United States Patent Application Publication US 2008/0050393 A1 - sequence listing, part 33

SEQ ID NO: 119303 - DNA, 1290 bp, Homo sapiens
atggcggaatcagcggttatcaatcacaagaaacgtaaaaatagcccgcgaatcgtccagtcaaacgacctcactgaggcggcatatagtctctcccgggatcaaaaacgtatgctgtatctgttcgttgaccagatcagaaaatctgatggcaccctacaggaacatgacggtatctgcgagatccatgttgctaaatatgctgaaatattcggattgacctctgcggaagccagtaaggatatacggcaggcattgaagagtttcgcggggaaggaagtggttttttatcgccctgaagaggatgccggcgatgaaaaaggctatgaatcttttccttggtttatcaaacggccaggcggtgaagggcaatcagctgttgcccgtctcactggtgaaaagaaaaaccaccctggcgcccaatacgcaaaccgcctctccccgcgcgttggccgattcattaatgcagctggcacgacaggtttcccgactggaaagcgggcacaatcttgtgtgaacgcggggaaggccgaaaggatgcattttatggcccgcttcggtaaaggacgaaagtatgctatggcttacaagaggatgagaaattacatgtccattccaagtgtagttcacctgctgtccatggggacccagaactccgcggcgagaagtaggctggaccagagacccatccagaggccatatcgactatccaagcaggaggacacaattgagaggacacaccaggcggcacaaaacagtggcaactggccagatgcaataagtctccacttcaatgtggaatgtgatcatgtcctccttgctgaaggaaggtgtgatggtgccggattcacaaaggcgcaagtgttcaccaacaaggtctcatacccatgggggaagcccccttcctggttgaaaatgtcgcgtgccgttcgcccaatcgactgggagagctggacacaggcgcgtcaggtggtgcgagttaagtgcaatccgtgtaacggaaaaggcgttatcagcaattcgtgtcgctgccatggcaaaggtaaggtgctggacaaggcagaaagcgatcgccagggcgttccagtaatgaaagcctgcgaccgctgcggtggtagaggttacgccaggcttaagttctcaacggtaattgagggcgttaatactgttgcggagataaagaaaacggcggcatatgagcaacttcagccgctatttgaggagttggtcgccgaatgccataaacaggagtctatggctgattccattctctcaaaagtaacgagatga

SEQ ID NO: 119304 - DNA, 3345 bp, Homo sapiens
  misc_feature (1)...(3345): n = a,t,c or g
atggagcggcgtaaccgtcgcacaggaaggacagagaaagcgcggatctgggaagtgacggacagaacggtcaggacctggattggggaggcggttgccgccgctgctgctgacggtgtgacgttctctgttccggtcacaccacatacgttccgccattcctatgcgatgcacatgctgtatgccggtataccgctgaaagttctgcaaagcctgatgggacataagtccatcagttcaacggaagtctacacgaaagtttttgcgctggatgtggctgcccggcaccgggctatcagagatgccgagacagcagggcgactaccgcacccggatatggaaattcgaggacgggttgagcaacgtgttggttatacaattgaacaaattaatcatatgcgtgatgtgtttggtacgcgattgcgacgtgctgaagacgtatttccacctgtgatcggggttgctgcccataaaggtggcgtttacaaaacctcagtttctgttcatcttgctcaggatctggctctgaaggggctacgtgttttgctcgtggaaggtaacgacccccagggaacagcctcaatgtatcacggatgggtaccagatcttcatattcatgcagaagacactctcctgcctttctatcttggggaaaaggacgatgtcacttatgcaataaagcccacttgctggccggggcttgacattattccttcctgtctggctctgcaccgtattgaaactgagttaatgggcaaatttgatgaagggttcgagcctgatgtacgtattttgcttaccaaatacagcaatagtaatggctctcagtccccgtggatggaggagcaaattcgggatgcctggggaagcatggttctaaaaaatgttgtacgtgaaacggatgaagttggtaaagctgccccgatggtggattcgttaattgcgcgcgtaggagtaatggctcgcggtaatgccattactttgcctgtatgtggtcgggatgtgaagtttactcttgaagtgctccggggtgatagtgttgagaagacctctcgggtatggtcaggtaatgaacgtgaccaggagctgcttactgaggacgcactggatgatctcatcccttcttttctactgactggtcaacagacaccggcgttcggtcaaagagtatctggtgtcatagaaattgccgattgggaagtcgccgtcgttaagctgctgcactttaccgaagtgattatcgngacatttcgtagaactcccccttgtcacacttcacatggatctgtcatggcggaaacagcggttatcaatcacaagaaacgtaaaaatagcccgcgaatcgtccagtcaaacgacctcactgaggcggcatatagtctctcccgggatcaaaaacgtatgctgtatctgttcgttgaccagatcagaaaatctgatggcaccctacaggaacatgacggtatctgcgagatccatgttgctaaatatgctgaaatattcggattgacctctgcggaagccagtaaggatatacggcaggcattgaagagtttcgcggggaaggaagtggttttttatcgccctgaagaggatgccggcgatgaaaaaggctatgaatcttttccttggtttatcaaacgtgcgcacagtccatccagagggctttacagtgtacatatcaacccatatctcattcccttctttatcgggttacagaaccggtttacgcagtttcggcttagtgaaacaaaagaaatcaccaatccgtatgccatgcgtttatacgaatccctgtgtcagtatcctgccccgatggtggattcgttaattgcgcgcgtaggagtaatggctcgcggtaatgccattactttgcctgtatgtggtcgggatgtgaagtttactcttgaagtgctccggggtgatagtgttgagaagacctctcggacaccggcgttcggtcgaagagtatctggtgtcatagaaattgccgatgggagtcgccgtcgtaaagctgctgcacttaccgaaagtgattatcgtgttctggttggcgagctggatgatgagcagatggctgcattatccagattgggtaacgattatcgcccaacaagtgcttatgaacgtggtcagcgttatgcaagccgattgcagaatgaatttgctggaaatatttctgcgctggctgatgcggaaaatatttcacgtaagattattacccgctgtatcaacaccgccaaattgcctaaatcagttgttgctcttttttctcaccccggtgaactatctgccccggtcagggccataaaatggtccttgtcattgggtacttccgcggcccactcgaaaaactcctgcataaagcccacttgctggccgggtcttgacattattccttcctgtctggctctgcaccgtattgaaactgagttaatgggcaaatttgatgaaggtaaactgcccaccgatccacacctgatgctccgactggccattgaaactgttgctcatgactatgatgtcatagttattgacagctctcctaacctgggtatcggcacgattaatgtcgtatgtgctgctgatgtgctgattgttcccacgcctgctgagttgtttgactacacctccgcactgcagtttttcgatatgcttcgtgatctgctcaagaacgttgatcttaaagggttcgagcctgatgtacgtattttgcttaccaaatacagcaatagtaatggctctcagtccccgtggatggaggagcaaattcgggatgcctggggaagcatggttctaaaaaatgttgtacgtgaaacggatgaagttggtaaagaaactcccacaagtgcttatgaacgtggtcagcgttatgcaagccgattgcagaatgaatttgctggaaatatttctgcgctggctgatgcggaaaatatttcacgtaagattattacccgctgtatcaacaccgccaaattgcctaaatcagttgttgctcttttttctcaccccggtgaactatctgccctgtcaggtgatgcacttcaaaaagcctttacagataaagaggaattacttaagcagcaggcatctaaccttcatgagcagaaaaaagctggggtgatatttgaagctgaagaagttatcactcttttaacttctgtgcttaaaacgtcatctgcatcaagaactagtttaagctcacgacatcagtttgctcctggagcgacagtattgtataagggcgataaaatggtgcttaacctggacaggtctcgtgttccaactgagtgtatagagaaaattgaggccattcttaaggaacttgaaaagccagcaccctga

SEQ ID NO: 119305 - DNA, 1962 bp, Homo sapiens
atggcggaaacagcggttatcaatcacaagaaacgtaaaaatagcccgcgaatcgtccagtcaaacgacctcactgaggcggcatatagtctctcccgggatcaaaaacgtatgctgtatctgttcgttgaccagatcagaaaatctgatggcaccctacaggaacatgacggtatctgcgagatccatgttgctaaatatgctgaaatattcggattgacctctgcggaagccagtaaggatatacggcaggcattgaagagtttcgcggggaaggaagtggttttttatcgccctgaaaaagatgccggcgatgaaaaaggctatgaatcttttccttgggttatcaaacatcattctcgagagagctccccctcctggtcacgttcattacctgaccatacccgagaggtcttctcaacactatcaccccggagcacttcaagagtaaacttcacatcccgaccacatacaggcaaagtaatggcattaccgcgagccattactcctacgcgcgcaattaacgaatccaccatcggggcagctggtgtcgataacgaagatctggctctgaaggggctacgtgttttgctcgtggaaggtaacgacccccagggaacagcctcaatgtatcacggatgggtaccagatcttcatattcatgcagaatactctctcctgcctttctatcttggggaaaaggacgatgtcacttatgcaataaagcccacttgctggccggggcttgacattattccttcctgtctggctctgcaccgtattgaaactgagttaatgggcaaatttgatgaaggtaaactgcccaccgatccacacctgatgctccgactggccattgaaactgttgctcatgactatgatgtcatagttattgacagcgcgcctaacctgggtatcggcacgattaatgtcgtatgtgctgctgatgtgctgattgttcccacgcctgctgagttgtttgactacacctccgcactgcagtttttcgatatgcttcgtgatctgctcaagaacgttgatcttaaagggttcgagcctgatcgttatgtaagccgattgcagaatcaatttgctggaaatatttctgcgctggctgatgcggaaaatatttcacgtaagattattacccgctgtatcaacaccgccaaattgcctaaatcagttgttgctcttttttctcaccccggtgaactatctgcccggtcatgtgatgcacttcaaaaagcctttacagataaagaggaattacttaagcagcaggcatctaaccttcatgagcagaaaaaagctggggtgatatttgaagctgaagaagttatcactcttttaacttctgtgcttaaaacgtcatctgcatcaagaactagtttaagctcacgacatcagtttgctcctggagcgacagtattgtataagggcgataaaatggtgcttaacctggacagtgcttatgaacgtggtcagcgttatgcaagccgattgcagaatgaatttgctggaaatatttctgcgctggctgatgcggaaaatatttcacgtaagattattacccgctgtatcaacaccgccaaattgcctaaatcagttgttgctcttttttctcaccccggtgaactatctgcccggtcaggtgatgcacttcaaaaagcctttacagataaagaggaattacttaagcagcaggcatctaaccttcatgagcagaaaaaagctggggtgatatttgaagctgaagaagttatcactcttttaacttctgtgcttaaaacgtcatctgcatcaagaactagtttaagctcacgacatcagtttgctcctggagcgacagtattgtataagggcgataaaatggtgcttaacctggacaggtctcgtgttccaactgagtgtatagagaaaattgaggccattcttaaggaacttgaaaagccagcaccctga

SEQ ID NO: 119306 - DNA, 2357 bp, Homo sapiens
ctttaaagcctgatgggctagaagccactatccagcgttcagctctaccttccacctccttgcctagctccaaagagtgtgtcccttcacgctttggtgctctccactccaccccattcaaactgttaccctgtcctaccaggtatccattgaccatctctccacaacctaagcaagaaaaggtggaaagagaatattttgggacctatttttggccaaacaaggctttgcagaactttcagcggtataccggcatacagcatgtgcatcgcatagcaatggcggaacgtatgtggtgtgaccggaacagagaacgtcacaccgtcagcagcagcggcggcaaccgcctccccaatccaggatctgatgtgtgggacagctggccgtgccaaaacgctgacggaacagtagctgaatacaccggctatcacgttgtgtttgctcttgcgggaagcccgaaagacgctgatgacacatcaatctacatgttttatcaaaaggtcggcgacaactcaatcgacagctggaaaaacgcgggccgtgtctttaaagacagcgataagttcgacgccaacgatccgatcctgaaagatcagacgcaagaatggtccggttctgcaacctttacatctgacggaaaaatccgtttattctacactgactattccggtaaacattacggcaaacaaagcctgacaacagcgcaggtaaatgtgtcaaaatctgatgacacactcaaaatcaacggagtggaagatcacaaaacgatttttgacggagacggaaaaacatatcagaacgttcagcagtttatcgatgaaggcaattatacatccggcgacaaccatacgctgagagaccctcactacgttgaagacaaaggccataaataccttgtattcgaagccaacacgggaacagaaaacggataccaaggcgaagaatctttatttaacaaagcgtactacggcggcggcacgaacttcttccgtaaagaaagccagaagcttcagcagagcgctaaaaaacgcgatggaaacagttatgaccatgattacgaattcgagctcggtaccccaaagcccttcatagtggaagtaactgcaagtcaagaaaacaagatagatctttgtgacaatctaaaaacttgtcacacttcacatggatctgtcatggcggaaacagcggttatcaatcacaagaaacgtaaaaatagcccgcgaatcgtccagtcaaacgacctcactgaggcggcatatagtctctcccgggatcaaaaacgtatgctgtatctgttcgttgaccagatcagaaaatctgatggcaccctacaggaacatgacggtatctgcgagatccatgttgctaaatatgctgaaatattcggattgacctctgcggaagccagtaaggatatacggcaggcattgaagagtttcgcggggaaggaagtggttttttatcgccctgaagaggatgccggcgatgaaaaaggctatgaatcttttccttggtttatcaaacgtgcgcacagtccatccagagggctttacagtgtacatatcaacccatatctcattcccttctttatcgggttacagaaccggtttacgcagtttcggcttagtgaaacaaaagaaatcaccaatccgtatgccatgcgtttatacgaatccctgtgtcagtatcgtaagccggatggctcaggcatcgtctctctgaaaatcgactggatcatagagcgttaccagctgcctcaaagttaccagcggccaggcggtgaagggcaatcagctgttgcccgtctcactggtgaaaagaaaaaccaccctggcgcccaatacgcaaaccgcctctccccgcgcgttggccgattcattaatgcagctggcacgacaggtttcccgactggaaagcgggcagtgagcgcaacgcaattaataagaagaaggagcaggagaggcagagggagagggagaggtagagggagaaagagaaggagaagaatagggaaagggagaggaagaggaacaagaagaagaagaaaaagaggaggaagaggaagaaggagaagagaagacagagaacaggaagaggaagaaggaaaagaggaggaagaagaaggaggaataggaagaaggagaaaagaagaagaggaggaagaggaagaaggagaagagaagaagaggaagaagaaggagaagaacaagaagaaggaagtacaagaagaagaagaagaaggaagaagaagaagaagaagaaggagaaggagaagagaagaaggggaggaggaggagaaaaacccatgtgagaagaaacaaagtgacttccattcctgcttaggtatctgtggctga

SEQ ID NO: 119307 - DNA, 1710 bp, Homo sapiens
  misc_feature (1)...(1710): n = a,t,c or g
atggatgcaaaattaccctttggaacacccttgaaaaattccttaggaaaaagctacatttggaagcttacctactaccctcagtcggttactggtgctttattttattccatttgggggatctctagactcagcctggggtcagcacgtagttccgagaaaagcagggcggactacccgcacccggatatggaaattcgaggacgggttgagcaaacgtgtttggttatacaattgaccaaattaatcatatgcgtgatgtgtntggatctggctctgaaggggctacgtgttttgctcgtggaaggtaacgacccccagggaacagcctcaatgtatcacggatgggtaccagatcttcatattcatgcagaagacactctcctgcctttctatcttggggaaaaggacgatgtcacttatgcaataaagcccacttgctggccggggcttgacattattccttcctgtctggctctgcaccgtattgaaactgagttaatgggcaaatttgatgaaggtaaactgcccaccgatccacacctgatgctccgactggccattgaaactgttgctcatgactatgatgtcatagttattgacagcgcgcctaacctgggtatcggcacgattaatgtcgtatgtgctgctgatgtgctgattgttcccacgcctgctgagttgtttgactacacctccgcactgcagtttttcgatatgcttcgtgatctgctcaagaacgttatcttaaagggttcgagcctgatggattttgcgaatttcggaaccaccatcaaacaggattttcgcctgctggggcaaaccagcgtggaccgcttgctgcaactctctcagggccaggcggtgaagggcaatcagctgttgcccgtctcactggtgaaaagaaaaaccaccctggcgcccaatacgcaaaccgcctctccccgcgcgttggccgattcattaatgcagctggcacgacaggtttcccgactggaaagcgggcacatttatagcttcctggagtctgctttgagcaactgctttcccttgccttaccttccaatattcaagctcttcagcaaactcactgaggctgcctgcctgcagtgtgacaatctaaaaacttgtcacacttcacatggatctgtcatggcggaaacagcggttatcaatcacaagaaacgtaaaaatagcccgcgaatcgtccagtcaaacgacctcactgaggcggcatatagtctctcccgggatcaaaaacgtatgctgtatctgttcgttgaccagatcagaaaatctgatggcaccctacaggaacatgacggtatctgcgagatccatgttgctaaatatgctgaaatattcggattgacctctgcggaagccagtaaggatatacggcaggcattgaagagtttcgcggggaaggaagtggttttttatcgccctgaagaggatgccggcgatgaaaaaggctatgatcttttcggtggatcctctagagtcaagctgggatgtctgcacagcagagtggcctgttttgacagggcgctgattggtgcgtttacaatccctgagctagatacaaaggttctccacgtccccaccagattagttagatacagagtatccacacaaaggttctccaaggccccaccagagcagctagatacagagtgtcgattggtgcattcacaaaccctgagctag

SEQ ID NO: 119308 - DNA, 1302 bp, Homo sapiens
atgaaactcatggaaacacttaaccagtgcataaacgctggtcatgaaatgacgaaggctatcgccattgcacagtttaatgatgacagcccggaagcgaggaaaataacccggcgctggagaataggtgaagcagcggatttagttggggtttcttctcaggctatcagagatgccgagaaagcagggcgactaccgcacccggatatggaaattcgaggacgggttgagcaacgtgttggttatacaattgaacaaattaatcatatgcgtgatgtgtttggtacgcgattgcgacgtgctgaagacgtatttccaccggtaaatgtgtcaaaatctgatgacacactcaaaatcaacggagtggaagatcacaaaacgatttttgacggagacggaaaaacatatcagaacgttcagcagtttatcgatgaaggcaattatacatccggcgacaaccatacgctgagagaccctcactacgttgaagacaaaggccataaataccttgtattcgaagccaacacgggaacagaaaacggataccaaggcgaagaatctttatttaacaaagcgtactacggcggcggcacgaacttcttccgtaaagaaagccagaagcttcagcagagcgctaaaaaacgcgatgctgagttagcgaacggcgccctcggtatcatagagttaaataatgattacacattgaaaaaagtaatgaagccgctgatcacttcaaacacgtgtgacaatctaaaaacttgtcacacttcacatggatctgtcatggcggaaacagcggttatcaatcacaagaaacgtaaaaatagcccgcgaatcgtccagtcaaacgacctcactgaggcggcatatagtctctcccgggatcaaaaacgtatgctgtatctgttcgttgaccagatcagaaaatctgatggcaccctacaggaacatgacggtatctgcgagatccatgttgctaaatatgctgaaatattcggattgacctctgcggaagccagtaaggatatacggcaggcattgaagagtttcgcggggaaggaagtggttttttatcgccctgaagagatgccggcgatgaaaaaggctatgaatcttttccttggtttatcaaacgtgcgcacagtccatccagaaggctttacagtgtacatatcaacccatatctcattccccttctttatcgggtaccaaaccgggttacgcagtttcggcttagtgaaacaaaagaatcacccatccgtatgccatgcctttatacgaatccctgtgtcagtattctaa

SEQ ID NO: 119309 - DNA, 1452 bp, Homo sapiens
atgagcagatggctgcattatccagattgggtaacgattatcgcccaacaagtgcttatgaacgtggtcagcgttatgcaagccgattgcagaatgaatttgcttgaaatatttctgcgctggctgatgcggaaaatatttcactcaaacgacctcactgaggcggcatatagtctctcccgggatcaaaaacgtatgctgtatctggggggggaccagatcagaaaatctgatggcaccctacaggaacatgacggtatctgcgagatccatgttgctaaatatgctgaaatattcggattgacctctgcggaagccagtaaggatatacggcaggcattgaagagtttcgcggggaaggaagtggttttttatcgccctgaagaggatgccggcgatgaaaaaggctatgaatcttttccttggtttatcaaacgtgcgcacagtccatccagagggctttacagtgtacatatcaacccatatctcattcccttcatgtatcggttacagaaccggtttacgcagtttcggcttagtgaaacaaaagaaatcaccaatccgtatgccatgcgtttatacgaatccctgtgtcagtatcgtaagccggatggctcaggcatcgtctctctggaaatcgactggatcataagaccgttaccagctgcctcaaagtaccagcgtatgcctgacttccgccgccgctttctggaaggcttagagcttaaatgcctgtttgtcgactctagaggatccccgttaatgggcaaatttgatgaaggtaaactgcccaccgatccacacctgatgctccgactgaacattgaaactgttgctcatgactatgatgtcatagttattgacagcgcgcctaacctgggtatcggcacgattaatgtcgtatgtgctgctgatgtgctgattgttcccacgcctgctgagttgtttgactacacctggcgactgcagtttttcgatatgcttcgtgatctgctcaagaacgttgatcttaaagggttcgagcctgatgtacgtattttgcttaccaaatacagcaatagtaatggctctcagtccccgtggatggaggagcaaattcgggatgcctggggaagcatggttctaaaaaatgttgtacgtgaaacggatgaagttggtaaagaacggagtaacctcggtgtgcggttgtatgcctgctgtggattgctgctgtgtcctgcttatccacaacattttgcgcacggttatgtggacaaaatacctggttacccaggccgtgccggcacgttaaccgggctgcatccgatgcaacattctgccgacatggaagccatcacaaacggcatgatgaacctgaatcgccagcggcatcagcaccttgtcgccttgcgtataatatttgcccatggtgaaaacgggggcgaagaagttgtccatattggccacgtttaa

SEQ ID NO: 119310 - DNA, 1326 bp, Homo sapiens
atgggaaagggcttcatgactaaaacaccaaaagcaatggcaacaaaagccaaaattgacaaatgggatctaattaaactaaagaacttctgcacagcaaaagaaactaccatcagagtgaacaggaaacctacagaatgggagagaatttttgcaatctactcatctgacaaagggctaatatccagaatctacaaagaactcaaacaaattgacaagaaaaaaacaaacaaccccatcaaaaagggggtatttattcgcgataagctcatggagcggcgtaaccgtcgcacaggaaggacagagaaagcgcggatctgggaagtgacggacagaacggtcaggacctggattggggaggcggttgccgccgctgctgctgacggtgtgacgttctctgttccggtcacaccacatacgttccggcattcctatgcgatgcacatgctgtatgccggtataccgctgaaagttctgcaaagcctgatgggacataagtccatcagttcaacggaagtctacacgaagtgtgacaatctaaaaacttgtcacacttcacatggatctgtcatggcggaaacagcggttatcaatcacaagaaacgtaaaaatagcccgcgaatcgtccagtcaaacgacctcactgaggcggcatatagtctctcccgggatcaaaaacgtatgctgtatctgttcgttgaccagatcagaaaatctgatggcaccctacaggaacatgacggtatctgcgagatccatgttgctaaatatgctgaaatattcggattgacctctgcggaagccagtaaggatatacggcaggcattgaagagtttcgcggggaaggaagtggttttttatcgccctgaagaggatgccggcgatgaaaaaggctatgaatcttttccttggtttatcaaacgtgcgcacagtccatccagagggctttacagtgtacatatcaacccatatctcattcccttctttatcgggttacagattctttttacgcagtttcggcttagtgaaacaaaagaaatcaccaatccgtatgccatgcgtttatacgaatccctgtgtcagtatcgtaagccggatggctcaggcatcgtctctctgaaaatcgactggatcatagagcgttaccagctgcctcaaagttaccagcgtatgcctgacttccgccgccgcttcctgcaggtctgtgttaatgagatcaacagcagaactccaatgcgcctctcatacattgagaaaaagaaaggccgccagacgactcatatcgtattttccttccgcgatatcacttccatgacgacaggatag

SEQ ID NO: 119311 - DNA, 1560 bp, Homo sapiens
atgattgtttatctagaaaaccccatcgtctcagcccaaaatctccttaagctgataagcaacttcagcaaagtctcaggatacaaaatcaatgtacaaaaatcacaagcattcttatacaccaacaacagacaaacagagagccaaatcatgggtgaactcccattcacaattgcttcaaagagaataaaatacctaggaatccaacttacaagggatgtgaaggacctcttcaaggagaactacaaaccactgctcaaggaaataaaagaggacacaaacaaatggaagaacattccatgctcatgggtaggaagaatcaatatcgtgaaaatggccatactgcccaaggtacccagggagcagcctcagcggcacccgcagaggagtctgagcaagggcaccaagatctggccaagagataacgacgtccagggaccaggtgcccttcggctcccgccgacctgttgctcgaaacttgccctgagctctcgctgccgggctctgggctcccaagcctctcccccgccgccgcagcagcctcttttaggggcccggaagaaatgggagccggggctgtcaggcaccgagtatgaaatctacaatgcgctcattgtcatcctaggcaccgacaccctggatgctgtaggcataggcttggttatgccgatacttgcgggcctcttgcggaaaattgcccattccgacaggattcccaggaacttgggcgtggtaaatcccccagcggttatcaatcacaagaaacgtaaaaatagcccgcgaatcgtccagtcaaacgacctcactgaggcggcatatagtctctcccgggatcaaaaacgtatgctgtatctgttcgttgaccagatcagaaaatctgatggcaccctacaggaacatgacggtatctgcgagatccatgttgctaaatatgctgaaatattcggattgacctctgcggaagccagtaaggatatacggcaggcattgaagagtttcgcggggaaggaagtggttttttatcgccctgaagaggatgccggcgatgaaaaaggctatgaatcttttccttggtttatcaaacgtgcgcacagtccatccagagggctttacagtgtacatatcaacccatatctcattcccttctttatcgggttacagaaccggtttacgcagtttcggcttagtgaaacaaaagaaatcaccaatccgtatgccatgcgtttatacgaatccctgtgtcagtatcgtaagccggatggctcaggcatcgtctctctgaaaatcgactggatcatagagcgttaccagctgcctcaaagttaccagcttcgatatcaaccttttggagtagacactattattccgaattcacaaaagaaggtaaaagctttgaagagattacctgatttgacaaatatcacagaactgggaaatcatggatctgggataacacctggcctgtgtgatctagagccaaagcctggaactctggtttgcaccatacgggaggtttatgccaaaattgccagttttacactccaactgatatttaattag

SEQ ID NO: 119312 - DNA, 2262 bp, Homo sapiens; identical to SEQ ID NO: 119030

SEQ ID NO: 119313 - DNA, 2421 bp, Homo sapiens
atggcggaaacagcggttatcaatcacaagaaacgtaaaaatagcccgcgaatcgtccagtcaaacgacctcactgaggcggcatatagtctctcccgggatcaaaaacgtatgctgtatctgttcgttgaccagatcagaaaatctgatggcaccctacaggaacatgacggtatctgcgagatccatgttgctaaatatgctgaaatattcggattgacctctgcggaagccagtaaggatatacggcaggcattgaagagtttcgcggggaaggaagtggttttttatcgccctgaagaggatgccggcgatgaaaaaggctatgaatcttttccttggtttatcaaacgtgcgcacagtccatccagagggctttacagtgtacatatcaacccatatctcattcccttctttatcgggttacagaaccggtttacgcagtttcggctgaacttcgtgcagaaatctcgcctagtggatctggctctgaaggggctacgtgttttgctcgtggaaggtaacgacccccagggaacagcctcaatgtatcacggatgggtaccagatcttcatattcatgcagaagacactctcctgcctttctatcttggggaaaaggacgatgtcacttatgcaataaagcccacttgctggccggggcttgacattattccttcctgtctggctctgcaccgtattgaaactgagttaatgggcaaatttgatgaagcggttatcaatcacaagaaacgtaaaaatagcccgcgaatcgtccagtcaaacgacctcactgaggcggcatatagtctctcccgggatcaaaaacgtatgctgtatctgttcgttgaccagatcagaaaatctgatggcaccctacaggaacatgacggtatctgcgagatccatgttgctaaatatgctgaaatattcggattgacctctgcggaagccatagctgaatacaacggctatcacgttgtgtttgctcttgcgggaagcccgaaagacgctgatgacacatcaatctacatgttttatcaaaaggtcggcgacaactcaatcgacagctggaaaaacgcgggccgtgtctttaaagacagcgataagttcgacgccaacgatccgatcctgaaagatcagacgcaagaatggtccggttctgcaacctttacatctgacggaaaaatccgtttattctacactgactattccggtaaacattacggcaaacaaagcctgacaacagcgcaggtaaatgtgtcaaaatctgatgacacactcaaaatcaacggagtggaagatcacaaaacgatttttgacggagacggaaaaacatatcagaacgttcagcagtttatcgatgaaggcaattatacatccggcgacaaccatacgctgagagaccctcactacgttgaagacaaaggccataaataccttgtattcgaagccaacacgggaacagaaaacggataccaaggcgaagaatctttatttaacaaagcgtactacggcggcggcacgaacttcttccgtaaagaaagccagaagcttcagcagagcgctaaaaaacgcgatgctgagttagcgaacggcgccctcgacctgacaacagcgcaggtaaatgtgtcaaaatctgatgacacactcaaaatcaacggagtggaagatcacaaaacgatttttgacggagacggaaaaacatatcagaacgttcagcagtttatcgatgaaggcaattatacatccggcgacaaccatacgctgagagaccctcactacgttgaagacaaaggccataaataccttgtattcgaagccaacacgggaacagaaaacggataccaaggcgaagaatctttatttaacaaagcgtactacggcggcggcacgaacttcttccgtaaagaaagccagaagcttcagcagagcgctaaaaaacgcgatgctgagttagcgaacggcgccctcggtatcatagagttaaataatgattacacattgaaaaaagtaatgaagccgctgatcacttcaaacacggtaactgatgaaatcgagcgcgcgaatgttttcaaaatgaacggcaaatggtacttgttcactgattcacgcggttcaaaaatgacgatcgatggtattaactcaaacgatatttacatgcttggttatgtatcaaactctttaaccggcccttacaagccgctgaacaaaacagggcttgtgctgcaaatgggtcttgatccaaacgatgtgacattcacttactctcacttcgcagtgccgcaagccaaaggcaacaatgtggttatcacaagcgcatgcggtgctgaatcgacgttttatgtagaggatccccccggctggtctcagactcctggactcaagagatcctcctgccttggcctcccaaaatgctga

SEQ ID NO: 119314 - DNA, 1218 bp, Homo sapiens; identical to SEQ ID NO: 119033

SEQ ID NO: 119315 - DNA, 2031 bp, Homo sapiens
atggactacagatccaagttcctggagttgcaaccaattagtgctggtgcaagagatacacgtttaactttgaagagctttaaagtctttcccatctcactaaatggcaatcccattcactcaatagctcaggcaaaaaccttagaagccactcttgattcctttgttgctacactctctgacatccagttcatcagcaaatccagtgggccaaccagcaagaaaagagggactgcagtcctacaaccacaaggaaccaaatactgtcaacaatctgaaggagcaagagaacggatttccttgctccagcaagaaatgcagccttgcagatgccttcattttagccacactgaagacttgtaccagacttctgaactacagaactgtcagatcccccctatttctgggtttgaatcactggatggttgggaaagaagagtggcagaagataatcaagttagcgtctttaccaatggtgaagccataggggaggtcacggtttacccggccaaatggctcagggaaatggttctcaaaagtgaaaaccaagggggcccacgaaatggccacatgaatggagacgagtgttcgaaggtcgtggggccgctggaagatggatctcaggctaggatgaggaaacctgacctacaacaactcgatagccattgtgacaatctaaaaacttgtcacacttcacatggatctgtcatggcggaaacagcggttatcaatcacaagaaacgtaaaaatagcccgcgaatcgtccagtcaaacgacctcactgaggcggcatatagtctctcccgggatcaaaaacgtatgctgtatctgttcgttgaccagatcagaaaatctgatggcaccctacaggaacatgacggtatctgcgagatccatgttgctaaatatgctgaaatattcggattgacctctgcggaagccagtatggatatacggcaggcattgaagagtttcgcggggaaggaagtggttttttatcgccctgaagaagatgccggcgatgaaaaaagctatgaatcttttccttggtttatcaaaccttgtttttcttttaacagtcaggcccctcttctgcagggttgctgcggtttgctggggatccactccagagcctattcacctgggtcccttccacccctggaggtgttaccagtgtatgctgcagaacagcaaagatcggttgcctgctcgttcctctgggatgtctatctcatgaggagcactgacctgatgacagctggaatgctcctgtataaggtgtctggtgacccctggtcgactctagaggatccccttctagacaccaggaatggccctccactgacagccagcaagaaaagagggactgcagtcctacaaccacaaggaaccaaatactgtcaacaatctgaaggagcaagagaacggatttccttgctccagcaagaaatgcagccttgcagatgccttcattttagccacactgaagacttgtaccagacttctgaactacagaactgtcagatccctaaacagcagcaaaacgaaaaataccaagtgcctcaattcgatcaatcagcgaatcaaaatattgagtctgcaaaaggacttgatgtgcgggacagctgggcgctgcaaaacgctgacggaacagtcggcgacaactcaatcgaccgctggctcaacgcgggccgtgtctttaaagacagcgataagttcggcgccaacgatccgatcctgaaagatcaaacgcaagaatggtccggttctgcgaacctttatcatctgacggaaaaatccgtttattctacactgactattccggtaaatcagtacggtctgatgtcactctccaaatcaacggagtgtgaagatcacggtacgatttttgatcggcacggagaaacatatccgaacgttcaggagtttatcgatgaaggctatcatacctccggcgactaccgtacgctgagcagcttgcatgcctgcaggtcgactctagaggatcccaacattcatttgagcctttga

SEQ ID NO: 119316 - DNA, 1653 bp, Homo sapiens
atggtggattcgttaattgcgcgcgtaggagtaatggctcgcggtaatgccattactttgcctgtatgtggtcgggatgtgaagtttactcttgaagtgctccggggtgatagtgttgagaagacctctcgggtatggtcaggtaatgaacgtgaccaggagctgcttactgaggacgcactggatgatctcatcccttcttttctactgactggtcaacagacaccggcgttcggtcgaagagtatctggtgtcatagaaattgccgatgggagtcgccgtcgtaaagctgctgcacttaccgaaagtgattatcgtgttctggttggcgagctggatgatgagcagatggctgcattatccagattgggtaacgattatcgcccaacaagtgcttatgaacgtggtcagcgttatgcaaaccgcttgcagaatgaatttgctggaaatatttttgcgctggctggggcgcaaaatatttcaccggttatcaatcacaagaaacgtaaaaatagcccgcgaatcgtccagtcaaacgacctcactgaggcggcatatagtctctcccgggatcaaaaacgtatgctgtatctgttcgttgaccagatcagaaaatctgatggcaccctacaggaacatgacggtatctgcgagatccatgttgctaaatatgctgaaatattcggattgacctctgcggaagccagtaaggatatacggcaggcattgaagagtttcgcggggaaggaagtggttttttatcgccctgaagaggatgccggcgatgaaaaaggctatgaatcttttccttggtttatcaaacgtgcgcacagtccatccagagggctttacagtgtacatatcaacccatatctcattcccttctttatcgggttacagaaccggtttacgcagtttcggcttagtgaaacaaaagaaatcaccaatccgtatgccatgcgtttatacgaatccctgtgtcagtatcgtaagccggatggctcaggcatcgtctctctgaaaatcgactggatcatagagcgttaccagctgcctcaaagttaccagcgtatgcctgacttccgccgccgcttcctgcaggatctggctctgaaggggctacgtgttttgctcgtggaaggtaacgacccccagggaacagcctcaatgtatcacggatgggtaccagatcttcatattcatgcagaagacactctcctgcctttctatcttggggaaaaggacgatgtcacttatgcaataaagcccacttgctggccggggcttgacattattccttcctgtctggctctgcaccgtattgaaactgagttaatgggcaaatttgatgaaggtaaactgcccaccgatccacacctgatgctccgactggccattgaaactgttgctcatgactatgatgtcatagttattgacagcgcgcctaacctgggtatcggcacgattaatgtcgtatgtgctgctgatgtgctgattgttcccacgcctgctgagttgtttgactacacctccgcactgcagtttttcgatatgcttcgtgatctgctcaagaacgttgatcttaaagggttcgagcctgatatttgccagtgggaggaggagctgaaggagcctgcagaagccgacctttga

SEQ ID NO: 119317 - DNA, 1449 bp, Homo sapiens
atgatgtggtctgtccttttacagccagtagtgctcgccgcagttgagcgacagggcgaagccctcgaaatgggcagtgcagcttaccaaggacgatgtccccaggacaaagagagctacaacatgctctctgtagagtctgagaaccacctaccagggaaagttaccacagacagcaacctcaacccccagccccagcagggggaaacagcggttatcaatcacaagaaacgtaaaaatagcccgcgaatcgtccagtcaaacgacctcactgaggcggcatatagtctctcccgggatcaaaaacgtatgctgtatctgttcgttgaccagatcagaaaatctgatggcaccccacaggaacagacggtattctgcgagatccatgttgctaaatatgctgaaatattcggattgacctctgcggaagccagtaaggatatacggcaggcattgaagagtttcgcggggaaggaagtggttttttatcgccctgaagaggatgccggcgatgaaaaaggctatgaatcttttccttggtttatcaaacgtgcgcacagtccatccagagggctttacagtgtacatatcaacccatatctcattcccttctttatcgggttacagaaccggtttacgcagtttcggcttagtgaaacccaagaaatcaccaatccgtatgccatgcgtttatacgaatccctgtgtcagtatcgtaagccggatggctcaggcatcgtctctctgaaaatcgactggatcatagagcgttaccagctgcctcacagttaccagcgtatgcctgacttccgccgccgcttcctgcagatcagaaaatctgatggcaccttacaggaacatgacggtatctgcgagatccatgttgctaaatatgctgaaatattcggattgacttctgcggaagccagtaaggatatacggcaggcattgaagagtttcgcggggaaggaagtggttttttatcgccctgaagaggatgccggcgatgaaaaaggctatgaatcttttccttggtttatcaaacgtgcgcacagtccatccagagggctttacagtgtacatatcaacccatatctcattcccttctttatcgggttacagaaccggtttacgcagtttcggcttagtgaaacaaaagaaatcaccaatccgtatgccatgcgtttatacgaatccctgtgtcagtatcgtaagccggatggctcaggcatcgtctctctgaaaatcgactggatcatagagcgttaccagctgcctcaaagttaccagcgtatgcctgacttccgccgccgcttcctgcaggtctgtgttaatgagatcaacagcagaactccaatgcgcctctcatacattgagaaaaagaaaggccgccagacgactcatatcgtattttccttccgcgatatcacttccatgacgacaggatag

SEQ ID NO: 119318 - DNA, 1791 bp, Homo sapiens
atggagcccagtgatgaggctgctgatatagttcacacagaaggagagagtttgatctgggacagaagcgctaggtatggagaggaggaaggaaatatttctgctaacagtactcggcgtgctcgctggtataccaaacttgtattctttcgtgaccatagaccttttcctgtgcccttatcatcgcttttcagtgatggagaaaatgttggttgtgttgatgtaattattcaaagagcataccctatacagctgctgaatatgtacagggaactgagtgacataaagacacacatgaagaaagccagtgcagtcattgcagctgaccctctctattcagacggcgcgtggtcagagcccactttcacgtccagtgaagcagccatacagtccatgctggagtgcatgaagaacaacgaactcggcaaagctttgcggcagatcagagagtgcagaacaccagaagaattgcataacttttcattaaattctgaatcacattctgacataagaaagaacaaaatgcacattctaagttatgaggacacacacatagttacacacaaaatactgaaagagagtgtcccagttggtactggaaatcaaatagtgaccttacaggcacaacccgaacgtgatgaaaagatcaaagaacctactctattgggttttcatacagctagcgggaaaaaagttaaaatctcaaagtgtgacaatctaaaaacttgtcacacttcacatgtatctgtcatggcggaaacagcggttatctatcacaagaaatgtaaaaatagcccgcgtatcgtacagtcaaacgacctcactgaggcggcatatagtctctcccgggatcaaaaacgtatgctgtatctgttcgttgaccagatcagaaaatctgatggcaccctacaggaacatgacggtatctgcgagatccatgttgctaaatatgctgaaatattcggattgacctctgcgaaagccagtaaggatatacggcaggcattgaagagtttcgcggggaagaaagtggttttttatcgccctgaagaggatgccggcgatgaaaaaggctatgaatcttttccttggtttatcaaacgtgcgcacagtccatccagagggctttacagtgtacatatcaacccatatctcattcccttctttatcgggttacagaaccggtttacgcagtttcggcttagtgaaacaaaagaaatcaccaatccgtatgccatgcgtttatacgaatgcctagcgtactacggcggcggcacgaatttcttctgtaaagaaagccagaagcttcagcagagcgctaaaaaacgcgatgctgagttagcgaacggcgccctcggtatcatagagttaaataatgattacacattgaaaaaagtaatgaagccgctgatcacttcaaacacggtaactgatgaaatcgagcgcgcgaatgttttcaaaatgaacggcaaatggtacttgttcactgattcacgcgcttcaaaaatgacgatcgatggtattaactcaaacgatatttacatgcttggttatgtatcaaactctttaaccggcccttacaagccgatgaacaaaacagggcttgtgctgcaaatgggtcttgatccaaacgatgtgacattcacttactctcacttcgcagtgccgcaagccaaaggcaacaatgtggttatcacaagctacatgacaaacagaggcttcttcgaggataaaaaggcaacatttgcgccaagggggatctatagagtccacaaaaggctgcaagcctaa

SEQ ID NO: 119319 - DNA, 1896 bp, Homo sapiens
  misc_feature (1)...(1896): n = a,t,c or g
atgtcatgccacntagtcnggctgaatacaccgggctatcacgttgtgtttgctcttggggaaagcccgaaagacgctgatgacacatcaatctacatgttttatcaaaaggtcggcgacaactcaatcgacagctggaaaaacgcgggccgtgtctttaaagacagcgataagttcgacgccaacgatccgatcctgaaagatcagacgcaagaatggtccggttctgcaacctttacatctgacggaaaaatccgtttattctacactgactattccggtaaacattacggcaaacaaagcctgacaacagcgcaggtaaatgtgtcaaaatctgatgacacactcaaaatcaacggagtggaagatcacaaaacgatttttgacggagacggaaaaacatatcagaacgttcagcagtttatcgatgaaggcaattatacatccggcgacaaccatacgctgagagaccctcactacgttgaagacaaaggccataaataccttgtattcgaagccaacacgggaacagaaaacggataccaaggcgaagaatctttatttaacaaagcgtactacggcggcggcacgaacttcttccgtaaagaaagccagaagcttcagcagagcgctaaaaaacgcgatgctgagttagcgaacggcgccctcggtatcatagagttaaataatgattacacattgaaaaaagtaatgaagccgctgatcacttcaaacacggtctgtgttaatgagatcaacagcagaactccaatgcgcctctcatacattgagaaaaagaaaggccgccagacgactcatatcacaccggcgttcggtcgaagagtatctggtgtcatagaaattgccgatgggagtcgccgtcgtaaagctgctgcacttaccgaaagtgattatcgtgttctggttggcgagctggatgatgagcgagggtgtgacaatctaaaaacttgtcacacttcacatggatctgtcatggcggaaacagcggttatcaatcacaagaaacgtaaaaatagcccgcgaatcgtccagtcaaacgacctcactgaggcggcatatagtctctcccgggatcaaaaacgtatgctgtatctgttcgttgaccagatcagaaaatctgatggcaccctacaggaacatgacggtatctgcgagatccatgttgctaaatatgctgaaatattcggattgacctctgcggaagccagtaaggatatacggcaggcattgaagagtttcgcggggaaggaagtggttttttatcgccctgaagaggatgccggcgatgaaaaaggctatgaatcttttccttggtttatcaaacgtgcgcacagtccatccagagggctttacagtgtacatatcaacccatatctcattcccttctttatcgggttacagaaccggtttacgcagtttcggcttagtgaaacaaaagaaatcaccaatccgtatgccatgcgtttatacgaatccctgtgtcagtatcaatgtgactccaggcagaaagccagggaaaatgtggggatctctacagaaactgagcgggcagccacagtttttaaaaattattcatctggatcttcgatagagaagatgtactatattcagtgggtactcattggtccaaagggccatgttttccaaccaataacaatagtgggaaaagctgaccacgtacagacaggagcaaactgtgacaaactgcagggcacaaaatccaaacaggccagttacgaccattggctgacagttgatggtgataatgtcccgtgtcggcggcacgataacacacgcggagagcctccaacaccgcggaacacaccgccccggcgaaaacacagactctggggagaagacgctccccgttactaa

SEQ ID NO: 119320 - DNA, 2154 bp, Homo sapiens
atggagaaaaaaatcactggatataccaccgttgatatatcccaatggcatcgtaaagaacattttgaggcatttcagtcagttgctcaatgtacctataaccagaccgttcagctggatattacggcctttttaaagaccgtaaagaaaaataagcacaagttttatccggcctttattcacattcttgcccgcctgatgaatgctcatccggagttccgtatggcaatgaaagacgggtttattgagaatatgtttttcgtctcagccaatccctgggtgagtttcaccagttttgatttaaacgtggccaatatggacaacttcttcgcccccgttttcaccatgggcaaatattatacgcaaggcgacaaggtgctgatgccgctggcgattcagtttttcgatatgcttcgtgatctgctcaagaacgttgatcttaaagggttcgagcctgatgtacgtattttgcttaccaaatacagcaatagtaatggctctcagtccccgtggatggaggagcaaattcgggatgcctggggaagcatggttctaaaaaatgttgtacgtgaaacggatgaagttggtaaagacaccggggttcggtcgaagatatctggtgtcataaaaatgccgatgggagtcgccgtcgtaaactgctgcacttacggaagtgattatcgggtctggttggcgagctggatgatgagccaatggctgcattatccagaatggtaccgtaaagaaaataagcacaagttttatccggcctttattcacattcttgcccgcctgatgaatgctcatccggagttccgtatggcaatgaaagacggtgagctggtgatatgggatagtgttcacccttgttacaccgttttccatgagcaaactgaaacgttttcatcgctctggagtgaataccacgacgatttccggcagtttctacacatatattcgcaagatgtggcgtgttacggtgaaaacctggcctatttccctaaagggtttattgagaatatgtttttcgtctcagccaatccctgggtgagtttcaccagttttgatttaaacgtggccaatatggacaacttcttcgcccccgttttcaccatgggcaaatattatacgcaaggcgacaaggtgctgatgccgctggcgattcagtttttcgatatgcttcgtgatctgctcaagaacgttgatcttaaagggttcgagcctgatgtacgtattttgcttaccaaatacagcaatagtaatggctctcagtccccgtggatggaggagcaaattcgggatgcctggggaagcatggttctaaaaaatgttgtacgtgaaacggatgaagttggtaaaggtcagatccggatgggtaccgagctcgaattctttcggcttagtgaaacaaaagaaatcaccaatccgtatgccatgcgtttatacgaatccctgtgtcagtatcgtaagccggatggctcaggcatcgtctctctgaaaatcgactggatcatagagcgttaccagctgcctcaaagttaccagcgtatgcctgacttccgccgccgcttcctgcagtgtgacaatctaaaaacttgtcacacttcacatggatctgtcatggcggaaacagcggttatcaatcacatgaaacgtaaaaatagcccgcgaatcgtccagtcaaacgacctcactgaggcggcatatagtctctcccgggatcaaaaacgtatgctgtatctgttcgttgaccagatcagaaaatctgatggcaccctacaggaacatgacggtatctgcgagatccatgttgctaaatatgctgaaatattcggattgacctctgcggaagccagtatggatatacagcatgcattgaagagtttctcggggaaggaagtggttttttatcgccctgaagaggatgccggcgatgaaaaagctatgaatcttttccttggtttatcaaacgtgcgcacagtccatccagagggctttacagtgtacatatcaacccatatctcattcccttctttatcgggttacagaaccggtttacgcagtttctgcttagtgaaacaaaagaaatcaccaatccgtatgccatgcgtttatacgaatgcctgtgtcagtatcccgtgtaaccgagcatag

SEQ ID NO: 119321 - DNA, 1170 bp, Homo sapiens
  misc_feature (1)...(1170): n = a,t,c or g
atgaacatgaacatcaaaaaaattgtaaaacaagccacagttctgacttttacgactgcacttctggcaggaggagcgactcaagccttcgcgaaagaaaataaccaaaaagcatacaaagaaacgtacggcgtctctcatattacacgccatgatatgctgcagatccctaaacagcagcaaaacgaaaaataccaagtgcctcaattcgatcaatcaacgattaaaaatattgagtctgcaaaaggacttgatgtgtgggacagctggccgctgcaaaacgctgacggaacagtagctgaatacaacggctataacgttgtgtttgctcttgcgggaagccccgaagacgctgatgacacatcaatctacatgttttatcaaaagtgtgacaatctaaaaacttgtcacacttcacatggatctgtcatggcggaaacagcggttatcaatcacaagaaacgtaaaaatagcccgcgaatcgtccagtcaaacgacctcactgaggcggcatatagtctctcccgggatcaaaaacgtatgctgtatctgttcgttgaccagatcagaaaatctgatggcaccctacaggaacatgacggtatctgcgagatccatgttgctaaatatgctgaaatattcggattgacctctgcggaagccagtaaggatatacggcaggcattgaagagtttcgcggggaaggaagtggttttttatcgccctgaagaggatgccggcgatgaaaaaggctatgaatcttttccttggtttatcaaacgtgcgcacagtccatccagagggctntacagtgtacatatcaacccatatctcattcccttctttatcgggttacagaaccggtttacgcagtttcggcttagtgaaacaaaagaaatcaccaatccgtatgccatgcgtttatacgaatccctgtgtcagtatcggaaagccggatggctcaggcatcgtctctctgaaaatgactggatcataaagcgttcccagctgcctcaaagtgccttctaccaaccctttatggggctgcggagggagagtttttatttccgctgggaaagacggaccttgggtcccctaaaaagttttagtgttaaaaggggaacggaagccggaaaattcagacttgcagcccttttggtgcgactctaa

SEQ ID NO: 119322 - DNA, 1398 bp, Homo sapiens
atgcctgcaagcggtaacgaaaacgatttgaatatgccttcaggaacaatagaaatcttcgtgcggtgttacgttgaagtggagcggattatggattttgccgatttcggaaccaccatcaaacaggattttcgcctgctggggcaaaccagcgtggaccgcttgctgcaactctctcagggccaggcggtgaagggcaatcagctgttgcccgtctcactggtgaaaagaaaaaccaccctggcgcccaatacgcaaaccgcctctccccgcgcgttggccgattcattaatgcagctggcacgacaggtttcccgactggaaagcgggcatcaggcaccgtgtatgaaatctaacaatgcgctcatcgtcatcctcggcaccgtcaccctggatgctgtaggcataggcttggttatgccggtactgccgggcctcttgcgggatatcgtccattccgacagcatcgccagtcactatggcgtgctgctagcgctatatgcgttgatgcaatttctatgcgcacccgttctcggagcactgtccgaccgctttggccgccgcccagtcctgctcgcttcgctacttggagccactatcgactacgcgatcatggcgaccacacccgtcctgtggatctacccactatgtgacaatctaaaaacttgtcacacttcacatggatctgtcatggcggaaacagcggttatcaatcacaagaaacgtaaaaatagcccgcgaatcgtccagtcaaacgacctcactgaggcggcatatagtctctcccgggatcaaaaacgtatgctgtatctgttcgttgaccagatcagaaaatctgatggcaccctacaggaacatgacggtatctgcgagatccatgttgctaaatatgctgaaatattcggattgacctctgcggaagccagtaaggatatacggcaggcattgaagagtttcgcggggaaggaagtggttttttatcgccctgaagaggatgccggcgatgaaaaaggctatgaatcttttccttggtttatcaaacgtgcgcacagtccatccagagggctttacagtgtacatatcaacccatatctcattcccttctttatcgggttacagaaccggtttacgcagtttcggcttagtgaaacaaaagaaatcaccaatccggattttgccgatttcggaaccaccatcaaacaggattttcgcctgctggggcaaaccagcgtggaccgcttgctgcaactctctcagggccaggcgaacccagatttcttcccccgtggaggacgcagccttaaaggtcccgctttgaaaccagaaagccagaccttcatccagttatcaaccctgctggcaactagacttgtacttcctaccgctgcaaaactgtga

SEQ ID NO: 119323 - DNA, 1827 bp, Homo sapiens
atgaacatgaacatcaaaaaaattgtaaaacaagccacagttctgacttttacgactgcacttctggcaggaggagcgactcaagccttcgcgaaagaaaataaccaaaaagcatacaaagaaacgtacggcgtctctcatattacacgccatgatatgctgcagatccctaaacagcagcaaaacgaaaaataccaagtgcctcaattcgatcaatcaacgattaaaaatattgagtctgcaaaaggacttgatgtgtgggacagctggccgctgcaaaacgctgacggaacagtagctgaatacaacggctatcacgttgtgtttgctcttgcgggaagcccgaaagacgctgatgacacatcaatctacatgttttatcaaaagatcagacgcaagaatggtccggtttctgcaacctttacatctgacggaaaaatccgtttattctacactgactattccggtaaacattacggcaaacaaagcctgacaacagcgcagtgtgacaatctaaaaacttgtcacacttcacatggatctgtcatggcggaaacagcggttatcaatcacaagaaacgtaaaaatagcccgcgaatcgtccagtcaaacgacctcactgaggcggcatatagtctctcccgggatcaaaaacgtatgctgtatctgttcgttgaccagatcagaaaatctgatggcaccctacaggaacatgacggtatctgcgagatccatgttgctaaatatgctgaaatattcggattgacctctgcggaagccagtaaggatatacggcaggcattgaagagtttcgcggggaaggaagtggttttttatcgccctgaagaggatgccggcgatgaaaaaggctatgaatcttttccttggtttatcaaacgtgcgcacagtccatccagagggctttacagtgtacatatcaacccatatctcattcccttctttatcgggttacagaaccggtttacgcagtttcggcttagtgaaacaaaagaaatcaccaatccgtatgccatgcgtttatacgaatccctgtgtcagtatcgtaagccggatggctcaggcatcgtctctctgaaatcgactggacatagagcgtaccagctgcctaaagttcccagcccggaagcgaggaaaataacccggcgctggagaataggtgaagcagcggatttagttggggtttcttctcaggctatcagagatgccgagaaagcagggcgactaccgcacccggatatggaaattcgaggacgggttgagcaacgtgttggttatacaattgaacaaattaatcatatgcgtgatgtgtttggtacgcgattgcgacgtgctgaagacgtatttccaccggtgatcggggttgctgcccataaaggtggcgtttacaaaacctcagtttctgttcatcttgctcaggatctggctctgaaggggctacgtgttttgctcgtggaaggtaacgacccccagggaacagcctcaatgtatcacggatgggtaccagatcttcatattcatgcagaagacactctcctgcctttctatcttggggaaaaggacgatgtcacttatgcaataaagcccacttgctggccggggcttgacattattccttcctgtctggctctgcaccgtattgaaactgagttaatgggcaaatttgatgaaagtaaactgcccaccgatccacacctgatgctccgactggccattgaaactgttgctcatgactatgatgtcatagttattgacagcgcgcctaacctggtgcttagtcttaatattgaggacagtcggaaaagttga

SEQ ID NO: 119324 - DNA, 1668 bp, Homo sapiens
atggcggaaacagcggttatcaatcacaagaaacgtaaaaatagcccgcgaatcgtccagtcaaacgacctcactgaggcggcatatagtctctcccgggatcaaaaacgtatgctgtatctgttcgttgaccagatcagaaaatctgatggcaccctacaggaacatgacggtatctgcgagatccatgttgctaaatatgctgaaatattcggattgacctctgcggaagccagtaaggatatacggcaggcattgaagagtttcgcggggaaagaagtggttttttatcgccctgaagaggatgccggcgatgaaaaagctatgaatcttttcccttggttatcaaacattattacccgctgtatcaacaccgccaaattgcctaaatcagttgttgctcttttttctcaccccggtgaactatctgcccggtcaggtgatgcacttcaaaaagcctttacagataaagaggaattacttaagcagcaggcatctaaccttcatgagcagaaaaaagctgggatggcctccagctctaaaattttatcctattctgccagtgatacaactgccagagctctggggtcagtcctggagcagaagtgtttaaatgaaatatttccaccaagaatagttcttaaaatcaaaaaggctgccattttcatagctgcccaacagcctcagtttctggttacctcgcgtgcgcttcacttttggggggaagaagagaaggggagggaggcaccgaggggggcagccgagttgctatttgtggccaaagaatccgctttaaaagaagaggcagcaggaaggaggaaagaggagaggcggagggaggagaggagacgcggccccggaccccccagccgcgagcggcggagcatcgaggagcgggaggaggaggaagaggaggaggaggaggagggggaggagacaaacagcggcggcggcggcagcgagagaagcgggcgcagggcgagcaggaggagcgggaggaggagaaaccgccgcggaagccgcgggctcagaagggccaagaggacggcccgggaagaggaggaggaggcggaggaggaggaaaagggggatccaaatactgaacgtgaccaggagctgcttactgaggacgcactggatgatctcatcccttcttttctactgactggtcaacagacaccggcgttcggtcgaagagtatctggtgtcatagaaattgccgatgggagtcgccgtcgtaaagctgctgcacttaccgaaagtgattatcgtgttctggttggcgagctggatgatgagcagatggctgcattatccagattgggtaacgattatcgcccaacaagtgcttatgaacgtggtcagcgttatgcaagccgattgcagaatgaatttgctggaaatatttctgcgctggctgatgcggaaaatatttcacgtaagattattacccgctgtatcaacaccgccaaattgcctaaatcagttgttgctcttttttctcaccccggtgaactatctgcccggtcaggtgatgcacttcaaaaagcctttacagataaagaggaattacttaagcagcaggcatctaaccttcatgagcagaaaaaagctggggtgatatctgaagctgaagaagttatcactctttttaccttctgtgcttaa

SEQ ID NO: 119325 - DNA, 2823 bp, Homo sapiens
  misc_feature (1)...(2823): n = a,t,c or g
ttaacacagacgtttgataaaccaaggaaaagattcatagcctttttcatcgccggcatcctcttcagggcgataaaaaaccacttccttccccgcgaaactcttcaatgcctgccgtatatccttactggcttccgcagaggtattnccgaatatttcagcatatttagcaacatggatctcgcagataccgtcatgttcctgtagggtgccatcagattttctgatctggtcaacgaacagatacagcatacgtttttgatcccgggagagactatatgccgcctcagtgaggtcgtttgactggacgattcgcgggctattttttcgtttcttgtgactgatacccgcatcgatcgtcatttttgaaccgcgtgaatcagtgaacaagtaccatttgccgttcattttgaaaacattcgcgcgctcgatttcatcagttaccgtgtttgaagtgatcagcggcttcattacttttttcaatgtgtaatcattatttaactctatgataccgagggcgccgttcgctaactcagcatcgcgttttttagcgctctgctgaagcttctggctttctttacggaagaagttcgtgccgccgccgtagtacgctttgttaaataaagattcttcgccttggtatccgttttctgttcccgtgttggcttcgaatacaaggtatttatggcctttgtcttcaacgtagtgagggtctctcagcgtatggttgtcgccggatgtataattgccttcatcgataaactgctgaacgttctgatatgtttttccgtctccgtcaaaaatcgttttgtgatcttccactccgttgattttgagtgtgtcatcagattttgacacatttacctgcgctgttgtcaggctttgtttgccgtaatgtttaccggaatagtcagtgtagggggattgcatggcatacggattggtgatttcttttgtttcactaagccgaaactgcgtaaaccggttctgtaacccgataaagaagggaatgagatatgggttgatatgtacactgtaaagccctctggatggactgtgcgcacgtttgataaaccaaggaaaagattcatagcctttttcatcgccggcatcctcttcagggcgataaaaaaccacttccttccccgcgaaactcttcaatgcctgccgtatatccttactggcttccgcagaggtcaatccgaatatttcagcatatttagcaacatggatctcgcagataccgtcatgttcctgtagggtgccatcagattttctgatctggtcaacgaacagatacagcatacgtttttgatcccgggagagactatatgccgcctcagtgaggtcgtttgactggacgattcgcgggctatttttacgtttcttgtgattgataaccgctgtttccgccatgacagatccatgtgaagtgtgacaagtttttagattgtcacattnccgatctgcctttttcatctgacaccttcccaaagccacagtttcctcattcttaacataggattcattagtcctacttctgtccaggttaagcaccattttatcgcccttatacaatactgtcgctccaggagcaaactgatgtcgtgagcttaaactagttcttgatgcagatgacgttttaagcacagaagttaaaagagtgataacttcttcagcttcaaatatcaccccagcttttttctgctcatgaaggttagatgcctgctgcttaagtaattcctctttatctgtaaaggctttttgaagtgcatcacctgaccgggcagatagttcaccggggtgagaaaaaagagcaacaactgatttaggcaatttggcggtgttgatacagcgggtaataatcttacgtgaaatattttccgcatcagccagcgcagaaatatttccagcaaattcattctgcaatcggcttgcataacgctgaccacgttcataagcacttgttgggcgataatcgttacccaatctggataatgcagccatctgctcatcatccagctcgccaaccagaacacgataatcactttcggtaagtgcagcagctttacgacggcgactcccatcggcaatttctatgacaccagatactcttcgaccgaacgccggtgtctgttcttcccttgctgtgtgatcatgaatcatacacaaatgagcctctctcagctgggtcctgagccacgatgtgagaagaacctcactctcaaattcttcatcaaatttgcccattaactcagtttcaatacggtgcagagccagacaggaaggaataatgtcaagccccggccagcaagtgggctttattgcataagtgacatcgtccttttccccaagatagaaaggcaggagagtgtcttctgcatgaatatgaagatctggtacccatccgtgatacattgaggctgttccctgggggtcgttaccttccacgagcaaaacacgtagccccttcagagccagatcctgagcaagatgaacagaaactgaggttttgtaaacgccacctttatgggcagcaaccccgatcaccggtggaaatacgtcttcagcacgtcgcaatcgcgtaccaaacacatcacgcatatgattaatttgttcaattgtataaccaacacgttgctcaacccgtcctcgaatttccatatccgggtgcggtagtcgccctgctttctcggcatctctgatagcctgagaagaaaccccaactaaatccgctgcttcacctattctccagcgccgggttattttcctcgcttccgggctgtcatcattaaactgtgcaatggcgatagccttcgtcat

SEQ ID NO: 119326 - DNA, 1332 bp, Homo sapiens
  misc_feature (1)...(1332): n = a,t,c or g
atggcggaaacagcggttatcaatcacaagaaacgtaaaaatagcccgcgaatcgtccagtcaaacgacctcactgaggcggcatatagtctctcccgggatcaaaaacgtatgctgtatctgttcgttgaccagatcagaaaatctgatggcaccctacaggaacatgacggtatctgcgagatccatgttgctaaatatgctgaaatattcggattgacctctgcggaagccagtaaggatatacggcaggcattgaagagtttcgcggggaaggaagtggttttttatcgccctgaagaggatgccggcgatgaaaaaggctatgaatcttttccttggtttatcaaacgtgcgcacagtccatccagagggctttacagtgtacatatcaacccatatctcattcccttctttatcgggttacacaaccggtttacgcagtttcggcttagtgaaacacaagagatcaccaatccgcatgccatgcgtttatacgaatccctgtgtcagtatcgtaagccggatggctcatgcattgtctctctgaaaatcgactggatcatagaagcgtaccagctgcctcaaattaccaacctatgcctgacttccgccccgtttcctgcagggctgggttatgagatcaacaacgaactccaagcgcctctatacattaagaaaanggatctggctctgaaggggctacgtgttttgctcgtggaaggtaacgacccccagggaacagcctcaatgtatcacggatgggtaccagatcttcatattcatgcagaagacactctcctgcctttctatcttggggaaaaggacgatgtcacttatgcaataaagcccacttgctggccggggcttgacattattccttcctgtctggctctgcaccgtattgaaactgagttaatgggcaaatttgatgaaggtaaactgcccaccgatccacacctgatgctccgactggccattgaaactgttgctcatgactatgatgtcatagttattgacagcgcgcctaacctgggtatcggcacgattaatgtcgtatgtgctgctgatgtgctgattgttcccacgcctgctgagttgtttgactacacctccgcactgcagtttttcgatatgcttcgtgatctgctcaagaacgttgatcttaaagggttcgagcctgatgtacgtattttgcttaccaaatacagcaatagtaatggctctcagtccccgtggatggaggagcaaattcgggatgcctggggaagcatggttctaaaaatgttgttcgtgaaacggatgaagttggtaaaggtcagatccggatga

SEQ ID NO: 119327 - DNA, 1611 bp, Homo sapiens
  misc_feature (1)...(1611): n = a,t,c or g
atggagttttacatgaaggctttcaataagctgttttccctcgttgttgcatctgttctggttttctctcgtgctggctgcggtgacaaagaagaatcgaagaaattcagcgccaatttgaacggcactgaaattgccattacctatgtctacaaaggtgacaaggtgcttaagagggccttagcacttaccacgtacactttcgcctcttaccatttccaccttaatccggttagccaattcccgtttacgctttccccgttaggatgtgacgccgatatgattttaaaaataaaccccctccgccgtatgacgcctttcggcgctttaaaaataaaaaactgtgacaatctaaaaacttgtcacacttcacatggatctgtcatggcggaaacagcggttatcaatcacaagaaacgtaaaaatagcccgcgaatcgtccagtcaaacgacctcactgaggcggcatatagtctctcccgggatcaaaaacgtatgctgtatctgttcgttgaccagatcagaaaatctgatggcaccctacaggaacatgacggtatctgcgagatccatgttgctaaatatgctgaaatattcggattgacctctgcggaagccagtaaggatatacggcaggcattgaagagtttcgcggggaaggaagtggttttttatcgccctgaagaggatgccggcgatgaaaaaggctatgaatcttttccttggtttatcaaacgtgcgcacagtccatccagagggctttacagtgtacatatcaacccatatctcattcccttctttatcgggttacagaaccggtttacgcagtttcggcttagtgaagggtacccaaacccttggaaaatccccccgtttaatatatccccaagggcaatgggaaagaacaattttgagccattccagtccagttgcccaatggaccctaaaacaagccggtccaagtgggatattccggcttttttaaaagnccaattcaatgcattaatggaaagtgaaaaaggacagagccagaacttgtggaaatttgccgtttactcaggacttcgtcacggggaactggcagctctggcgtgggagaatgtggatctcgaaaagggaatagtgaatgtcagaagaaacctgacgatacttgatatgttcggtcccccaaaaacaaatgccgggatccgaacagtaacactactgcagcctgctcttgaagcactgaaggagcaatacaaactgaccgggcatcatcgcaaaagcgaaatcaccttttatcatcgggagtacggcagaaccgaaaagcaaaaactgcattttgttttcatgcccagggtgtgtaacggaaaacaaaaaccttattactcggtaagcagtttgggggcaaggtggaatgcagcagtaaaacgtgctggtattcgccgccgtaatccgtaccatacgcggcatacttttgcctgctggctgttgacggcaggagcgaacccggcatttatagccagccaaatggggcatgaaactgcgcagatggtgtatgaaatttacggtatgtggattgatgacatgaacgccgagcagataaccatgttgaatgcgcggttatcgtag

SEQ ID NO: 119328 - DNA, 1453 bp, Homo sapiens
atggcggaaacagcggttatcaatcacaagaaacgtaaaaatagcccgcgaatcgtccagtcaaacgacctcactgaggcggcatatagtctctcccgggatcaaaaacgtatgctgtatctgttcgttgaccagatcagaaaatctgatggcaccctacaggaacatgacggtatctgcgagatccatgttgctaaatatgctgaaatattcggattgacctctgcggaagccagtaaggatatacggcaggcattgaagagtttcgcggggaaggaagtggttttttatcgccctgaagaggatgccggcgatgaaaaaggctatgaatcttttccttggtttatcaaacgtgcgcacagtccatccagagggctttacagtgtacatatcaacccatatctcattcccttctttatcgggttacagaaccggtttacgcagtttcggcttagtaaacaaaagagggtatcctctagactcaactgggaaagcgataagtttgacgcccaccgatccgatcctgaaagatcagaggcaagaatggtccggttctgcaacctttacatctgacggaaaaatccgtttattctacactgactattccggtaaacattacggcaaacaaagcctgacaacagcgcaggtaaatgtgtcaaaatctgatgacacactcaaaatcaacggagtggaagatcacaaaacgatttttgacggagacggaaaaacatatcagaacgttcagcagtttatcgatgaaggcaattatacatccggcgacaaccatacgctgagagaccctcactacgttgaagacaaaggccataaataccttgtattcgaagccaacacgggaacagaaaacggataccaaggcgaagaatctttatttaacaaagcgtactacggcggcggcacgaacttcttccgtaaagaaagccagaagcttcagcagagcgctaaaaaacgcgatgctgagttagcgaacggcgccctcggtatcatagagttaaataatgattacacattgaaaaaagtaatgaagccgctgatcacttcaaacacggtaactgatgaaatcgagcgcgcgaatgttttcaaaatgaacggcaaatggcaggcaccgtgtatgaaatctaacaatgcgctcatcgtcatcctcggcaccgtcaccctggatgctgtaggcataggcttggttatgccggtactgccgggcctcttgcgggatatcgtccattccgacagcatcgccagtcactatggcgtgctgctagcgctatatgcgttgatgcaatttctatgcgcacccgttctcggagcactgtccgaccgctttggccgccgcccagtcctgctcgcttcgctacttggagccactatcgactacgcgatcatggcgaccacacccgtcctgtggatctacccactagtcaattcaccatcttgttga

SEQ ID NO: 119329 - DNA, 4164 bp, Homo sapiens
atgactgagtacaagatccaccagcgctggttcgccaagttgaagcgcaaggctgcggcaaagctgcgcgagatcgagcagagctggaagcacgagaaggcggtgcctggggaggtcgacactctgcgcaagctcagccccgaccgcttccagcgaaagcggcgattgagcggggctcaagcgccgggcccctcggtccctaccagggagcctgagggtgggaccctggcggcttggcaggagggagagactgagactgctcagcactcaggtttgggcctgatcaacagttttgcttctggagaagtgaccaccaacggggaggctgcccccgagaatggagaggacggagagcatggcttgctgacatacatctgtgacgccatggagctggggcctcagagagccctcaaagaggagagtggggccaagaagaaaaagaaagatggggagtgggattttcccgatttcggaaccaccatcaaacaggattttcgcctgctggggcaaaccagcgtggaccgcttgctgcaactctctcagggccaggcggtgaagggcaatcagctgttgcccgtctcactggtgaaaagaaaaaccaccctggcgcccaatacgcaaaccgcctctccccgcgcgttggccgattcattaatgcagctggcacgacaggtttcccgactggaaagcgggcacccttgccagcatccagccatgggggatatgaaaaccccagattttgatgaccttctggctgcctttgacatcccagaccccaccagccttgatgccaaggaggccatccagacacccaggacgcctcatgctcccaagcacagccgcccccagaggggaagtgtggaccaggcggaaggagaaacatgccgagggccacagtcaccaggcccagtcgaggccaagcaggaggccagcccgttccagtgccccaaggaggagcggccagggggagtgccgtgtatggatcagggtggctgtcctctagctggcctgagccaggaggtacccacgatgccttctcttcctggaactgggctgacagctagcccaaaggcggggccgtgtagcaccccgacttctcagcacgggagcacagccaccttcctgccctctgaggatcaggtcctgatgagttctgccccaacactgcacctggggctggggacccccactcagagtcacccaccagaaaccatggccaccagcagtgagggggcctgcgcccaggcaccagatgtggaggggcggaccccaggtccccggagctgtgaccctggcctcatagattccctgaagaactacctgcttctgctgctgaagctgtccagcacagagacaagtggagcagggggagagtcccaggtgggggcagccaccggaggtctggtgccctcagccactctgacacccactgtggaagtggctggaaggagacatgaacatgaacatcaaaaaaattgtaaaacaagccacagttctgacttttacgactgcattctggcaggaggagcgactcaagccttcgcgaaagaaaataaccaaaaagcatacaaagaaacgtacggcgtctctcatattacacgccatgatatgctgcagatccctaaacagcagcaaaacgaaaaataccaagtgcctcaattcgatcaatcaacgattaaaaatattgagtctgcaaaaggacttgatgtgtgggacagctggccgctgcaaaacgctgacggaacagtagctgaatacaacggctatcacgttgtgtttgctcttgcgggaagcccgaaagacgctgatgacacatcaatctacatgttttatcaaaaggtcggcgacaactcaatcgacagctggaaaaacgcgggccgtgtctttaaagacagcgataagttcgacgccaacgatccgatcctgaaagatcagacgcaagaatggtccggttctgcaaccttcacatctgacggaaaaatccgtttattctacactgactattccggtaaacattacggcaaacaaagcctgacaacagcgcaggtaaatgtgtcaaaatctgatgacacactcaaaatcaacggagtggaagatcacaaaactatttttgacggagacggaaaaacatatcagaacgttcagcagtttatcgatgaaggcaattatacgggggatcctctagaggcggaaacagcggttatcaatcacaagaaacgtaaaaatagcccgcgaatcgtccagtcaaacgacctcactgaggcggcatatagtctctcccgggatcaaaaacgtatgctgtatctgttcgttgaccagatcagaaaatctgatggcaccctacaggaacatgacggtatctgcgagatccatgttgctaaatatgctgaaatattcggattgacctctgcggaagccagtaaggatatacggcaggcattgaagagtttcgcggggaaggaagtggttttttatcgccctgaagaggatgccggcgatgaaaaaggctatgaatcttttccttggtttatcaaacgtgcgcacagtccatccagagggctttacagtgtacatatcaacccatatctcattcccttctttatcgggttacagaaccggtttacgcagtttcggcttagtgaaacaaaagaaatcaccaatccgtatgccatgcgtttatacgaatccctgtgtcagtatcgtaagccggatggctcaggcatcgtctctctgaaaatcgactggatcatagagcgttaccagctgcctcaaagttaccagcgtacgcctgacttccgccgccgcttcctgcaggtctgtgttaatgagatcaacagcagaactccaatgcgcctctcatacattgagaaaaagaaaggccgccagacgactcatatcgatgttcagattgaaactgatggaaaactcaaccagtgcataaacgctggtcatgaaatgacgaaggctatcgccattgcacagtttaatgatgacagcccggaagcgaggaaaataacccggcgctggagaataggtgaagcagcggatttagttggggtttcttctcaggctatcagagatgccgagaaagcagggcgactaccgcacccggatatggaaattcgaggacgggttgagcaacgtgttggttatacaattgaacaaattaatcatatgcgtgatgtgtttggtacgcgattgcgacgtgctgaagacgtatttccaccggtgatcggggttgctgcccataaaggtggcgtttacaaaacctcagtttctgttcatcttgctcaggatctggctctgaaggggctacgtgttttgctcgtggaaggtaacgacccccagggaacagcctcaatgtatcacggatgggtaccagatcttcatattcatgcagaagacactctcctgcctttctatcttggggaaaaggacgatgtcacttatgcaataaagcccacttgctggccggggcttgacattattccttcctgtctggctctgcaccgtattgaaactgagttaatgggcaaatttgatgaaggtaaactgcccaccgatccacacctgatgctccgactggccattgaaactgttgctcatgactatgatgtcatagttattgacagcgcgcctaacctgggtatcggcacgattaatgtcgtatgtgctgctgatgtgctgattgttcccacgcctgctgagttgtttgactacacctccgcactgcagtttttcgatatgcttcgtgatctgctcaagaacgttgatcttaaagggttcgagcctgatgtatttattcgcgataagctcatggagcggcgtaaccgtcgcacaggaaggacagagaaagcgcggatctgggaagtgacggacagaacggtcaggacctggattggggaggcggttgccgccgctgctgctgacggtgtgacgttctctgttccggtcacaccacatacgttccgccattcctatgcgatgcacatgctgtatgccggtataccgctgaaagttctgcaaagcctgatgggacataagtccatcagttcaacggaagtctacacgaaggtttttgcgctggatgtggctgcccggcaccgggtgcagtttgcgatgccggagtctgatgcggttgcgatgctgaaacaattatcctga

SEQ ID NO: 119330 - DNA, 2902 bp, Homo sapiens
atggcggaaacagcggttatcaatcacaagaaacgtaaaaatagcccgcgaatcgtccagtcaaacgacctcactgaggcggcatatagtctctcccgggatcaaaaacgtatgctgtatctgttcgttgaccagatcagaaaatctgatggcaccctacaggaacatgacggtatctgcgagatccatgttgctaaatatgctgaaatattcggattgacctctgcggaagccagtaaggatatacggcaggcattgaagagtttcgcggggaaagaagtggttttttatcgccctgaagaggatgccggcgatgaaaaaggctatgaatcttttccttggtttatcaaacgtgcgcacagtccatccagagggctttacagtgtacatatcaacccatatctcattcccttctttatcgggttacagaaccggtttacgcagtttcggcttagtgaaacaaaagatatcaccaatccgtatgccatgcgtttatacgaatccctgtgtcagtatctgcctcaattcgatcaatcaacgattaaaaatattgagtctgcaaaaggacttgatgtgtgggacagctggccgctgcaaaacgctgacggaacagtagctgaatacaacggctatcacgttgtgtttgctcttgcgggaagcccgaaagacgctgatgacacatcaatctacatgttttatcaaaaggtcggcgacaactcaatcgacagctggaaaaacgcgggccgtgtctttaaagacagcgataagttcgacgccaacgatccgatcctgaaagatcagacgcaagaatggtccggttctgcaacctttacatctgacggaaaaatccgtttattctacactgactattccggtaaacattacggcaaacaaagcctgacaacagcgcaggtaaatgtgtcaaaatctgatgacacactcaaaatcaacggagtggaagatcacaaaacgatttttgacggagacggaaaaacatatcagaacgttcagcagtttatcgatgaaggcaattatacatccggcgacaaccatacgctgagagaccctcactacgttgaagacacaggccataaataccttgtgttcgaagccaacacgggaacagataacggataccaaggcgaagaatctttatttaacaaagcgtactacgggcggcggcacgaacttcttccgtatagaaagccagaagcttcagcagagcgctaaaaaacgcgatgctgagttagcgaacggcgccctcggtatcatagagttaaataatgattacacattgaaaaaagtaatgaagccgctgatcacttcaaacacggtaactgatgaaatcgagcgcgcgaatgttttcaaaatgaacggcaaatggtacttgttcactgattcacgcggttcaaaaatgacgatcgatgcggcatatagtctctcccgggatcaaaaacgtatgctgtatctgttcgttgaccaaatcagaaaatctgatggcaccctacaggaacatgacggtatctgcgagatccatgttgctaaatatgctgaaatattcggattgacctctgcggaagccagtaaggatatacggcaggcattgaagagtttcgcggggaaggaagtggttttttatcgccctgaagaggatgccggcgatgaaaaaggctatgaatcttttccttggtttatcaaacggtttattgagaatatgtttttcgtctcagccaatccctgggtgagtttcaccagttttgatttaaacgtggccaatatggacaacttcttcgcccccgtgtggaccatgggcaaatattatacgcaaggcgacaaggtgctgatgccgctggcgattcaggttcatcatgccgtttgtgatggcttccatgtcggcagaatgcttaatgaattacaacagtactgcgatgagtggcagggcggggcagatgtcacttatgcaggagcgcccacttgctggccagagcttgacattattccttcctgtctggctctgcaccgtattgaaactgagttaatgggcaaatttgatgaaggtaaactgcccaccgatccacacttgatgctcctactggccattgaaactgttgctcatgactatggtggggtagttattgacagcgcgcctaacctgggtatcggcacgatgagggtagtatgtgctgctgatgtactaattgttcccacgcctgctgagttgtttgactacacctccgcactgcagtttttcgatatgcttcgtgatctgctcaagaacgttgatcttaaagggttcgagcctgatgtacgtattttgcttaccaaatacagcaatagtgatggctctcagcccccgtggatagaggagcaaattccggatgcgctgggaagcatggttcttaaaaatgttcaaaatacgtacatcaggctcgaaccctttaagatcaacgttcttgagcagatcacgaagcatatcgaaaaactgcagtgcggaggtgtagtcaaacaactcagcaggcgtgggaacaatcagcacatcagcagcacatacgacattaatcgtgccgatacccacaaccggtttacgcagtttcggcttagtgaaacaaaagaaatcaccaatccgtatgccatgcgtttatacgaatccctgtgtcagtatcgtaagccggatggctcaggcatcgtctctctgaaaatcgactggagcatagagcgttaccagctgcctcaaagttaccagcgtatgcctgacttccgccgccgcttcctgcaggtctgtgttaatgagatcaacagcagaactccaatgcgcctctcatacattgagaaaaagaaaggccgccagacgactcatatcgtattttccttccgcgatatcacttccatgacgacaggatag

SEQ ID NO: 119331 - DNA, 5909 bp, Homo sapiens
atggcggtgaagaacacgttcttaagaagagacatctgttccgaagagagaaagcatcaaaccctatcacgggctattcttttaaccggtaaggaatttggccgcatgcgaaaccaccatcaaacgggagaatccccgggagaggcaaaccagcaagagccgctgcatgcaactctagcagggacaggcggtgaaggacaatcagctgttgcccgtctcactggtgaaaagaaaaaccaccctggcgcccaatacgcaaaccgcctctccccgcgcgttggccgattcattaatgcagctggcacgacaggtttccagattggaaagcgggcagtgaccccccctccccccataataggcgagaatctcaaacctgtcgacggtgagcgggagcatgtgtacgcacatgcacgtgtacgttgcgggaagtcagggaccccgaacggagggagcggctggagctgcggccgaggcacggattttgccgatttcggaaccaccatcaaacaggattttcgcctgctggggcaaaccagcgtggaccgcttgctgcaactctctcagggccaggcggtgaagggcaatcagctgttgcccgtctcactggtgaaaagaaaaaccaccctggcgcccaatacgcaaaccgcctctccccgcgcgttggccgattcattaatgcagctggcacgacaggtttcccgactggaaagcgggcagtgagcgcaacgcaattaattgacgcggccgaacctcgtcgctttcgtattgcctctcgtgtgatttcggcagcgttcggtcgcgtttccacctacggtgccgaatgcatgtgtatcagtccgctcaagagaacgggattttgccgatttcggaaccaccatcaaacaggattttcgcctgctggggcaaaccagcgtggaccgcttgctgcaactctctcagggccaggcggtgaagggcaatcagctgttgcccgtctcactggtgaaaagaaaaaccaccctggcgcccaatacgcaaaccgcctctccccgcgcgttggccgattcattaatgcagctggcacgacaggtttcccgactggaaagcgggcatgtgacaatctaaaaacttgtcacacttcacatggatctgtcatggcggaaacagcggttatcaatcacaagaaacgtaaaaatagcccgcgaatcgtccagtcaaacgacctcactgaggcggcatatagtctctcccgggatcaaaaacgtatgctgtatctgttcgttgaccagatcagaaaatctgatggcaccctacaggaacatgacggtatctgcgagatccatgttgctaaatatgctgaaatattcggattgacctctgcggaagccagtaaggatatacggcaggcattgaagagtttcgcggggaaggaagtggttttttatcgccctgaagaggatgccggcgatgaaaaaggctatgaatcttttccttggtttatcaaacgtgcgcacagtccatccagagggctttacagtgtacatatcaacccatatctcattcccttctttatcgggttacagaaccggtttacgcagtttcggcttagtgaaacaaaagaaatcaccaatccgtatgccatgcgtttatacgaatccctgtgtcagtatcgtaagccggatggctcaggcatcgtctctctgaaaatcgactggatcatagagcgttaccagctgcctcaaagttaccagcgtatgcctgacttccgccgccgcttcctgcaggtctgtgttaatgagatcaacagcagaactccaatgcgcctctcatacattgagaaaaagaaaggccgccagacgactcatatcgctatcagagatgccgagaaagcagggcgactaccgcacccggatatggaaattcgaggacgggttgagcaacgtgttggttatacaattgaacaaattaatcatatgcgtgatgtgtttggtacgcgattgcgacgtgctgaagacgtatttccaccggtgatcggggttgctgcccataaaggtggcgtttacaaaacctcagtttctgttcatcttgctcaggatctggctctgaaggggctacgtgttttgctcgtggaaggtaacgacccccagggaacagcctcaatgtatcacggatgggtaccagatcttcatattcatgcagaagacactctcctgcctttctatcttggggaaaaggacgatgtcacttatgcaataaagcccacttgctggccggggcttgacattattccttcctgtctggctctgcaccgtattgaaactgagttaatgggcaaatttgatgaaggtaaactgcccaccgatccacacctgatgctccgactggccattgaaactgttgctcatgactatgatgtcatagttattgacagcgcgcctaacctgggtatcggcacgattaatgtcgtatgtgctgctgatgtgctgattgttcccacgcctgctgagttgtttgactacacctccgcactgcagtttttcgatatgcttcgtgatctgctcaagaacgttgatcttaaagggttcgagcctgatgtacgtattttgcttaccaaatacagcaatagtaatggctctcagtccccgtggatggaggagcaaattcgggatgcctggggaagcatggttctaaaaaatgttgtacgtgaaacggatgaagttggtaaagctgccccgatggtggattcgttaattgcgcgcgtaggagtaatggctcgcggtaatgccattactttgcctgtatgtggtcgggatgtgaagtttactcttgaagtgctccggggtgatagtgttgagaagacctctcgggtatggtcagctcgaaggattcctgagaatgtaaaagttggtgctggtgggctgtgtgacaatctaaaaacttgtcacacttcacatggatctgtcatggcggaaacagcggttatcaatcacaagaaacgtaaaaatagcccgcgaatcgtccagtcaaacgacctcactgaggcggcatatagtctctcccgggatcaaaaacgtatgctgtatctgttcgttgaccagatcagaaaatctgatggcaccctacaggaacatgacggtatctgcgagatccatgttgctaaatatgctgaaatattcggattgacctctgcggaagccagtaaggatatacggcaggcattgaagagtttcgcggggaaggaagtggttttttatcgccctgaagaggatgccggcgatgaaaaaggctatgaatcttttccttggtttatcaaacgtgcgcacagtccatccagagggctttacagtgtacatatcaacccatatctcattccctttctttatcgggttacagaaccggtttacgcagtttcgggcttagtgaaacaaaagaaatcaccaatcccgtatgcccttgcgtttataccaatccctgtgtcagtatcgtaagccggatggctcaagcatcgtctctctgaaaatcgactggatcatagagcgttaccagctgcctcaaagttaccagcgtatgcctgacttccgccgccgctttctgcagacaaaggccataaataccttgtattcgaagccaacacgggaacagaaaacggataccaaggcgaagaatcctttatttaacaaagcgtactacggcggcggcacgaacttcttccgtaaagaaagccagaagcttcagcagagcgctaaaaaacgcgatgctgagttagcgaacggcgccctcggtatcatagagttaaataatgattacacattgaaaaaagtaatgaagccgctgatcacttcaaacacggtaactgatgaaatcgagcgcgcgaatgttttcaaaatgaacggcaaatggtacttgttcactgattcacgcggttcaaaaatgacgatcgatggtattaactcaaacgatatttacatgcttggttatgtatcaaactctttaaccggcccttacaagccgctgaacaaaacagggcttgtgctgcaaatgggtcttgatccaaacgatgtgacattcacttactctcacttcgccatgccgcaagccaaaggcaacaatgtgggtatcacaagctacatgacaaacaaaagcttctttcaagataaaaaggcaacatttgcgcccagccttcttaatgaacatcaaaggcaataaaacatccgttgtcaaaaacagcgtcctgggagcaggacaggtggccgtccgctagttgcggcaaaaagaagtggccggtcttgattggcgttgtgtttgaaaacaggttttttattacctaccacggcgggctgtacatctctgacgtacagaaggaggacgccctctccacctatcgctgcatcaccaagcacaagtatagcggggagacccggcagagcaatggggcacgcctctctgtgacagcggttatcaatcacaagaaacgtaaaaatagcccgcgaatcgtccagtcaaacgacctcactgaggcggcatatagtctctcccgggatcaaaaacgtatgctgtatctgttcgttgaccagatcagaaaatctgatggcaccctacaggaacatgacggtatctgcgagatccatgttgctaaatatgctgaaatattcggattgacctctgcggaagccagtaaggatatacggcaggcattgaagagtttcgcggggaaggaagtggttttttatcgccctggaaaagatgccggcgatgaaaaaggctatgaatcttttccttggtttatcaaacgtgcgcacagtccatccagagggctttacagtaaccggtttacgcagtttcggcttagtgaaacaaaagaaatcaccaatccgtatgccatgcgtttatacgaatccctgtgtcagtatcgtaagccggatggctcaggcatcgtctctctgaaaatcgactggatcatagagcgttaccagctgcctcaaagttaccagcgtatgcctgacttccgccgccgcttcctgcagtgcataaacgctggtcatgaaatgacgaaggctatcgccattgcacagtttaatgatgacagcccggaagcgaggaaaataacccggcgctggagaataggtgaagcagcggatttagttggggtttcttctcaggctatcagagatgccgagaaagcagggcgactaccgcacccggatatggaaattcgaggacgggttgagcaacgtgttggttatacaattgaacaaattaatcatatgcgtgatgtgtttggtacgcgattgcgacgtgctgaagacgtatttccaccggtgatcggggttgctgcccataaaggtggcgtttacaaaacctcagtttctgttcatcttgctcaggatctggctctgaaggggctacgtgttttgctcgtggaaggtaacgacccccagggaacagcctcaatgtatcacggatgggtaccagatcttcatattcatgcagaagacactctcctgcctttctatcttggggaaaaggacgatgtcacttatgcaataaagcccacttgctggccggggcttgacattattccttcctgtctggctctgcaccgtattgaaactgagttaatgggcaaatttgatgaaggtaaactgcccaccgatccacacctgatgctccgactggccattgaaactgttgctcatgactatgatgtcatagttattgacagcgcgcctaacctgggtatcggcacgattaatgtcgtatgtgctgctgatgtgctgattgttcccacgcctgctgagttgtttgactacacctccgcactgcagtttttcgatatgcttcgtgatctgctcaagaacgttgatcttaaagggttcgagcctgataaaaatggagataagaaatataccaggttctcagaattgttttga

SEQ ID NO: 119332 - DNA, 6722 bp, Homo sapiens
atggacaacttcttcgcccccgttttcaccatgggcaaatattatacgcaaggcgacaaggtgctgatgccgctggcgattcaggttcatcatgccgtttgtgatggcttccatgtcggcagaatgcttaatgaattacaacagtactgcgatgagtggcagggcggggcggtcaccgtcgacagcgacacacttgcatcggatgcagcccggttaacgtgccggcacggcctgtgtaaccagtgtgacaatctaaaaacttgtcacacttcacatggatctgtcatggcggaaacagcggttatcaatcacaagaaacgtaaaaatagcccgcgaatcgtccagtcaaacgacctcactgaggcggcatatagtctctcccgggatcaaaaacgtatgctgtatctgttcgttgaccagatcagaaaatctgatggcaccctacaggaacatgacggtatctgcgagatccatgttgctaaatatgctgaaatattcggattgacctctgcggaagccagtaaggatatacggcaggcattgaagagtttcgcggggaaggaagtggttttttatcgccctgaagaggatgccggcgatgaaaaaggctatgaatcttttccttggtttatcaaaccgccgggttattttcctcgcttccgggctgtcatcattaaactgtgcaatggcgatagccttcgtcatttcatgaccagcgtttatgcactgatccccgatgtgctgattgttcccacgcctgctgagttgtttgactacacctccgcactgcagtttttcgatatgcttcgtgatctgctcaagaacgttgatcttaaagggttcgagcctgatgtacgtattttgcttaccaaatacagcaatagtaatggctctcagtccccgtggatggaggagcaaattcgggatgcctggggaagcatggttctaaaaaatgttgtacgtgaaacggatgaagttggtaaaggtcagatccggatgagaactgtttttgaacaggccattgatcaacgctcttcaactggtgcctggagaaatgctctttctatttgggaacctgtctgcaatgaaattttcgatcgtctgattaaagggtaccgagctcgaattcgtaatcatggaaggacagagaaagcgcggatctgggaagtgacggacagaacggtcaggacctggattggggaggcggttgccgccgctgctgctgacggtgtgacgttctctgttccggtcacaccacatacgttccgccattcctatgcgatgcacatgctgtatgccggtataccgctgaaagttctgcaaagcctgatgggacataagtccatcatgttcaacggaagtctacacgaaggtttttgcgctggatgtggctgcccggcaccggtgtgacaatctaaaaacttgtcacacttcacatggatctgtcatggcggaaacagcggttatcaatcacaagaaacgtaaaaatagcccgcgaatcgtccagtcaaacgacctcactgaggcggcatatagtctctcccgggatcaaaaacgtatgctgtatctgttcgttgaccagatcagaaaatctgatggcaccctacaggaacatgacggtatctgcgagatccatgttgctaaatatgctgaaatattcggattgacctctgcggaagccagtaaggatatacggcaggcattgaagagtttcgcggggaaggaagtggttttttatcgccctgaagaggatgccggcgatgaaaaaggctatgaatcttttccttggtttatcaaacgtgcgcacagtccatccagagggctttacagtgtacatatcaacccatatctcattcccttctttatcgggttacagaaccggtttacgcagtttcggcttagtgaaacaaaagaaatcaccaatccgtatggccatgcgttaatacgaatccctgtgtcagtatcgtaagccggatggctcaggcatcgtctctctgaaaatcgactggatcatagagcgttaccagctgcctcaaagttaccagcgtatgcctgacttccgccgccgcttcctgcaggtctgtgttaatgagatcaacagcagggggtcttctagagtccccaaacagggctgtcaagtccagtgtaaagagaatggcgctttcactgtgcttgttgacaactatgtgaaggaagaagaaggcacaggggttgtccaccaagctccttacttcggtgctggagaggatccgcggaattatacatccggcgacaaccatacgctgagagaccctcactacgttgaagacaaaggccataaataccttgtattcgaagccaacacgggaacagaaaacggataccaaggcgaagaatctttatttaacaaagcgtactacggcggcggcacgaacttcttccgtaaagaaagccagaagcttcagcagagcgctaaaaaacgcgatgctgagttagcgaacggcgccctcggtatcatagagttaaataatgattacacattgaaaaaagtaatgaagccgctgatcacttcaaacacggtaactgatgaaatcgagcgcgcgaatgttttcaaaatgaacggcaaatgtcaggcaccgtgtatgaaatctaacaatgcgctcatcgtcatcctcggcaccgtcaccctggatgctgtaggcataggcttggttatgccggtactgccgggcctcttgcgggatatcgtccattccgacagcatcgccagtcactatggcgtgctgctagcgctatatgcgttgatgcaatttctatgcgcacccgttctcggagcactgtccgaccgctttggccgccgcccagtcctgctcgcttcgctacttggagccactatcgactacgcgatcatggcgaccacacccgtcctgtggatctacccactatgtgacaatctaaaaacttgtcacacttcacatggatctgtcatggcggaaacagcggttatcaatcacaagaaacgtaaaaatagcccgcgaatcgtccagtcaaacgacctcactgaggcggcatatagtctctcccgggatcaaaaacgtatgctgtatctgttcgttgaccagatcagaaaatctgatggcaccctacaggaacatgacggtatctgcgagatccatgttgctaaatatgctgaaatattcggattgacctctgcggaagccagtaaggatatacggcaggcattgaagagtttcgcggggaaggaagtggttttttatcgccctgaagaggatgccggcgatgaaaaaggctatgaatcttttccttggtttatcaaacgtgcgcacagtccatccagagggctttacagtgtacatatcaacccatatctcattcccttctttatcgggttacagaacccgtttacgcagtttcggcttagtgaaacacaagagatcaccaatcccctgacttcagcgcaggtaaatgtgtcaaaatctgatgacacactcaaaatcaacggagtggaagatcacaaaacgatttttgacggagacggaaaaacatatcagaacgttcagcagtttatcgatgaaggcaattatacatccggcgacaaccatacgctgagagcccctcactacgttgaagacaaaggccataaataccttgtattcgaagccaacacgggaacagaaaacggataccaaggcgaagaatctttatttaacaaagcgtactacggcggcggcacgaacttcttccgtaaagaaagccagaagcttcagcagagcgctaaaaaacgcgatgctgagttagcgaacggcgccctcggtatcatagagttaaataatgattacacattgaaaaaagtaatgaagccgctgatcacttcaaacacggtaactgatgaaatcgagcgcgcgaatgttttcaaaatgaacggcaaatggtacttgttcactgattcacgcggttcaaaaatgacgatcgatggtattaactcaaacgatatttacatgctcggttatgtatcaaactctttaaccggcccttacaagccgctgaacaaaacagagcttgtgctgcagatgggtcttgatccaaacgatgtgacattcacttactctcacttcgcagggccgcaagccaaaggcgacaatgtgacaaaggccattaaataccttgtattcgaagccaacacgggaacagaaaacggataccaaggcgaagaatctttatttaacaaagcgtactacggcggcggcacgaacttcttccgtaaagaaagccagaagcttcagcagagcgctaaaaaacgcgatgctgagttagcgaacggcgccctcggtatcatagagttaaataatgattacacattgaaaaaagtaatgaagccgctgatcacttcaaacacggtaactgatgaaatcgagcgcgcgaatgttttcaaaatgaacggcaaatgtgcgactctaaagcacccccctgaatcagccgatctcgacccgcatgcgttagcgcgtgaaaaaacaggagcagtaagaagtatgctgctggatagcgtcgaaccgcttcctcttgttgatgtggtgaaaagttggcatggtcgtcgcccaatggctgtaggaacggggagtgaaagcgccatcgctgaggcattgctggcgcacctgggattacgccattattttgacgccgtcgtcgctgccgatcacgtcaaacaccataaacccgcgccagacacatttttgttgtgcgcgcagcgtatgggcgtgcaaccgacgcagtgtgtggtctttgaagatgccgatttcggtattcaggcggcccgtgcagcaggcatggacgccgtggatgttcgcttgctttctttggatacagctgcgccttccaccccaggaccttcacacacggctgatcccccagagcccttgccggaggagctcattcctgctcctgtttcaagtccagcttccaggccccctacagcctcagtccctgtggcctccccaggggcagccctgctgttcctgacctcagccccctataggaaagggtggtttacttttgatttgatattgggacgcattcctgtgcgctggaatatccgcagaagtcatcccttgctcaacccaggaagtgtcaaggaagtggcctgtgggggaaaccactctgtgttcctgctggaagatggggaagtttacacatgtggtttgaacacaaggggcaactgggccatgagagggaaggaaacaagccagtgtgacaatctaaaaacttgtcacacttcacatggatctgtcatggcggaaacagcggttatcaatcacaagaaacgtaaaaatagcccgcgaatcgtccagtcaaacgacctcactgaggcggcatatagtctctcccgggatcaaaaacgtatgctgtatctgttcgttgaccagatcagaaaatctgatggcaccctacaggaacatgacggtatctgcgagatccatgttgctaaatatgctgaaatattcggattgacctctgcggaagccagtaaggatatacggcaggcattgaagagtttcgcggggaaggaagtggttttttatcgccctgaagaggatgccggcgatgaaaaaggctatgaatcttttccttggtttatcaaacgtgcgcacagtccatccagagggctttacagtgtacatatcaacccatatctcattcccttctttatcgggttacagaaccggtttacgcagtttcggcttagtgaaacaaaagaaatcaccaatccgtatgccatgcgtttatacgaatccctgtgtcagtatcgtaagccggatggctcaggcatcgtctctctgaaaatcgactggatcatagagcgttaccagctgcctcaaagttaccagcgtatgcctgacttccgccgccgcttcctgcaggtctgtgttaatgagatcaacagcagaactccaatgcgcgggggatctcacaccccaaccggattcagcacgcaaggcataattaattatttttctttcttcgcggtggcggccgccagagggggagaggcccaaaacgcgcgaaaaacacaatcgcttcgtggaaacaacaacagggcttatgagaggcaaaaatcagagaaacctaggacaaaaatagtgggtatcctctacagtcggctggattcagccagtaggcctttttcttcggtttgcctatttagcgtgctcaccacgaaatgcccagacccccggcgcacaccgtgtgcctggcacactggacaccaactcggacccgccaccacccacaccgccggcaagggcgcgcccacgcggcccccgctggtccagaccgcccgcaacaaacccaatggacaaccccgaagcaccccacacccccaccgcgtacagaaaggcggcgcgcacacgaaccgcacccgcccccgcaagcgcgggccaacgcgccgaacaccgcgaaggaaccgcgacgccaccagagccaccacgcagcccacgccaccaccgggcgcggcagccaggagccgaacgcccccacacacaccaccccgccaacgcaaccgccgcaacgccggcgcaaccgacgccacgaccagcgacggcagccccggagagcccgggcgagcaagggcccacaccaacgcccccccgagagcggccacaccccggcccggccccaaacgaccgcgagagcgaagaaaaaggaaagaaacacgaaacgtggcttga

SEQ ID NO: 119333 - DNA, 6604 bp, Homo sapiens
atgaagcgtgcgcctgttattccaaaacatacgctcaatactcaaccggttgaagatacttcgttatcgacaccagctgccccgatggtggattcgttaattgcgcgcgtaggagtaatggctcgcggtaatgccattactttgcctgtatgtggtcgggatgtgaagtttactcttgaagtgctccggggtgatagtgttgagaagacctctcgggtatggtcaggtaatgaacgtgaccaggagctgcttactgaggacgcactggatgatctcatcccttcttttctactgactggtcaacagacaccggcgttcggtcgaagagtatctggtgtcatagaaattgccgatgggagtcgccgtcgtaaagctgctgcacttaccgaaagtgattatcgtgttctggttggcgagctggatgatgagcagatggctgcattatccagattgggtaacgattatcgcccaacaagtgcttatgaacgtggaatacaaactaccatcagagaatactataaacacctctatgcaaataaactagaaaatctagaagaaaaggataaattcctggacacatacaccatcccaatactaaaccaggaagaagttgaatccctgaatagaccaataataggctctgaaattgaggcaataattaccaaccaaaaaaagtccaggactggacggattcacagccgaattcaaacagagaagccaggacttactgtgcaagaaatggaaaatagccccaaaggcattttggagatcatttggggctacccttcccatcacaaatgcataatacaagggcgtggaggacagaatgggggcaccactgcccagtacaacctcacattactggctctgctccccaaattctgttgccacactccttggctgcccaagtgtgactctgccaaaccggattcagcaactcagcttgtcctactttcacaaggatccgtcagggcggaaccaccggttatcaatcacaagaaacgtaaaaatagcccgcgaatcgtccagtcaaacgccctcactgaggcggcaaatagtctctcccgggatcaaaaacgtatgctgtatctgttcgttgaccagatcagaaaatctgatggcaccctacaggaacatgacggtatctgcgagatccatgttgctaaatatgctgaaatattcggattgacctctgcggaagccagtaaggatatacggcaggcattgaagagtttcgcggggaaggaagtggttttttatcgccctgaagaggatgccggcgatgaaaaaggctatgaatcttttccttggtttatcaaacgtgcgcacagtccatccagagggctttacagtgtacatatcaacccatatctcattcccttctttatcgggttacagaaccggtttacgcagtttcggcttagtgaaacaaaagaaatcaccaatccgtatgccatgcgtttatacgaatccctgtgtcagtatcgtaagccggatggctcaggcatcgtctctctgaaaatcgactggatcatagagcgttaccagctgcctcaaagttaccagcgtatgcctgacttccgccgccgcttcctgcagtcacatggatctgtcatggcggaaacagacggttatcaatcacaagaaacgtaaaaatagcccgcgaatcgtccagtcaaacgacctcactgaggcggcatatagtctctcccgggatcaaaaacgtatgctgtatctgttcgttgaccacatcagaaaatctgatggcgccctacaggaacatgacggtatctgcgagatccatgttgctaaatatgctgaaatattcggattgacctctgcggaagccagtaaggatatacggcaggcattgaagagtttcgcggggaaggaagtggttttttatcgccctgaagaggatgccggcgatgaaaaaggctatgaatcttttccttgggttatcaaacgtgcgcacagtccatccagagggctttacagtgtacatatcaacccatatctcattcccttctttatcgggttacacaaccggtttacgcactttcggcttagtgaaacaaaagagatcaccactccgtatgccatgcgtgtatacgaatccctgtgtccagatcgtaagccggatggctcaggcatcgtctctctggaaaatcgactggatcatagagcggtaccagctgcctcaaagttaccagcgtatgccctgacttccgccgccgcttcctgcaggatgttcagaatgaaactcatggaaacacttaaccagtgcataaacgctggtcatgaaatgacgaaggctatcgccattgcacagtttaatgatgacagcccggaagcgaggaaaataacccggcgctggagaataggtgaagcagcggatttagttggggtttcttctcaggctatcagagatgccgagaaagcagggcgactaccgcacccggatatggaaattcgaggacgggttgagcaacgtgttggttatacaattgaacaaattaatcatatgcgtgatgtgtttggtacgcgattgcgacgtgctgaagacgtatttccaccggtgatcggggttgctgcccataaaggtggcgtttacaaaacctcagtttctgttcatcttgctcaggatctggctctgaaggggctacgtgttttgctcgtggaaggtaacgacccccagggaacagcctcaatgtatcacggatgggtaccagatcttcatattcatgcagaagacactctcctgcctttctatcttggggaaaaggacgatgtcacttatgcaataaagcccacttgctggccggggcttgacattattccttcctgtctggctctgcaccgtattgaaactgagttaatgggcaaatttgatgaaggtaaactgcccaccgatccacacctgatgctccgactggccattgaaactgttgctcatgactatgatgtcatagttattgacagcgcgcctaacctgggtatcggcacgattaatgtcgtatgtgctgctgatgtgctgattgttcccacgcctgctgagttgtttgactacacctccgcactgcagtttttcgatatgcttcgtgatctgctcaagaacgttgatcttaaagggttcgagcctgatgccaccgaaacgagcgatcagggtcggcaaagctgtggagatgaaatgggcaacaccttccacactgcgagtaaagctcgcaatccgggtggaggcctccacgtcctagcgcagtccagtcccgggcgcagggaggagagctggtcagccaagattccaagacaggtgtccacctcctccaacgaagcggaacacgccaccaggttcatgtggaggctcccaggcgcccgcgccgcgcttcgggtgatccggacggcggtggagaagctgagccgggctgaagcggggagccagacagcggcgggagcgatggagcgcgctgtagtgcgctgcgtaccttcggaacccaagctgagcctgtcattcgctttggctgatggtagccacaagaacatgcagcgcgaccagagcgagccgctgggtcgagtcctcagccgcatcgctaccaatgccctaaagggtcacgctaaggcggccgccgccaagaagagcaggaagagccggccgaatgctagcggcggtgcggcctgttcagggccggggcctgagccggctgtgttctgcgagcccgtggtgaagctgtactaccgggaagaggcagtggctgaggacgtgctcaacgtggatgcctggcaagacggcgcggtgctgcagatcggcgatgttaagtacaaggtggagcgcaacccgcccgccttcaccgaactgcagttgccgcgctacatcatggccgggttccctgtgtgccccaaactcagcctcgaatttggggatcccgccagctcccttttccgctggtataaggaagccaagcccggagcggcggagcccgaggtcggtgtcccctcgtcattgtctccctcctcaccttcttcttcttggactgagactgatgtggaggagcgtgtctacaccccgtccaatgccgacatcgggctaaggctcaagcttcactgcaccccaggcgatgggcagcgctttgggcacagccgggagttggaaagtgtgtgtgtggtagaggctgggcctggcacctgcacttttgaccaccggcatctctacacgaagaaggtgactgaggacgctctcatccgcactgtctcttacaacatcctggcagacacgtacgcgcagactgagttctcgcgaacggttctgtacccatactgtgccccctacgccctggagctcgactaccgccagaaccttatccagaaggaactcaccggctacaacgccgatgtcatctgtttcaggagcttggtacccgccctagaggccttcgggctcgagggggtgtttcgaatcaagcagcacgaaggcctggccactttctaccgaaagtctaagttcagccttcttagccagcatgacatttcattctacgaagccctcgagtccgacccacttcacaaagaactgctggagaaactagttttgtacccatcagcgcaggagaaggtgctccagagatcttctgttcttcagcatataaacagaaccaaagacaaaaaccatatgattatctcaatagatgcggaaaaggcctttgacaaaattcaacagtgcttcatgctaaaaactctcaataaattaggtattgatgggacgtatctcaaaataataagagctatctatgacaaacccacagccaatatcatactgaatgggcaaaaactggaagcattccctttgaaaactggcacaagacagggatgccctctttcaccactcctattcaacaaagtgttagaagttctggccagggcaatcaggcaggagaaggaaataaagggtattcagttaggaaaagaggaagtcaaattgtccctgtttgcagatgacatgattgtatatctagaaaaccccattgtctcagcccaaaatctccttaagctgataggtaacttcagcaaagtctcagaatacaaaatcaatgtgcaaaaatcacaagcattcttatacaccaataacagacaaacagagagccaaatcacgagtgaactcccattcacaattgcttcaaagagaataaaacacctaggaatccaacttacaagggacatgaaggacctcttcaaggagaactacaaaccactgctcaacaaaataaaagaggatacaaacaaatggaagaacattccatgctcatgggtaggaagaatcaatatcgtgaaaatggccatactgcccaaggtaatttatagattcaatgccatccccatcaagctaccaatgactttcttcacagaattggaaaaaactactttgaagttcatatggaaccaaaaaagagcctgcattgccaagtcaattctaagccaaaagaacaaagctggaggcatcacgctacctgacttcaaactgtactacaaggctacagtaaccaaaacagcatggtactggtaccaaaacagagatatagaccaatggaacagaacagaggcctcagaaataatgccgcatatctacaaccatctgatctttgacaaacctgagaaaaacaagcaatggggaaaggattccctatttaataaatggtgctgggaaaactggctagccatatgtagcaagctgaaactggatcccttccttacacctcatacaaaaactaattcaagatggattaaagacttaaatgttagacctaaaaccataaaaaccctagaagaaaacctaggcaataccattcaggacataggcatgggcaaggacttcaagcctaaaacaccaaaagcaatggcaacaaaagccaaaattgacaaatgggatctaattaaactaaagagcttctgcacagcaaaagaaactaccatcagagtgaacaggcaacctacagaatgggagaaaatttttgcaatctacccatctgacaaagggctagtatccagaatctacaatgaactcaaacaaatttacaagaaaaaaacaaacaaccccatcaaaaagtgggcaaaggacatgaacagacacttctcaaaagaagacatttttgcagccaaaagacacatgaaaaaatgctcatcatcactaatcatcaaagaaatgcaaatcaaaaccacaatgagataccatctcacaccagttagaatggcgatcattaaaaagtcaggaaacaacagtcaggcaccgtgtatgaaatctaacaatgcgctcatcgtcatcctcggcaccgtcaccctggatgctgtaggcataggcttggttatgccggtactgccgggcctcttgcgggatatcgtccattccgacagcatcgccagtcactatggcgtgctgctagcgctatatgcgttgatgcaatttctatgcgcacccgttctcggagcactgtccgaccgctttggccgccgcccagtcctgctcgcttcgctacttggagccactatcgactacgcgatcatggcgaccacacccgtcctgtggatctacccactagtcaattcaccatcttgttga

SEQ ID NO: 119334 - DNA, 6510 bp, Homo sapiens
  misc_feature (1)...(6510): n = a,t,c or g
atgaacatgaacatcaaaaaaattgtaaaacaagccacagttctgacttttacgactgcacttctggcaggaggagcgactcaagccttcgcgaaagaaaataaccaaaaagcatacaaagaaacgtacggcgtctctcatattacacgccatgatatgctgcagatccctaaacagcagcaaaacgaaaaataccaagtgcctcaattcgatcaatcaacgattaaaaatattgagtctgcaaaaggacttgatgtgtgggacagctggccgctgcaaaacgctgacggaacagtagctgaatacaacggctatcacgttgtgtttgctcttgcgggaagcccgaaagacgctgatgacacatcaatctacatgttttatcaaaaggtcggcgacaactcaatcgacagctggaaaaacgcgggccgtgtctttaaagacagcgataagttcgacgccaacgatccgatcctgaaagatcagacgcacgaatggtccggttctgcaccctttacatctgacggaaaaatccgtttattctacactgactattccggtaaacattacggcaaacaaagcctgacaacagcgcaggtaaatgtgtcaaaatctgatgacacactcaaaatcaacggagtggaagatcacaaaacgatttttgacggagacggaaaaacatatcagaacgttcagcagtttatcgatgaaggcaattatacatccggcgacaaccatacgctgagagaccctcactacgttgaagacaaaggccataaataccttgtattcgaagccaacacgggaacagaaaacggataccaaggcgaagaatctttatttaacaaagcgtactacggcggcggcacgaacttcttccgtaaagaaagccagaagcttcagcagagcgctaaaaaacgcgatgctgagttagcgaacggcgccctcggtatcatagagttaaataatgattacacattgaaaaaagtaatgaagccgctgatcacttcaaacacggtaactgatgaaatcgagcgcgcgaatgttttcaaaatgaacggcaaatggtacttgttcactgattcacgcggttcaaaaatgacgatcgatggatgccagcctacgtgttctgaggctttgcagaactttcaacggtataccggcatacagcatgtgcatcgcataggaatggcggaacgtatgtggtgtgaccggaacagagaacgtcacaccgtcagcagcagcggcggcacccgcctccccaatccaggtcctgcccgttctgaacattttgaggcatttcagtcagttgctcaatgtacctataaccagaccgttcagctggatattacggcctttttaaagaccgtaaagaaaaataagcacaagttttatccggcctttattcacattcttgcccgcctgatgaatgctcatccggagttccgtatggcaatgaaagacggtgagctggtgatatgggatagtgttcacccttgttacaccgttttccatgagcaaactgaaacgttttcatcgctctggagtgaataccacgacgatttccggcagtttctacacatatattcgcaagatgtggcgtgttacggtgaaaacctggcctatttccctaaagggtttattgagaatatgtttttcgtctcagccaatccctggtcttccttagagctagcagtgatcatgggaccaattctggccaataagtgtgacaatctaaaaacttgtcacacttcacatggatctgtcatggtcggaaacagcggttatcaattcccaagaaaaggtaaaattagcccgcgaatcgtccagttcaaaggacctcactgaggcggcaaaaagtctctcccgggatcaaaaacgtaagccgtatctgttcgttgcccagatcagaaaatctgagggcaccctacaggaaacatgacggtatctgcgagatccatgttgctaaatatgctgaaatattcggattgacctctgcggaagccagtaaggatatacggcaggcattgaagagtttcgcggggaaggaagtggttttttatcgccctgaagaggatgccggcgatgaaaaaggctatgaatcttttccttggtttatcaaacgtgcgcacagtccatccagagggctttacagtgtacatatcaacccatatctcattcccttctttatcgggttacagaaccggtttacgcagtttcggcttagtgaaacaaaagaaatcaccaatccgtatgcccatggcgttatacgaatccctgtgtcagtatcgtcggccggatggctcaagcatcggctctctgaaaatcgactggaatataaagcggttaccagctgcctcaaaagtaccaacgtatggcctgacttccggcgccgcttactgcaggtctgtgttaatgagatcaacagcagaactccaatgcgcctctcatacattgagaaaaagaacggccgccagacgactcatatcgatctggctctgaaggggctacgtgttttgctcgtggaaggtaacgacccccagggaacagcctcaatgtatcacggatgggtaccagatcttcatattcatgcagaagacactctcctgcctttctatcttggggaaaaggacgatgtcacttatgcaataaagcccacttgctggccggggcttgacattattccttcctgtctggctctgcaccgtattgaaactgagttaatgggcaaatttgatgaaggtaaactgcccaccgatccacacctgatgctccgactggccattgaaactgttgctcatgactatgatgtcatagttattgacagcgcgcctaacctgggtatcggcacgattaatgtcgtatgtgctgctgatgtgctgattgttcccacgcctgctgagttgtttgactacacctccgcactgcagtttttcgatatgcttcgtgatctgctcaagaacgttgatcttaaagggttcgagcctgatgtacgtattttgcttaccaaatacagcaatagtaatggctctcagtccccgtggatggaggagcaaattcgggatgcctggggaagcatggttctaaaaaatgttgtacgtgaaacggatgaagttggtaaagctgccccgatggtggattcgttaattgcgcgcgtaggagtaatggctcgcggtaatgccattactttgcctgtatgtggtcgggatgtgaagtttactcttgaagtgctccggggtgatagtgttgagaagacctctcgggtatggtcaggtaatgaacgtgaccaggagctgcttactgaggacgcactggatgatctcatcccttcttttctactgactggtcaacagacaccggcgttcggtcgaagagtatctggtgtcatagaaattgccgatgggagtcgccgtcgtaaagctgctgcacttaccgaaagtgattatcgtgttctggttggcgagctggatgatgagcagatggctgcattatccagattgggtaacgattatcgcccaacaagtgcttatgaacgtggtcagcgttatgcaagccgattgcagaatgaatttgctggaaatatttctgcgctggctgatgcggaaaatatttcacgtaagattattacccgctgtatcaacaccgccaaattgcctaaatcagttgttgctcttttttctcaccccggtgaactatctgcccggtcaggtgatgcacttcaaaaagcctttacagataaagaggaattacttaagcagcaggcatctaaccttcatgagcagaaaaaagctggggtgatatttgaagctgaagaagttatcactcttttaacttctgtgcttaaaacgtcatctgcatcaagaactagtttaagctcacgacatcagtttgctcctggagcgacagtattgtataagggcgataaaatggtgcttaacctggacaggtctnggtgtgacaatctaaaaacttgtcacacttcacatggatctgtcatggcggaaacagcggttatcaatcacaagaaacgtaaaaatagcccgcgaatcgtccagtcaaacgacctcactgaggcggcatatagtctctcccgggatcaaaaacgtatgctgtatctgttcgttgaccagatcagaaaatctgatggcaccctacaggaacatgacggtatctgcgagatccatgttgctaaatatgctgaaatattcggattgacctctgcggaagccagtaaggatatacggcaggcattgaagagtttcgcggggaaggaagtggttttttatcgccctgaagaggatgccggcgatgaaaaaggctatgaatcttttccttggtttatcaaacgaaatcccagaaagaggacagaacaaggcaaggcacagaacaaggttcagtggtggctgaccaggactcctgttatggtccagaagttcatcaatggggacgtcacgcggcttggagctccgatcgaggcgcaggcgctgatcgccacctacggccgtgatcgtgatcctggccggccgttgtggttggggtcggtcaagtcgaacatcggtcatacgcaagcggcggcgggtgtggctggtgtgatcaagatggtgatggcgatgcggcacgggcagctgccacgcacgttgcacgtggaatcgccgtcgccggaggtggattggtcggcggggacggttcaactccttacggagaacacgccctggcccaggagtggtcgtgttcgtcgggtgggggtgtcgtcgttcgggatcagtggtactaacgcgcacgtcatcctcgaacagcccccgggagtgccgagtcagtctgcggggccgggttcgggttctgtcgtggatgttccggtggtgccgtggatggtgtcgggcaaaacacccgaagcgctatccgcgcaggcaacggcgttgatgacctatctggacgagcgacctgatgtctcctcgctggatgttgggtactcgctggcgttgacacggtcggcgctggatgagcgagcggtggtgctggggtcggaccgtgaaacgttgctgtgcggtgtgaaagcgctgtctgccggtcatgaggcttctggntgtgacaatctaaaaacttgtcacacttcacatggatctgtcatggcggaaacagcggttatcaatcacaagaaacgtaaaaatagcccgcgaatcgtccagtcaaacgacctcactgaggcggcatatagtctctcccgggatcaaaaacgtatgctgtatctgttcgttgaccagatcagaaaatctgatggcaccctacaggaacatgacggtatctgcgagatccatgttgctaaatatgctgaaatattcggattgacctctgcggaagccagtaaggatatacggcaggcattgaagagtttcgcggggaaggaagtggttttttatcgccctgaagaggatgccggcgatgaaaaaggctatgaatcttttccttggtttatcaaacgtgcgcacagtccatccagagggctttacagtgtacatatcaacccatatctcattcccttctttatcgggttacagaaccggtttacgcagtttcggcttagtgaaacaaaagaaatcaccaatccgtatgccatgcgtttatacgaatccctgtgtcagtatcgtaagccggatggctcaggcatcgtctctctgaaaatcgactggatcatagagcgttaccagctgcctcaaagttaccagcgtatgcctgacttccgccgccgcttcctgcaggtctgtgttaatgagatcaacagcagaactccaatgcgcctctcatacattgagaaaaagaaaggccgccagacgactcatatcaagacactctcctgcctttcttgttggggaaaaggacgataacacttatgcaataaagcccacttgctggccggggcttgacattattccttcctgtctggctctgcaccgtattgaaactgagttaatgggcaaatttgatgaaggtaaactgcccaccgatccacacctgatgctccgactggccattgaaactgttgctcatgactatgatgtcatagttattgacagcgcgcctaacctgggtatcggcacgattaatgtcgtatgtgctgctgatgtgctgattgttcccacgcctgctgagttgtttgactacacctccgcactgcagtttttcgatatgcttcgtgatctgctcaagaacgttgatcttaaagggttcgagcctgatgtacgtattttgcttaccaaatacagcaatagtaatggctctcagtccccgtggatggaggagcaaattcgggatgcctggggaagcatggttctaaaaaatgttgtacgtgaaacggatgaagttggtaaaggtcagatccggatgagaactgtttttgaacaggccattgatcaacgctcttcaactggtgcctggagaaatgctctttctatttgggaacctgtctgcaatgaaaatttcgatcgtctgattaaaccaccctgggagattagataa

SEQ ID NO: 119335 - DNA, 231 bp, Homo sapiens
aatcatcttgccgttcgtcggttaaccgagctttccggcggtcagcgccagcgcgcatttctggcaatggtcctggcccagaatacgcccgttgtattacttgatgagccaaccacctatcttgatatcaatcaccaggtggacctgatgcggttgatgggcgaactccggactcagggtaaaacggtggtcgattaagtgcgcgaccttaatcaggttagccggtactgc

SEQ ID NO: 119336 - DNA, 306 bp, Homo sapiens
tgcttacgaattctatgtccgtacccgtacatcccgctgactgagaaaaccctggcctgacccgcgttatataccttggagctcacggccgatatggctgagacctgtaagcaatttctccctgagttttctctgactttctctttccagcgcggctgggagaaagagacagaatatgctgaggtgctggaacgtaattttgaacgcgatcgccagctaacctacaccgcgcacggcccgcacaaagcggacttacgcattcaggaatccggggttccatacaacgaaattttggttaccttgtga

SEQ ID NO: 119337 - DNA, 273 bp, Homo sapiens
acgaattcgagcgtcggacccggagatcgtctgctgtaacaaactgccgcgccgcatcgggggaagctgaaagttttcttcggtgcctgtgcaggcgtcgggaagacctgggcgatgctggcagaagcccagcgactgcgggcgcaagggctggatattgtggttggcgtggtagaaacccacgggcgaaaagataccgccgccatgctggaagggctggctgttctgccgttaaaacgccaggcgtaccgtgggcggcatatcagcgagttt

SEQ ID NO: 119338 - DNA, 2553 bp, Homo sapiens
ttagtgtggtaattcacacgccagcaaaaactctgccgttccttcatcaacaatcaggtccgtgacatatcctcccagcagggcacccaacgttgcgtcatagcctctttccccaccagcaaggaagatcttccgttcaatctgccttaggtgcagcgagcggcaacggcctgaaacttgtaggccgattcgaatggggtccaagtcgccgggcgcgatctggataccctgatgccacaggatatgatcaacgccaagccgatttccgcagcagtgaaagagttcttcggttccagccagctgtctcagtttatggaccagaacaacccgctgtctgagattacgcacaaacgtcgtatctccgcactcggcccaggcggtctgacccgtgaacgtgcaggcttcgaagttcgagacgtacacccgactcactacggtcgcgtatgtccaatcgaaacccctgaaggtccgaacatcggtctgatcaactctctgtccgtgtacgcacagactaacgaatacggcttccttgagactccgtatcgtaaagtgaccgacggtgttgtaactgacgaaattcactacctgtctgctatcgaagaaggcaactacgttatcgcccaggcgaactccaacttggatgaagaaggccacttcgtagaagacctggtaacttgccgtagcaaaggcgaatccagcttgttcagccgcgaccaggttgactacatggacgtatccacccagcaggtggtatccgtcggtgcgtccctgatcccgttcctggaacacgatgacgccaaccgtgcattgatgggtgcgaacatgcaacgtcaggccgttccgactctgcgcgctgataagccgctggttggtactggtatggaacgtgctgttgccgttgactccggtgtaagtggtggtgtcgttcagtacgtggatgcttcccgtatcggtatcaaagtaacgaagacgagatgtatccgggtgaagcaggtatcgacatctacaaccttgcctcttttcctgatggaatccaatcctcttttctggatggcggtactggtcagtgcgggtatccttggacaatggccgattggacgtctggcggataagtttggtcgactgctggtgttgcgtgttcaggtctttgtcgtcattctcggcagtatcgcgatgggttctctgggctttctctttggttgagatatccgggatctggatttcatgggtgatgcctttggtcgccagcaggcgcgccagtttggtgcgtgcatccgccgctttatccatcgccgtaccgagcatccgtaaaccttcttccggtgcgtgcatatgaatgccgtgggaagcgatcgccagatcccagcgccactgggcatgacggatatcgtcctgaattggcttcatttcagcttccgtcgcgcctgcatccagcgctgctttcgcttcgaagtgagcgtgaaccagttgatcttcaaccttgattttcaggtcgttaatcgactgcttacgttccgcgaccactttttgcaaggcagctttgtcctgggtatggcagttcgcacaagtctgggcgaagttatcaaacggattaccaattttatggtcggtgtagagtttgccttcggcgttctgcacttttggcatatggcagtcgatacaggtcacgttgtttttaccgtgaatgcccgctgtccaggtttcatattccgggtgctgcgctttcagcattggcgttttcgacagggagttagtccagtcagagaaggcaattttgtcgtaatactgctccatattttcgagctttgtttttgcagtcgagtatactcccatggcatgccgcaaacatcgattctggtcgaacgtcggcttctcaaaggttacaatggctccatcggcacgcatacgacgggaagggtactcggttgctttgggactatgcccccagacaccggcaaaacagtcggcctggagttccatacgcacagataagcggtttacttccgcctgcgtcgcgttttgttgcagttgacgaactttcggctcgatgcctaacagtttctgcacatgatgaccgacttcatgggcgataacgtacccctgggcaaaatcgccatccgcgccaagtttgtctttcatgtcatcatagaaggagagatcgatataaaccgtgccatccgccgggcaatagaacggccccattatggactggcccgccccgcagccggtacgcgtcattccacggtacatgaccagcttcggttgctgataggtcttacccatcttctcgaactgttgtccccaggtgtcttccgtggttgccagaatcaccgaggtgaattttgcggcttcgtcttcatttgggctaattgaccgcgttgattgttgttgggaaaccggctgcccggtcatcaacccggttaaatcaacaccatagtagcctgcaaccagcacgactatcagtaaaatcagcccgcctttaccgcttggcaggcgaaaaccggggacagcccatagatggaccaccagagctgttgcgcctgtcttcaacat

SEQ ID NO: 119339 - DNA, 862 bp, Homo sapiens
atgccaagttttgcatggcttcaagttcttcgacataaatgcccgggttacctgtttgacttcctgaccgaatacctgtttaaagcgcacagcttcctgagcagaacacaccacaccatcaaggccacatttttgcgtcagtgccgccagacgttctgcataatctgccaggtgacagtgtcatgccaagatcgaccaggtcgctggcttccatgctggtcaacactgtcacagcattcaaaagcggtgcatctttgcctaacggaaccagtgcctcacgcgctggggtcatcatacgcgccccaccagaggcatgaacattctccatccacacgccttattcagctgcagcagcgacagcgtgcgctgcagtgttggggatatcgtggcctttcagctttcaggccgtgtcgcctcgctgcacgtgcccgccgtggtatcaagcgccagactggccatggagttacaggcagagcctattattcgatcgaattttgacgttctgactcgctgtacgaaagccttttttgtcgtgggtaacgcgcttgatgaaaatcccctgattcgggtgggcgtgctgaataagaaggaaatgcagacgtatcgggatttaggcgcagtaggtgtcatttgtggtcgcttctatgacaaggaagggatgcccgtcgtggctgatgttgaccagcgtattctgggaatcagtctggctcagctaaggcagattgaacggaagatcttccttgctggtggggaaagaggctatgacgcaacgttgggtgccctgctgggaggatatgtcacggacctgattgttgatgaaggaacggcagagtttttgctggcgtgtgaattaccacactaa

SEQ ID NO: 119340 - DNA, 579 bp, Homo sapiens
gacccacgcgattgacgcctgaaggtcgccaaatagatggtcacattgtttgggccacagtttgtgcgcgaacttcaacagcgtggttttgatatctttcttgacctgaaattccacgatatccccaacactgcagcgcacgctgtcgctgctgcagctgacttaggcgtgtggatggtgaatgttcatgcctctggtggggcgcgtatgatgaccgcagcgcgtgaggcactggttccgtttcgccccgatgcaccgcttttgattgctgtgccagtatgacgcagcataaaagccagcgacctggtcgatcttggcatgacactgtcacctgcagattatgcagaacgtctggcggcactgacgcaaaaatgtggccttgatggtgtggtgtgttctgctcaggaagctgtgcgctttaaacaggtattcggtcaggagttcaaactggttacgccgggcattcgtccgcaggggagtgaagctggtgaccagcgccgcattatgacgccagaacaggcgttgtcggctggggttgaatatatggagaatgggcgcccgggaacgcaatcggtaaaa

SEQ ID NO: 119341 - DNA, 1101 bp, Homo sapiens
tttcgtggggaagggccccaggcaggctgaggattctaggtgcggggcgggaaggaggaccggccgaaccttgggtgagggacagagggcgtgcgtgtggtgtgtccccaagggcaggaaggtggcgaagggaggcgaatccgagtgggtggagggaggggaagggcgggaggagaaaaaggtgggaggaggaccaggtgggagggtggcggctcactcaggacccaccgggggcagcgcgatgaggcgggtgaccctgttcctgaacggcagccccaacaacggaaaggcgggtgctggatatggaactttatccgatttgctttctgggggcagcagtaaacccggcataaaagccaccaatgtgtataatgggaaaggtggactgattgatgatattgctttgatcagggatgatgatgttttgtttgtttgtgaaggagaatcatttattgatcctcagacagattctaagcctcctgagggattgttaggattccacacagactggctgacattaaatgttggagggcggtactttacaactacacgcattactcctaccaggcaaatctttgctgtgcaaatcttgaatgagctgatctctctggatcagtgcttgactgtgcgaatctccagggagtcaagatgctctgttctaatgcagaaggagcatccctgaaactgtgtaattttgaggatccttctggtcttaaagccaatttagaaggtgctaatctgaaaggtgtggatatggaaggaagtcagatgacaggaattaacctgagagtggctaccttaaaaaatgcaaagttgaagaactgtaacctcagaggagcaactctggcaggaactgatttagagaattgtgatctgtctgggtgtgatcttcaagaagccaacctgagagggtccaacgtgaagggagctatatttgaagagatgctgacaccactgcacatgtcacaaagtgtcagatgagaattttaggggctggaggaagatgtaaaagatgaaaatgttttccttatcacttttctttctccacccactcagttgtctagaagaaataacactgtaaggaaatttaaaaaaaaaaaa

SEQ ID NO: 119342 - DNA, 601 bp, Homo sapiens
aatacaggctgtcacagtcgtcgtcaaagtcattggtctcccgcagctggttaaacatgcgcttcatctcatcggtgatgttcatggagccgacctcatcgtccgagaaccggttcacctccccgtcctgctcagagatgtcatcatcggaagccaccttacgctctttctttttggggaccacctcgccctgcaggtcgatggtcggattgcagttggtgaaatcctcccagagcagcagcgtgtcttcattctcttcccacgtcaggctgtcacagtcgtcgtcaaagtcaaaggtctcccgcctggcaggtacttgagaaggttccgagaagagaagtttccgagaagagaaggttccgtgcttgaggctgggacttcccgagagcactctgtatgcccactgcagtgtttgaagccgcacacatgtgttctctggaacatcgcaccactccagcaaggtggctgtgggtatgtccattgtacagatgagaaaactttgagtcgtgccaggtgaaatgacttgttccttgtcaaagcctactggacactggcttcttttcctccaagggtctccagaggtcatctgtttcttcctcat

SEQ ID NO: 119343 - DNA, 603 bp, Homo sapiens
tcatgtaatctggcacatgccgaggaagacctcaaagtgccggcaacttctgtgctctggggcgtccagaaatgcagacacagccgccaggcaaagcacctgctcctcccatcgcccccctggcaaaatccccagtctgggtccacggagagtcccaggctgcagctctgtgccaagcagccgaggggaacagagcacgggctcgccagctgcccccaggtgtggagacgtgacgcacacagaggcctcccaggaggagcagccatgactccgggggacacatgggccagcttcaaccccagagcagggcacagcaaaagccaaggtgagggacaggagagcagtggtgcatccaggcaagacaggcatcccgtcagccgctgggtagaaaggcagagggaggcctggggagcccccaggagcagcagtgcaggtggagtaaaggttgctgcgaccacagaaagggaacccgagtttaaaataaagactggaaaggcgtgaagcaaaggaaagaggctttctgctctcgttcagcatccttttcccagagcagggaggtagggtgcccgctatgatggcaggggccggacttacagcaccaca

SEQ ID NO: 119344 - DNA, 1185 bp, Homo sapiens
gcaggccgtgccttcactgacaggaatggcttttctaatcatttccctgatttctgctctttcaaacagggtaacttctttcaaaatattggttccatcacctaaatcttggctgttctccagggttttttttttgttttaatgctttaatatgtggaccaagtgacacacattacagaatctccccttccctctgtctcttacagttttgcgtttggctccctaatatctgctgtcgatccagtggccactattgccattttcaatgcacttcatgtggaagaagatacagaaaaggggcatgtcagacttacccccgcctccccctccacctttttttttttttttagtacagaagaaaaatatgctcctgggagctgttgtcggaaagcagcagttttgtgacttctccacatctcccatcaactctccctcgattctccttccttgacagttgtcatttacgtgctgaagcatattgacttgaggaaaacgccttcctgcaggcattgtgagatctgagttggggatcacacggcagtgctttctgttctgttctctccctctctaggcatcatggccatccttttctcaggcatcgtgatgtcccactacacgcccagggaagccagcccatgaagctgctgcctcttcactgtgtcctctcacactgtttgctgtcacccaggcctgcggggagccatcccctatgccctgagcctacacctggacctggagcccatggagaagcggcagctcatcggcaccaccaccatcgtcatcgtgctcttcaccatcctgctgctgggcggcagcaccatgcccctcattcgcctcatggggcttccaggaggtgccccccgatggtgccagctggtggccgtcgggccgcctttcctccctgctcagggcaacactgtggagtcggagcacctgtcggagctcacggaggaggagtacgaggcccactacatcaggcggcaggaccagctcagtttgttcaactgaaactgaagttgcctgtggccatcaccctgcctcccacctcctccctagacaccccacacaaaacacccagtagcatcccctcccttccatggccctgcccctgacgccctgacggcttggttgtgtctctcgacccaggacctgcaccacgggcgcatccagatgaaaactctcacc

SEQ ID NO: 119345 - DNA, 254 bp, Homo sapiens
atgagtctgcgggagacagcagagcttggaggctgggctgtgaggagcggcgacgccctttgctgtcttcccgaggccctggagtgccgtgcgtgtgaaggagtacgggtatacgcggctgcacatcctcaacgggacccacatccacatccagcaggtgtcggacgaccaggcctttgctcagtgccaccctccctgaccctcttgttaaaacagctccacctaaccggaggtcatcaggttcggtgaaataa

SEQ ID NO: 119346 - DNA, 308 bp, Homo sapiens
ctacggccgccgtgcgctggaatcctgcagatctacctcgatttcctattttccactatctttgtagaatccactccccttctttccacagcgcaggtaatactggctttcgatacacgtattctaacctggctgacacctggagaggacaggcccgaatcttccgccaggtgcacggctggccactcgaccaactaccagactgcctgctgcgagtcccagaggacgagacacaacccctccccattcctatctctttctactcagagaccgaggcaaaaggagaggcgccctacatagagccagag

SEQ ID NO: 119347 - DNA, 1078 bp, Homo sapiens
aatacacgccctccaacaccaccaggcatttatttttcattttcctacaattataaatatcagtcctcctctcccagctgtttctgaaggaattacagagaaacatgatttgaaatggacaaggcttccctcactcactcacttcccagtgtgcagttctctgcagctggatgaacaaaaaaatcccctacctcgatttcctattttccactatctttgtagaatccactccccttctttccacagcgcaggtaatactggctttcgatacacgtattctaacctggcgtaagttttcagttgtttcaaagtggtacctaacaagctcactcgctcttctacgaagccagggctcaggtaccagtagcgtccggccccctgctccgcagtgacacctggagaggacaggcccgaatcttccgccaggtgcacggctgtccactcgaccaactaccagactgcctgctgcgagtcccagaggacgagacacaacccctccccattcctatctctttctactcagagaccgaggcaaaaggagaggcgccctacatagagccagagaaactggatgcacccgcggtcgcgactgccaccgctcacggacttagcgccctccggagaaaaaggagaggggtagaagggttaggggaagaaggggaggggggggaaaaagaaggagaaggaagagaaagaagcggaagggaagtaaaggaagagaggatgctgctgctgctgctgctgctgcccagagcccgcgcacccgagcgcccgccccagactgagagcggcgcccccagccggctcccagcgcacgagctccgcctcggcccctcctccccgccccgcgcaggtcccgccccgcgcaggtcccgccagactccgcgagcccgtgggcggccgcggcggggctggcgctgccaccgccgcagtgtccgggagggggagcacgaccgcttcgccttctgccgcagccgccggcgccaggggggaccgcgaggtgggagcctcggagaccccgcccagccgctgcgccgggccttctccagagccctggtcccctcccgcgacaaagtga

SEQ ID NO: 119348 - DNA, 1671 bp, Homo sapiens; identical to SEQ ID NO: 114304

SEQ ID NO: 119349 - DNA, 954 bp, Homo sapiens
atgcaccttaccatcccattaaaacctaatcacccttaccccactcaatgccaatatcccatcccacggcatgctttaaaaagattaaagcctgttatcactcgcctgctacagcacggccttttaaggcctataaactccccttacaattcccccattttacctgttcaaaaaccagacaaggcttacaggttagttcagaatctgccccttatcaaccaaattgttttgcctatccaccccgtggtgccaaacccatatactctcctatcctcaatacctccctccacaacccatttttctgttctggatctcaaacatgctttctttactattcctttgtaccctttatcccagcctctcttcgctttcacttggactgaccctgacacccatcaggctcagcaaattacctgggccgtactgccgcaagccttcacagacagcccccacttcaaatcacccaagcagcttctcaggctcttggtattcagtggaaacttcatatcccttatcgtcttcaatcttcaggaaaggcagaacggactcgtggtctttgaaagacacacctcaccaagctcagcctccaacttaaaaaggactggacagtacttttacctcttgcccttctcagaattaagagcctgtcctcgagatgctacagggtacagtccatttgaacttgtatacggatgcgctttcttactcagccccaacctcgtcccagacaccagccccctagacaggtccagcaaaacgtccccagacatttcacaccagcaagctgccgccctcctccacacttacataaaaaacctttctccttatatcaactctactccccccatatttggacctctcacaacacaaactactattcctgtggccactcctttatgtatctctcagcaaagacccactggaattcccctgggtaacctttcaccttcttga

SEQ ID NO: 119350 - DNA, 1080 bp, Homo sapiens
atggaagtctatacgcagaaagcatactggagggtgcccctgggatcaaccgtgggggaccaaggaggtcatggccggttcattcatccatttgccatcaaaattgaacaagggagtacaaacagatgccccagtggatcacctgctaccaagtatgtccttctctgcctccatggtgaaaaagtagacctacttcctgctgatcagcaaagtatattctcaccaggaagaagcacacaggggcacttaattagcataacaggtgtcctgatgaacaggcattcgacgtacatggataaagaaaaagtgaaaatggtcactgctttgtggacagatgaagaactgtccaaactcacctggacgcgcatgaaatttgatgccatgactcaattgggagacctcccttgggagatcaatcccctgtcctcctgctctctgctccgtgagaaagatccacctacgacctcaggtcctcagaccgaccagcccaaggaacatctcaccaatttcaaatccacaaccaatcatgcaccccttaccatcccattaaaacctaatcactcttatcccgctgaatgccaatatcccgtcccacagcacgctttaaaaggattaaagtctattatcactcgcctgctacagcatggccttctaaagcctataaactgcccttacaattcccccattttacctgtcctaaaaccagacaaggcttacaggttacttcaggatctgcgccttatcaaccaaattgttttgtctatccaccccgtgttgccaaaaccaaatactctcctatcctcaatacctccctccacaacccattactctgttctggatctcaaacatgctttctttactattcctttgcacctttcatcccagcctctcttcgctttcacttggactgaccctgacacccatcaggctcagcaaattacgtgggctgtactgccacaaggcttcacagacagcccccattacttcaatcaagcccaaatttcttcctcatctgttacctatctcggcataattctcatgaaaacccacgtgctctccctgctgatcgtgtctggctaa

SEQ ID NO: 119351 - DNA, 1423 bp, Homo sapiens
gttctctaggcttgagtgccttgaccatatagaaaagaggctagatgaggcatcttgtaaaaatctctccgaatctggagatctaggatttgatgaaaccggcaattatcacagcaatggtggcagcactggctgcctcagaaggttaaatgtggaaataaactgccatactcacaaaagaaagaatattttgaaagttaagtgtgaaatagacagtacaccccaagagagagaaggttcagagctggctgctcgtaaggatgagacagccttggctgttactgggaaaactcccgttatggaagtcttacatgactattcatacggggattgggaagaggcgttactatcgggtgtccataagaggggacgaaggagagaatccaggaaacaaaatcgtattataaacctagaaacaggtgcatggcagccaagcaggaccacaagggaaaatgtcaggcggtcaggaggaacaaaggaggagcaagcccgccatctccctgtgagacgcttccccggagcgaacccagcctttgtgactccagatcagctgaaagtagaacaaagacaagcaacctctcttgcatcccggcatcactacagcaagtttgtgggccacgtgaatttatctggtcgggcaatcattgtcaccctttcttaccaatcaccagatgttatggctgtctctgctaccactactgtatggaaaactcaatcctatagaattcttgtcagagaaatcctactcctgtttgtcagagatccacgcttccatttttctggtgtgagcttttgtggcaaagccagtaccaatgtcactgaagggcagaaacagctgaagactgacactgcccaatcgccttggaagccccctagaccatcacggatgcccgagcttcgagtaactctcacagtggagggccaatatcccatcccacagctcgctttaaaaagattaaagcctgttatcactcgcctgctacagcatggccttttagagcctataagctctccttacaattcccccattttacctgtcctaaaaccagacaagccttacaagttagttcaggatctgcgccttgtcaaccaaattgttttgcctatccaccccatggtgccaaacccatatacactcctatcctcaatacctccctccacaacccattattctgttctggatctcaaacattctttcgttactattcctttgcacccttcatcccagcctctcttcactttcacttggactgaccctgacacccatcaggctcagcaaatcacctgggctgtactaccacaaggcttcacagacagcccccattacttcagtcaagcccaaatttcatcctcatctgttacctatctcgggataattctcataaaaacacacgtgctctccctgctgatcgtgttcgactga

SEQ ID NO: 119352 - DNA, 386 bp, Homo sapiens
accgtcacggacgccgagcttcgggtaactctcacagtggaagcacgctttaaaaagattaaagcctgttatcacttgcctgctacagcatggctttttaaagcctataaactctccttacaattccctcattttacctgtcctaaaaccagacaagccttacaagttagttcaggatctgcgccttatcaaccaaattgttttgcctatccaccccatggtgagccaggcgtgaagcagcaaagagtgtgtgagcaagtggacgtggggaccagccatagcacacagccaggagcaccagcacaggcgcgagcaatgtgggaggctgtggctggaccaggtgtgcctcaagtggcttccgccttgggcgccagcatctggatgag

SEQ ID NO: 119353 - DNA, 630 bp, Homo sapiens
tgtgaaataaaaaacagaaaagcagctgaaaaagtcaataaaaccaaaggtaaattctttgagatcaatacctatcctgggcccataaaaaccggagaacctagtgggcagacacagaagtggctggacatcgtgaggaacacactggtggaagaagacacaagcagctggtcatggagagcccaccagccgaagagcacgctgacggggaccggcaggccatcaaccaatggcacaatgtcaagtttggccagaacagtcagagaagagccaggcaaccagcccaactacagaggaaaaccatctcccttctggttcccccatctggtgagagctgcttctactcaacctgttatcactcgcctgctacagcatggccgtttaaagcctataaactctccttacaatttccccattttacctgtcctaaaaccagacaagccttacaagttagttcaggatctgcaccttatcaaccaaattgttttgcctatccaccccgtggtgccaaatccatatactctcctatcctcaatacctgcctctacaacccattattctgttctggatctcaaacatgctttctttactattcctttgcacccttaattccagcctctcttcactttc

SEQ ID NO: 119354 - DNA, 1080 bp, Homo sapiens
atgacctcaaacaagtccatagctccagattcccgtaatcatcggaagaaacggcatacaaaacaagcttttcgatacaccatctgcagtggaaccaccatcaaaatgcagatttttacaaaaactcttacagagaagaccatcaccctggaggttgaaacttcagatacaatagaaaatgtaaaggccaagatccaggataaggaaggaaatctgcctgcccacctgcacccaggtgaaataaacagctttattgctcacacaaagcctgtttggtggtctcttcacacagacacgcatgaaatttggtgctgtgactcggatcgggggaccacccttgggagatcaatcccctgtcctcctgttctttgttccaagagaaagatccacctacgaccttggtcctcagaccgaccagcccaagaaacatctcaccaatttcaaatccacctcctttgtgttctcctcttgtattcccccaccttaaccctcaagtatatctctactccctccttggcgaccgatcatgcaccccttaccatctcattaaaacctaatcacccttaccctgctcaatgccaatatcccatcccacagcatgctttgaaaggattaaagcctgctatcactcgcctgctacagcatggccttttaaagcctataaactctccttacaattcccccattttacctgtcctagaaccagagaagatttacaggttagttcaggatctgcgccttatcaaccaaattgttttgcctatccaccccgtggtgccaaacccatatactctcctatcctcaatacctccctccacaatccattattctgttctggatctcaaacgtgctttctttactattcctttgtacccttcatcccagcctctcttcgctttcacttggactgaccctgacacccttcaggctcagcaaattacctgggctgtactgccgcaaagcttcacagacagcccccattacttcagtcaagcccaaatttcttccttatctgttacctatctcagcataattctcataaaaacacacacgctctccctgctgatcatgtccgattaa

SEQ ID NO: 119355 - DNA, 2146 bp, Homo sapiens
ggacgccaaggggcgcttggaggaaagccgggctggggagctggccgcctatgtgcaggagaacctggaggccgcacagctggctggcgagctggcccggcaggagatgcatggagagctggtgctgctccgagagaagagccgggctctggaggcatccgtggcgcagctggccgggcagttaaaggagctgagtggccatctcccggctctgagcagccggctcgatctgcaggagcagatgctgggcctcaggctgtccgagggtagaggcctgacaggccggtcccaagcctcccgtcccacccagcgactgtccccagggcctgggagaccccgagccccagagactcctgtgtggggcaggacagccgctgagcagcctcggcccagcatctgcagcccggaggctgagaacagggagccttctggggaccgctgggctcgggagctcaggttgctgggctcctggaaggtgactgtgaggcccgagactgggcagcggggcagggcagtcctgcggaggcgggagtcgtggaggccccgtcagcccctcttctctcctaggctcctacaaccccctgaccctcggcctgttcacgctggtctacttcttcctggcctgctggacctacgggctcacggtgtctgccggggtcttcatcccgtccctgctcatcggggctgcctggggccggctctttgggatctccctgtcctacctcacgggggcggcggtgagtggggccggaggggaggctgtggggccctgcagctgagccaggtcttgcggcatcgcgggccggagcagaagtcccagggcaggacaaaagtgtcgcacctcacgtggttcacgggccgtgggcgttgtcctcgcgtggttcacgggccgtgggcgttgtcctgctgtggtggcagcgtgtactgtggcagcgcagcccatgtgtggagtctggaccaggcgaagggtagtgagtatcctgtgatgagaggtgctcacacagcagacaggtcattacttggaagtgatgctgcagaggacaatcaagagagtggcagctggcacgctttaaaaagattaaagcctgttatcactcgcctgctacagcatggccttttaaagcctataaactctccttacaattcccccatttcacctgtcctagaaccagagaagccttacaggttagttcaggatctgagccttatcaaccaaattgttttgcctatccaccccatggaattgttcaggcctcctccctttcctacacatcaagctcggggatttgcccctgcccaggactggcaaattgactttactcacatgccccgagtcaggaaactaaaatacctcttagtctgggtagacgctttcactggatggggaatgcaagcagaaacttctcctcttttgacacgttctccagatgatatggtgaccacgaagcctccactggtgatagccaggcaaagagggtctggagtggacttccaacgaactccagaagacctgcagcagaagggcctgactgttagaaggaaaactaataaacataaaggaatagcatcaacatcaacaaaaggaggtccacatgaaaaccccatccgaaggtcaccaacatcaaagaccaaagaaatacaaacttccatcagagaatactataaacacctctacacaaataaactagaaaatctagaagaaatggataaattcctggacacatacagcctcccaagactaaaccaggaagaagtcgaatccctgaatagatcaataacaagttctgaaagtgaggcagcaattaatagactaccaaccaaaaaaagcccaggaccagatggattcgcagccaaattctaccagaggtacaaagaggagctgtggcacaaatctaaaaaaaaatggacaatatcaaatattggtgaagaggagatggagcaaccagaacgctgtcacactcttgattggaacatacaacagtacgatcacaacagaaaatcatttgacagttccttaaaaagtgaaaatacacttactataggtcccagcctttcactcctatgtcactcctatttacccaagaaaaataaaagcatccgtccatacaaagagtctgtcacaatgtgtggacgagactatttgtaa

SEQ ID NO: 119356 - DNA, 858 bp, Homo sapiens
atgcatgaaatttggtgccgtgactccgatcgggggacctcccttgggagatcaatcccctgtcctcctgctctttgctctatgaaaaagatccacttacaacctcgggtcctcagacccaccagcccaaggaatatctcaccaattttaaatcggcagctgaagactgacgctgcccaatcgcctcggaagcctacaggatcatcacagacgctctgggtaactctcacagtggaggcatgctttaaaaggattaaagtctgttatcactcgcctgttatagcatggccttttaaagcctataaactctccttacaattcccccattgtacctgtcctaaaaccagacaagacttacaggaaggtggagtcattcactgcaaagaccatcaaaaggtgtcagatcccattgctgtaggcaaggcttatgctgataaggtggctagacaagcagctagctttccaacttctgtccctcacggccagtttttctccttcatatcagtcactcccatctactcccctgctgaaacttccacctatcaatctcttcccacacaaggcaaatgtttcttagaccaaggaaaatatctccttccagcctcacaggcccattctattctgtcgtcatttcataacctcgtccatgtaggttacaagccactagcccatctcttagaaactctcatttcctttccatcctggaaatctatcctcaaagaaatcacttctcagtgttctatttgctattctactaccgctcggggattgttcaggcttccttcctttcttacacatcaagctcgaggatttgcccctgcccaggactggcaaattgactttactcacatgccctga

SEQ ID NO: 119357 - DNA, 2082 bp, Homo sapiens
atggccaacctgctggagcagcatcaactggcccgccaattgttcaagaccatcaatcgctggctggccgaagcaggcgtcatgatgactcaaggcaccttggtcgatgccaccatcattgaggcacccagctcgaccaagaacaaagagcagcaacgcgatccggagatgcatcagaccaagaaaggcaatcagtggcactttggcatgaaggcccacattggtgtcgatgccaagagtggcctgacccacagcctggtcaccaccgcggccaacgagcatgacctcaatcagctgggtaatctgctgcatggagaggagcaatttgtctcagccgatgccggctaccaaggggcgccacagcgcgaggagctggccgaggtggatgtggactggctgatcgccgagcgccccggcaaggtaagaaccttgaaacagcatccacgcaagaacaaaacggccatcaacatcgaatacatgaaagccagcatccgggccagggtggagcacccatttcgcatcatcaagcgacagttcggcttcgtgaaagccagatacaaggggttgctgaaaaacgataaccaactggcgatgttattcacgctggccaacctgtttcgggcggaccaaatgatacatctgaattattatcacgatccccattcgacggaaattgaagaggatggcagcactatcagtgacgatgcggtgaagcaacggggtgaaataaaagtgggagtcacgggcaatatcagtcagcgagtgtccctgcgcggcagcgtggcgtggcagaaagggagtgatgattttgcccagacggcagggtttttgtcgatgacggtgaaatgccacagccctgattactatagtaaagcctgttatcactctcctgctacagcatggccttttaaagcctataaactctccttaccattcccccattttacctgtcctaaaaccagacaagccttacaagttagttcagaatctgcgccttatcaaccaaattgtttcgcctgtccaccccgtgtatttattcaggtacttaacccaatgaatattgcctatcgtaaacgggaagcggataaagtactggcaacccggctcgcgctgcgtacccaccgaattagttatatcacgctcatcgcggtgatcctgttttttgccttttcgtttaccttctcaattagccacgaagaagccgtttctgcctttgaacaaaatatctcagcactggcgctggccgcgcaggtgatccctgggcatatcattcatatcacctctacggtgcttaatatctttgccgtactgaccgcattctttggcatttatctcggtttccacgaggccattaaaggcattattctcaatctgttaagccgaattattgataccaagaaaattaactcacgcgtgctgactctggcgatctgcgcttttatcgtcattacgttgacgatttgggtttcgtttcgtgtatcggtgctggtgttctttcagttgggaagcccgttatatgttaaaaatggacagatcattaatcaaccaacaaacgcatttcagtctgatttcagccttgccgctttatggcgtaacgaaaatcatgctggggtaaaagatgcaaatcccgtggcagttaatcaggaaacacctaagctctctatagcgcttaatggcattgtactcacatcgaatgatgagacttcttttgtcttaattaatgaggggagcgaacaaaagcgatactccctcaacgaagcccttgagtcagcgccgggaacgtttattagaaaaataaataaaaccagcgttgtgtttgaaactcacgggcattacgaaaaagtaactctccatccagggctacctgacatcatcaagcagcctgattcagaaagtcaaaatgtactcgctgattatattatcgccacgcctatacgtgatggagaacagatatacgggcttcgattgaaccctcgtaagggcctcaatgcatttaccaccagcttgctacaaccagaggatatcgacctcaggatcaataatctatcgctgacccaacctgatgaggttcacaggcattaa

SEQ ID NO: 119358 - DNA, 936 bp, Homo sapiens
atgtgtcatttcctggagaaagcatttcctggagatagcacagaatactgccactatgtcctcctcttggtgtatggaaagcataagaacagacagagcctttctcagtccttgactaagaatactacagactggataatttgtaaagaagagagctttatttcttacagttctggaagttggggagttgaagggcatatggtgctggtgtctggtgagggcctttgggctgcatcatcccgttgtggaaaagtggaagggcaagttgttcctcgccaggccgagctaggtcccaattcttcctcagcctctgctcctccaccctataatctttttatcgcctcccctcctcacacctggtcgggcttacagtttcgttccgtgactagccctccccctcctgcccagcaatttactcttaaaaaggtggctggagctaaaggcatagtcaagcacgctttaaaaagattaaagcctgttatcactcgcctgctacagcatggccttttaaagcctataaactctccttacaattcccccattttacctgtcctaaaaccaggcaagccttacaagttagttcaggatctgcgccttatcaaccaaattgttttgcctatccaccccgtggtgccaaacccatatactctcctatcctcgatacctgcctctacaacccattattctgttctagatctcaaacatgctttctttactattcctttgcacccttcatcccagcctttcttcgctttcacttggactgaccctgacacccatcaggctcagcaaattacctgggctgtactgcctcaagtcttcacagacagcccccattacttcagtcaagcccaaatttcttcctcatctgttacctatctcagcgtaattctcataaaaacacacgtgctctccctgctgatcatgttcagctga

SEQ ID NO: 119359 - DNA, 957 bp, Homo sapiens
atggccaaagccgtcctgagcaaaaagaacaaaactggaagcaccacactacccgacttcaaaatatattacaaggatatagtaactgaagaacctggtattgaaaccctgaggcacacaagtagcacaaagttttccaaaggcctacctagtcgtgaatctttctcagagaagcaaaacaaaacaacaacccacctgcacccaggtgaaataaacagctttattgctcacacaaagcctgcttggaggtctcttcacacggacgcgcatgaaatttggtgccgtgactcggatcaggtgaactcccctgggagatcaatcccctgtcctcctgctctttgctccatgagaaagatccacctacgacctctggtcctcagaccagccagcccaaggaacatctcaccaattttaaatccgctacacctcattgctgcccttcttcccaatccaaagcctccttttcgtcctcctcttgtatcccccgaccttaacccacaagtaaaagatatctctactccctcctgggcaaccgatcatgtacacctcaccgtctcattaaaaccttatcacccttaccctgctcaatgccaatatcccatcccacagcacgctttgaaaggattaaagcctgttatcactcgcctgctacagcatggccttttaaagcctataaactctccttacaattcccacattttacctgtcctaaaaccagacaagccttacaagttagttcaggatctatgccttatcaacccaattgttttgcctatccaccccatggtgccaaacccatatactctcctatcctcaatacctccctccacaatccattattctgttctggatctcaaacatgctttctttactattcctttgcacccttcatcccagcctctctttgctttcacctggactgaccctgacattcatcaagctcagcaaattacctag

SEQ ID NO: 119360 - DNA, 1803 bp, Homo sapiens
  misc_feature (1)...(1803): n = a,t,c or g
atggaggctgagaagttccatcagatgccatctgtgagccggagaaccaggaaagccagtggtgtaattcagtccaaatctgagaacctgagaaccaggggagccaatagtcacgctttaaaaagattaaagcctgttatcactcgcctgctacagcatggccttttaaagcctataaactctccttacaattcccccattttacctgtcctaaaaccagacaagccttacaaacggtttctcgccttttacggttggagtccacgttctttaatagtggactcttgttccaaactggaacaacactcaaccctatctcgggttattcttgtgatttataagggattttgccgatttcggaaccaccatcaaacaggattttcgcctgctggggcaaaccagcgtggaccgcttgctgcaactctctcagggccaggcggtgaagggcaatcagctgttgcctgtctcactggtgaaaagaaaaaccaccctggcgcccaatacgcaaaccgcctctccccgcgcgttggccgattcattaatgcagctggcacgacaggtttcccgactggaaagcgggcagtgagcgcaacgcaattaatggattttgccgatttcggaaccaccatcacacaggattttcgcctgctggggcaaaccagcgtggaccgcttgctgcaactctctcagggccaggcggtgaagggcaatcagctgttgcctgtctcactggtgaaaagaaaaaccaccctggcgcccaatacgcaaaccgcctctccccgcgcgttggccgattcattaatgcagctggcacgacaggtttcccgactggaaagcgggcaatcttctcagcttagcagcttaagactgacactgcccgatcgcctcagaagccccctagaccatcacggacgccgagcttcaggtaactctcacagtggaagcccaaagcctccttcgtgtcttcctctcatatctccccaccttaacccacaagtatgggacatctctactccttccctggcaaccgatcacatgcccattaccatcccgttaaaatctaatcacccttaccccactcaacttaaagtgccaatatcccatcccgcagcatgctttaaaaagattaaagcctgttatcactcgcgtgctacagcatggcgttttaaagcctacaaactctccttacaattcccccattttacctgtcctaaaaccagacaagccttacaagttagttcaggatctgcgccttatcaaccacattgttttgttgcctatccaccccatggtgccaaacccatatactctcctatcctcaatacctccctccacaatccattattctgttctggatctcaaacatgctttctttactattcctttccacccttcatcccagcctctcttggctttcacttgggactgaccctgacatccatcaagctcagcaaattacctagggctgtactgccggcaaaggtttcccaggacaggcccccattacttcaatcaagcccaaatttcttcctcatctgttacctatctcggcataattctcataaaaacatacgtgctctccctgccaatcgtgtccgactgatctctcaaaccccagcaccttctacaaaacaacaactcctttccttcctaggcatggttagcgtggtcagaattcttacacaagagccaggaccgcaccctgtagcctttctgtccaaacaacttgaccttactgttttagcctagccctcatgtctgcgtgcagggctgccgtnttttaatacttttagagggcctcaa

SEQ ID NO: 119361 - DNA, 1847 bp, Homo sapiens
atggaggacagggtggggccgagtgaggagaggagccagcagaagttatccataacacctgccaggctggcgggtggtgacagtcttaaccctgctggaaggacaggtgacctcttagtggagacatcccctttgctggcagctgtcttcccagcccacgacaacagcctctgcaacaagccttactggttagttcaggatctgcgccttatcaaccaaattgttttgcctatccaccccatgatgttactaggggagatatcagtcaccaaggccttggctggctccctgataaaagcccttgcagtattccacactgcagaatccccaggctatgctctcctggattcttactacctgctccagaaagggagtgtttgcatctccatcctccaagaagaggaagcattttcttggccggggaaaggagagtgtcgagataagtcctgggcctctctgggcctaatacccgcatttccccagggaggacagtggaaacaggccctggggcttctggaccacagctgcctctgctttggggaattaggcaccaggttggcagccccagcatccttcagcaccttcccaataacaaaccgagagcgggagagaaaaactgacaagctgattccaaaattcatgtggaaatgcaagggacccagaataaccaaaacaatcttggaaaagaatgaagttggagaatttacacttcttgatttcaaaacttaccacaaatttgcagtaatcaaaactatgtggtactggcataaggacagatacattgatcaacagaatgacattgaaagtccagaaataaattcatatgtttatggtcaactgatttttgacaaagactcagcccgcctgcacccaggtgaaataaacagtcttgttgctcacacaaagcctgtttggtggtctcttcatatggacgcgcatgaaatttggtgccgtgactcggattgggggacctcccttgggagatcaatcccctgtcctcctgctctttgctccatgagaaagatccacctacgacctcgggtcctcagaccgaccagcccaaggaacatctcaccaatttcaaatccgggacacctctctgattatacacccacgtttcaagggtgtcagaccatgcagggacgcctgccttggtccttcacccttagcggcaagtctcgcttttctggggaaggggcaactcaacgccaatatcccatcccacagcaagctttgaaaggattaatgcctgctatcactcgcctgctacagcatgggccttttaaaccctataaactctccttacaattcccccatttttcctgtcctaaaacgagacaagccttacaagttagttcaggatctgcgccttatcaaccaaattggttttggcctatccaccccgtggtgccaaacccatatactcttctatcctcaatacctgcctctacaacccattattctgttcgtatatgtcaaacatgctttctttactattcctttgcacccttcatcccagcctctctccactttcacttggactgaccctgacacccattaaggctcaacaaattacctgggctgcactgccacaagggtttcacagacagcccccattacttcagtgaagcccaaatttcatcctcatctgttagtcatactcccgttcaccgttctcaactactcatacatgccctggctcttctttacactggccgggtttacactggtttctccaaggacatcacagctggatatctcctgggtgctatccccaaactggccacttctaaactcttgaagtaaataaataatctttgctggcaggactctgctgaatctcctta

SEQ ID NO: 119362 - DNA, 539 bp, Homo sapiens
tttttttttttttttttacagaaatgcggtttactttgtaggccacgttggttcaataaatgatgcagcggacacagcccgcccagccccggcgcccgcccgcgccctccctcgcggtcccggccccactcctccgcccctaggcgccgcggcaggtgtccgcggtgaccggcaggcagctgaggaagcggaagccgaatctgctctccgccgtgttctgcaccgacagggccaccagggggcagctacggtccacgctcttacgtcacacccgaactcggtgttctttctggagccgacagtcctccaggcccagcccggcctctgcgggaggcgacggcagggtggggtcacccgggatggcgggcaggtgctgcggcgcggggatctcggggttctcgggccgcgcaggcccctcccgcgcgtggaagagcttccccgagctcactgggggcagcaggccccgcgtccctggtctccggcgactgacccggggctcccgcacccggcctttgcgcaggggtcgaggtgggcgcggc

SEQ ID NO: 119363 - DNA, 2083 bp, Homo sapiens
atgcgcgttctctgatctgtagaatgcgttggggttgaggcagccatcactgtcctgccatgaactgagcctgggtactgggaggcaagaggggctccctgctgcactgccttgtgaggctggacgggggcagggctggggtctggagctggagtggccatcaagcagagcgtggtccacaggcagccccggccctggccacagctggacacagggagcccagagtcctctggaaagcattccgagcggcatcacaagaccgtggagtggggctccctgccctgtctgaacaccagcagctcagggggcgctgactccgactccagcagctgccggccgggcctgcacttccttcgtgcaggtgatagggcacccgcaccgggaccaccgcgcttcctccgagcaagcgctggtgcaggccgggagctacagcagggactcagaagatctccagaaaacccactcacccaggcacggcgagccggtcctgtcgccccagccctgcacagaccccgaccactggagcccggaactcctgcagagcccgacaggcctgaagatcgtggctgtgagctgccgggagaagttcgtccgcatcttcaacccgtcgcaggagagcacggccgacctgagcggcatggtgctgaagcagctggtgcgcggcttcccggagcgcctgtaccgcttcccgccgggcacgctgctggccccgcggcaccacgtcacggtctggggcgaggcgacccgcagcgccaagaagccgctgcgcgcgtcctcgagccgggagcccgttcccctcctctccatccgcggctgcgcgacgctgctcctgagccccaagggcgaggtcctcagtgagcaccggatcccacgccgcgagactccggccccgagggtcttcgccgacggcaccgacttgtccatcgaccgcttcccgctccctgaggccgggcccggcgccgacacccgcaagccgccgcgcccacctcgacccctgcgcaaaggccgggtgcgggagccccgggtcagtcgccggagaccagggacgcggggcctgctgcccccagtgagctcggggaagctcttccacgcgcgggaggggcctgcgcggcccgagaaccccgagatccccgcgccgcagcacctgcccgccatcccgggtgaccccaccctgccgtcgcctcccgcagaggccgggctgggcctggaggactgtcggctccagaaagaacaccgagttcggaactttctccactcagtaagggagatctacgaaaaactcacagaaccttctcccctcagtagggagatctacgaaaaactcacagaaccttctccactcggtagggagatctacgaaaaactcacagaactttctgcactcggtagggagatctacgaaaaactcacagaaccttctccactcggtagggagatctacgaaaaactcacagaaccttctccactcggtagggagatctacgaaaaactcacagaaccttctccactcggtagggagatctacgaaaaactcacagaaccttctccactcggtagggagatctacgaaaaactcacagaactttctgcactcggtagggagatctacaaaaaactcacagaactttctccactcggtagggagatctacgaaaaactcacagaaccttctccactcggtagggagatctacgaaaaactcacagaaccttctccactcggtagggagatctacgaaaaactcacagaactttctgcactcggtagggagatctacgaaaaactcacagaaccttctccactcggtagggagatctacgaaaaactcacagaactttctgcactcggtagggagatctacgaaaaactcacagaaacttctccactcggtagggagatctacgaaaaactcacagaaccttctccactcggtagggagatctacgaaaaactcacagaactttctgcactcggtagggagatctacaaaaaactcacagaactttctccactcgaagtctacacaaatgctaaaattcacagaatgtacactgcctcagaaaagtcaattttgccacgatga

SEQ ID NO: 119364 - DNA, 453 bp, Homo sapiens
gaaaatatttatgataactaaaatgtgatagctgatacattactgtggaaagctgtttgaatctttctctagagctttctaagactatcatggaatgctttctgtctagatgatttcttctaagcctgagattttcgggaaaatgattgcaaatttactgttttagtgactgccatatgtcaatttgttgtagaatttaaatgtgcctgattcatctctccctgctgaaaatgaagccactggccctggctttgttcctccacctcttgctccagtcagaggtccattgtttccagtgggatggcaagaggcccattcttgaggaagagggacctccttttccccccacctcctccagggagccatggtttggagcttctcgagattattttccaccaggggatttcccaggtccaccacctgctccatttgcaagtatggcttttttaaact

SEQ ID NO: 119365 - DNA, 2762 bp, Homo sapiens
gacaggccggggttactgtggcgaccacgagagcagctttggcgctatggaggagcccggggctacccctcaaccgtatttggggctgctcctggaggagctacgcagggttgtggcagcactgcctgaaggtatgagaccagattctaatctttatggttttccatgggaattggtgatatgtgcagctgttgttggattttttgctgttctcttttttttgtggagaagttttagatcggttaggagtcggctttatgtgggacgagagaaaaagcttgctctaatgctttctggactaattgaagaaaaaagtaaactacttgaaaaatttagccttgttcaaaaagagtatgaaggctatgaagtagagtcatctttaaaggatgccagctttgagaaggaggcaacagaagcacaaagtttggaggcaacctgtgaaaagctgaacaggtccaattctgaacttgaggatgaaatactctgtctagaaaaagagttaaaagaagagaaatccaaacattctgaacaagatgaattgatggcggatatttcaaaaaggatacagtctctagaagatgagtcaaaatccctcaaatcacaagtagctgaagccaaaatgaccttccagatatttcaaatgaatgaagaacgactgaagatagcaataaaagatgctttgaatgaaaattctcaacttcaggaaagccagaaacagcttttgcaagaagctgaagtatggaaagaacaagtgagtgaacttaataaacagaaagtaacatttgaagactccaaagtacatgcagaacaagttctaaatgataaagaaagtcacatcaagactctgactgaacgcttgttaaagatgaaagattgggctgctatgcttggagaagacataacggatgatgataacttggaattagaaatgaacagtgaatcggaaaatggtgcttacttagataatcctccaaaaggagctttgaagaaactgattcatgctgctaagttaaatgcttctttaaaaaccttagaaggagaaagaaaccaaatttatattcagttgtctgaagttgataaaacaaaggaagagcttacagagcatattaaaaatcttcagactcaacaagcatctttgcagtcagaaaacacacattttgaaaatgagaatcagaagcttcaacagaaacttaaagtaatgactgaattatatcaagaaaatgaaatgaaactccacaggaaattaacagtagaggaaaattatcggttagagaaagaagagaaactttctaaagtagatgaaaagatcagccatgccactgaagagctggagacctatagaaagcgagccaaagatcttgaagaagaattggagagaactattcattcttatcaagggcagattatttcccatgagaaaaaagcacatgataattggttggcagctcggaatgctgaaagaaacctcaatgatttaaggaaagaaaatgctcacaacagacaaaaattaactgaaacagagcttaaatttgaacttttagaaaaagatccttatgcactcgatgttccaaatacagcatttggcagaggctcacgaggcccagggaatcctctggaccatcagattaccaatgaaagaggagaatcaagctgtgataggttaaccgatcctcatagggctccctctgacactgggtctctgtcacctccatgggaccaggaccgtaggatgatgtttcctccgccaggacaatcatatcctgattcagcccttcctccacaaaggcaagacagattttgttctaattctggtagactgtctggaccagcagaactcagaagttttaatatgccttctttggataaaatggatgggtcaatgccttcagaaatggaatccagtagaaatgataccaaagatgatcttggtaatttaaatgtgcctgattcatcttttccttgctaaaaaagaagccactggccctggctttgttcctccacctcttgctccagtcagaggtccattgtttccagtggatgcaagaggcccattcttgagaagaggacctcctttccccccacctcctccaggagccatgtttggagcttctcgagattattttccaccaagggatttccccaggtccaccacctgctccatttgcaatgagaaatgtctatccaccgaggggttttcctccttaccttcccccaagacctggatttttccccccacccccacattctgaaggtagaagtgagttcccctcaggtttgattccaccttcaaatgagcctgctactgaacatccagaaccacagcaagaaacctgacaatatttttgctctcttcaaaagtaattttgactgatctcattttcagtttaagtaactgctgttacttaagtgattacacttttgctcaaattgaagcttaatggaattataattctcaggatagtattttgtaaataaagatgatttaaatatgaatcttatgagtaaattatttcaattttattttagacggtataactatttcaatttgattaatccactattatataaacaatagtgggagttttatatatgtaatctttcaggtggggaggctttaaattctgaagtctgtgtctttatgccaagaactgtatttactgtggttgtggacaaatgtgaaagtaactttatgcttaaataaattatagttgatttaaagatttgtttggcattgataataataaaatcagtagtttttctat

SEQ ID NO: 119366 - DNA, 3681 bp, Homo sapiens
  misc_feature (1)...(3681): n = a,t,c or g
tgcccggcggaaaccaaaccgagggatggggtggcgaggacagggtacgtcgcaggcttgtgcgggtcgggttcggacctgcgctgcctcgggatgtaaagtataacaagagggtcgggatgggcagcgtaggcctgtgaggcctgcgggtgcccctgtcccccagctccccccgcagccggctccgcagtggtccactccggttgccgggtgcggattcgggttccggaccgaaggctgtgtgttctccgccgttcattgtggccccgacaggccggggttactgtggcgaccacgagagcagctttggcgctatggaggagcccggggctacccctcaaccgtatttggggctgctcctggaggagctacgcagggttgtggcagcactgcctgaaggtatgagaccagattctaatctttatggttttccatgggaattggtgatatgtgcagctgttgttggattttttgctgttctcttttttttgtggagaagttttagatcggttaggagtcggctttatgtgggacgagagaaaaagcttgctctaatgctttctggactaattgaagaaaaaagtaaactacttgaaaaatttagccttgttcaaaaagagtatgaaggctatgaagtagagtcatctttaaaggatgccagctttgagaaggaggcaacagaagcacaaagtttggaggcaacctgtgaaaagctgaacaggtccaattctgaacttgaggatgaaatactctgtctagaaaaagagttaaaagaagagaaatccaaacattctgaacaagatgaattgatggcggatatttcaaaaaggatacagtctctagaagatgagtcaaaatccctcaaatcacaagtagctgaagccaaaatgaccttccagatatttccaatgaatgaagaacgactgaagatagcaataaaagatgctttgaatgaaaattctcaacttcaggaaagccagaaacagcttttgcaagaagctgaagtatggaaagaacaagtgagtgaacttaataaacagaaagtaacatttgaagactccaaagtacatgcagaacaagttctaaatgataaagaaagtcacatcaagactctgactgaacgcttgttaaagatgaaagattgggctgctatgcttggagaagacataacggatgatgataacttggaattagaaatgaacagtgaatcggaaaatggtgcttacttagataatcctccaaaaggagctttgaagaaactgattcatgctgctaagttaaatgcttctttaaaaaccttagaaggagaaagaaaccaaatttatattcagttgtctgaagttgataaaacaaaggaagagcttacagagcatattaaaaatcttcagactgaacaagcatctttgcagtcagaaaacacacattttgaaaatgagaatcagaagcttcaacagaaacttaaagtaatgactgaattatatcaagaaaatgaaatgaaactccacaggaaattaacagtagaggaaaattatcggttagagaaagaagagaaactttctaaagtagatgaaaagatcagccatgccactgaagagctggagacctatagaaagcgagccaaagatcttgaagaagaattggagagaactattcattcttatcaagggcagattatttcccatgagaaaaaagcacatgataattggttggcagctcggaatgctgaaagaaacctcaatgatttaaggaaagaaaatgctcacaacagacaaaaattaactgaaacagagcttaaatttgaacttttagaaaaagatccttatgcactcgatgttccaaatacagcatttggcagagagcattccccatatggtccctcaccattgggttggccttcatctgaaacaagagcttttctctctcctccaactttgttggagggtccactcacactctcacctttgcttccagggggaggaggaagaggctcacgaggcccagggaatcctttggaccatcagattaccaatgaaagaggagaatcaagctgtgataggttaaccgatcctcatagggctctctctgacactgggtttctgtcacctccatgggaccaggaccgtaggatgatgtttcctccgccaggacaatcatatcctgattcagcccttcctccacaaaggcaagacagattttgttctaattctggtagactgtctggaccagcagaactcagaagttttaatatgccttctttggataaaatggatgggtcaatgccttcagaaatggaatccagtagaaatgataccaaagatgatcttggtaatttaaatgtgcctgattcatctctccctgctgaaaatgaagccactggccctggctttgttcctccacctcttgctccagtcagaggtccattgtttccagtggatgcaagaggcccattcttgagaagaggacctcctttccccccacctcctccaggaagccatgtttggagcttctcgagattatttttccaccagggggatttcccagggtccaccaccttgctccatttggcaatgaggaaatgtcttatcccaccgagggggtttttccttccttaacctttcccccaaggacngggggttttttccccccacccccacatttttgaaggtaggaagtgaatttcccttaggttttgattccaacttcaaatgagcctgctactgaacatccagaaccacagcaagaaaacctgacaatatttttggctctcttcaaaagtaattttgactgatctcattttcagtttaagtaactgctgttacttaagtgattacacttttggctcaaattgaagcttaatggaattataattctcaggatagtattttgtaaataaagatgatttaaatatgaatcttatgagtaaattatttcaattttattttagacggtataactatttcaatttgattaatccactattatataaacaatagtgggagttttatatatgtaatcttgcaggtggggaggctttaaattctgaagtctgtgtctttatgccaagaactgtatttactgtggttgtggacaaatgtgaaagtaactttatgcttaaataaattatagttgatttaaagatttgtttggcattgataataataaaatcagtagtttttctataactatggctctattaattaacttttttccttttaccaataactttgaggtgcaaaactcaaacttatgtgggtcttttgtgttcaattatgttatgacaaatgtgctctctttcttgtaaatagacatgagtggcccaaagcaacaaattaatacacttttaaaagtcaaaattgattatattttaaagataaccaggatattatctaatggtgaattgtagaattttgatcttcttattcactgagtttcttgcacggtttctttattgctttttttcccgcctgttcttttgtaaggtatttactattttctgtggaggatattgagatgtactacaggataactgtagtgaatgatgtgtcatcattttgagctttggactcaatatctttagtgtttccctaaatcagatttgtaggtcatgttaagcttcttgcacattaatatgattatggaaggaaaggcagtgaagcataactaataaacatcataatactt

SEQ ID NO: 119367 - DNA, 447 bp, Homo sapiens
  misc_feature (1)...(447): n = a,t,c or g
ctttttgagggtcttctgttatttctttattggggtgggggtggggtgcatcattcagatctttgtgctggtgcatacgtgcannnnnnnnnnnnnnnnnnnnnnnnnnnnnnngcatgtgttcacgtatgtatacatatacacacaaggccagagctctagtgtgctggaggaggggcaagctctttttccaagagggtattagaaagaggttgattccagaggatgagtggtctctgaggctatagccccccactgggtgggcagccagctctgtgagaatgccagggtgcagctgacagcgctggaggcctggggactggactctgagaggagcttgggcagacacagcagcctccggccccaacactgccctgggttggcaggcccagccctggtcctgacaggcaggtcctgagctccctcgtgccgaattcctgcaggcgg

SEQ ID NO: 119368 - DNA, 441 bp, Homo sapiens
  misc_feature (1)...(441): n = a,t,c or g
tgacgctgcggaatcggcacagggagctaaggacctgcctgtcaggaccagggctgggcctgccaacccaggtcagtgttgtggccggaggctgctgtgtctgcccaagctcctctcagagtccagtccccaggcctccagcgctgtcagctgcaccctggcattctcacagagctggctgcccacccagtggggggctatagcctcagagaccactcatcctctggaatcaacctctttctaataccctcttggaaaaagagcttgcccctcctccagcacactagagctctggccttgtgtgtatatgtatacatacgtgaacacatgcnnnnnnnnnnnnnnnnnnnnnnnnnnnnntgcacgtaggcaccagcacaaagatctgaatgatgcaccccacccccaccccaataaagaaataacagaaaaccctcaaaa

SEQ ID NO: 119369 - DNA, 468 bp, Homo sapiens
atgcgctggcccgatctcccgcggggtaaccacagagcccggacggcgatctgtgctttcgccatagaaagggggaaaggagacctgcagccccagctggacagtgccctgcaggacgtcaacgacatgtacctgctgctggaagagacggaaaaccaggccgtgcgccgggcgctgatcgatgagcggggccgattctgcacctttatcaccttcctgcaccctgtggtggtgggactcctggggactcaaaccccagaagggcaccagcacaaagatctgaatgatgcaccccacccccaccccaataaagaaataacagaaaaccctcaacccgagccggcctgctccttcccagctgacacgtgcagctgtccgggggcctcaccctctgtcctggagatcgggtttcatgatggccccaaggagtactggctgccccagggcctggtccctgcactcacctga

SEQ ID NO: 119370 - DNA, 365 bp, Homo sapiens
gtgtgctgcaacgcgggcaaagggaaaggagacctgcagccccagctggacagtgccctgcaggacgtcaacgacatgtacctgctgctggaggagacggagaagcaggccgtgcgccgggcgctgatcgaggagcggggccgcttctgcaccttcatcaccttcctgcagcctgtggtgaatggagagctgaccatgctgggagagatcacccacctgcagggcatcatcgacgacttggtggtgctgacagcagaaccccacaaactgcctcccgccagcgagcaggtaatcaaagacctaaagggctcggactacagctggtcctaccagaccccaccaatgtattgcggccgctctagagg

SEQ ID NO: 119371 - DNA, 265 bp, Homo sapiens
tttcaggatgtgacaacgtttttaatgcaaagtcaaccattagcatctttcccatgtacttattagatgtgaaatggcaggacttcacgatgcttttctccaggtaaacattgagagtattgttccggaacattccacccgctgcaagttgttgggaaaatttattcgaatttggataaaatactttaggcatctcgtgcacggtgggggctctgctcccgtaagcctggttactggtcctgtacacaaccacccactagttctc

SEQ ID NO: 119372 - DNA, 461 bp, Homo sapiens
tgtctccgtgtacaggaccagtaaccaggcttacgggagcagagcccccaccgtgcacgagatgcctcgggtggaatgttccggaacaatactctcaatgtttacctggagaaaagcatcgtgactggccccgataactgcatcacctcctgtgaccggctcaacttccaccccagttacaacatcaacaggccatccatctgcgattgaggggctggaaactccctttaggagtcctctgaccccagggcctcctggaaaatcatcatccctcatcacccacagtcgcccgattgtgacggcacagactgcgctgccttccctgaaaatattattcgtctgcggagtaggaaaatatgcaaacggggccgtgaagtcctgccatttcacatctaataagtacatgggaaagatgctaatggttgactttgcattaaaaacgttgtcccatcctgaaaaaa

SEQ ID NO: 119373 - DNA, 675 bp, Homo sapiens
tttttttttttttttttcaggatgtgacaacgtttttaatgcaaagtcaaccattagcatctttcccatgtacttattagatgtgaaatggcaggacttcacggccccgtttgcatattttcctactccgcagacgaataatattttcagggaaggcagcgcagtctgtgccgtcacaatcgggcgactgtgggtgatgagggatgatggattttccaggaggccctggggtcagaggactcctaaggggagtttccagcccctcaatcgcagatggatggcctgttgatgttgtaactgggggtggaagttgagccggtcacaggaggtgatgcagttatcggggccagtcacgatgcttttctccaggtaaacattgagagtattgttccggaacattccacccgctgcaagttgttgggaaaatttattcgaatttggataaaatactttaggcatctcgtgcacggtgggggctctgctcccgtaagcctggttactggtcctgtacacggagacagccttctgggtcctgtagccccggaaccaccccgggttgttgaacctgcccggcaggtccgcgctcacgcggtagtagtcgctggtcctctccggcggggccgtggccttgggcgccacaggctccgcgcacgctctggggcattcctcagccat

SEQ ID NO: 119374 - DNA, 2067 bp, Homo sapiens
atgcgaggatcctccatcattaatgcctctttaataaaaactcttctcaaggccgctttacttccaaaggaagctggagtcattcactgcaagggccatcaaaaggcatcagatcccatcactcagcgcaatggttatgctgataagacaaaattcttaggtttggccttcccacctctgtacagtccaaaaatgaactggcctttattagtcaaatcacccaagcagtttctcaggctcttggtatttggtaaaaccttcataccccttactgtcctcaatcttcaggaaagtgagatttggcccagagagatcaaccacggctcttttgagcaggtggaacatggtgatgtggccaacactgagaggaggggagctcttgggagcctccaccgtcccaactgctgccacccagggatggtcagccatacccacacacctcccatggcagtgggtttatcacgcatctgtgtagtttcttttcgcaaatgtaagcagatagctatctattttaaccctatcagcatcttgtacagcgcttgcgaggctgagagatcatgggagcctcatgctgccccagctgctgcctctccagtgaggggtctgctgtgcccatgtgtcatccatggtgctctcaatcagatctacgtttggagctttgcgatgagagggtctgctttcctctacttgttctacatcttcctccagttgctctgtttactgatgccgtattggtataggcctgtaacaggtgctggctccttctctcctagactgttgctgttcactgcagttcccccattttgtctgtccaaaaaccggaaagccttacagccctcacgtcagtgtgcggtggctgccgccgccctaatacttttagaggccctcaaaatcacaaactatgctcaactcactctctacagttctcataacttccagaatctattttcttcctcccacctgacgcatatactttctgctccccggctccttcagctgtactcactctttgttgagtctcccacagttaccattgttcctggcccagacttcaatccggcctcccacattattcctgataccacacctgacccccatgattgtacctctctgatccacctgacattcactccatttccccaaatttccttctttcctgttcctcaccctgatcacacttggtttattgatggcagttccaccaggcctaatcaccacacaccagcaaaggcaggctatgctatagtacaagccactagcccgcctcttagaacctctcatttcctttccatcgtggaaatctatcctcaaggaaatcacttctcagtgttccatctgctattctactacccctcagagattgttcaggccccctcccttccctacacatcaaactcggggatttgccccacccaggactggcaaattgatattactcacatgccccaagtcagaaaactaaaatacctcttagtcttggtagacacagggtctaagaaggcgaccgtggtcatttcttcccttctgtcagacataattcctcggtttggccttcccacctctatacagtctgataacggaccagcctttattagtcaaatcacccaggcaatttctctagctcttggtattcagcgaactcatggtcttttaaaaactcacctcaccaacctcagccaccaacttaaaaaggactggacaatacttttaccactttctcttctcagaattcaggcctgtcctcggaatgctacaggactgcacagtgatggagaggcccgaagctccttccaggctcaccatttcaacttcatcacacatgggacagtccctgatgtttttgttccaattttacaactcctgaatgaggactttgaagatccatgcttgggttacttgcctagccctgagatcagtatttgtctagaaccaactagttggagtaaggacaggagctgttcttcaggagaggagggaagtgctgggcagacagtaacgggtgacctccacaaagctcagactcctgaattggaccagccagcctccttgaactgccctgatttataa

SEQ ID NO: 119375 - DNA, 1761 bp, Homo sapiens
atgcaggttgccactcgccccgggaagggggagatcaacaggtgggggtctctgcccgggcgatcactctccatggaggacagccccgattgtgccctggggactgtgcaatcccgtattgtctcggagtgttcacaacaaagagctttgtccctgaggactgcccgagggcagaggaggaggagagagaagcagcaaatgaattcccaggttgggaaggaaggagctctgacctccagccctctggcgttaaagataaatcctctacagttcccatccaaacggcatccattactcacaatcagaattgggtggggacctagattccactcccaggaatctcctctgggccaggtacaaaattctgagctacaaccagatgaacagtacttcccaacaacacacagagaggttaatccaagggagaaaaacctgggtcaaatgaaaagatcgaggcttgcagacctcattaagcacagtgcctccctttacacgcagctaccaaacacaccctcagctctctgctgcccacagctgaggttcccagaagagcaaatgctgctgatccggaccgaagttagtctcttcccgctggaagtggcaatgagccaggataaatgtacatgcttcccagactccttgcaggaagggatggccaaagccacacaatcagaagttgttgggtggagattctgggaaaactctttaaaaggagccgacacaacactccttcagctatactcactctttgttgagtctcccacaattaccattgttcctggcccggacttcaatccggcctcccacattattccggataccacacctgaccctcatgactgcatctctctgatccacctgactttcaccccatttccccacatttccttcttccctgtttctcatcctgatcacacttggtttactgatggcagttccaccaggcctaattgccactcaccagcaaaggcaggatatgcaatagtatcttccacatctgttattgacgctaccgctctgcccccctccactacctctcagcaagccgaaccagctgccttaactcaggccctcactcttgcaaaaaggctaggcatcaatatttatactgactctaaatatgccttccatattctgcactaccatgcagtcatattggctgaaagaattttccttactacacaagggtcctccatcattaatgcttctttaataaaaactctgctcgaggccgctttacttccaaaggaagctggggtcattcactgcaagaggcatcaaaaggcgtcagatcccattgctctaggcaacgcttgtgctgataaggtggctaggcaagcagctagctttccaacttctgtctctcacagcaattctgatgcagataaggtggctagacaagcagctagctctccaacttctgtccctgacggccagtttttctccttcacatcggccactcccacctactcccccgctgaaacctccacctatcaatctcttctcacacaaggcaaatggttcttagatctaggaaaatacctccttccagcctcacaggccccttctattctgtcgtcatttcataacctcttccatgtaggttacaagccactagcctgtctcttagaacctctcatttcctttccatcatggaaatctatcctcaaggagatcacttctcagtttcccatctgctattctactacccctcatggattgttcaggcctcctccctttcctacacatcaagctcagtga

SEQ ID NO: 119376 - DNA, 1967 bp, Homo sapiens
atggttggatactttcgcctttggatacctggttttgccatcctaacaaaaccattatataaactcacaaaaggaaacttagctgaccccatagatcctaaatcctttccccactcctctttctgttccttgaagacagctttagaaactgcccccactctagctctccctgactcatcccaacctgcttcattacacacagccgaagtgcagggctgtgcagtcggaattcttacacaaggaccaggatcgcgtcctgtagcctttttgtccaaacaacttgatcttactgttttaggctggccatcatgtctccgtgcagccgctgctgctgccctaatacttttagaggccctcaaaatcacaaactatgctcaactcactctctacagctctcataatttccaaaatctattttcttcctcacacctgacacatatactttctgctcccggactccttcagctatacttacactttgttgagtctcccacaattaccattgttcctggcccggacttcaatccggcctcccacattattccggataccacacctgaccctcatgactgcatctctctgatccacctgacattcaccccatttccccacatttccttcttccctgtttctcaccctgatcacacttggtttattgatggcagttccaccaggcctaatcgccactcaccagcgaaggcaggctatgctatagtatcttccacatctatcattgaggctactgctctgcctccctccactacctctcagcaagctgaactagttgccttaactcaagccctcactcttgcaaaaggactatgcgtcaatatctatactgattctaaatatgccttccatatcctgcaccaccatgcagtcatatgggctgaaagaggtttcctcactacacaagggtcctccatcattaatgcctctttaataaaaactctgctcaaagccgctttacttccaaaagaagctggggtcattcactgcaaggggcatcaaaaggcatcagatcccattgctctaggcaatgcttatgttgataaagtggctagacaagcagctagctctccaacttctgtccctcacggccagtttttctccttcacttcagtcactcccacctactcccccactgaaacttccacctatcaatctcttcccacacaaggcaaatggttcttagaccaaggaaaatatcttcttccagcctcacaggcccattctattctgtcatcatttcataacctcttctatgtagacataattcctcggtttggccttcccacctctatacagtctgataacggaccagcctttactagccaaatcacccaagtagtttctcaggctcttggtattcagtggaaccttcataccccttaccgtcctcaatcttcaggaaaggtggaacggactaatggtcttttaaaggcacacctcaccaagtttagcctccaacttacaaaggattggacagcacttttacctcttgctcttctcaaaatcagagcctgtcctcgagatgctacaggatacagtccatttgaacttttatatggacgcactttcttgcttggccccaacctcatcccagacaccagccctctaggcgactatcttccagtactccagcaggctagacaggaaattcgccaggctgctaatcttctcttgcctactccagatccccagccatatgaagacaacctagctggacgatcagttcttgttaagaatctgacccctcaaactctacaacctcgatggaccggaccctacttagtcatctatagtaccccgactgccgtctgcctgcagaatcctccccactgggttcaccattccagaataaagctgtgtccatcggacagccagcctaatccctcctcttcctcctggaagtcgcaagtactctcccccacttcccttaaactcactcatatttctgaagaaca

SEQ ID NO: 119377 - DNA, 1911 bp, Homo sapiens
taaaacggccccacccttatctccctttgctgactctcttttcggactcagcccacctgcacccaggtgaaataaacaaccatgttgctcacacaaggcctgtttggtggtctcttcacacggacgtgcatgaaatttggtgccgtgactcggattggggggacctcccttgggagatcaatcccctgtcctcctgctctttgctccatgagaaagatccacctacgacctcaggtcctcagaccaaccagcccaagaaacatctcaccaatttcaaatccggtaagcggcctctttttactctcttctccaacctccctcactatccctcaacctctttctcctttcaatcttggcgccacacttcaatctctcccttctcttaatttcaattcctttcattttctggtagagacaaaggagacatgttttatccgtgtacccaaaactccggcgccagtcacggactgggaaggcagccttcccttggtgtttaatcactgcagggacacctctgtgattattcacccacgtttcaaaggtgtcagaccacgcagggacgcctgccttggtccttcacccttagcggcaagtcctgcttttctggggaaggggcaagccgagctaggtcccaattcttcctcagcctctgctcctccaccctataatctttttatcgcctcccctcctcacacctggtccggcttacagtttcgttcggtgactagccctcccccacctgcccagcaatttactcttaaaaaggtggctggagccaaaggcatagtcaagcggctgaagactgacactgcccgatcgccttggaagacccctagaccatcacggacgccgagcttcagaaaagcagaacggactaaaggtcttttaaaaatacacctcaccaagctcagccaccaacttaaaaaggactggacaatacttttaccactttcccttctcagaattcaggcctgtcctcggaatgctacaagactggctactggccaattgggatatccttttatcagtcaaagctatgtcctggtcaatggatttcaaactgttgaggatctatgtgaagctgcagaccttcgagtgagtgttgcagaccttcgagtgagtgttacagctcttaaggtggcgcgtctggagttgttcgttcctcccggtgggctcgtggtctcgctggcttcagcagtgaagctgcagaccttcgcggtgttacagctcataaaagcaaaaagatgggactggggcaccttggagcagggggcggcgctcatcggggaggctcgggacgcacaggagcccacggagggggtgggaggctcaggcatggcgggctgcaggtccagagacctgccccgcgggaaggcagctaaggcccggcgagaaatcgagcgcagcgccgggctgacgatcaagaaggaaagatgcatacgaaatggatacagcaaagaaaaaatgaaactcatagttgtttctcatggcctccatgtaaatgacttgcagcataaactgacgcttttcaccaaggaaacatacacatacctagccagggattcagagaagcagaagcaggggtatctagcaggacttgaaggagcccatgccaacagggtgaaccagcagatcagtgacaacttagccatagtctttggacaaaagattcaaggccatctctccactactggacagctgcttatggcaggtcaagaaggaaagctgggccagcttcttttcctgggaatttcgggttggacaattcaactgaatgatgtttattgtctacagacacaatcaacaattgtccacataagatcagaagcagggaattccaatccacgagaatggctgccgcttttacaaggaatcagcagtaaagatgaaacacagccctttatgccttag

SEQ ID NO: 119378 - DNA, 2146 bp, Homo sapiens
ctagtagacactgggaaatgtcagtgagagctcccagggtatggagatatgagggctgttgttcttagggtaagatggagtcccgtgatggctgcgttccccaaatggcaccctctccacagctgtccaagtattggggtggggagtaattggcccggtgcgagtttcctgtctggtgcaatgacctcgcagggtctccaaactgccactcatacttgtatcactgtacatatgggtagaggagctctcctcctgctgtgtggcccggttcctgtcagaccacagactggtactggtccatggcctatgggttggggacccctgtacttcactgaagccatttatcagctcaaggagccttttggcagagccttcaggattttctaggtataaaatcatatcatcagtgaagagagataatttcagtctgtggtctgacaggaaccgggccacacagcaggaggtgagtggcaggtgactgagtgaagcctcatctgtatacaggaaaaggaggtgagattaacagagtgacttgtcagctagtcagcacggcttgtttccacttgctacagaggtgaggagtagtggtgctgccagctgccctgatagtgactccatctgccctgcccccaccatcgccccaggccgtgccacacctccccaagccaactgctgggcttctgaaggcaccctgagataccaagcgttacctggcaaccgcgcacctgtgagccaggtcagccaggcaggtggtgctaacctgtgtgttcagcagcccaagaaacatctcaccaatttcaaatccggtaagcggcctctttttactctcttctccaacctccaaggaccgagatcgcgtcctgtagcctttttgtccaaacaacttgaccttactgttttaggctggccatcatgtctccgtgcagcagctgctgccgccctaatagttttagaggcccttaaaatcacaaactatgctcaactcactctctacagctctcataatttccaaaatctattttcttcctcccacctgacgcatatacttttctgttcccctggctccttcagctgtactcactctttgttgagtctcccacaattacccattgttcctggcccagacttcagtccggcctcccacattattctggataccacacctgaccctcatgactgtatctctctgatccacctgacattcaccccatttccgcatatttccttctttcctgctcctcaccctgatcacgcttgatttattaatggcagttccaccaggcctaatcgccacacaccagcaaaggcaggctatgctatagtacaagtcactagcccgcctcttaaaacctctcatttcctttccatcgtggaaatctatcctcaaggaaataacttctcagtgttccatctgctattctactactcctcagggattattcaggcccccctcctttccctacacatcaagctcagggatttgccaccgcctaggactggcaaatcagcgttactcaacatgccccgagtcaggaaactaaaatacctcttagtcttggtagacacagggtctaagaaggcgaccgtggtcatttcttcccttctgtcagacataattcctcggtttggccttcccacctctatacagtctgataacggaccagcctttattagtcaaatcacccaggcaatttctctagctcttggtattcagcgaactcatggtcttttaaaaactcacctcaccaacctcagccaccaacttaaaaaggactggacaatacttttaccactttctcttctcagaattcaggcctgtcctcggaatgctacaggactgcacagtgatggagaggcccgaagctccttccaggctcaccatttcaacttcatcacacatgggacagtccctgatgtttttgttccaattttacaactcctgaatgaggactttgaagatccatgcttgggttacttgcctagccctgagatcagtatttgtctagaaccaactagttggagtaaggacaggagctgttcttcaggagaggagggaagtgctgggcagacagtaacgggtgacctccacaaagctcagactcctgaattggaccagccagcctccttgaactgccctgatttataa

SEQ ID NO: 119379 - DNA, 420 bp, Homo sapiens
cggacgcgtgggggagaaaaagagtaggaggagaagcagaggagcaggagataaaggataaaatgagaggaggaggagaaatagaggagaagcagaggagcaggagataaaggataaaatgagaggaggaggagaaatagaggagaaccagtggagaaggaggaggatgacaggaggaggaagaggcaatggagaagaggagaggaggagaagaggagaagggggaggaactgtggaggaggaggaggagaggagaaggaggatgggagaaggaggaggcttccttgtttcctcctccttccttctttgcttgtttctctgctgtggctcgtttcctttttgccctgtgtgtttggctttttcggtgctccggccgttgtctttgctcgctttcgggggcttcgggctttttgtcgcttt

SEQ ID NO: 119380 - DNA, 469 bp, Homo sapiens
ctcagaagataaaataacagtccactttataaaccgtgatggtgaaacattaacaaccaaaggaaaagttggtgattctctgctagatgttgtggttgaaaataatctagatattgatggctttgtaatgagcaccacccggctgctcgaacctgaaaccgtagagcaccattccttcctctttcttcccaacctgacatccagtccatcggcacctcctgccagttgtgcccccaagattcgcctccagcatgtcctgttggctccatccctacagtcggcacgaggggctggccagccactgggcgcctggagctgtgctaacctgcttctgctctggagtttaacagccagatcacggttgggctgccaaatctgtttgacaaaatctatggacaatatgactgttcgagtgcctgaaacagtggctgatgccagacaatccattgatgtgggcaagacctcctga

SEQ ID NO: 119381 - DNA, 777 bp, Homo sapiens
tcaaaacaaaggggctacagaccccatgcaagtccaaaatccagcagggcagtcaaatcttaaagctccaaaatgatctcctttgactacatgtctcacatccaggtcacactgatgcaagagctgggttcccatggtcttgggcagctccacccctgtggctttgcaggatacagcctccctcctggctgctttcatgggctggcattgagtgtctgtggcttttccaggcatatcatgcaagctgtcagtggatctaccattctgaggtttggagggcagtggccctcttcgcacagctccactaggcggtgccccaatagggactctgtgtgggggctccaaccccacatttcccttctgcacaaagccatcaatatctagattattttcaaccacaacatctagcagagaatcaccaacttttcctttggttgttaatgtttcaccatcacggtttataaagtggactgttattttatcttctgagcaagttaggcacgtcagacaatcagtgccaaagccaagtttcaagtcccggcagattacttcaacgcaggggctttcaacacttgagcaactagcaaagggcctgctccgggcccgcgccgacacgctcagcgaccggctcgcctccgcgctcccgcccggcccccggttcctcagcaggccgctggatccagcgcgggacccagcgtggtgcagccaccggccggccgggccgccgaggacagcagaagcggcgcgcagcagccgggcgcccccagcggcagccat

SEQ ID NO: 119382 - DNA, 2630 bp, Homo sapiens
gggtatgcggaacagaacacagtggtctagctaaccgatttccgctagacgtccagctatctttcaaaatattttgtttctgcacggcaacttcagccgctaaaaaagcatccagcttacaacggaacctggagggttggtaaaggccccctgcgctggccccgccccatgggaccgggcggcgtgggcgtgagaggcggggcggggcgcgctctgcttgccaatgtctttataggtcacccggaaggcacgcggaacctcggcgcggtgcttccagcagggtctctccgccactccagccccgcgcccctcgccgcggccctcgggcgtctgcgccgcagctgccgcccccgcctctttggagtctctcgcggcctcaaagcgcggcctgcgtcgcttccggcagttcccgaccgcgggcgatggctgccgctgggggcgcccggctgctgcgcgccgcttctgctgtcctcggcggcccggccggccggtggctgcaccacgctgggtcccgcgctggatccagcggcctgctgaggaaccgggggccgggcggtagcgcggaggcgagccggtcgctgagcgtgtcggcgcgggcccggagcagctcagaagataaaataacagtccactttataaaccgtgatggtgaaacattaacaaccaaaggaaaagttggtgattctctgctagatgttgtggttgaaaataatctagatattgatggctttggtgcatgtgagggaaccctggcttgttcaacctgtccacctcatctttgaagatcacatatatgagaagcttagatgcaattcactgatgaggagaatgacaatgctcgatctgggcaatggactacccagccagatccccggttgctgccaaatcctgtttgacaaaaatctatggacaatatgactgttcgagtgcctgaaacagtggctgatgccagacaatccattgatgtgggcaagacctcctgaactagaacaaatagggaatattttcatggaaaatttacctatttttataattattatttcttaaagtgattaaattgagaacatggatgagtggacttcatattatgactagctttactattttaattcaccttgcataactactgaattttgtcattcttgaaagtatgcaatttttattttggttatattacaaaaatgtcaatcaaatattaaaaaatagttaatgtgatagaaaaaccttacatatttttttctcatgtgtgtgtatcgcgacttgcgcaatgtgttttcataatatctcatctggtttacctagaagataggttaaggaaaatatattattattccctgttttgatgtgggtgaaggccagagatctaacctggcttggtttagggccataccaactatttacaaactctgtactagaccctgtgtccttattcctataagctatgtgttcagactgaaactggagaaattacgactattctatctctagtagtagttaaattccgagtggtgtatggcacaaaaaatatttattggctcagtaaagctgcttaacttcaaaagatagttattgccctttataaataaatatttcaaaattttgatgcggaaggactaagtctggccgtagacgattataatgctatcaaagaagtttgatctctgttttgactaaactagaggaaaaatgattggatgtgtttattcttttctaagcagaatggtttaactttgtactctttgaaaaataatgctgatttataaatctctgcctataacagaatggaaaccttatgaatgaattgtgtttctctgtcctgagctcggtacccctggagaagggaatgagcaggctgacacgttgcacagccccaggtggcgccattctctcacgcaaggatggggctgcagggtgagcagcgtgggctgcagtgtgtcagtcccaggagtgagggagtggcaagcaccacagattaccacgtatgtgtggaagacattcgtactcttatctttactataaataaattcataaaagttaacaaaggggtacacagtatggtctttggaaatataataaaacatcaactaacttggactaattgtgaggaaagagcagaccaaattagtagaaagaggttataagacaattgagttagcttcatgtgtattattgcagcttgatcatttatataaatatttgtctagtacaatgcttgacatacagcattgtgttatgcccattggggacacagaggtgaacaagacaaggaatgccatcagggaattcaccttttattaggaaaatataaaatatgtatgtatgtgcagataatttgcttgaactaaactgactagttctgctaaataagattttaaactaattcatatgtaaaaagtgattaggaagaacttgaagtatcatttgatgcttaataactattgagtaggtttttttttttttttttggtggggggagcgggggacagggtcttactctgtcactcaggccagagtacaatagtatgatctcggctcactgcaacttctgcctcccagtttcaagggattctcgtgcctcagcctcccaggtagctggtactacaggcacggaccaccacgcctgggctaatt

SEQ ID NO: 119383 - DNA, 503 bp, Homo sapiens
  misc_feature (1)...(503): n = a,t,c or g
aagcattcagaaggcacacatacttacacttccctgagacttagttcgaaatgtgaaatatgatttggcgaggaagatcaacatataggcctaggccgaggagaagtgtaccacctcctgagctgattgggcctatgctggagcccggtgatgaggagcctcagcaagaggaaccaccaactgaaagtcgggatcctgcacctggtcaggagagaaaagaagatcagggttcagctaagactcaagtgcctgacctggaagctgatctccaggagctgtctcagtcaaagactgggggtgaatgtggaaatggtcctgatgaccaggggaagattctgccaaaatcagaacaatttaaaatgccagaaggaggtgacaggcaaccacaggtttaaatgaagacaagctgaaacaacccaaaactgtttttatttaagatatttgacttaaaaatatcgaaataaacttttgcagctttctccnnnnnnnnnnnnnnnnnnnnn

SEQ ID NO: 119384 - DNA, 330 bp, Homo sapiens
tcacaaggccacaaactgtatggtgtcattgacataacactctccccaagacaaaaccctggttccaggagcccggtgatgaggagcctcagcaagaggaaccaccaactgaaagtcgggatcctgcaccccgtcttccccgcagcccttaatccgccgatcctccctggcgatctcagcgcccccaggggctgaccaggccaccgccagaacctctccgtcctcacgggtctcctcctgcccacctaagtctcttctgccagcggtcatgccctgggcctcaggaaagaccgcacccctccacgatgtgaaggaatgcacgggcgtcat

SEQ ID NO: 119385 - DNA, 661 bp, Homo sapiens
gtcttttgccaggagccttaagaaattgctcagctagcttgaccaacttaatggcttcccaagcattcagaaggcacacatacttacacttgccctgagacttagttcgaaagtatttacaaacttttaaaaaatgacaagttaatatttggtcatggaagtggtcaaatatagctgtcttttcaagtgcatttaccaattcacagtattctgtttgcagtgtgaaatatgatttggcgaggaagatcaacatataggcctaggccgaggagaagtgtaccacctcctgagctgattgggcctatgctggagcccggtgatgaggagcctcagcaagaggaaccaccaactgaaagtcgggatcctgcacctgggtcaggagagagaagaagatcagggtgcagctgagactcaagtgcctgacctggaaggctgatctccaggagctgtctcagtcaaagactgggggtgaatgtggaaatggtcctgatgaccaggggaagattctgccaaaatcagaacaattttaaaatgccagaagggaggtgacaggcaaccacaggtttaaatgaagacaagctgaaacaacacaaaactgtttttatctaagatatttgacttaaaaatatcgaaataaacttttgcagctttctccaaaaaa

SEQ ID NO: 119386 - DNA, 155 bp, Homo sapiens
  misc_feature (1)...(155): n = a,t,c or g
ggtgaagaggacatgctcccagctgggggttggctcggcccctgtcgcaggccacttgcctgtgatgtccggccggtcgtctatgagaaggtcagcaganccacggtcttgtctctggtcagcacaatctgctccagaaagtcagggccaaagta

SEQ ID NO: 119387 - DNA, 348 bp, Homo sapiens
ccgccttcgcagcgggtgtgaggatggcacgagatgcggcaaggaggccgtcagcacgcgcagccagtgctcagtcaacagggactgactgcgggtcactgtcaccaccagcactgtcgcaggccacttgcctgtgatgtccggccggtcgtctatgagaaggtcagcagagaccacggtcttgtctctggtcagcacaatctgctccagaaagtcagggccaaagtacttctccacccaggcatactggacgcaaacaggcaagggcaggtggtgagaagaaagtgacatcagacccagcgaacactgcacagcataacccaaacacagggagcagagggcggccat

SEQ ID NO: 119388 - DNA, 467 bp, Homo sapiens
ctttctggagcagattgtgctgaccagagacaagaccgtggtctctgctgaccttctcatagacgaccggccggacatcacagcaatgtggactgatgcaatgaatgacaggagggcagagcaaagctcctgcagggaaggggccgagccaacccccagctgggagcatgtcctcttcaccgcctgccacaaccagcacctgcagctgcagcccccccgccgcaggctgcactcgtgggcggacgactggaaggccattctggacagcaagcggccctgctgagctggactgtgcttcgggctcctctgtggggctctgacctcagggctcccagctcggggcctgtggggccagtatgctggtctgggaggccctcctagactcctgggccccatgacctcctgctgcatgtcccttcccttccccagccctgccaggccttaacctgatcacggggcagggctgg

SEQ ID NO: 119389 - DNA, 724 bp, Homo sapiens
gccccacagaggagcccgaagcacagtccagctcagcagggccgcttgctgtccagaatggccttccagtcgtccgcccacgagtgcagcctgcggcgggggggctgcagctgcaggtgctggttgtggcaggcggtgaagaggacatgctcccagctgggggttggctcggcccctgtgatgtccggccggtcgtctatgagaaggtcagcagagaccacggtcttgtctctggtcagcacaatctgctccagaaagtcagggccaaagtacttctccacccaggcatacttctcatagggacagtacttgaaacatcttgcatggggcttgtgcaagatgaaaaacgtcagtgttttgtaggctggccatctccttgacagcttcccacggcccctggcagaggctcaagttcaaaaaagaaattctttgactcccaaatgctgatggccttctcgctcagccctggccgcaggcggccgtactgctccgacacccagaagccgcgccggtcctccagcgcgatgaagggctggtcgggaaagcgcgcgcggaacttcctgaggaatccgccctcgaagtcagccagcacgccgtccatgtccaccagcacccgtagggcgcggcctcccgccaggcccagcccgcccgccgccccgcgccgccccgcgggaaccgccgcgctgcagagccgccgcgcacaccagccgcccagccggatcat

SEQ ID NO: 119390 - DNA, 1554 bp, Homo sapiens
atggctgccttgtcagagcgctttcatgccaaggagccagcaggatctgacagctacccttggactagcagagttttgcaaagaaatgatggtgacagtttatttacggacgctcagattcgcggccgtataatggaggcagccctactaggaaaggcaagggtgcaggtttttgagaatgcatcggtaagggccattaaatccgaccttcctcagtcctccttgtggtctaggaggaaaactagtgtttctgcttctgtgtcagtgagcgcaactattctgatcagcagggtccgcggaccattaagaaaacaagcaaagaaatctccaaaggcccacaaaaaacccctggctattggttatgtcccctacaagcttagggggaggggaatttggcccaacccagaagggctaaggagaaataggaaaaagcccatgaattattcagtgatgtccaccataactcagggaaaggaagaaaatccttctgccttcctcaagtggctacaggaggccttaagaaaatatactcccctgtcaaccggctccatcaagggtcaattgatcctcaaagataagtttattacccaatcagctgcagatatcaggagaaagctccaaaagcaagccctgggccctgatctaaatctggaggtgttattaaatctggcaacctcggtgttccataatagggaccaagaagaacaggcccaaagggaaaagcgagatcagagaaaggctgcagcctttgtcatgacaattagagaaacaaacattggtggttcagagaggacagaaaatggagcaggagtacaaaaatcgaatggtcagtggagactagtgcaagatcttagactcatcaatgaggcagtaattcctctatatccaattgtacccaacccctataccctgctctctcaaatacaagaggaagcagaatggttcactgttctggacctcaaggatgccttcttctgtattcccctgcactctgactcccagtttctctttgcctttgaggattccacagaccacacgtcccaatttacatggatggtcttgccccaagggtttagggatagccctcatctgtttggtcaggcactggcccaagatctagaccacttctcaagtcgaggtactctggtccttcagtatgtggatgatttacttttggctaccaatttggatgcctcatgccagcaggctactctagatctcttaaactttctagctaatcaaggatacaaggcatctaaattgaaggcccaactctgcctacaacaagtcaaatatctaggcctaattttagccagaggaaccaagaccctcagcaaggaacaaatacagcctgtgctggcttatcctcaccctaagacattaaaactgttgcaggggttccttggaatcacaggcttttgccaactatggatcactagatacagtgagatagccaggcctctctatattctaatcaaggagacccagagggcaaatactcatctaatagaatgggaaccagaggcagaaacagccttcaaaaccttaaaatag

SEQ ID NO: 119391 - DNA, 366 bp, Homo sapiens
atgaagccgtggatcctcacagtgagtgttacagttcttaaagatggtgtgtccggagttttttcattctggtgggtttgtggtctcactgacttcaggactgaatctgcagatcttcacggagtgaagctgcagaccttcacagtgagtgttacagctcataaagttagtgtggacccaaagagtgagcagcagcaagatttattgcaaagagtgaaagaacaaaacttacacagcgtggaaggggacccgagtgggttgccgctgctggctagggacaccccaactgctgttgggaatttggctgatgaccgctctagctacttcctgctggataggggtgaagaaggggccctgcagttgtag

SEQ ID NO: 119392 - DNA, 717 bp, Homo sapiens
atgaattcagttatagaatctatgggagcattacagccaggattgccttctgctataattccaaaaaattggcctttaatagtcatagatttaaaagacggtttatttactatccctttagctgagcaagactgtgaatggtttgcatttacaattcctgtggtaaataacctgcagcctgctaagcgttttcattgttttacagatgggtctaataatggtaaagcttcttattctggatcaaaaaataaagttttccagatgtcctatacttcagctcaaaaagcagagcttgtagctgtaattgagttaattgaaaatgctcagttacgatttcatacagatgaacaactgatgactttatttacccaattacaaacagcagttaggagtagaatgcaccctttttacatcactcacattagggctcatacacctcttccaggacctttgactgaagggaatcaaatggctgatcgcctagttgctaatgcaatatctagtgctagacactttcagcaacacctgttgaacacagccacccacctggggacagatcaagaagctgtcacagatggcggaaaaaacttgaggaaagcgggacaagcagtcacgagtaatttaatggtagctataatagcagttatcaccactgccatgagtattccttcaacaagggctgacacagagaacaattatacttattgggcatattga

SEQ ID NO: 119393 - DNA, 689 bp, Homo sapiens
gtatgttcaactattgagggccaggaaattgacttcctcctggacactggcgccgccttctcagtgttaatctcctgtcctggacgactgtcctcaaggtccgttaccatccgaggaatcctgggacagcctgtaaccaggcaatatcccttaaggcctgaagttcataaaggattacagaatattgttaaacatttgaaagctccaggcttagtaaggaaatgcagcagtcactgcaacaccccaattctaggagtacaaaaaccgaacggtcagtggagactagtgcaagatcttagactcattaatgaggcagtagttccactatatccagttgtacccaacccctataccctgctctctcaaacaccagaggaagcagaatggttcatggttctggacctcaaggatgccttcttctgtattcccctgcactctgactcccagttcctctttgcttttgaggatcccacagaccacacgtcccaaattacgtggatggtcttgccccaagggtttagggatagcccttatctgtttggtcaggcactggcccaagatctaggccacttctcaagtcgaggcactctggtccttcaatatgcagatgatttacttttcgctaccagttcagaagcctcatgccagcaggctactctagacctcttgaactttctagctaatcaaag

SEQ ID NO: 119394 - DNA, 616 bp, Homo sapiens
agggaaagcacatttagttgattatatcaaggcctgtgatagtatcagaggtaatctacataaagctactttgttggcacaggcgatggcaggactgagagtggataaaggaaatactccatttcctggagcttgttttaactgtgggaagcatggtcatactaaaaagaatgtagaaaaaaaatcagcgactgagcaatactgtgaacggtttgcatttacaattcctgcagtaagcaacctgcagcctgcgaagtgttttcattgtttcacagatgggtatagtaatggtaaagcttcttattctggatcaaaaggtaaagttttccagacaccctatacttcagctcaaaaagtggagcttgtagctgtaattgaggtattgactgcttttgatatgcctattaatgtgatttctgattcttcatacatggttcactccacacagttaattgaaaatgctcagttacaatttcatacagatgaacaactgataataaaaacaaaaaagggggagaaacagggattaagggatagcccatatacaattgaatctagcattattaactttcaattttttaagcctgcccaaaggccagatgttatcagcagctga

SEQ ID NO: 119395 - DNA, 461 bp, Homo sapiens; identical to SEQ ID NO: 86076
  misc_feature (1)...(461): n = a,t,c or g

SEQ ID NO: 119396 - DNA, 1148 bp, Homo sapiens
aagggctaaggagaaataggaaaaagcccatgaattattcagtgatgtccaccataactcagggaaaggaagaaaatccttctgccttcctcaagtggctacaggaggccttaagaaaatatactcccctgtcaaccggctccatcaagggtcaattgatcctcaaagataagtttattacccaatcagctgcagatatcaggagaaagctccaaaagcaagccctgggccctgatctaaatctggaggtgttattaaatctggcaacctcggtgttccataatagggaccaagaagaacaggcccaaagggaaaagcgagatcagagaaaggctgcagcctttgtcatgacaattagagaaacaaacattggtggttcagagaggacagaaaatggagcaggagtacaaaaatcgaatggtcagtggagactagtgcaagatcttagactcatcaatgaggcagtaattcctctatatccaattgtacccaacccctataccctgctctctcaaatacaagaggaagcagaatggttcactgttctggacctcaaggatgccttcttctgtattcccctgcactctgactcccagtttctctttgcctttgaggattccacagaccacacgtcccaatttacatggatggtcttgccccaagggtttagggatagccctcatctgtttggtcaggcactggcccaagatctagaccacttctcaagtcgaggtactctggtccttcagtatgtggatgatttacttttggctaccaatttggatgcctcatgccagcaggctactctagatctcttaaactttctagctaatcaaggatacaaggcatctaaattgaaggcccaactctgcctacaacaagtcaaatatctaggcctaattttagccagaggaaccaagaccctcagcaaggaacaaatacagcctgtgctggcttatcctcaccctaagacattaaaactgttgcaggggttccttggaatcacaggcttttgccaactatggatcactagatacagtgagatagccaggcctctctatattctaatcaaggagacccagagggcaaatactcatctaatagaatgggaaccagaggcagaaacagccttcaaaaccttaaaatag

SEQ ID NO: 119397 - DNA, 852 bp, Homo sapiens
atgcaggtttttgagaatgtgtcagtaagggccactaaatctgaccttcctcggtcctctttgtggcctagaaggaaaacaagtgtttctgctgctgctttgatcaaggtagacctggggaagttttcagatgctcctcatagatatatagatgtcctacagggtctagggcaaaccttcagtctcacttggagagatgtcatgctattgttagatcaaacgtttgcctttaatgaaaagaatgtggctttagctgcagcccgagagtttggagatagctggtatcttagtccagtaaatgatagaatgacagccaaagaaagggacaaattccataccagtcagcaagccatccccagagtacaaaaaccgaatggtcagtggagacaagtgcaagatcttagactcatcagtgatgcagtaattcctctatatccagctgtatccaacccctataccttgctctctcaaatactggaggaagcagaatggttcactgttctggacctcaaggatgccttcttctgcattcccctgcgctctgactcccagtttctccttgcctttgaggatcccacagaccacacatcccaacttacgtggacggtctttactcaagggtttatggatacccctcatctgtttggtcagtcactggcccaagatctaggccacttctcaagtccaggcactctggtccttcagtatgtggatgatttacttttggctaaacagcaggctactctagatctcttgaactttctagctaatcaagggtacaagttgtctaaattgaaggcccagctctgtgagttgctggtattctcgtcgtgtgcccgcatgcacagctaa

SEQ ID NO: 119398 - DNA, 1035 bp, Homo sapiens
atgggacaagtgtgggctctggttcgttccaccttggaactttttcacactgatgatgaggaggaaggagagtatgacgaagtaacagaagaggttacagagcaggtttatttgccagctaaagctaaagtggcacaggaggaagaggttcatccctacccttctgcaccccctcattattattttgaagaaaaagagtggccagaccctccagatctttcttttctggaggacactgggcgaaaagtagttgccccagtgactgagcagcacctcgagcgactgctgtcagttctattcaggcaggagttcagcaggctagacgagagggatgatgccgtagagcagcttagaggagtgtgcattagagcttgggaaaaaatcacttcaggtggagaacaatacccttcctttagtgctgtaaaacagggaccaaaagaactgtatgcagattttatagcttggaatctcttaagacaggagtctcttaaaaaggtgatttcagattcagctgctcaggatatagtgttgcagttattagcttttggcaatgttaatctcgattgccaggctgctttgcgacctattagagggaaagcacatttagttgattatatcaaggcctgtgacggtatcggagctaagcaagacagtgaacggtttgcatttacaattcctgtggtaaacaatctgcagcctgctaagcattttcattatttcacagatgggtctagcaatggtaaagcttcttattctggatcaaaaggccaaaaccagcagccaatttggatactatcaagacacctaaaaccttatcatgagccagatgccaaggaagagattccaggaggatcccgaggaccccctggttgcagccatgtcgagactgatgctgaggaggaccctaactgtcacgagcaacacccgttgaacacagccacccacctggggacagatcaagaagctgtcacagatggtggaagaaaacctgaggaaagcgggacaactggtcacaatgactgtttactggaatga

SEQ ID NO: 119399 - DNA, 1767 bp, Homo sapiens; identical to SEQ ID NO: 114662

SEQ ID NO: 119400 - DNA, 3429 bp, Homo sapiens
atgacagctgaagaaagggacaaattccctaccagtcagcaagctgtccccagtatggatgcccactgggacctcgactcagatcatggggactggagtcgtaaacatctgttgacctgtgttctagaaggactaaggagaattaggaaaaagcccatgaattattcaatgatgtccaccataactcagggaaaggaagaaaatccttctgccttccttgagcagctacaggaggccttaagaaaatatactcctctgtcacccaactcactagtgggtcaattgatcctaaaagataagtttattacccaatcaaccacagatatcagaagaaagctccaaaatagggaccaagaggaacaggcccaaaaggaaaagcgagatcagagaaaggccatagccttagtcatggccctcagacaaaccttggtggttcaaagaggacagaaaatggagcaggccaatcacctggtggggcttgttaccagtgtggtttgcaaggacaccttaaaaaagattgtccaacgagaaacaagccgccccatcgtccatgtccactatacggaggcaatcactggaagtcacactacccagagggcaaagcttctctgggccagaagcccccaaccagatgatccaatgacaggactgaggatgactgcggcaagcacccgttcatgtcatcaccccctcactgagccctgggtatgtttaatcattgagggccaggaaattgacttcctcctggacactggcacgaccttctcagtgttaatcccctgtcttggacgactgtcctcaaggtccgttaccatccaaggaatcctgggacagcctgtaaccaggtatttctcccacctcctcagttgtaattgggagactttgctcttttcacatgcctttcttgttatgcctgaaagtcccacacccttattagggagggatatattagccaaagctggagctattatctccatgaagacagggaacaagttacccatttgttgtcccctacttgagggaatcaaccctgaagtctgggcattggaaggacaatttggaagggcaaaaaatgcccatccactccaaatcaggctaaaagaccccatcagttttccttatcaaaggcaatatcccttaaggcctgaagctcataaaggattacaggatattgttaaacatttaaaagctcaagactcagtaagaaaatgcagcagtccctgcaacaccccaattctaggagtacaaaaactgaacagtcagtggagactagtgcaagatcttagactcatcaatgaggcagtaattcctctatatccagttgtacgcaacccctatacccttctctctcaagtaccagaggaagcagaatggttcactgttctggacctcaaggatgccttcttctgtattcccctgcactctgactcccagtttctttttgcctttgaggatcccacagaccacacatcccaacttatgtggatggtcttgccccaaaggtttagagatagccctcatctgtttggtcaggcacaggcccaagatctaggccacttctcaagtccaggcactctggtccttcaatacagcgagatagccaagaccctctatactctaatcaaggagatggagagggcaaatactcacctagtagaatgggaaccagaggcagaaacagccttcgaaaccttaaagcaggccctagtacaagctccagctttaagccttcccacaggacaaaacttcgctttatatgtcatagagagagcagggatagctcttggagtccttactcagactcacaggacaaccccacaaccagtggcatacctaagtaaggaaattgatgtagtagcaaaaggctggcctcactgtttaaggacagttgtggcagtggctgtcttagtgtcagaggctatcaaaataatacaaggaaaggatttcactgtctggactactcatgatgtgaatggcatactaggtgccaaaggcggtttatggccatcagacaactgcctacttagataccaggcactactccttgaggaaccagtgcttcaaatacatatgtgcatagccatcaaccctgccacttttctcccagaagatggggaaccaatcaagcatgactgccagcaaattatagtccagacttatgccacccaagatgatctcttagaagtccccttagctaatcctgactttaacctatataacagtggaagttcatttgtagagaatgggatacaaagggcaggttatgccatagttagtgatgtaactgtacttggaagtaagcctctttccccagggactagcacccagttagcagaactagtggcacttacccgagccttagaactgggaaaaggaaaaagaataaatgtgtatacagatagcaagtatgcttatctaatcctacatgcccatgctgcaatatggaaagaaagggagttcctaacctctgggggcacccccattaaataccacaaggaaattatggagttattgcacacagtgcaaaaacccaaagaggtggcagtcttacactgccaaagccatcagaaggggagtgcaaggaggatcttctgtctcaccagaattcccgggaccagagtatgcaaaaacccccatgtctccctgagtggcatctctgagtggccactgagagaccacacacctctgtgcttcagacccaaggccctgctggcatgggttcatgaggagatctgctccatgggttgcaaagatccaggttggaacagtttgaaggtctcagaagaagataggaagatgcaggaaagtttggaaacttctagagacttgctgaatggttttgaccaaaatgttgataatgatatggacagtaaagtccaggctgagggagcctcagatggagatgaggaacttattgggaaatggcgtaaaggattgtcaatgctatggaagatactctctatagagaatatgatgaatgtctggaaggatggcaccataaaagatgccatcattgttatagaaaaagcagtgaaagccatcaagcctgaaacaataaattcctgccagagaaatctgtgtccagatgttgtacatgacttcacaaggtttacaacagagccaataaaggacataaaagagattggagatttggcaataaaattgggaatttttgagtcctctaatagcacccaattccttaatcagtttgtacctgatgatcggttatccccccataataaattactgaagttttacaaaccggaattttattcatcatacccccttgtttcctgccttgaccattatgtggatcaagttggagccagaatcagcatgagtttctgtgtgacaacagtgacagaggcctctggcagcggcagctggacatgtggtgtgagccagcttaagctgtcctatgccgactaa

SEQ ID NO: 119401 - DNA, 1779 bp, Homo sapiens
atgattgcagattcggctgctcaggttatagtgttgcagttattagcttttgacaatgctaatgccgattgccaggctgctctgcaacctgtcagagggaaagcacatttagttgattacatcaaggcctgtgatggtatcagaggtaatctgcataaagctactttgttggcacaggaaatggcaggactgagagtggataaaggaaatactccatttcctggagcttgttttaactatgggaagcatggtcatactaaaaaagaatgtagaaaaaaatcagtgagtcaggcagccagatggggaaaaaggaaaactgctgatcctgaaatatgtccaaaatgtaaaaaagggaaatattgggctaatcagtgtcactctaagtttgacaaagatgggaccctgatttcgggaaatgccatgagggctgagcaagactgtgaatggtttacatttacaattcctgcagtaaacaacctgcagcctgctaagcattttcatcgtttcacagatgtgtctagtaatggtaaagcttcttattctggatcaaaaggaggacaggcaagggtccagctttttgagaatgcatcagtaagggccactaactctgaccttcctcagtcctccttgtggtgtaggaggaaaactagtgtttctgttgctgtgttggtgagtgcaactattccgatcagcagggtccagggaccatcacaggttcttgggcagggggagaaacaaacaaaccaaaacgggtctagggcaaaccttcgatctcattggagagatgtcatgctattgttagatcaaaccctggcctttactgaaaagaatgtggctttagctgcagcccaagagtttggagatacctggtatcttagtcaagtaaatgatagactgacagccaaagaaagggacaaattccctactggtcagcaagccatccccagtatggatccccactgggaccttgactcagatcatggggactggagtcataaacatctgttgacctgtgttctagaaggactaaggataattaggaaaaagcccatgaattattcaatgatgtccaccatgactcagggaaaggaagaaaatccttctgccttcctcgattggctacgggaggccttaagaaaatatacttccctgtcacctgactcactagagggtcaattgattctaaaagataagcttattacccaatcagctgcagaaatcagaagaaagctccaaaagcgagccctgggccctgaacaaaatctggaggcattattaaacctggcaacttcagtgttctataataggggccaagaagaacaggcccaaaaggaaaagcaatcactggaaggcacactgccccagagtacgatggttctctgggccagaagctcccaaccagatgatccaacaacagaacttatggtgcccaggtttctctttgcctttgaggatctcacagaccacacatcccaacttacgtggaccatcttgccccaagggtttagggatagccctcatctctttggtcaggcactggctcaagatctaggccacttctcaagtccaggcactctggtccttcagtatgtggatgatttacttttggctaccagttcagaagcctcatgccagcaggctactctagatttcttgagctttctagcaaatcaagggtacgaggcatctaggtcgaaggcccagctttgcctacagcaggatcgaggctatcaagctacagatgatcttacaaatggaaccccaaatgagctcaactaa

SEQ ID NO: 119402 - DNA, 936 bp, Homo sapiens
atgggacaagtgtgggctctggttcgttccaccttggaactttttcacactgatgatgaggaggaaggagagtatgacgaagtaacagaagaggttacagagcaggtttatttgccagctaaagctaaagtggcacaggaggaagaggttcatccctacccttctgcaccccctcattattattttgaagaaaaagagtggccagaccctccagatctttcttttctggaggacactgggcgaaaagtagttgccccagtgactgagcagcacctcgagcgactgctgtcagttctattcaggcaggagttcagcaggctagacgagaggggaccaaaagaactgtatgcagattttatagcttggaatctcttaagacaggagtctcttaaaaaggtgatttcagattcagctgctcaggatatagtgttgcagttattagcttttggcaatgttaatctcgattgccaggctgctttgcgacctattagagggaaagcacatttagttgattatatcaaggcctgtgacggtatcggagctaagcaagacagtgaacggtttgcatttacaattcctgtggtaaacaatctgcagcctgctaagcattttcattatttcacagatgggtctagcaatggtaaagcttcttattctggatcaaaaggccaaaaccagcagccaatttggatactatcaagacacctaaaaccttatcatgagccagatgccaaggaagagattccaggaggatcccgaggaccccctggttgcagccatgtcaagactgatgctgaggaggaccctaactgtcacgagcaacacccgttgaacacagccacccacctggggacagatcaagaagctgtcacagatggtggaagaaaacctgaggaaagcgggacaactggtcacaatgactgtttactggaatga

SEQ ID NO: 119403 - DNA, 1929 bp, Homo sapiens
  misc_feature (1)...(1929): n = a,t,c or g
atgggaaaagtgtgggctgtggttcgttccaccttggaactttttcacactgatgatgaggaggaaggagagtataacgaagtaacagaagagattacagagcaggtttatttgccagctaaagctaaagcggtaaaggagagagaacaacggggaaatattacagctacatttgagccttttccttttaaattgctcaaagaatttaaacaagctataaatcagtatggaccaggttctcattttgtaatgggactgttaaagaatgttgctgtttccagtcagatgattcctactgactgggatgctcttactcaggcttgtctaactcctgctcagttcttacaatttaaaacttggtgggcccatgaagcttccattcaggctgcttgcaacgcccaggcccagcctcaaattaatataactacaggccaacttttgggggttggcggctgggctggtttagatgcacaagtggtcatgcaggatgatgccatagaacagcttagaggagtgtgcattagagcttgggaaaaaatccctttatgtggagaacaatacgcttcctttagtgctataaaacagggaccaaaagaaccatatgtggattttatagcttggttacaggagtctcttaaaaaggtgattgcagattcggctgctcaggatatagtgctgcagttatcagctttcgacaatgctaatcccgattgccaggctgctctgtgacctatcagagggaacgcacacttagttgattatatcaaggcctgtgacggtatcagaggtaatatgcataaagctactttgttggtacaggcaatggcaggactgagagtggataaaggaaatcctttgttgcctggagcttgttttaactgtgggaagcatggtcatactaaacaagaacgtagaaaaaaatcagtgagtcaggcagccagatggggaaaaaggaaaactgctgatcctgaaatatgtccaaaatgtaaaaaagggaaatattgggctaatcagtgtcactctaagtttgacaaagatgggaccctgatttcgggaaatgccatgagggctgagcaagactgtgaatggtttacatttacaattcctgcagtaaacaacctgcagcctgctaagcattttcatcgtttcacagatgtgtctagtaatggtaaagcttcttattctggatcaaaaggaggacaggcaagggtccagctttttgagaatgcatcagtaagggccactaactctgaccttcctcagtcctccttgtggtgtaggaggaaaactagtgtttctgttgctgtgttggtgagtgcaactattccgatcagcagggtccagggaccatcacaggttcttgggcagggggagaaacaaacaaaccaaaacgttgtacccaacccctataccctgctctctcaaataccagaggaagcaaaatggttcactgctctggacctcaaggatgccttcttctgtattcccctgcactctgactcccagtttctctttgcctttgaggatctcacagaccacacatcccaacttacgtggaccatcttgccccaagggtttagggatagccctcatctctttggtcaggcactggctcaagatctaggccacttctcaagtccaggcactctggtccttcagtatgtggatgatttacttttggctaccagttcagaagcctcatgccagcaggctactctagatttcttgagctttctagcaaatcangggatcgaggctatcaagctacagatgatcttacaaatggaaccccaaatgagctcaactaacaactaccaaggacccctggaccaacccgctggccctttcaatggcctaaagagttcccctctggaggacactacaactgcagggtcctttctttgcccctatccagcaggaagtagctag

SEQ ID NO: 119404 - DNA, 1433 bp, Homo sapiens
atgtttcggaaggatgaagaactgacttcctcacagagggatttagctgtaaggaactgggcatggagcctagcccgtggtgagcgctcagcaaacatgcacgcagtacacacctcgcttctagtggaaaggacaatactgaccacgaccaaggaaagagggtctaccttgcaatatcccttaagacctggagctcataaaggattgcaagatattgttaaacgtttcaaagctcaagccttaataaggaaatgcagcagtccctgcaacaccccaattctaggagtacaaaaaccgaatggtcagtggagactagtgcaagatcttagacttatcaatgaggcagtaattcctctatatccagttgtacccaacccctataacctgctctctcaaataccagaggaagcagaatggttcactgttctggacctcaaggatgccttcttctgtattcccctgcactctgactcccagtttctctttgcctttgaggatcccacagaccacacgtcccaacttacgtggacggtcttgcccccagggtttagggatagccctcccctgtttggtcaggcactggcccaagatctaggccacttctcaagtccaggcactctggtccttcagtatgtggatgatttacttttggccaccagttcagaagcctcttgccagcaggctactctagatctcttgaactttctagctaatcaagggtgcaagagagtgggaatagctcttggagtccttactcagactcatgggacaaccccacaaccagtggcatacctaagtaaggaaactgatgtagcagcaaaaggtcccctgacagccatcttgctattactcgcctttgggccctgtatttttaacctccttgtcaaacttgtttcctccaggattgatgccatcaagttacaaatggtcttacaaatggaaccccaaatgagctcaactaacaacttctaccgaggacccctggaccaacctgctggccctttgactggcctaaagagttcccctccggaggacactacaactgcagggcccctacttcgcccctatccagcaggaagtagctagagtggtcatcagccaaattcccaacagcagttggggtgtcctttttagaggggggattgagaggagcttgctacaagtgctggaaatctggccactgggccaaggaatgcccacagcccagaattcctcctcatccacgtcccatctgtgtgggaccccactgaaaatcagacttttcaactcaccaggcagccactcccagagcccctggaactctggcccaaggctctctgactccttcccagatcttcttggcttagcggctgaagacggacgctgcccagtctcctcagaagcccccgagactatcacgaatgccgatcttctggtaacactcacaatggagg

SEQ ID NO: 119405 - DNA, 3105 bp, Homo sapiens
atggaggccactggcaaatttctcagagcatcagatcaatctacagcctcccaagttgggaaaaccaaagcagaccatgtgtcctataacaccaaggtagaatctccaaggcttcctatgagacagttggaggtcatgcagcttttcctatgctgcattctcttggtcaaagatgcggaaaaggccttcaataaaattcaacatcccttcatgttaaaacctctccataaactaggtattgaaggaacatatctcaaaataaaagccatttatgacaaactcacagacaacatcacactgaacgggaaaaagctagaagcattccccttgaaaaccagcagaagacaaggatgccctctctcaccactcctattcaacatagtattggaagttctggccagggaaatcaagcaagagaaagaaataaaggaaagtttaaaaacagacaaagctggtctaaggtgtcaaaacaaacttgtccaacccaagggccatgggtcgcatgtggcccaggatggctttgaatgcggcccaacacaaattgttacaattggcactccatgggcttcagtcagccagaagtcgaatgcagtttcctatcagtgtgaggtgtggataccagaacaatttttccagaggtcctgccctcagacttcaacaagccccactgtggctgtcactcaactgtgcggctggtgccatccctctgagcagacgctgaaagagaaaacttctgagatagcacttgtgagcgaaaagcacaccaactggctcaaagagctgtggttgggcagatctggtgtaaatacaaagttccttcccgacatttcccagagtttcttgaagatcacctggcctctagaagatgacaaggagacagcaagtcctacaagcaaaaaggagcattcagcaaacattccaagcacagcttatgccctggaagagtatgttccacgggagagaagtgaagccagtgggtccggacctggaactggacgaatgccaagaggtctcttagataagacagtatggcccctaacttgggatctcactgaaagaggcagcaggtgtatggcagggcagtcaaggtatccaacccaacagatcaggactctgcagctcctagcccaggccctctggcagcccagaaggagctcgtcccagacaaccaagaggaaaagaggggaagcgagaaagagacggagaccctccatcatggccaatgaccctgcaaagagggaacggtggtccaggcatgggacccagactctgatcaatcccagcagtcgtcggccagacgcaccaagtgtggggcctgccaagcctgcgcccacccggaacccacggtggcctgacaccccaactgctgttgggaatttggctgatgaccgctctagctacttcctgctggatagatgggactgtctagttgcaggaaaacaagctcagggctcccacggattctacattatgaaggaaacaagcaaagaaatctccaaaggaccacaaaaacccccaggctatcagttatgtcccttgcaagctgtagggggaggggaatttggcccaacctggatacatgtccccttctccctctctgatttaaagcagatcaaggcagacctggggaagttttcagatgatcctgataggtacaaagatgtcctacagggtctagggcaaacattcgatctcgcttggagagatgtcatgctattgttagatcaaatcctagcctttattgaaaagaatgcagctttagctgcagcccgagagtttggagatacctggtatcttagtcaagtaaatgatagaatgacagccaaagaaagggacaaattccttactggtcagcaagccatccccactatggatccccactgggactttgactcagatcatggggactggagtcataaacatctgttgacctgtgttcttgaaggactaaagggaattaggaaaaagcccatgaattattcaatgatgtccactataactcagggacaagaagaaaagccttctgccttcctcgagcggctaagagaggccttaagaaaatatactcccctgtcacccgaatcactcgagggtcaattgattctaaaagataagtttattacccagtcagctgcagatatcaggagacagctccaaaagcaagccctgggccctgaacaaaatctgcaggaattattaaacctggcaaccttggtgttctataacagggaccaagaggaacaggcccaaaaggaaaagcgagatcagagaaaggctgcagccttagtcagggccctcagacaaacaaaccttggtggttcagagaggacagaatatggagcaggccaatcacccaggagggatatattagccaaagctggagctattatctacatgaatatggggaacaagttacccatttgttgtcccctacttgaggagggaatcaaccctgaagtgtgggcattggaaagacaatttggaagggcaaaaaatgcccgcccagtccaaatcaggctaaaagaccccaccacttttccttatcaaaggcaatatcccttaaggcttgaagctcataaagcattacaggatattgtaaaacatttaaaacctcaaggcttagtaaggaaatgcagcagtccctgcaacaccccagttctaggagtacaaaaaccaaatggtcagtggagattagtgcaagatcttagactcatcaatgaggcagtaattcctgtatatctagttgtagcaaacccctataccctgctctctcaaataccagaggaagcagaatggtttatggttctggacctcaaggatgccttcttctgtattcccctgcactctggctcccagtttctctttgcctttgaggatcccacagaccacatgtcccaacttatgtggatggtcttgccccaagggtttagggatagccctcatctgtttggtgaggcactggcccaagatctaggccacttctcaagtccaggcactctggtccttcagtatatggatgatttacttttggctaccagttgggaagcctcatgccagcaggctactctagatctcttgaactttctagctaatcaagggtacaag

SEQ ID NO: 119406 - DNA, 5175 bp, Homo sapiens; identical to SEQ ID NO: 118077

SEQ ID NO: 119407 - DNA, 371 bp, Homo sapiens
ctatcaggatcatctgaaaacttccccaggtctgccttgatctgctttaaatcagagagggagaaggggacatgcacctgggttgggccaagttctctgccccctacagcttgaaggggacataaccgattgcctggggggcgggttgtggtcctctggagatttctttgcttatttccttcctcggctgagcccagaagtacaggaaaagcagaagcttgttctaggcaaaccaacgctcccaactccgaagagctgggggttgttagagagcccatttccagaaagcctgacacccgtgtctttagtccggtggccacactagtcgcttttagctggccgacaggtgcccgatatttaacccccgaatt

SEQ ID NO: 119408 - DNA, 317 bp, Homo sapiens
ctatcaggatcatctgaaagctttcccaggtctgcattgatctgctttaaatcagagagggagaaagggacatgtacccgggttgggccaaattcccctccccctacagcttgaaggggacataaccgatagcccagggggttttgtggtcctttggagatttcttttattgtttccttcaacgctcccaactccgaagagttggaggttgttcgagagccctttcccagaaagcctgacacccgtgtctttagtctggtggccgtgctagtcacttttaactggccgacagatgcctggtatttagcccctgaatt

SEQ ID NO: 119409 - DNA, 384 bp, Homo sapiens
ctatgccaaggcaatcactggaaggcacactgccccagaggacaaagcttctctgggacagaagcccccaaccagatgatccaacaacaggactgagggtgcctggggcaagtgtcagctcatgtcatcactctcactgagccccaggtaactttaaccattgacagccaggaaattgacttcctcctggacactggtgcggctttctcagtgttaatttcctgtcctgaacagctgtcctccaggtccgttaccatctgaggaatcctgggacagcctgtaaccaggtatttctcccacctcctcagttgtaattgggagactttgctcttttcacatgcctttcttgttatgcctgaaagtcccacacccttattagggagg

SEQ ID NO: 119410 - DNA, 424 bp, Homo sapiens
gctctcagggcgtgtggggactaggtgagtgggagaagcggatcacgctgactccactagatccagtaggagtagccaaagctggagttattatctacatgaatatggggaacgagttacccatttgttgtcccctacttgaggagggaatcaaccctgaagtctgggcattggaaggaacaaactcaagctccagccttaagccttcccacaggatgaaacttttctttatgcatcacagagagagcaaggatggctcttggagtccttactcagactcatggggcaaccccacaaccagtggcatacctaagtaaggaaattgatgtagtagcgaaaggctggcctcactctttaagggtagttgtggcggtggccatcttagtgtcagaggctatcaaaataatacaaggaaaggatctct

SEQ ID NO: 119411 - DNA, 614 bp, Homo sapiens
gagggaaactagtgcttctgctgctgcgttggtgagtgcaactattccaatctgcagggtccagggaccattgcgggttcttgggcaagaggtgtttctgctgctgcttcgccttcctacagctccccttcctattaatgataagcctcctctaatctcccctgcccagaaggaaacaagcaaagaaatctccaaaggaccacaaaaacccctgggctatcggttatgtccccttcaagcagtagggggaggggaatttggcctaacccgggtacatgtccccttctccctctatgatttaaagcagatcaaggcagacttggggaagttttcagatgatcctgataggtacatagatgtcctacagggtctagggcaaactttctatctcacttggagagatgtcatgctattgttagatcaaaccctggcctttaatgaaaagaacgcagctttagctgcagcccgagagtttggagatatctgggaccaaggggaacagtccaaaaaggaaaagcaagatcagagaaagaccgtagccttagtcatggccctcagacaaataaaccttggtggttcagagaggacagaaaatggagcaggtcaatcagccg

SEQ ID NO: 119412 - DNA, 852 bp, Homo sapiens; identical to SEQ ID NO: 119397

SEQ ID NO: 119413 - DNA, 912 bp, Homo sapiens
atgggtcaggaagtttggctcacacctgtaatcccagtgctttgggaagccaagtctaagaggaaaggcagtgtttccactgctgcttcagtgagtgcaactattccaaacagcagggtccagggaccattgcagattcttgggcaggggagaaaaaacatcaacaaccaaaacagtgggcagctttttctttcagaaggaaacaagcaaagaaatctccaagggaccacaaaagcccctgggctgtcagttatgtcccttcaagctgtagggggaggggaatttggcccaacccggatacatgtccccttctcccgctctgatttaaagcagatcaaggtagatatggggaagttttcagatgatcctgataggtatatagatatcctacagggtgtagggcaaaactttgacctcacttggagagatctcatgctattgttagatcaaaccctggcctttaataaaaagaatgcagctttagctgcagctggagagtttggagataccttgtatctgagtcaagtaaatcatacaatgaccgacgaagagatggacaaattccctgctgaggttgggaaaccaattgagcatgactgccaacaaattgtagcccagacttatgctacccgagaggatcttttagaagtccccttagctaatcctgaccttaacctatatactgatggaagttcatttgtggtgaatgggatacaaagggcaggttatgccatagttagtgatgtaacagcacttgaaagtcccatgacaaccatcatgctattactcacctgtgagccctgtatttttaacctccttgtcaattttgtttcctccaggattgaggccatcaagctacagatggccttacaaatggaaccccaaataagctcaactcacaacttctactga

SEQ ID NO: 119414 - DNA, 600 bp, Homo sapiens
atgcgtcggtcaaggccactaaatccgatttttctcagtcctctttgtggtctaggaggacagacaagggtgcaggttttcgagaatgtgttggtaagggccactaaatccaaccttcctcagtcccccttgtggtctgggaggaaaactagtgtttctgctgctgcgtcgaaggaaataagccaagaaatctccaaaggaccacaaaaacccccaggctatcggttatgtccccttcaagctgtagggggaggggaatttggcccaacccaggtacatgtccccttctccctctctgatttaaagcagatcaaggcagacctggaggatcacaactccttgccagcaagggaacaaaactggacagagaatgaatttgacgaattgacaggagcaggcttcagaaggtgggtaataacaaactcctctgagctaaaggagcatgttgtaacccaatgcaaggaagctaagaaccttgaaaaaaggttacaggaactgctaactagaataaccagtttaaagaagaacatgaaagacctgatggagctgaaaaacacagcacgagaacttcatgaagcatacaaaagtaacaatagctga

SEQ ID NO: 119415 - DNA, 1635 bp, Homo sapiens
atggtgtgtccagagtttgttccttctgatgtacggatgtgtccagagtttcttccttctgttgggttcgtggtctcgctgacttcaggagtgaagctgcagaccttcacgctagacacaaaagttctccatgtccccttctccctctctgatttaaagcagatcaaggcagacctggggaagttttcagatgatcctgataggtacaaagatgtcctacagggtctagggcaaacattcgatctcgcttggagagatgtcatgctattgttagatcaaatcctagcctttattgaaaagaatgcagctttagctgcagcccgagagtttggagatacctggtatcttagtcaagtaaatgatagaatgacagccaaagaaagggacaaattccttactggtcagcaagccatccccactatggatccccactgggactttgactcagatcatggggactggagtcataaacatctgttgacctgtgttcttgaaggactaaagggaattaggaaaaagcccatgaattattcaatgatgtccactataactcagggacaagaagaaaagccttctgccttcctcgagcggctaagagaggccttaagaaaatatactcccctgtcacccgaatcactcgagggtcaattgattctaaaagataagtttattacccagtcagctgcagatatcaggagacagctccaaaagcaagccctgggccctgaacaaaatctgcaggaattattaaacctggcaaccttggtgttctataacagggaccaagaggaacaggcccaaaaggaaaagcgagatcagagaaaggctgcagccttagtcagggccctcagacaaacaaaccttggtggttcagagaggacagaatatggagcaggccaatcacccaggagggatatattagccaaagctggagctattatctacatgaatatggggaacaagttacccatttgttgtcccctacttgaggagggaatcaaccctgaagtgtgggcattggaaagacaatttggaagggcaaaaaatgcccgcccagtccaaatcaggctaaaagaccccaccacttttccttatcaaaggcaatatcccttaaggcttgaagctcataaagcattacaggatattgtaaaacatttaaaacctcaaggcttagtaaggaaatgcagcagtccctgcaacaccccagttctaggagtacaaaaaccaaatggtcagtggagattagtgcaagatcttagactcatcaatgaggcagtaattcctgtatatctagttgtagcaaacccctataccctgctctctcaaataccagaggaagcagaatggtttatggttctggacctcaaggatgccttcttctgtattcccctgcactctggctcccagtttctctttgcctttgaggatcccacagaccacatgtcccaacttatgtggatggtcttgccccaagggtttagggatagccctcatctgtttggtgaggcactggcccaagatctaggccacttctcaagtccaggcactctggtccttcagtatatggatgatttacttttggctaccagttgggaagcctcatgccagcaggctactcttgaactttctagctaa

SEQ ID NO: 119416 - DNA, 675 bp, Homo sapiens
atggaaactcttgcagaagtatatctgactaagtccatccgggacatagcatccatcaagaatcactgggatctacacacagaagaaagtagcaaggacaccccaactgctgttgggaatttggctgatgaccactctagctacttcctgctggatagatgggactgtctagttgcaggaaaacaagctcagggctcccacggattctacattatgaaggaaacaagcaaagaaatctccaaaggaccacaaaaacccccaggctatcagttatgtcccttgcaagctgtagggggaggggaatttggcccaacctggatacatgtccccttctccctctctgatttaaagcagatcaaggcagacctggggaagttttcagatgatcctgatagaagcagccaattgcagacaagaaatgccaattgctgtagcagaatgccagttccaattgtggcagcagtgacagctcctactcaggccacttgtcatctggagcagcttagcagtgagtgtgaacccacaggtgtcagccccaagtggtggcagatgtcacctcaggtagactacatccctatggaagaaagttcttcaaaatcagagctgaaggaaccaggaaaatgggatatggacaatattgttgagtatcaccaaaatgacttggtgcagcagtag

SEQ ID NO: 119417 - DNA, 1047 bp, Homo sapiens
cctactgagcatgtcacacttagagccttcagcgggggagctgaacctgatgaaccagtaaggtacagatttggacttaaaacataagattgttttattagacactcccgccatgtaaattctttcattacgtttgggctgtaaggtgcccaagctagtaccaatcaccaagaggcaaactgcagcaggccaggtatctttcactcaggaggaactaactctggacacatcctgggggcttgtctgggattttgccacatggtgagtaccatcggaccactttcactgctattctgtcctatttttccttagaattcaggggctaaacacgctgtagggggaggagaatttggcccaactcgggtacatgtccccttctccctctctgatttaaagcagatcaaggtagacatggggaagttttcagatgatcctgataggtatttagatgtcctacagggtctagggcaaaccttaaaaaagactgtccaacaagaaacaagccacatcctcgtccatgtccgctatgacaaggcaatcactggaaggtgcactgccccagagaacaaaggttctctgagccagaagcccccaaccagatgatccaacaacaggacggacaaccccacatcagtggcatatctaagtaaggaaactgatgtagtagcaaaaggctggcctcactgtttatgggtagttgtggcagtggccatcttagtattagaggctatcaaaataatacaaggaaaggatttcactgtctggacttctcatgatgtaaatggcatactaggtgccaaaggaaattcatggctatcagacaaacgcctgcttagataccaggcactactccttgagggaccagtgcttcaaatacacacgtgtgtggccctcaaccctgctatttttctcccagaggatggagagccaatcaagcatgactaccaacaaattgtagcccagacttatgtcacctgagaggatctcttagaagtccccttagctaatcctgaccttaacctatataccaatggaagttcatttgtg

SEQ ID NO: 119418 - DNA, 1002 bp, Homo sapiens
atgaaaacaggttataataccacaaaaagatgtaaagataacttcaggttcctgcagctagacaaaatacttgatgtcgtttctaaaggaggacaggcaaaggtgcaggttttcaagaaagcatcagtaagggccactaaatccgaccttcctcggtcctccctgtggtgtaggaggaaaactagtgtttctgctgctgcgtcagtgagcacaactattctgatcaacagggtccagggaccgttgtgggttcttgagcaagaagggtttctgctgctgcgtcgggaaaaatggccacctgagggaggtataaataacaatactatcctgcagcttgacctttgctgtaagagggaaggcaaacggagtgaaataccttatgtccaagctttcttttcattgaagaaggaaataagcaaagaaatctccaagagaccaaaaaaacccccgggctatcagttatgtccccttcaagctgtagggggaggggaatttggcccaacccaggtacatgtccccttctccctctctgatttaaagcagatcaaggtagacctggggaagttttcagatgatcctgataggtacatagatgtcctacagggtctagggcaaacctttgatctcacttggaaagatgtcatgctattgttagatcaaaccctggcctttaatgaaaagaatgctttagctgcagtccgagagtttggagatacctggtatcttagtcaagtaaatgacagaatgacagctgaagaaagggacaaattccctactggtcagcaagccatccccagtatggatccccactgggaccttgactcagatcatggggactggagttgcaaacatttgttgacctgtgttctagaaggactaaggagaattaggaaaaatgaattatgcaatgatgtccaccataactcagggaaaggaagaaaatcctgccttcctcaagtggctatgggaggccttaagaaaatacactcccctgtcacctga

SEQ ID NO: 119419 - DNA, 2309 bp, Homo sapiens
ggctctctaacaacccccgactctttggagttgggagcgttggtgtgcctcgaaccagcttccacttttcttgtacttctgggctgagcctagggttgacagagaggaaagccatgcagctccggggtcccgacaacaagttggttgaccctgcggccatgagtggaactctcaaaggcatgttgcccaagcaagactcgcccatctctcctatctatcctgacccttgccccctgggtcctaatgcctgccagacaaacttcctcttgcctctcttctccaagaaggaaataagcaaagaaatctccaaaggaccacaaagacccccaggttatcggttatgtccccttcaagctgcaggaggaggggaatttggcccaacccgggtacatgtccccttctccctctctgatttaaagcaggtcaaggcagacatggggaagttttcagatgatcctgataggcacatagatgtcctacagggtctagggcaaacctttgacctcgcttggagagatgtcatgctactgttagatcaaaccctggccttttatgaaaagaatgtggctttagctgcagcccgagagtttggagatacctggtatcttagtcaagtatgtttaactattgagggccaggaaattgacttcctcctggacagtggcacggccttctcagtgttaatctcctgtcctggacaactgtcctcaaggtctgttaccatccgaggaatcctgggacagcctgtaaccaggcctgaagctcataaaggattacagaatactgttaaacatttgaaagctcaaggcttagtaaggaaatgcagcagtcccggcaacaccccaattctgggagtacaaaaacccaatcgtcagtgcagactagtgcaagatcttagactcatcaatgaggcagtgattccactatatccagttgtacccaacccctataccctgctctctcaaataccagaggaagcagaatggttcatggttctggacctcaaggatgccttcttctgtattcccctgcactctgattcccagttcctctttgcttttgaggatcccacagaccacacgtcccaacttatgtggatggtcttgccccaggggtttagggatagccctcatctgtttggtcaggcactggcccgagatctaggccacttctcaagtctaggcactctggtccttcaatatgtggatgatttacttttggctaccagttcggaagccttgtgccagcaggctactctagatctcttgaactttctagctaatcaagggtacaaggtgtctaggtcgaaggcccagctttgcctacagcaggatggggaaccaatcgagcatgactgccaacaaattatagtccagacttatgccacccgagatgatctcttagatgtccccttaactattcctgaccttaacctatataccgatggaagttcagttgtggagaatgggatacaaaggacaggttacaccatagttagtgatgtaaccatacttgaaagtcccgtggcagccatcttgctgttacttgcctttggggcctgtatttttaaccttcttgtcaaatttgtttcctctagaatcgaggccttcgagctacagatggtcttacaaatggaaccccaaatgagttcaactaacaacttctaccgaggacccatggaccgacccgctggcacttcccctggcctagagagttcccctctgaaggacactacaactgcaggagctgtaacactcaccacggaggtctgcagcttcactcctgagccagcgagaccacgaacccaccagaaggaagaaactccgaacacatctgaacatcagaaggaacaaactccagacacgctgcctttaagaactgtaacactcaccgcaagcgtccacggcttcattcttgaagtcaatggttcaggaaaaactggaaaggcaactatagtgtggcaagatgccacgcagaactggcagcacaaaatccaggaacgttttaaaactacgcaacaggcggagttagaagaggtatcagctcttgaaggcttacttctcaatactggctgcgagagcaagatgcccacgacgaccttgggaactacaagtccgccatacagcgggagcgcccggagtagggacgaccgacaccagcccgtacccaccctcgtgcgcgacggccccttccgccggtcaacccggaagagttcgcggtggccgcggcagacggaagccgaacgagttcttcggcggctgcaggatggggactccaaagtgaaagtggcggtcggatacgacccatga

SEQ ID NO: 119420 - DNA, 1159 bp, Homo sapiens
atggggaaaaatggccacctgaagggaagtacaaattacaatactatcctgcagtttgaccttttctgtaagagggaaggcaaatggagtgaaataccttatgtccaagctttcttttcattgacagagaatacacaacaatgcaaagcttacaatttacatcccacaggaggaccgctcaacttacccccatatcatagcctccctatagctccccttcccattaatgataatcctcctctaatctcccctgcccagaaggaaataagtaaagaaatctccaagggagcacaacctctcccccacccctgctatcggttatgtccttttcaagctgtatggggaggggaatttggcccaacccgggtacatgtccccttctccttctctgatttaaagcagatcaaggtagacctgggtaagttttcagatatatcctgataggtatatagatgtcccacagggtccagggcaaaccttcaatctcacctggagagatgtcatgctattgctagatcacaccctggcctttaatgaaaagaatgcggctttagctgcagcccgagagtttggagatacctggtatcttagtcaggtaaatgatagaatgacagccaaagaaagggaaaaattccctacaggtcagcaagccatccccagtatggatccctgctgggacctcgactcagatcatggggactggagatgcaaacatctgttgacctgtgttctagaaggactaaggagaattaggaaaaagcccatgaattattcattgatgtccaccataactcagggaaaggaagaaaatccttctgccttccctgagcagctacaggaggccttaagaaaatatactcccttgtcacctgactccctcaaaggtcaattgatcctaaaagataagtttattacccaatcagccacagccgcagatatcaggagaaagctccaaaagcaagccctgggccctgaagaaaatttggaggcattattaaacctggcaacctcagtgttctataatagggaccaagaggaacaggcccaaaaaggaaaagcgagatcagagaaaggccacagccttagtcacggccctcaggcaaacaaaccttggtggttcagagaggacagaaaacagagcaggccaatcacccggtag

SEQ ID NO: 119421 - DNA, 611 bp, Homo sapiens
gtactcaagacgttcatcaactgccgggataccgtctttgttgcgtttgaagtcaacaatacggtaagcctgcttgtggccaccaccgatatgacgagtggtgatacggccattgttgttacgaccaccggatttgctgtttttttccagcaacggagcaaaaggtttgcccttgtgcagctcagggttaaccactttaactacgtggcgacgacccggagatgtcggtttacatttaacaactgccattgtattactcctccgacttactcagcgccgccaacgaagtccagattctggccttctttcagggtgacgtaagcttttttccagtcgctacgacgaccgatacgctgtccgtgacgtttaactttccctttaactaccagggtgttaacgacttcgacttcgacttcaaacagtttctgcacagcagctttgatttctgctttggtcgcgtctttagcaactttgagtaaagtcacacactggggcatgttagggggtgggaggcgacggtggctcccatcccccggcctggtccgcatcccgtcctcggactcatcctcggagccgctgctgctgtagcccaccaggggcgccgcgctcat

SEQ ID NO: 119422 - DNA, 1296 bp, Homo sapiens
atgggcacaccgcagctggcgcgaattctgcacccgtttgtcggcgtggttatgtttgcctcgttcatcatcatgtttttccgttactggcatcacaacctaatcaatcgggatgatatcttttgggcgaagaatattcgtaagatcgtcgtcaacgaggaagtaggtgacaccgggcgttataacttcggtctgcaccaatcggtcggtaatggcgcaatgagcaatgctattaacgaaattgataataccgatttagtgttcgttttcgggtacaacccggcggattcccacccaatcgtggcgaatcacgtaattaacgctaaacgtaacggggcgaaaattatcgtctgcgatccgcgcaaaattgaaaccgcgcgcattgctgacatgcacattgcactgaaaaacggctcgaacatcgcgctgttgaatgcgatgggccatgtcattattgaagaaaatctgtacgacaaagcgttcgtcgcttcacgtacagaaggctttgaagagtatcgtaaaatcgttgaaggctacaaccgcccggagctccggttgaagatatcacccggcccgtcagcgccaagcctcgcgatgctgaccgtaactcaaccgggtgttacctggtttgattgcagcatcaacgccagactgaatctggtcgccagctttcaggcctttaggggccaggatgtaacggcgttcaccgtctttgtacagaaccagcgcgatgttcgcggaacggttcggatcgtactcaagacgttcaacaactgccgggataccgtctttgttgcgtttgaagtcaacaatacggcgttccgatcgcagccgccggaaggcgcagcggaagaggtgcgggcaggtgatgccgcagcaccgtcgctcgatccggccactattgcagccaataacaccgagtttgaaccggaacctgcaccggtcgccccaccgaagccgaaaccggtggagccgcctaaaccgaaggttgaagcaccacctgcgccgaagccagaaccgaagccggtcgtggaagaaaaagctgcaccgacgggtaaagcctatgttgtgcaactgggtgcgctgaaaaatgccgataaagtgaatgagattgtcggtaagctgcgcggtgccggttatcgggtttatacgtcgccatccacgccagtgcagggtaaaattacccgtattctggttgggccggatgcctcgaaagataagctgaaaggttcgctgggtgagttgaagcaactttctggcttaagtggcgtggtaatgggctatacgccgaattaa

SEQ ID NO: 119423 - DNA, 1593 bp, Homo sapiens
atgaggtgcttgtggtttcgtggcggtaccatcgcttccacgtactgtctacgggacctggtgcttttattgcaattccgagcaacagtgtttttgatcctgtcctttgggcctccgggaaacaaggtccggggacttggctacacaggggaggtaagggcggcaaagaatgcgcttcggagccgcgccttatgctacgccggggtgtggttttgccgccttacggcaggcaccatttcgcctcctatggcgtacaaaaagaatgaaatgcccgcgtgccggaactgcccgcggatgactgatggacttaccgggccacaggcaattaaacctgcgggccctcccgttacaccggccccccaagcggccactgccaccaacgcccgaatacggccaccttcaaccaccgcgcacacggctaaacataggggctttgccgcaatggcgttgcttaccctggtgagcacgcgtatacaagagggggaagggagggagggagggggcgtaattgcaaccaccaggacctgcaacgcgggattcacctacccgagtggacctgatactaccctgctctgcgcggcatgtgcgcccgcggacccaccctgccccctagtaccggcaacagacccatactacgcccgattgctgacgtacccattgcatgcccgcaaacccccgaatgcgcacggcccaaccgattaccgtgaaacactgccttgccgcccggcgccggccaccacctgcccgctgagcgcattgacccagaacccacacacatttcatggttatgtgatgactgggggtcagccgtacgcaacacggcgcaaagaatggcacggggctacccggaccttgaatgccggggcccgacccgatggcgcgtttgccgaagcgcaaacttgccgtcgtctggtattgctgaactattttggcgaagggcgtcaggagccgtgcgggaactgcgatatctgcctcgatccgccgaaacagtacgacggttcaaccgatgctcagattgccctttccaccattggtcgtgtgaatcagcggtttgggatgggttatgtggtggaagtgattcgtggtgctaataaccagcgtatccgcgactatggtcatgacaaactgaaagtctatggcatgggccgtgataaaagccatgaacattgggtgagcgtgatccgccagctgattcacctcggcctggtgacgcaaaatattgcccagcattctgccctacaactgacagaggccgcgcgcccggtgctgcgcggcgaatcctctttgcaacttgccgtgccgcgtatcgtggcgctcaaaccgaaagcgatgcagaaatcgttcggcggcaactatgatcgcaaactgttcgccaaattacgcaaactgcgtaaatcgatagccgatgaaagtaatgtcccgccgtacgtggtgtttaacgacgcaaccttgattgagatggctgaacagatgccgatcaccgccagcgaaatgctcagcgttaacggcgttgggatgcgcaagctggaacgctttggcaaaccgtttatggcgctgattcgtgcgcatgttgatggcgatgacgaagagtag

SEQ ID NO: 119424 - DNA, 863 bp, Homo sapiens
aagaggcatggtgtttctccttctgatggatcagcgtcagcagcgtgtcgacgactggcgcaggctgccgtcattgttgagcgtatggcaatcctgtggagatagcgggcggcgcgcgccaggcgggcgttaatttcactggcgttttcaggccacggttttccaggcgctggcggaggatctccggcgaaacctgcaaattgtggtggcgacggtggcgttcggcatgggcatcaataaaccaaacgttcgcttcgtggtccactttgatattccgcgcaatatcgaatcctattatcaggaaaccggacgcgccgggcgtgatggcctgcccgcggaagcgatgctgttttacgatccggctgatatggcgtggctgcgccgttgtctggaagagaagccgcaggggcagttgcaggatatcgagcgccacaaactcaatgcgatgggcgcgtttgccgaagcgcaaacttgccgtcgtctggtattgctgaactattttggcgaagggcgtcaggagccgtgcgggaactgcgatatctgcctcgatccgccgaaacagtacgacggttcaaccgatgctcagattgccctttccaccattggtcgtgtgaatcagcggtttgggatgggttatgtggtggaagtgattcgtgttgcggcgtttctcgagccagattattcgcatcgcccgtgaatttgccgataacgggtgaaatccctgaaagagggttccatccgttttgcggcagaacaacagaaaacggtaaaaaccacccgcgcaacctgttcatctggcgttctaactgctcggttcttccggtaaaggtcatgagtttatgctcaagtaccccatgccccat

SEQ ID NO: 119425 - DNA, 654 bp, Homo sapiens
  misc_feature (1)...(654): n = a,t,c or g
tcacacgaccaatggtggaaaggcaatctgagcatcggttgaaccgtcgtactgtttcggcggatcgaggcgatatcgcagttcccgcacggctcctgacgcccttcgccaaaatagttcgcaataccagacgacggcaagtttgcgcttcggcaaacgcgccccatcgattgacgttggtggcgtgtcagcgtaaagaagaggaaacagcattgagctgtcggcttgttttgcgaaagctgacagaaacagaaccggtgattattttcgaaggtatcgaagcgccggcaacgctgggtttaaaagccagtcggtcaccctgaaagaaggccagaatctgacttcgttggcggcgctgagtaagtcggaggagtaatacaatggcagttttaaatgtaaaccgacatctccgggtcgtcgccacgtagttaaagtggtaaccctgagctgcacaagggcaaaccttttgctccgttgcgtattgttgacttcaaacgcaaaaagacggtatcccggcagttgttgaacgtcttgagtacgatccgaaccttccgcgaacatcgcgctggttcngtaacgatttctcggttcctgttttgcaactattaggttccccatgatgtgtgcttcgggtacggcctgtttcgttcccat

SEQ ID NO: 119426 - DNA, 906 bp, Homo sapiens
ccgggggcccccattttaaattggtttcccccacaagggaaaggcccccgggcaaatgtgacataaaatctccttttgggagggggggggaaaaagaaaaaacccccccggacccgggggccttttcccgggctttcccaaccgggccttttatggcttttcccaaagaggcctggttgcagtcatttgccctccacccccattaaggaaatgggtttgccaaaaattcaccatagggtgggatgggaatcattttcgggtgtcttcttagaagttgacttcaaaatctacaaaaagaaaatgaatgagtttttctccgtagacgataataatgaagaagaagaggatgttgaaatgaaagaagattcagatgagaacggtccagaggagaagcaaagtgtggaagaaatggaagagcagagccaagatgcagatggtgtcaacactgtcactgtgcccggccctgcttcagaagaggcagttgaagactgtaaagatgaagattttgcaaaggatgaaaatattacaaaaggcggtgaagtgacagatcattctgtgcgtgaccaagatcatcccgatggacaagagaatgattcaacgaagaatgaaataaaaattgaaacagaatcgcagagctcatatatggaaacagaagaactttcatcaaaccaagaagatgccgtgattgtggagcaaccagaagtgattccattaacagaggaccaagaagaaaaagaaggtgaaaaagctccaggcgaggacacacctaggatgcctgggaaaagtgaaggctccagtgacctagaaaatactccaggtcctgatgttgaaatgaatagtcaggttgacaaggtaaatgacccaacagagagtcaaccctcgtgccaagcatgacgtagtcggggt

SEQ ID NO: 119427 - DNA, 639 bp, Homo sapiens
acttgtttccctgaaaggtggttatcccatggccagtttcatggtacaacgccattaatgagaactgccgtgaagaaataggtcagttgattgaggggtaaatttataccaggagccacaacttgtaacacctgttcattgtgaagcgaggaagaggaagaagatgaagaagaggaagaggaagaagaggaggaagaggaagaagaggaggaagaataagaagagggagagtcagccatcatttgtgccaaagtctgcatcagcgtttttccaaggagaaaaaatgagctaaacatggcaattacgccaaacaccattccaaaattgaaccactggtaaagcatccatgctttccgccgtccccaactgtaaaaggcacgattgaaaacagcagtttgccatcttatgtggaaaggggagatgctcagtccgttgttttccagccagtcttcataagaatgtttaaaatagacagatgacttcagcaccaagtcggtcaggtagacgacagtccagccacccaccaccaccaccaccagcgacaccggaatcatggcggcagcggcggcagaggagggaaggcgagccccggcgtcctcctccctgcaccgccaacagctgaccgcgcgcgccacgaaa

SEQ ID NO: 119428 - DNA, 657 bp, Homo sapiens
tacttttgacggaagcgtgttcccatttggggacttgtgagggctatcaggccagttcaaccgtcccacatcccagttaggtgggtctatttgttgaagcttttaccccaagctgaacgactgaccagggcccgagggtgactactggggacacccatcaaggtcagccccaagctgtagcccaactgagccaggtagagtctggggctcagaggcttcctcctaaggcaggcttccacagggtctggccctctatcctgccgtgtcctggcacttttgatgaaggatagtgagttgctcctggtgacaggcatgcattccatggtggtggatcaggtctcagccctgagctcactctccctcagactcagtgctgtgctcaggcaactgtgcagggcctggaggggaccagaagctggtcccagagtgggacaagtagcctgagtccatggtctcacacttccttagcctgccctcaaaaagaagagggagaagaagaagaggaagaggaagaggaagaagaagaagaagaggaagaggaagaagaagaagaagaggaagaggaagaggaagaagaagaagaagaagaagaggaggaagcaaaaacacaatagaaaagtggacaaaagatataaacagacagcccacagaaaaaga

SEQ ID NO: 119429 - DNA, 683 bp, Homo sapiens
ctctcgccccggaattaccgggtcgacgatttcgtatggggaccccgggcatggtgctgggcctcctggtgcagatctgggccctgcaagaagccttaagcctgagcgtgcagcaggggcccaacttgctgcaggtgaggcaaggcagtcaggcgaccctggtctgccaggtggaccaggccacagcctgggaacggctccgtgttaagtggacaaaggatggggccatcctgtgtcaaccgtacatcaccaacggcagcctcagcctgggggtctgcgggccccagggacggctctcctggcaggcacccagccatctcaccctgcagctggaccctgggagcctcaaccacagcggggcgtacgtgtgctgggcggccgaagagattcctgagttggaggaggctgagggcaacataacaaggctctttggggacccagatgaccccacacagaacagaaaccggatcgcaagctttccaggattcctcttcgagctgctgggggtgaaaagcgtgggtgtggctgtgatcgtgcggggtgcctggttctggggccgcctcagctgccagctcagggactcatgtagcagcccaggaaatgcattctacagtaacgtactataccgtccccggcgcgccccaaagaacagtgaggactgctctcgtgagcggaaggaccct

SEQ ID NO: 119430 - DNA, 628 bp, Homo sapiens
agtctctctcatagggcgggtggaggaggtggggtgggggggggcgctgtgtgtctcttctcccccccgcggacaaaaagagagtccgcaccggagtcgccctcccgggttcttggtcactctccggttcccagctagggcgcgccctccaccagagggtcagtatcgcgcatcctgacttcaggaggtacccatgagcgaagtaacggccttacctgtcatcgaaatcaagccggaacaggccccagtgctttacgtagcgggcggccttgatgcttatctcgagcaaatccgccaggcagtaaacgaagtgccggacctgtccacgaagaaaggacgtgaccgtgtcgcctctctggcagcgcaggtatcacgcagtaagacggcaattgaaaagccgggccgagagtacctgaagcgcctgaaagaggctgtgcgacctgctgaggccgaaattaagcgtttcgttgatgcatgtgacgagcttcgcgacgcaacccgccgcccactcaccgaatgggaagccgagcaggaacgcattaaggctgaagaagccatgaacgcgctgcacgccgaagcgctggaaatgaacatcaagttcgatcaggagttggcggccaagttctaa

SEQ ID NO: 119431 - DNA, 516 bp, Homo sapiens
tgcagaatgatgaagttgcatttagaaaattaaagctgattattgaagatgttcagggcaaaagctacctgacgaacttccatggcatgaatcttacccatgacaaaatgtgttccatggtcaaaaaatggcagacagtgatcgaagctcatgttgatgtcaagactaccaatggttacttgctttgtctgttctgtgttggttttactaaaaaatgcaacaatcaaatatggaagacttctttgttttgacaacaggcatcatttcccacctccatgagcctttcttggtggtaacagactatgaccagtaataggtttccatttctgcacccagttgggggtgatattaaaattacttaataatctgtacacctgaacatgaacaactgtattgttactcacagctttcattaccccttgtagctcccttgacccgggcaacacagtgccctcatcaaaccttccgctaggttgtgtcatatgaagagtgtgatgtttgatgcacgatgttgat

SEQ ID NO: 119432 - DNA, 764 bp, Homo sapiens
acccacgcgtccgctctgaccagttttatggcggttttttttgaacaagctttcttacgacaggcggcaaaaagggatctcaagaagaaagtggttgatccattttctaagaaagattgttgtaatatgtaaagcaccgtgctatgttcaatataagaaatattggaaaagacgttgggtcccccaggacccaaggaaccaaaattgcatcctgatggtctcaagggtccgtgtgtttgaaagtgagtcttgctgatttgcagaatgatgaagttgcatttagaaaattcaagctgattacttgaagatgttcagggtaaaaaactgccctgactaacttccatggcatggatcttaccccgtgacaaaaatgttgttccatggtcaaaaaaatgggcagacaatgatttgaagctcaccgttgatggtcaagactacccgatgggttacttgcttccgtctgttcctgtgttggttttactaaaaaaccgcaacaatcagatacggaagacctcttatgctcagcaccaacaggtccgccaaatccggaagaagatgatggaaatcatgacccgagaggtgcagacaaatgacttgaaagaagtggtcaataaattgattccagacagcattggaaaagacatagaaaaggcttgccaatctatttatcctctccatgatgtcttcgttagaaaagtaaaaatgctgaagaagcccaagtttgaattgggaaagctcatggagcttcatggtgaaggcagtag

SEQ ID NO: 119433 - DNA, 501 bp, Homo sapiens
tgtcctccgcccgctttgtgtcttcgtcctcctcggggggctacggcggcggctacgggggcgtcctgaccgcgtccgacgggctgctggcgggcaacgagaagctaaccatgcagaacctcaacgaccgcctggcctcctacctggacaaggtgcgcgccctggaggcggccaagatcctgagtgacatgcgaagccaatatgaggtcatggccgagcagaaccggaaggatgctgaagcctggttcaccagccggactgaagaattgaaccgggaggtcgctggccacacggagcagctccagatgagcaggtccgaggttactgacctgcggcgcacccttcagggtcttgagattgagctgcagtcacagctgagcatgaaagctgccttggaagacacactggcagaaacggaggcgatgtgcgagctgatagtgagcggcagaatcaggagtaccagcggctcatggacatcaagtcgcggctggagcaggagat

SEQ ID NO: 119434 - DNA, 757 bp, Homo sapiens
gcgcagctaaaagttaagttctggtactggccagaagcaggggctgggggcctccgccgcttcaagcactatctacacgccattcaaggactgtcgggacaagattcttggggccaccattaagaactccaggattgtcttgcagatcgacaacgccggtttggctgcagatgacttccgaaccaagtttgagacggaacaggctctgcgcatgagcgtgtaggccgacatcaccggcctgcgcagggtgctggatgagctgaccctggccaggaccgacctggagatgcagatcgaaggcctgaaggaagagctggcctacctgaagaagaaccatgaggaggaaatcagtacgctgaggggccaagtgggaggccaggtcagtgtggaggtggattccgctccgggcaccgatctcgccaagatcctgagtgacatgcgaagccaatatgaggtcatggccgagcagaaccggaaggatgctgaagcctggttcaccagccggactgaagaattgacccgggaggtcgctggccacacggagcagctccagatgagcaggtccgaggttactgacctgcggcgcacccttcagggtcttgagattgagctgcagtcacagctgagcaggctctggggcttctgctgtcctttggagggtgtcttctgggtagagggatgggaaggaagggacccttacccccggcttttttcctgacctgccaataaaaatttatggtccaagggaaaaaaaaaa

SEQ ID NO: 119435 - DNA, 833 bp, Homo sapiens
aagacaccctccaaaggacagcagaagccccagagcctgctgcctcagaggaccttggaggcagacaaattgttgtagtgatcttcctgtccctcgagcaggctgcgctgggcttcaataccgctgatcagcgcctggatatgcgccagctgggctccaaagcgcgcctccgtttctgccagtgtgtcttccaaggcagctttctgaggatagggagagggggttgtgactcagcagagcctggttcccggagagggcatggcacagccaccggccaggctgccctaggctgcaagggtataagtgtgaattgcacagggaagcggcggcggctggagagtgagcgctccctgcgccagctggtggaggcagacaagtgtgggacacagaagctcctggatgatgcaaccctgccaatggccgacctggaggcccagcaggagtccctgaaggaggagcagctctccctcaagagcaaccacgagcaggaagtaaagattctgaggagtcagctgggggagaagctccggattgagctggacattgagcccaccattgacctgaacagggtgctgggggagatgcgggctcagtatgaggccatattgccctctttcccccagtgggccattcaagcaagtttcctccaagttgagcctagcagaggagacagactcgtgtccatgagcaaagcagaaggctctgttcataatctggaggagaggaaagctgagtcatattttggagccattctgaagcccaagtttcagaaacaacaacagcagcagcagcagcagcaacaacaacatatgggtagctttgctttgctctaa

SEQ ID NO: 119436 - DNA, 1067 bp, Homo sapiens
gatggctggcattggcatcagggaaggaaatcagtacgctgaggggccaagtgggaggccaggtcagtgtggaggtggattccgctccgggcaccgatctcgccaagatcctgagtgacatgcgaagccaatatgaggtcatggccgagcagaaccggaaggatgctgaagcctggttcaccagccggactgaagaattgaaccgggaggtcgctggccacacggagcagctccagatgagcaggtccgagaaaactggccttggagaaacactggcagaaacggagcgcgctttggagcccactggcgcatatccagcgctgatccacggtattgaacccactggccgattgcgaactgatatgacggcagataaggattccaacgcttatggccttaattccggctggaacaggaatggccactcgccgcaaggccatgcccttaaggccacttttactgggggaaaaggcctttcagacttgacagccctgcttgtcgactctaaagatccccccccttctgcctgtgaaaatgcaatgttccctccctctgcaccaacaaggcaccatcttggaaggagagagcagctcttgccagacaccaaacctgctagtgacttgatcttggacttcccaatccccccttcaaacacggtaactgatgaaatcgagcgcgcgaatgttttcaaaatgaacggcaaatggtacttgttcactgattcacgcggttcaaaaatgacgatcgatggtattaactcaaacgatatttacatgcttggttatgtatcaaactctttaaccggcccttacaagccgctgaacaaaacagggcttgtgctgcaaatgggtcttgatccaaacgatgtgacattcacttactctcacttcgcagtgccgcaagccaaaggcaacaatgtggttatcacaagctacatgacaaacagaggcttcttcgaggataaaaaggcaacatttgcgccaagcttcttaatgaacatcaaaggcaataaaacatccgttgtcaaaaacagcatcctggagcaaggacagctgacagtcaactaa

SEQ ID NO: 119437 - DNA, 1654 bp, Homo sapiens
  misc_feature (1)...(1654): n = a,t,c or g
cgggggttgctccgtccgtgctccgcctcgccatgacttcctacagctatcgccagtcgtcggccacgtcgtccttcggaggcctgggcggcggctccgtgcgttttgggccgggggtcgcttttcgcgcgcccagcattcacgggggctccggcggccgcggcgtatccgtgtcctccgcccgctttgtgtcctcgtcctcctcgggggcctacggcggcggctacggcggcgtcctgaccgcgtccgacgggctgctggcgggcaacgagaagctaaccatgcagaacctcaacgaccgcctggcctcctacctggacaaggtgcgcgccctggaggcggccaacggcgagctagaggtgaagatccgcgactggtaccagaagcaggggcctgggccctcccgcgactacagccactactacacgaccatccaaggaactgcgggacaagattcttggtgccaccattgagaactccaggattgtcctgcagatcgacaatgcccgtctggctgcagatgacttccgaaccaagtttgagacggaacaggctctgcgcatgagcgtggaggccgacatcaacggcctncgccagggtgctggaatgaagctgaaccctggcccaggaaccgaacctggaagatgccagaatcgaaggcctgaaggaagaagctggcctacctgaagaagaaccatgaggaggaaatcagtacgcttaaggggcccaagtgcgaggcccaggtccagtgtggaggtggatttccgcttccgggcacccgatcttcgccaaagatcctgagtgacatgcgaagcccaatatgaggtcatggccgagcaagaaccggaaggattgctgaagccctggttcacccagccggaactgaaagaattgaaacccgggaggtcgcttggccacaccggagcagcttccagatgagccaggctccgaggttacttgaccttgcggcggcgacccctcaggggtcttaagatttgagctgccagtcacagcttgagccattgaaagctgcccttggaaagacaccactggcagaaaaccggaaggcgccgctttggaaacccccagctggcgccatatccccaggcgcttgattcagcggttatttgaaagccccagctgggcgnattgttgcgaagcttgatagttnaaccggcagaattcaggagtaccagccggctcattggacatcaagttcgccngcttggagcaggagattgcccaccctaaccgcagccttgcttcgagggacaggaagatcactacaacaattttgtttgcctccaaggtcctctgaggcagcaggctctggggcttctgctgtccctttggagggtgttttttgggtaaagggatgggaaggaagggaccccttacccccggctttttttcctgacctgccaataaaaatttatggtccaagggnnnnnnnnnnnnnnnnnnnnnnggggggggccgttttaaagaatccaattttacgtccccgggcgggcaaggtaaaattttttttatggggcccccaaaattaaatccccgggccggggtttaacaacggggggaggggaaaaacccgggggttcccaaattaaatggcttggaagaaaatccccttttcgccagggggggaaaaaaa

SEQ ID NO: 119438 - DNA, 282 bp, Homo sapiens; identical to SEQ ID NO: 117047

SEQ ID NO: 119439 - DNA, 510 bp, Homo sapiens
atggaaaagaatgagaaggagcaggaggaggaggaaaagaaggagaagaacagcaagaagaaagaagaagaggaggaggaagaaggaggaggagaagaagaagaagaagaaggagaaggaggagaagaagaagaagaagaagaagaagaagaagaagaagaagaagaagaagaagaagaagaagaagaagaagaagaagaagaagaagaaaagaagaagaagaagaagaagaagaagaagaagaagaagaagaagaagaagaagaagaagaagaagaagaagaagaagaggaagaagaagaagaaagaagaagaagaaaaagtagtggaggaggaggatgaattcatttggtttttgggaaactctctctatttcccttctttttctcattttgcctggtcacagattccaagtagagaagatgaaggggaaaggagacttcgtgtgaactcgatgatcatggatttcacttcaaatacaaaccatgtccagctaattgtggccaggtga

SEQ ID NO: 119440 - DNA, 259 bp, Homo sapiens; identical to SEQ ID NO: 118473

SEQ ID NO: 119441 - DNA, 390 bp, Homo sapiens
atgaggttagataaagcagcaacgggaatggattcaaacagagcagtcatagctggaggaggagaaggaggaggagaaggaggaggagaaggaggaggagaaggaggaggaggaggaggagaaggaggagaagaaggagaagaaggagaaggaggagaaggagaagagggagaagagggagaagaagaggaagaagaagaagaggaagaagaagaggaagaagaagaggaagaagaagaagaagaagaagaggaagaagaagaagaagaagaagaagaagaagaagaagaagaagaagaagaagaagaagaagaagaagaagaaatgattgttttaaaaataattgtagcaaaacagttatttgaatattcatctatcagtggcatttga

SEQ ID NO: 119442 - DNA, 1446 bp, Homo sapiens
atgcatgtggcgtggagttgcccgactgctcaatcttcacaggccaccgtggactctgggaaaacactggcagaaactgaatcacctattggactctcgagcaaggttggtggaaagaatataagagctggggaatgggatgaattgaagtatgacaggttccccggccagaagccaaagaagaagaagaggaagaggaaagaagaagaagaggaagaggaagaagaagaagaagaagaagaagaagaagaagaagaagaagaagaagaagaagaagaagaagaaaagaagaagaagaagaagaggaagaagaagaatgcagcaatcccacccaaacccaacctcagccatcctggctccttgggcctgagctgctgccgcgtgactttgggggacaaaggaggctcttcctggcaaaccttctcccagactgcctgcctggggcctgcatccccagtcagctccaaacaaggctgttgctgctgctgctgccgcagccgcagctgtgacgtgtggaggcctttcctcggagggcaggcagccgcgtgggcaacagatgtctcagctccctgccgcctgcagccgtcagccgccgccactgagcctgtcagcggcctcacgcccaggcctcggatacacaggggatctgggtcccgggcggaccgcgagaacccggtctcagacatgggaccgccctgccgccacgcagccgccagactcacccgtgagatggtgaggggcgcgctgaagtcccggccgcccaccaggcggaagccccagggcgaaggcccgcgcagggtcacggaatggggcatcgcgggctggagccgcagccggagcctgagccggactctgaggaggagccgccgccgccgcagccgccgccgccgcctggacgccgcgccccgcccccggcccgcccgcccctgtccccactcggcccagcccccgcccccgctccctgtgcgcctggattggccccgcggccagcccgaccctcccacttcggggggctctgaggacccgccctcagccccggctgccggcaacccggcacccccactcagctctcagagatccccgcgttcggacggccccgacggcctggatcctgctcgggccttggatctgcaggccgcggacccaaacccagctgtcgacaccggccctttgaagtcgcttttaggggcggtgctccagcccgaggagggatggagggcccacttgggggatggggctgccccagctcagatacctcctcatgggcccgactggcacacctgcggcccatcctgccgtgtgaggagccctctgaaccaagaaccctatgaaccaggggcttgcgcagcactgggccggggacgcagacccaaaacgacagcaggcagcgccgagcgtgggagtggacacagaaaggtcctcagactagtttgtggaggccagtaa

SEQ ID NO: 119443 - DNA, 246 bp, Homo sapiens; identical to SEQ ID NO: 118051

SEQ ID NO: 119444 - DNA, 435 bp, Homo sapiens; identical to SEQ ID NO: 117052

SEQ ID NO: 119445 - DNA, 1269 bp, Homo sapiens
atgaagaagaaggaggaagaagaaggaggaagaacaagaaaagaagaagaggaagaggaagagaaagaagaagaagaagaagaagaagaagaagaagaagaagaagaagaagaagaagaagaagaagagccaaatagcttcatcccatactgctcaccttttctagatttttggttttgcttcattaccaacatccaaaaaaattctttctgtaaggagaacaaagacaaaaaagtcacagaatcctcaagtcagagagataaaaaactggagcaagacacaaccacagacagcattgtttcaaagcctattggtgaggaaataagtatttccttagaaacaattgataaatacctaaattcagtactgcagtgcaagcataagcaaaggagctcaaaaggcttagacagcatgcagcagcagccagtgctggtcgcctctccccaccctgggaatttgtctctaaaacattatagtgatggcagtgatggcccatctggagcagctgctgccatgatgccagctgcagtaaggaaagcacagctggggcggcatgctccatggagccagcagaagccagggataggcaaaagccctacccacttcccagttggcaggatgggagccttgtgctccccaggcacagctgcagctgaccagctgctactctggaccctggcatccctgttctcttgggggctgggagcaggagggagccctgccctctcagtgccagccatggaaggtgcttgcagtgtgtctggtccagctgcagctttgcaggagccagcgcttggagatacccaccctgctgcagctgacatgcctggccgtgtgcagtggctggagcccatgcttgctccctcacacagccctctgtgcctggctcacccatggcagaaacttcatccacgctctttgaaccattttctcaattcccagtggatcaagcttacctatctttatggtgtgaccttctggtttctggtgttcaggctttcatcaccaggcttcttggtggctttgtcattttctgccctgaattggtgggttcttggtctcactgacttcaagaatgaagccgtggaccctcgtgggaggcagctgaggcccggcaagaattcaagcctagcgccagcactgctgagggactccacagctgctggccctggtgctaagtccctcactgcacagggcggaggtgccggccagctggcagcttcgagggtggggcctatggagcccacggccacccagaactcccgctag

SEQ ID NO: 119446 - DNA, 279 bp, Homo sapiens
acctcatctcttaaaaaagaagaagaagaagaagaagaagaagaagaggaagaggaagaggaagaggaggaggaagaagaagaagaagaagaagaagaagaagaagaagaagaagaagaagaagaagaagaagaagaagaagaagaagaagaaaggtcagttgctcatgtggaacccagaacaggctacttgttcaatagtcaacagacactgaacacctatcatgtgagaggcacagatccaggtacttgggataaatcagtacacagaatagcaaag

SEQ ID NO: 119447 - DNA, 708 bp, Homo sapiens
gaggaaggagaagtagaagaagagggggaggaggaggaagaagaagaggaaggggaaggggaggaagaggaagaggaagaaggagaaggagaaggggaaggggaaggggaaggagaagaagaagaagaagaagaagaagaagaagaggaagaagaagaagaagaagaagaagaagaagaagaggaagaggaagaggaagaagaagaagaagaagaagaagaagaagaacaagaagaagaagaagaagaagaagaagaagaagaagaagaagaagaaagaagaagcggcagcagcggcagcagccagcagggacagccacacctccctggagcttacctactggcctccatgtcctgctctgagagacactctggtctccaactgctcactctcctctctctgtacctctggagacagtttccactggtgagagaccaccatcccagcaatgtcttcctgctcccatcagcacagcctccaccagttaggaattatccccaggcagattttaatgagaatggcttcattgatgaggaggatctgcagaggatcatcctgcgactgctgaacagtgatgacatgtctgaggacctcctgatggacctcacgaaccacgtcctgagtgagtcggatctggacaatgacaacatgctgtccttctcagagtttgaacatgcaatggccaagtctccagatttcatgaagtaa

SEQ ID NO: 119448 - DNA, 508 bp, Homo sapiens
aaagcatatccagaaaaaagaagaagaagaagaagaagaagaagcagaagaagaagaagaagaagaagaagaagaagaagaagaagaagaagaagaagaagaagaagaagaagaagaagaggaagaggaagaagaagaagaagaagaagaagaagaagaagaagaagaagaagaagaagaagaagaagaagaaaagtgctcactgaagcacactgaagctccctgtgtaaaaggaatagaaactattttctggaataaacttatatacataaagctggacttaagacagttccctgatgaacctgatagacatgcacaggctttccaacatttaaatcagctgtttcctcttatgtgcagaaatgcagtgcaacttttaagccacatttcaactactgcggaaaaacaggcagcagtacagacagcaaaggaatttgaagatgaacaactgacatcctatagtcagtcaaaaaataaacagaagcgaaagatgaaaatggatgagtaa

SEQ ID NO: 119449 - DNA, 483 bp, Homo sapiens
atgacagcaaagtgtgtgtgtggttggggggtgggggagagagagcgagagaaagagagagaagaagaagaagaagaagaagaagaagaagaagaagaagaagaagaagaagaagaagaagaagaagaagaagaagaagaagaagaagaagaagaagaagaagaagaagaagaagaagaagaagaagaagaagaagaagaagaagaagaagaagaagaagaagaagaaaaatttaaagaatctatgaagcaccagagaaaactgctgttgcttctgcatcccccagctcaaaccaaccactggtatcctctgggaaatctgggctcccatgactgccctaaccaaagcctggaagcctctgcagtcatctgtgccttaattttccttcgactgaccacccccacaatcctgctccatggtcataaatccccacttgttcttactgaagtcagagttgagtttgatctctctcccttgcagtga

SEQ ID NO: 119450 - DNA, 495 bp, Homo sapiens; identical to SEQ ID NO: 117054

SEQ ID NO: 119451 - DNA, 873 bp, Homo sapiens; identical to SEQ ID NO: 119143

SEQ ID NO: 119452 - DNA, 498 bp, Homo sapiens
atggcagatgttggaggaagaaagaagggagaagaagggagaaggagaaggagaagaagaagaaagaagaagagaggggaagaaggggacgaaggggaagaagcggatgaaggggaagaaggggaagaaggagaagaaggggaagaagaaggggaagaaaagaagaagaagaagaggaagaggaagaagaagaagaggaagaagaagaggaagaagaagaggaagaagaagaggaagaagaggaagaagaagaggaagaagaggaagaagaagaagaagaagaagaagaagaagaagaagaagaagaagaagaagaagaagaagaggaagaggaagaagacagaatttcccatatacagcttggcacagaatatgggagtccgtcatccaacattttgttcaaataaattggagcacttcgccccaccccacccaccaaattcctttctcatggagaagatgcagcagttggaacgggacaatatacaaaggaactaa

SEQ ID NO: 119453 - DNA, 654 bp, Homo sapiens
atgcaggtccgtgacttcattcttgaagtcagcgagaccaagaacccaccggaaggaaccagttacggacacattaagagaatgattctttctataatgatctctaggcaacacaaagaagaagaagaagaagaagaaagaagaagaagaaaggagaagaaaggagaagaaaggagaagaaaggagaagaaaggagaagaagaagaagaagaagaagaagaagaagaagaagaagaagaagaagaagaggaagaggaagaggaagaggaagaggaagaggaagaagaagaagaagaagaagaagaagaagaagaagaagaagaagaagaagaagaagaagaagaagaagaaggactatcaatcaagtatatgacaagcacaaagaccctttcagacatcaacggatttgaaaaattacttccagtacaccctattttagcagtactagaggatgcgtttagcagttctggaaaacacgacaataaaggcaaagaagagaaacagaacaggaaacaagggattcaagatgatcgagagcaaaaggatgttccacagatgatgactatgcaggctgtgcagggggacaggactgtgggaaaatctcccaaagaaaaaaatataatagagcacttggaactgcgcttgaatctttga

SEQ ID NO: 119454 - DNA, 2427 bp, Homo sapiens
atggaatactatgcatccataaaaaaggatgagttcatgtcctttgcagggacatggaagaagctggaaaccatcattctgagcaaactgtctcaagaactatcgcatgttctcactcacagagggagcctgtgcgatgaccctgtcgtgagaggggccagcccactttgggaagctgtgaggagctcggtgtcgctgcagctgggtacaagcttgccaaatgacagtcactgcaatagaggcacagttcctgtgctgtttaatgatctcagtatgtcagttacattgccttctttgaaagccataacaactgagccctgcattgcaaaggaatgctttgttattctcaccatattcatcgagtgcccactacatgccaggctcctctcagcttgttacaaaaccagatggttaccccagtgcattcaggaaggtgatggagatatattcagggcccagtgggaaaaaaaaaggcatcaacttggcgttcatcaaaaacataaaaaaaaatcaattaaaattatgagagtctcgaagagatccagaagaaggaagaagaagaaagaagaagaagaaaataagaagaaaagaagaagaagaagaaaagatgaagataagaagaaggaagacgaagaagaagaggaagaggaagagagaaggaagaagaagaagaagaagaagaagagaagaagaagaagaagaagaagaagaagaagaagaagaagaagaaggaagaagaagaagaagaagaagaagaagaagaagaagaacaagaagaagaagaagaagaagaagaagaagaagaagaagaagaagaagaagaagaagaagaagaagaacaagaagaacaagaagaaccaaaccagggtagatgaagacaaagttaaaaagaaagaaaaggctgaaactattgtgaaaaattatttccagatgctgcaagtgggagggaggaaggaaagtaaagagaaaaagaacgaaagagaaagaaagaaaaagaagaggaagaagaagaagaggaagaagaagaggaagaagaagaataataagaagaagaagaagaagaaggagacggaggaaacggaggaaaccgaggaaacggaggaggatgaagataaggaggggaagaggaaggataagaggatggataagatgaaggagatagatgacacccgcgatgaacagcgttatcaggggtattgcgatgcgatgatgctgcataatctttccccattacgcatgaatccacgcgccatctcatccattcatttaggaatgcagttaatgcgtgatgcccttagcgcaaacccggatttagacggtgtattttgcaccaatgacgatattgcgatggatttatcacggcaacacgctttaggttattttctcttcattacacgtattctctttgccggacgttgcctatactccaggcaggaaactggaggatatctcatgagtgaacccctgttaaatgcccgcacgccggacacagaactgtttttactgccgggaatggctaaccgtcatgggctgattaccggcgcaacggggacgggtaaaaccctggcacgactgttgaatctcaacgatgtgcaatctggcgtgctgaatatcatcttccgcattgctgacgatcaggggctgttactgctcgactttaaagatctgcgggcaattacccagtacatcggcgataacgccaaatccttccagaatcagtacgactggatgcgcaccgatgccaacggtaaaggcgttatcaatatcctcagcgccgagaaactttatcagatgccgaaactgtacgccgccagcctgctgtggatgctttcagagttgtatgaacaattgccggaagcgggcgatctggagaaaccaaaactggtgtttttcttcgacgaggcacatctgctgtttaacgatgccccgcaggtactgctggataagattgagcaggtgataaggcttattcgctcaaaaggcgtgggcgtctggttcgtttcgcaaaacccgtctgatattccggataatgtgctcgggcagctcggtaatcgcgttcaacatgctttgcgggcttttacgccaaaaggtcagaaagcagtgaaggcagcggcgcaaaccatgcgggccaatccggcgtttgataccgaaaaggcgattcaggaactgggcaccggcgaggcgttgatctcttttctggatgcgaaaggaagcccttctgtggtggagcgtgcgatggtgatcgcgccttgttcgcggatggggccggtgacggaagatgagcgtaatggcttgattaatcactctccggtgtatggcaaatatgaggatgaggtggaccgggaatccgcctatgagatgtgcaaaaaggctttcaggccagtaccgagcagcaaaataatcctcccgcgaaagggaaagaggtag

SEQ ID NO: 119455 - DNA, 966 bp, Homo sapiens
caaatcactgcatgatcttgagccagccattcaacacacttccccatctgcaggagtaagtgatgggaaatggagtctttctccctcacacagaggttgaagaatggtagcaaatggctgattatggtctctgagtaacctcttttttttttttttttttttttcatttttttcggcccatcaataaggctttccagtacaacatggtaacttgcttttttctttttattcctttacatcattcatatattatactatgcctttaatgaatatggattttcttttttctttgttggttatttagttttaaccaagattgacaactacatcttcttagtcttcttagaatttgagttttcacctgatacactggtctttctctctcttttcccacagggtgtattctacccactggaaaacctcaccgacccccccttctcaccagttccttttgtgctcccagaacgcagcaactccatgctctacattggaatcgccgagtatactacattttccctgaaaagacaatccacgtaaaatcctaacagtgacataatgctaaccttgtgatctcccttcaccaactcacgcctcacaatctttatttctttctcggaatgtgggcagattgcagagatctacatcttgtcccagcccttcatggtgaggatcatggccacagagcctcccataatcaatctacaaccaggcaatttcaccctggacatcgtgagccgagatcacaccactgcactctagcctgggcgacaagagcaaaactccgtctcaaaaaaaaaggaagaagaagaagaagaagaagaagaagaagaagaggaagaagaagaggaagaagaagaggaagaagaagaggaagaagaagaggaagaagaagaggaagaagaagaagaagaagaagaagaagaagaagaagaagaagaagaagagaagaagaagaagaggaggagg

SEQ ID NO: 119456 - DNA, 1677 bp, Homo sapiens
atgcccagccccaaccatatatttctaagagtctcaggcatctttgccatcgagaaagtcatccttggccacccccacctttactcccactctggcctccacaggaaagtgctgaagcacaaagtccatgaaagcagaccagggataatgattctgcagcaaatagttgctggagggggcatactcactgagtaccacactctacaggtgaccataacattattcagtcagttctctgctgacggatttggaggctgttcccagtcttttgccacgagactgcacaccccagaatgcaacacgcgcctccgcgaagaagacctactcatagcaagtacttcacagcctacaattcccaagatgcaacgcgacctccttcccacagcaacgaaagactgcgactccccggactatcaggccgggagagtccacttccagctcacctcggagctccgggagcctttcagcacctgcttggatgcagccatcgtgggctacaaggacttgccttccatccaggccaccatccctgggaaaaccttcatcaacgtcaagccagctgaggttgatgtcctggttggcaaagactggtcaagtttttttgtgaatgaggtgacacttgggggccagaaatgttctgtgatctgggacctactgctgcaggatggggaactgacctatctttataccaagagcaccgatggagcccccaccttcaatgtcactgtcaccatgactgctaggatgctagtgttggcagtggaagaacattgtcctttgtttcctgaaaagggaacattagacgtggaactatgggatcgtgttggtgcaaaattccgggaactggtcccaacaggaaattatgttcccgtcactgtttggggtgactgggccttggctcagctcacaggctccaataattactctgacactactgcccaattaggctttgatgctctcaccgtggaacaagtaacaaagggtcacaatgaattatatcctgattttttagctaaattacaagatgctgttgaaaaatctgtctctgatgagcacgctcaaggtattcttcttcgaatgttagcttttgagaatgcgaaccatgagtgtaaaatggccatgcattccgtccaacaacaaaatttacctgatcgtgaggtgttgcctgagtatattaaatatgaaggcattggatcagacacaaagctattctgtgcccacaaagctattctgtgggcacgggccatgaaggacggcaatcaaactggctcgactgattcttttcttggagcctgctataattgtggtcaacttggtcatactcgaaaaaattgcacagttaaaaacttaaaggcagccaagccggctcaaaaaacacagccaaatgctcctgctactgtttgcccttgttgttgtaaagtttcccctcacattgatttacctgctacacaaaattattcttgctgggcttatgtgccttttcctccacttattcaacctctcacctggatggatgctcctgcggaaatctatactaatgatagtgtgtggatgcctggagctacagatgaccgttgccccactcaaccaggaaaagaaggcactgcatttaatgttcctacggttataaataccctcctctgtgcctcggacatgcaccttgttgtatccatctag

SEQ ID NO: 119457 - DNA, 378 bp, Homo sapiens
ttattgattcttgacgaaccgaccaacgatcttgatgtcgaaacgctggaactgctggaagaactgatcgacagctatcagggcacggtattgctggttagccacgatcgtcagtttgtcgataacaccgttacagaatgttggatcttcgaaggcggcggtaaaattggtcgttatgtcggcggttatcatgatgcccgtggtcagcaagagcagtatgtggcgctcaaacagcgttctgctatgattcaccttaaatcgttccaggtattgaggaagcttggactgctctgtttcctcgatgtctaactgctccaccagtttttctgacccctggttgtcttcatcattttgggactgctcctcttgaagccccat

SEQ ID NO: 119458 - DNA, 431 bp, Homo sapiens
ctcgaggatcatgctcatgctggttaaagctttagcagaccagagagccaagaatcaggatggaatgaacgccctccactttgccactcatagcaatcatgtgcgcatcgtggagtatcttattcaagatctgcacctcaaggacctgaaccagcctgatgagaaaggaagaaaaccatttcttttggcagctgataggggccatgttgaaacgatagaaaaacttaccttcctaaacctgcatacttcagaaaaggacaaggggggaaacactgccttgcacctcgctgcgaagcatggtcacagtcctgcagtgcaagtgctgctagcccagtggcaagacataaatgagatgaatgagctcaatatcagtagtttgcagatagcaaccaggaacggccatgcatcccttgtcaactttcttcttaggg

SEQ ID NO: 119459 - DNA, 588 bp, Homo sapiens
atgctcatgctggttaaagctggagcagaccagagagccaagaatcaggatggaatgagcgccctccactttgccactcagagcaatcatgtgcgcatcgtggagtatcttattcaagatctgcacctcaaggacctgaaccagcctgatgagaaaggaagaaaaccatttcttttggcagctgagaggggccatgttgaaatgatagaaaaacttaccttcctaaacctgcatacttcagaaaaggacaagatacagtggtccacactctggaccgcagctttaaccaaaatgaaaacttccagaaactccattgcagcccttactattgaaggagcatgctctcctggcacaggggtttctacgtcgagtgtgtctctgttgcaggggggaaacactgccttgcacctcgctgcgaagcatggtcacagtcctgcagtgcaggtgctgctagcccagtggcaagacataaatgagatgaatgagcgtcagggtcttgctttgtcacccaggctggagtacagcggcatgggagatgcagcatttcttaaagaatgccccactgttgtttctaagattttcttctaa

SEQ ID NO: 119460 - DNA, 711 bp, Homo sapiens
atggccatccctgctatggagagctgtgatgacctgctctactatgaacccctagcatattactgctcccaaggacagcccccaaggacagtgtcgagtaacatagattcagagaccaatcaatttgttaagaattctcaggctattgaagttttctatgggactcttaaaggaagaactaagactactgggtggaagcttccaagaactttggcttccacaaatcacactgccaagatggtcaggctcgctgatctctcagtggccagcctcatcctccacaacagtgaccaccaggagctactggagcttctctttggaccagctggtggcatcccactcagtgccagctgttcacgttgcttccatcctcctgctcctccacaatccagcaaagaagatagttcaaattctcaggtatccaagctaagagagaaactccagctgatcagtgctcttacaaacaaacctgagagcaacaggcctccagagaccgccgatgaaggaggatggaagcaacgtgaacagctggcacttgagtggatgccaccagctggtccaaaaaaagctccagaactcctggtggtcattgttgtggaggataaggctgccactgaaaatcagcgagctaaagcaggggaagttttctgtagtgcttccacagcaagatggacgctgtttaaagtattgccaatggaagctacactctga

SEQ ID NO: 119461 - DNA, 596 bp, Homo sapiens
gcacacaagccatgccccctcttttctctttgggataccaccagtgccgctggaactatgaagatgagcaggatgtaaaagcagtggatgcagggtttgatgagcatgacattccttatgatgccatgtggctggacatagagcacactgagggcaagaggtacttcacctgggacaaaaacagattcccaaaccccaagaggatgcaagagctgctcaggagcaaaaagcgtaagcttgtggtcatcagtgatccccacatcaagattgaacctgactactcagtatatgtgaaggccaaagatcagggcttctttgtgaagaatcaggaaggggaagactttgaaggggtgtgttggccaggtctctcctcttacctggatttcaccaatcccaagggatctacggacatcctcttcctttggaatgacatgaatgagccttctgtctttagagggccagagcaaaccatgcagaagaatgccattcatcatggcaattgggagcacagagagctccacaacatctacggtttttatcatgtaagacatccaaaaagaattaaactgggcttgtgtgacccaccttttggctga

SEQ ID NO: 119462 - DNA, 661 bp, Homo sapiens
atcatgagggaggatgaagctgtgaaggtaggaggctagcttcctgtactgccattctgaaaaggccttcctagtacacagcgcaatgctctggtagtgttcacatattgcctggccaaaccaatgaccattggaactcaatttaggagggaggctgggaatattctcctatgaagatagatgaggtagaacagtgaggctgaggagataaaaggcaaacaagggcaatagaatcctcagcctttcttgtgtgggggcacagaattaaacagtttcctttctgtagttaagagatatgtggatcattgatccatttgattttgatgagcattttgacaagtgcctcaattatctaccacattaccgtacgagtgctgagttccacaggacagcgtggatgttgcatttgtgtcatcttatccaggaggctgccttatacatctccacagtcattgagaaagggggcggccagctgagtcggatctttatgtttgagaaagtaagtacaagggaacttgacccatcagcattaaagggctgcatgttcctctgtgttttcggccttcctggtgataagaagccagacgagtgtgcacatgccctggagagctccttcagcatcttcagcttctgctgggagaatcttgctaagaccaactga

SEQ ID NO: 119463 - DNA, 636 bp, Homo sapiens
atgattgtatatctagaaaaccccactgtctcagcccaaaatctccttaagctggtaagcaacttcagcaaagtctcaggatacaaaatcaatgtacaaacatcacaagcattcttatacaccaataacagacaaacagagagccaaatcatgagtgaactcccattcacaattgctacaaagagaataaaatacctaggaatccaacttacaagggacgtgaaggacctcttcaaggagaactacaaactactgctgaatgaaataaaagaggatacaatcaaatggaagaacattccatgctcatgtgtaggaagaatcaatatcgtgaaaatggccatactgcccaagctggcattgttcaaaacgcttgtgagggaaccgattggcttaggggacttccgaatcagccttatcatgcaggaacagagaaaccaagccaagatccgtcttcgcaatcaagttggaggagcccggagcccgccttcggagctacggcctaacggcggcggcgactgcagtctggaggccaaggcagaggcttcctcaggagaccatcccactgacacagagatggacgacgagcagaagagcaacacggcacggagccagtctcacgtggagacagaagcatag

SEQ ID NO: 119464 - DNA, 906 bp, Homo sapiens
atgggaggtgtggaaagccacatttaccagctccctcagtgcctgattggaagaggggataaggttataattgtcatccatgcttatggaaatcgaaaaggcatccgttacctcactaatgacctcaaagtctattacttgcctctgaaagtcatgtataaccagtctatggccatgaccctctttcacagtctgccattgctcaagtacatatttgttcaggagagagtcacaataatccattcacatagttcattttctgccatggcccatgatgttctcttccatgccaagacaatggggcttcaaacagtcttaacagaccatcccctttctggatttgctaaggtccattcagtgcttacaaacaaacttctaactgtgtctctttgtgacacaagccgtatcatttgcgtttcttatactagtaaggaaaataccgtactacgagcggcactgattactgaaatagtgtctgtcattcctaacgctgtagatcctattgacttcactccagacccatttagaaggcatgatagtataactattgttgtcagcagacttgtttacagaaagggaacaaatttggttagtgggactgatatcactgttgatagtgcagagaaaccctccataattaagttttctgtaaaagccttcgtgttttctgagcagaatgtacgaggtgtgccatcccaaaaccagctgctaccctgtccttttaatgtatggtttggagaagatctgcctctaagtcctcggagtcctctgactcccagacacggaccaggattggctaatgtttgtcagtacgatgagtggatagctgtgaggcatgaagccactttgttgcccatgcaagaagatctgtcaatctggttatctggtttattaggtgaggcttga

SEQ ID NO: 119465 - DNA, 635 bp, Homo sapiens
tgtgcaagttgcttggggacagtgctgctttaggctatgggttgggttcaggcctgttccacgtatctctcagtctggaccagcagcaaatcagcatgctcttctcccagatggcagaagtgcaggcagctaaaccaaaccatgcaagcacatttaaagcctctctttgcattgtttgtttacattccattgagagccagccgcagagtctctgccgtctccccgtgcgctcaagcacaagcccccaactaaaagccttgtctggaaaatctgcttggtgccataacagattatctggtgagccagggtacaaatatctcctggtgtttgtggatacttttactggacgggtcaagggtttccctacctgtacagaaaaagcagtagaagtctgtaaaccttcactaaaggaagtaatttctcaatttggactccccaagtcccctcagagtggtaacaggctctccttcatggttctaggaactggccttaggaaatctaactatgaaaccaaggttatggagtatcccacctcaggaaggaacactgaacaactgattgacagtcttcttgccgccagccagaccaccaagtggcccattaaccaagagaaccagcgcaaccagatacgctga

SEQ ID NO: 119466 - DNA, 597 bp, Homo sapiens
ttattaattatatttttttttgactgtcttgttggctccctgaagaggcttgcagagatgtttttattagcgaaacttgggaattgacatcatgagtaaggtatgcaggctgggctgggcaaagcacatgagaggtaggagatgcgggtccagcgtatctggttgccgcctggttcctccttggttaaatgggcccacttggtggtcctggctggcggcaagaagactgtcaatccagttgttcagtgttccttcctgaaggtgggatactcccataaccttggtttcatagttagatttcctaaggccagttcctagaactgccacatcaagggtgacctgaggctccgtgggtgtgatgacgatggagtgtgctgcagtcagagccaggggtgctgtcaggcggtgtgtatcaatctcatctgaaagcttggtgaggagtggcggctggccaggtcttctgccggctgtcctgttttaaggaggtcagggcagcctctcttccagtgacaccctccatcctgcagtaggcacattggctccatccaaggttggctgtcttcgattagttggtctcctgagaatcctagggtcacc

SEQ ID NO: 119467 - DNA, 528 bp, Homo sapiens
atggctgaccagaagcagctgcagctggagactcccaccaaggagaaagaaaaagggtgctctggtctgacctgtttggctccccccaggtggtgttgctgtccttctccaattggggtgttgtgtcctacaggatgtcagttgcaagaggctttgctacaacaggaaaggccaatcagaaatagtgttgatgagttaaataacaatgtggaagctgtttcccagacctcctcttcttcctttcagtacatgtatttgctgaaagacctgtggcaaaagaggcagaagcaagtaaaaggtagatatccttgtgctttccattcgattttcagctataaaattggaaccgttagactgccacgagaatgcatggttgtgagaagattaacatttctggtctgggaccacgatcccactcgtgttgtcggtctgattatcggtctgggaccacggtcccacttgtattgtcgatcagactatcagcgtgagactacgattccatcaatgcctgtcaagggcaagtattga

SEQ ID NO: 119468 - DNA, 504 bp, Homo sapiens
atggtgacattcaaggatgtggctgtggtcttcaccagggaggagctggggttgctggaccttgcccagagaaagctgtaccaagatgtgatgctggagaacttcaggaacctgctgtcagtggaatgtgggaagagtttcggtcggagtgcacatcttcaagcccatcaaaaagtccacactggagataagccatacaaatgtgatgagtgtgggaagggcttcaagtggagcttgaaccttgacatgcatcagaggagtgtccacacaggagagaaaccatacaaatgtgatgtgtgtggtaaagtcttcagtcggtcttcacaactacagtctcatcagcgagttcacactggggagaaaccttataaatgtgagatatgtggtaagagcttcagttggcgatcaaatcttacagttcatcacagaatccatgttggtgataaatcctataaaagtaataggggtggtgctacagctggcttagtaaacctcaatgactga

SEQ ID NO: 119469 - DNA, 461 bp, Homo sapiens
cgtcccaaacctgtggcgggagttggagattctgcggcgaatacgccaggtgtgactggctggaagtggcgtggctggatcatcatgcctagggttcataacataaaaaagtctcttacacctcacatttcttgtgtgacaaatgaatctgataatctgctggattttttgcctgacagactaagagcaaagctacttccattccagaaagatggcatcatttttgccctcaaaagaaatggcaggtgtatggtggctgatgaaatgggtctaggaaagacaatccaggcaattggaattacttacttctataaagaggaatggcctctgttaatagtggtcccttcgtctctgaggtacccttggacagaagaaattgaaaaatggatcccagagctaagtccagaagaaatcaatgttattcagaataaaactgatgttaggagaatgtcgaccagtaa

SEQ ID NO: 119470 - DNA, 567 bp, Homo sapiens
tcaactactcccaatacttcctgttgtttgaggtagggataagttctctgccaagagacccaaaatgtgggaaagctggttgtccaccttgatttcactttttccagtgtagaaatcatgagacatggggaagccttctatgccatcattttgaaacgcaacacgtgaggttatatttattttaccatctttcagccttaggcccattgcagccactatttcttctttaaagtactcatccatcttgtttcccaagagaaacttcttgccccaggagctcaggctttctgaaaacttttgaatgctttgctgcttagaaatttcttccaccagataccctaaatcatctctctcaagttcaaagttccacaaatctctagggcaggggcaaaatgctgccagtctctttgctaaaacataacgagagtcacctttgctccagttcccagcaagttcttcatctccatctgagaccacctcagcctggaccttattgttcatatcactatcagcatttttgacaaaggcattcaacaagtctctaggaggttccaaactttcccacat

SEQ ID NO: 119471 - DNA, 1362 bp, Homo sapiens
ctagtgttgagtgtctgcagcttttccaagcacatggtgaaagctgtcagtggatctaccattctggggtctggaggatggtggccctcttgtcaaagccccactaggcaatgccccagtaggaactctgtgtgggggcttcaaccccacattttccttccacattgcactagcagaggttctccatgagggccctgctcctgcagcaaacttctgtctgggcatccaggtgtttccatacatcttctgaaatctaggcagaggttcccaaacctcaattcttgacttctgtgcacccgcaggcttaataccatgtggaagctgccaagggttggggcttccacactctgaagccacagccagagctgtatattggcccctttcagccatggctggagtggctgggacacagggcaccaaatccctagactccagtctctttgctaaaacataacaagagtcacctttgctccggttcccaacaagttcctcatctccatctgagaccacctcagcctttatcttattgttcatatcactatcagaatttttgtcaaagccattcaacaaatctctaggaggttccaaactttcccacatttttgtgtcttcttctgagccctccaaactctcccagcctctgcacatgcctatccaggctcggatttcctcctttacttcaggccatacagatgattccactgtcctcttctctgttctcttgaaactgccactgcctgttccatcccaggctttctctcttaaacctggctccattgtgatgctgttaagttcctggtctgataatttcaatattccttccatatctgattctgatgcttgatctgtctcttcaaacttttgcttttttcttttagtaagtcttgtaagtttttcttgacagccaaacataatgtactggttttccaggcctactgtgcacaacagcattcctgtacctttaggctttcttatatctttcagctttctctccttactaagcaaataagatacatttagggaaggagggctaacaagaagacaggggcttccaatctgatttcctttctttggggtttcaaaccgtgtaacatccagactggagtgtctgacatagaggctttctggtatgttccatccattctgaggaccaacaacatgccaggttccaggctccaggctagggtatggagggggtgtgggctggtatactggtcctgtcccttgcttgagtcttccacgagccacttttcctctcctttgcattgatgtgctttgagtgtccatttcaatatctctaacattttcttttatgtgaatctgaattattttctttattcttaggaggttttctgcaggcat

SEQ ID NO: 119472 - DNA, 1116 bp, Homo sapiens
atgtgggaaagtttggaacctcctagagatttgttgaatggctgtgacaaaattgctgatagttatatgaacaataagatccaggctgaggtggtctcagatggagatgaggaacttgttgggaattggagcaaaggtgactcttgttatgttttagcgaagagactgacggcactttgcccctgccctagagatttgtggaactttgaacttgagagagatgagttagggtatctggcggaagaaatttctaagcagaaaaggattcaagaggtgacttgggtactgttaaaggcattccgttttaaaagggaaacagagcataaaagtttggaaaatttgcagcctgatgatgcagtagaaaagaaaaatctatttcttgaggagaaattcaagctggctgcagaaatttgcataagtagcaaggagcctaatgttaatccaaaagaccatggagaaaatgtctccaggccatgtcagagaccttcacagcagcccctcccatcacaggcctggaggcccaggaggaaaaaatggttttgtgggccaggcccaaggacttggtgtcttgtgtcccagccactccagccatggctgaaaggggccactgtagagcttgggctatggcttcagagggtggaagccccaagccttggcagtgtccatttgttattgagcctgcaggtgcacagaaatcaagaattgaggtgtatggtggctgatgaaatgggtctaggaaagacaatccaggcaattggaattacttacttctataaagaggaatggcctctgttaatagtggtcccttcgtctctgaggtacccttggacagaagaaattgaaaaatggatcccagagctaagtccagaagaaatcaatgttattcagaataaaactgatgttagttggatctcagactgctgtgctagcaatgagcgaggctctgtgggcggaggaccctccgagccagttaacaggagtttagagccacacctttccaatcttcttgtccttttctgcctagtagatcacaaagcagctattacggttccagatttggcatcattgcgtgatgcaggaagaaaggaagaagacaaaacgacatgtgctaactga

SEQ ID NO: 119473 - DNA, 476 bp, Homo sapiens
ttttttttttttttttttatcatacaacaaattaacacaaatttattgggtggaaaatgtgaaaagggacaaaaaaaaggggtagttttgtactgatataagagttcataaagtgataaactcaggtccaaaatcttcagcccacatcaaagacttcatgttcttatgactctagaaacaggccagccccggctgctgggctcttggaatcatggagtgtagctacacataaagaagctcccttgtcaaggacatcacttcctctgtacctcagaatgatacttcttgggcatgggcctaagattctgttttctctcccatcgatgcagaacagattggttggacatgacatcatgttttacatcttggtccttttcctgccacctgtcttccccagaaggcctctgcaaccggttttttgtcagctcaagttgtagaccatcaaacctgtgcttaaaccagcgatgagcttcttc

SEQ ID NO: 119474 - DNA, 1419 bp, Homo sapiens
atggggaaaaaaaaggtatgggtgaagattatcttcttatcggacaatacttttttatggactattacttcacaccagtgggagactcctcaaaaacaggagctcaatcgttccagttcagaaaaggagacattggggcctaaagaagagaagaaccgggacagagaaccggaagagcagcgccttccagaagctacctcgccggggccagcaagagcaaggaaccggcgtccttctgggaaactcgcccggtcgcgccgcagctgcagcactcagctgaagaaagcccttgatgaagctaacttcagatcagtggaagtgtcccggaccaaccgagagctgcgacagaaacttgcagagctagaaaaaatactagaaagtaacaaggagaaaataaagaatcaaaagacccaaattaagctccacttgtcagctaaggcgaataatgctcagaatatagaaaggatgaaggtttctttgagtatccagagatttgtgtgtgaaatgactaacctgcagaaagagatgcagatgttggctaagagccaatatgatgcctcagtgcggaataaacagcaagagctgcacctagaagcagagcggaaaataaggcaggagctagagaatcggtgccaggaattggaagaaactgtcagacacctgaagaaatgtaaagaggcaacagagaatacgctgaaagaagccagtgtggaatcagaacagataacagctaatctggaagaagctcatcgctggtttaagcacaggtttgatggtctacaacttgagctgacaaaaaaccggttgcagaggccttctggggaagacaggtggcaggaaaaggaccaagatgtaaaacatgatgtcatgtccaaccaatctgttctgcatcgatgggagagaaaacagaatcttagcccatgcccaagaagtatcattctgaggaggtgtttggagatcccttttgtgaagagtcacccagtcaagaggaacaggatcacagacccacttcttaaagaagcaatctggctgttttttggtagtgcagctgtgctctgttgtgggggaccttcctcattcagaccatctggactctccagagtcagcagactggagctgctgagtcgactggagctgctgagtcgactgaattgcagagatagcagctgtccctgcccccagcaactcggtccttctcagaccaacttcagcctctcactgctggctggctggctggaattccaagccagtgtgtcttcacttgtgaggtgccatggaagtggggcccacagaacaatgctgtttggctgcctggattcagaccccttcctagggatatgtactgacggatcatcccccttgccgggatcctggggccagagtatgcagaactcctgggtctctgtgtgtgccaagtga

SEQ ID NO: 119475 - DNA, 337 bp, Homo sapiens
ctgaagaaagcccttgatgaagctaacttcagatcagtggaagtgtcccggaccaaccgagagctgcgacagaaacttgcagagctagaaaaaatactagaaagtaacaaggagaaaataaagaatcaaaagacccaaattaagctccacttgtcagctaaggcgaataatgctcagaatatagaaaggatgaaggttgtatgggaaacctcttctcacttcctggatacccttgtcacattccggctccctatctgtcccttccgtgttgattgtactggactttgctcttttgggatcagtgggctagatgggaaagaaagctcagcaggaactg

SEQ ID NO: 119476 - DNA, 682 bp, Homo sapiens
tgtcacattccggctccctatctgtcccttccgtgttgattgtactggactttgctcttttgggatcagtgggctagatgggaaagaaagctcagcaggaactgaaagagatgcagatgtggctaagagccaatatgatgcctcagtgcggaataaacagcaagagctgcacctagaagcagagcggaaaataaggcaggagctagagaatcggtgccaggaattggaagaaactgtcagacacctgaagaaatgtaaagaggcaacagagaatacgctgaaagaagccagtgtggaatcagaacagataacagctaatctggaagaagctcatcgctggtttaagcacaggtttgatggtctacaacttgagctgacaaaaaaccggttgcagaggccttctggggaagacaggtggcaggaaaagcccaaattgtggcatttgtgttttggaaaggctggtggctgtgaggaagacagaccaggggcaggagacagggaggctgctgcccaagtcccagaaattgatcatgaacacctgatggaagcagcagctgtgagaatcccaaacactctagaagaagtgaaaagaaatccaatcatcataaagactcctcaatacaccatcttcgtttatctgccaacgatgctgaagatagccttcgcatgcacagtactgtga

SEQ ID NO: 119477 - DNA, 782 bp, Homo sapiens
gatattgatccttaattagctccatttgcttcaattctttttctatttgctaaaagtaattggaaaataacataaaaagatgatcagtggaaaaactggcttgctctttttgcctataggatgacagaaagaatccaatatgagacccaaagttaccagttcctgctgagctttctttcccatctagcccactgatcccaaaagagcaaagtccagtacaatcaacacggaagggacagatagggagccggaatgtgacactggcagcaaatgagaaatcaaacatttacacagcagtgactccactgaaaaagtctccccaaagacaactggctataattcccagagaatacatggggctggtacggttctaaaacctgtcttccctagacaccattgactgactacatcctcacagggtatccaggaagtgagaagaggtttcccatacaaccttcatcctttctatattctgagcattattcgccttagctgaccagtggagcttaattggggtctttgaatttttaattttctccttgtcactttctagtattttttctagctctgcaagtttctgtcgcagctctcggttggtccgggacacttccactgatctgaagttagcttcatcaagggctttcttcagcttaaaacacaagggagaaaattgaaacatttttactttccattaagagaagcttacttagttttgtccttatattttatcatctttggatcttcttttaaaaaggagaggttctagatcgcgagcggccgct

SEQ ID NO: 119478 - DNA, 600 bp, Homo sapiens
atggcggtgaccacgtccacaggggtgctggcgaacttgtcagaaaagcaaagagttttatcagcttctgaagaacctgatcaatccaagctgtatgacacacaggatgtggagaatatgaatgatgatgatggctggcaacatgtaaatcttggagaccaacagcgttttggaattaaaacttcaggacttgaagcaaaagtaactgcttgccagatgttggtttactatgctaaggagttaagggaagggtttgtgaactatacagaacaagttgtgaagctgatggttcctttactgaaattttatttccaagacaatgttcgagtggcagcagcagagtccatgccttttctcctggaatgtgcaagaatttgtggcccagagtatcttgcacagatgtggcaattcatacgtaaccccttaatcaaggctattggtactgaaccagatacagatgtgctctcagaaataatgaattcttttgcaaagttcactgaagttatgggagatgattgccttaatgatgaatacttggaagaactgggagggacactgagagcaaaacttgaagggcactttaaaaacgaagaattgtga

SEQ ID NO: 119479 - DNA, 3319 bp, Homo sapiens
gcatgccggcaaccgcgtctgcaggggtgccggcgaccgtgtcagaaaagcaagagttttaccagcttctgaagaacctgatcaatccaagctgtatggtgcggaggcaagcagaggaaatctatgaaaatatcccaggtctgtgtaagactaccttcctcttagatgccgtcagaaatagaagagcaggttatgaggtgagacaaatggctgccgcactgctacgacggcttttgtcctctgggtttgaggaggtttatccaaatctgcctgctgatgttcagagagatgtcaagattgaactgattctggctgttaagttagaaacacatgctagcatgaggaaaaaactttgtgatatttttgcagtgctggccaggaatttgatagatgaggatggcactaaccactggccggaaggtctgaagtttcttattgattcaatctactccaaaaatgtggttctatgggaagttgcacttcacgttttctggcactttcctgggatttttgggacccaagagcggcatgatttggatatcatcaaacggttgttggaccagtgtattcaagatcaagaacatccagcaatcaggacgttatccgctagagctgcagctgcatttgtacttgctaatgagaataatattgctcttttcaaagactttgcagacttgcttcctggaatcttacaggctgtgaatgactcatgctaccaggatgatgattcagtgctagaatcccttgttgagattgcagataccgtacctaagtacttgggtccttatttagaagatactctacagttgagtttgaagttatgtggagactctaggcttagtaatctgcagcgccagctggccctcgaagttatagtgaccttgtctgaaactgccactccgatgttgaaaaaacatacaaatattattgcacaggcagttcctcatatattagcaatgatggttgatctacaagatgatgaggactgggtaaatgctgatgaaatggaagaagatgattttgacagcaatgcagttgctgcggagagtgcactagacagactggcttgtgggcttggtggaaaagttgttttaccaatgaccaaggagcatatcatgcagatgcttcagagccctgactggaagtatcgacatgctggattaatggccttatctgccattggagaaggatgccatcaacaaatggaatcaattctagatgaaacagttaactccgttttgctttttcttcaggatcctcatccaagggtgagggctgcagcctgtactacacttggacagatggctacagattttgcacctaatttccaaaagaaatttcatgaaacagtgattgcagctctgttacgtaccatggaaaatcaaggtaatcagcgtgtgcaatcacatgcagcttctgctcttattatttttattgaagactgccctaaatcattgctagttctatatgtggatagtatggtgaaaaatctacattccgtcttggtgattaaacttcaagagttgattcggaatggaactaagttggctttggaacaacttgtgacaaccattgcatcagttgcagatacaatagaagaaaaatttgtcccatattatgatatattcatgccctcactaaagcacattgttgagcttgctgttcagaaggaactcaagcttctgagaggaaaaactatcgagtgcattagccatattggtcttgctgttgggaaggaaaaatttatgcaagatgcatcaaatgtgatgcagctgttgttgaagacacaatcagacttaaataatatggaagatgatgaccctcagacctcttacatggtttcagcatgggctagaatgtgtaaaattcttggaaaagattttcaacagtaccttccactggttatcgagcctcttattaagactgcttcagctaaacctgatgttgctctcttagacacacaggatgtggaaaatatgagtgacgatgatggctggcaatttgtaaatcttggagaccagcagagttttggaattaaaacttcaggacttgaagcaaaagcaactgcttgccaaatgttggtttactatgctaaggagttaagggaagggtttgtggaatatacagaacaagttgtgaagctgatggttcctttactgaaattttatttccatgacaatgttcgagtggcagcagcagagtccatgccttttctcctggaatgtgcaagaattcgtggcccagagtatcttgcacagatgtggcaattcatatgtgaccccttaatcaaggctattggtactgaaccagatacagatgtgctctcagaaataatgaattcttttgcaaagtccattgaagttatgggagatggttgccttaatgatgaacacttggaagaactgggaggaatactgaaagcaaaacttgaagggcactttaaaaaccaagaattgagacaggtgaaaagacaggaagaaaactatgatcaacaggttgagatgtctctgcaagatgaggatgaatgtgatgtttatattctgaccaaagtatcagatattttgcactcattatttagtacttataaggaaaagattttaccatggtttgaacaactacttccattaattgtaaatctaatttgttcaagtaggccatggccagacagacagtggggattgtgcatatttgatgacatcatagagcactgcagtccaacttcatttaaatatgtagaatattttcggtggccaatgctactaaatatgcgagataacaaccctgaagtcaggcaagctgctgcttatggcctgggtgtcatggcacagtttggtggagatgattatcgttctttatgttcagaagctgttccactgctggtaaaagttattaagtgtgcaaattccaaaaccaaaaaaaatgtcattgctacagagaactgtatctcagcaatagggaagattttgaagtttaagcctaactgtgtaaatgtagatgaagttcttccacactggttatcatggcttccactgcatgaagataaagaggaagctattcagactttgagttttctctgtgacctaattgaaagtaaccacccagttgtaattggtccaaataattccaatcttcccaaaataatcagtataattgcagaaggaaaaattaatgagactattaactatgaggatccttgtgccaaacgcctagctaatgtcgtgcgtcaggtacagacttctgaagatttatggttggaatgtgtatcacaacttgatgatgaacagcaggaagccttacaggagttgctaaattttgctag

SEQ ID NO: 119480 - DNA, 615 bp, Homo sapiens
atggatcaacctagtggaagaagtttcatgcaagtattatgtgaaaaatatagtcctgaaaattttccttatcgccgtggcccggggatgggagtccatgtcccagccacacctcagggctctcctatgaaagatcgcctcaacctcccaagtgtactagtgttgaacagctgtggaataacctgtgcaggagatgaaaaagaaattgctgctttctgcgctcatgtgtcggaactagatctttctgacaacaaactcgaagactggcatgagatgtacttgcccatttatggaaggtatcatgaactgatcactaaatatgggaagttggagcctttggcagaagtggacctaagaccccagagcagtgcaaaagtagaagtccactttaacgatcaggtggaagaaatgagcattcgtctggaccaaacagtggcagaactaaagaaacagttaaaaactctagtacaattacccacaagcaacatgcttctctactattttgaccatgaagcaccctttggcccagaggaaatgaagtacagctctcgggcattgcattcctttggcattagggatggagataaaatttacgtggaatccaaaacaaaataa

SEQ ID NO: 119481 - DNA, 521 bp, Homo sapiens
tcgcatattttcccatatataaatctgctcctataactactgtatatgcacaaatacaatggaaataattatatttccctcaaacgtaaatctgtaaatacaaccacagcacatttaggtaccattagacatagagcaatatttcctagacatcagtctgtcagttagagccaccagtgcctccaaacagagagttatagagggagttataaataatctctccagatgtgaacggatcagtataactagatgtaaacatgactccaagccgttcctcctcctccttcttcttctttgtaagatattcctgaagcaagcccagtcatataacaggggggagaggtgtctgggtactggtattttttcccccaaggaggggcggaggtcgctggactttggggaaactgtgcaggagtgggtaggggaccaatgcccgctcccaacacagcccaaaagccccttccgtctgtctcctggtggctgagagctcgggcaagtggagaggcctggagaaaatgagg

SEQ ID NO: 119482 - DNA, 666 bp, Homo sapiens
atggccccaccgcgatgtccccgtccccccgccccgcccccctccccgccacgcctctccctcagcagccagtgccgcactgagccctcgccccacgctaatgcgatatggagagacccggtacagctgttgggagctgcctctcccgccctcaatctccctgtctgtggttccagagggaagaagagtggggaaaaaaggatgaagagaattgtttcagtgctgggggaggaggtagatgacttctttgagcaagagaagaacttccttattaactatgacaataggatcaaagattcttgtgtgaaagctgacaaaatgaccagatctcataaaagccggccccggaccccggcccaggaccggcctgccgcgcggccgcctgagctgcgagctgaggaggcccgttggctgttcccgcaaagagtggggggcgcattttctctcctgccagcccgctccatcctggtcgtttattcccggccttccctcaccccccacccccacagcctgctgtacgaatatcttacaaagaagaagaaggaggaggaggaacggcttggagtcatgtttacatctagttctactgatccgttcacatctggagagattatttataactccctctataactctctgtttggaggcactggtggctctaactga

SEQ ID NO: 119483 - DNA, 576 bp, Homo sapiens
agaagatagatcgccatcatgaacgacaccgtagctattcgcactagaaagttcatgaccaaccgactacttgagaggaaacaaatggtcattgatgtccttcaccccgggaaggcgacagtgcctaagacagaaattctggaaaaactagcccaaatgtacaagaccacaccggatgtcatctttgtatttggattcagaactcattgtggtggtggcaagacaactggctttggcatgatttatgattccctggattatgcggagaaaaatgaacccaaacatagacttgcccgacatggcctgtatgagaagaaaaagacctcatgaaagcaacgacaggaacgcacgaacagaatgaagaaagtcagggggactgcgaaggccaatgttgttgctggctaaaagccgaatgagtaaaggtgctgcaatgatgttagctgtggccactgtggatttttcgcaagaacattaataaactaatgacttcaaaacaaaagaagaaggcggccggttaaagggactcccagggggcccaattttgccgggctgagaccaaagagttttcccttatgg

SEQ ID NO: 119484 - DNA, 483 bp, Homo sapiens
  misc_feature (1)...(483): n = a,t,c or g
nnaaggccggccgnctgnnnnngggaaactttagnaacgacggnccaattnntnattnnnggnggnggcaagacaactgggctttggcatgatttatgaattgcctggattatgcaaagaaaaatgaacccaaacatagacgtgcaagacatggcctgtatgagaagaaaaagacctcaagaaagcaacgaaaggaacgcaagaacagaatgaagaaagtcagggggactgcaaaggccaatgttggtgctggcaaaaagtgagctggagattggatcacagccgaaggagtaaaggtgctgcaatgatgttagctgtggccactgtggatttttcgcaagaacattaataaactaaaaacttcnnnnnnnnnnnnnnnnnnnnnnnnnnnnnnnnnnnngggggggccctttaatttaaagggcccctttaaaccccgggaaaaaccctgggggggttttttatttggcccccttttttgtg

SEQ ID NO: 119485 - DNA, 669 bp, Homo sapiens
gactcccgggtcgactactactactaaatttccgacagcgtcgacgtctgaagatagatcgcccatcatgaacgactaccgtaactatcccgcactaagaaaagttcatgacccaaccgacttacttcaggggaaaccaaatggtcatttgatgtcctttcaccccccgggaagggcgaccagtgccctaagcacagaaaattcgggaaaaaactagcccaaaatgtaccaagacccacaccggattgtcatctttgtattttggattcagaacttcatttttggtggtggcaagacaacttggcttttggcatgatttatggattccctgggatttatgcaaaagaaaaaatgaacccagaccatagactttgcaaggacatgggccttgtattgaggaaggaaaaaggaccttcaaggaaagccaacggaaagggaacggcaaggaaccggattggaaggaaagttccaggggggactggcaaagggcccaatgttgggtgctgggcaaaaagaagaaatgaagtgtctagcagttgagctggagattggttcacagcccgaaggagttaaaaggtgctgcaatgatgttagctgtggcccctgtggatttttcgcaagaacattaataaactaaaaacttcaaaaaaaaaaaaaaaaaaactcgga

SEQ ID NO: 119486 - DNA, 2197 bp, Homo sapiens
gcaaggggactgtccatggggcactgattccctcacacttccagtgtgcactcgcttgaatgccagccccgggacgcggcccgccaccgccgctgccgccagcccagacgcgccgcccgcatgcgcagcgaccatggagcgccccgaagcgggactcagggtagcaccgagaagcccggtgcaaccggggtgtacatcagtgctgcctgtagcgaagcgttttaatgcacgcattctgtggctcaaaaggccccagcgacagctctggtcactttggagagcacaagccactgtaagccttgggggcttccatgtgatgttaagcctgcaggtgcacagaataaatgcaagagtgaaggaggcatggcagcttccacctagatttcagatgatgtaccagaaagcctgggtgctcaggcagaagcctgctgcagcagtggagccctcacagagaaactctcctagggcaatgctggggggaaatgtgggattggagcccccacccagagtctccaccagggcactgcctagtggagctgtgggaagggggctgccaccttccagacccaagaatgatacagccactggcagcttacaccctgagcttggaaaagctgcagacattcaattccatcctgtgagagcagccacaggggcttcaccttgcaaatccatagggacagaactgcctaaggctttgggagcccatgtcttgctccagtgtgccctggatgtgggacatggagttgaaggagagctttggagctttaagacccggcaaccatccgatttctcaattttttccccacccttcccgcctttctattccacaaaaccgccattgtcatcatggcccatccccaatgagccgctgggcacacctcccagacggggtcgtggcggggcagaggggctcctcacttcccagtgtagccatattcttaatggactatgttttacaggaggaattaattccaatgagtgtgaaaatgtatcaagaaaaaagaaaatgtcagaggaatttgaagccaatactatggattctctggtagacatgccatttgctactgtagatattcaggatgactgtggaattttctttgacgtgtggaaattgcgagttaactgccaagaaattcttgctaatagacaccctggcagagcaatgaggaaagtagtgctaacaaaaacatcatgggaaggggaatccttggcagtaggaaaactccccttgaaacggttagtgtctctcgattgtcagctgcgttgccttcagtgcgaatgtggtatcttgattaggcagcatgtggtctggttggagagaacaacaggtcactggcacccaagaagttctcaaagttgcaggctcaatacaacaagcacagcgctagaacactgcaatgcctttatttacaacacagtctgttcccacaaactgaaggaccactcccatgacaatggaaaatcttcaggttttctgaatccggtggctgcccctcactcctgcattgtcatggggcacctaactttgctcatcaccacttcttattacactccactcaccaagccagacacagaccccaccctgaagaaggaggggctgatctctcaggacagcagcagtttagaggttctgttgcacactgaccccctggggaagcgaggtaccccagatccccgagttgatgatgacagcctgggcaagtttcctgtgacaaacagtcaagcacgaaagcggatcctagaaccagatgacttcctggatgacctcgatgatgagtactgtgaagatgctcccaagcatcggggaaaggggtgtggcagtgcccataaggagctggatgcttccaacctggaggaccaggataagccctatgcctgtgacatttgtggaaaacgttacaagaaccgaccaggcctcagttaccactatgcccactctcacttggctgaggagggcgaggacaaagaagactcccaaccacccactcctgtttcccagaggtctgaggaacagaaatccaaaaagggtcctgatggatttgccttgcccaacaactactgtaacttctgcctggggaactcaaagattaacaagaagatgggacaacctgaggaggtggtgtcctgtttcgactgtggctgctcagggcatccatcttgcctccatttcacccccatgatgatggggcagtga

SEQ ID NO: 119487 - DNA, 652 bp, Homo sapiens
ttttcgcccttaatccatttaatcctgagtggacacagcacatgtttcagagagcacagggttgggggtaaggtcacagatcaacaggatcccaaggcagaggaatttttcttagtgcagaacaaaatgaaaagtctcccatgtctacttctttctacacagacacggcaaccatccgatttctcaatcttttccccacctttcccgcctttctattccacaaagccgccattgtcatcctggcccgttctcaatgagctgttgggcacacctcccagacggggtggtggccgggcagaggggctcctcacttcccagtaggggcggccgggcagaggcgccccctcacctcccagaagaggcggctggccgggcggggggctgaccccccaacctccctcccggacagggcggctggccgggcggggtgctgatccccccacctccctcccggacggggcggctggccgggcggggggctgaccccaccacctccctcccggacggggcggctggcccggcagaggggctcctcacttcccagtaggggtggctgggcagaggcgcttgtttatctgctgaccttccctccactattgtcccatgaccctgccaaatccccctctgtgagaaacacccaagaattatcaat

SEQ ID NO: 119488 - DNA, 817 bp, Homo sapiens
ttttttttttaattttaatttttaatttttaattttttatttttattgatcattcttgggtgtttctcgcacagggggatttggcagggtcataggacaatagtggagggaaggtcagcagataaacaagtgaacaaaggtctctggttttcctaggcagaggaccctgcggccttccgcaatgtttgtgtccctgggtacttaagattagggagtggtgatgactcttaacgagcatgctgccttcaagcatctgtttaacaaagcacatcttgcaccgcccttaatccatttaaccctgagtggacacagcacatgtttcagagagcacagggttggggataaggtcacagatcaacaggatcccaaggcagaagaatttttcttagtacagaacaaaatgaaaagtctcccatgtctacttctatccacacagaccccgcaaccatccgatttctcaattttttccccacccttcccgcctttctattccacaaaaccgccattgtcatcatggcccatccccaatgagccgctgggcacacctcccagacggggtcgtggccgggcagaggggctcctcacttcccagaaactttcaatcatggcagaaggtggaagggaagcaggcatgtcttcacatggcctgagcaggagagagaatggggaagcgctacacacttttaaacaacaagatcttgtgagaactcactcactatcacgagaacagcaaggggaaatccgctcccatgatccaatcacctcccaccaggcccctcctccaacactggagattaaaattcgacttgagatttgg

SEQ ID NO: 119489 - DNA, 657 bp, Homo sapiens
atgatgagtaatcggaggtgcaaggaaaatagagacctgaaggtgcagcgcctgtttcaacaggaccggggcaaccggggctctggacagatgtgttctggtgactgccagtctgggagcacgacactaacgccgggagaggaatgtaactggcaagaggaggcgacgacactcagtgtgtcgttgccagacgaactccaagacctcagcatcgcactcgcggtgatcgcccaccgtcaccgcgtggagtatactctaacataccacgcatactgggctaccagatccggaacgggagtgcgacggcactgtgggaacttccgcaagatttcgctaatgaacgacccgcaactgccgcattacaccttacgtcattcatatgacgcgcgtacagaccggcgggcactctcgagcaatcaagtcacactgaagatggatgtttcacatacagaacattcacatgtaatcggcaaaggtggcaacaatattaaaaaagtgatggaagaaaccggatgccatatccactttccagattccaacaggaataaccaagcagaaaaaagcaaccaggtatctatagcgggacaaccagcaggagtagaatctgcccgagttagaattcgggtaactatttattactttaacattgtaaattga

SEQ ID NO: 119490 - DNA, 429 bp, Homo sapiens
atgaggtttaaggaaagaagttgtctacacaacatagaagtacaaagtgaagcaggaagtagtgatggagaagctgcagcaagtgatctagaagctctagctaaaatcattgatgaaggctatacagctggtggctccaaaaaagacccactcactccatttaaggagagaagaaggaagaataaagaggactctgggatcttggataccagctcagccacagcaggacatcaaagaacatctactagcatcaacaccatcctggaaaacatgacctcaccaaatgaaatagataaggcaccagggaccaattctggagaaacagagatatgtgacttttcagacagagaattcaaaatggctgtgctgaggaaagtcaaagaaattcaagataacacagagaaggaattcagaatcctatctgattag

SEQ ID NO: 119491 - DNA, 842 bp, Homo sapiens
atgttcgctggagtgctgtcagctggtaatgatgaatttagagtgatgctaaatatgctggcctgtacaactttctccagcaaagctgagctatttgagtacagacatggagaagcctcagcctatacccccaactgcccaagaaagtatgcccaaccagtaccaccaggagtgggactgcccctaaagtcaaactgtgtccattgtgggagaattacccatcccaagaaagcgttgcgagatcggcatctgggatgcccagaaaagatccctcgactcactggtccctgggccacgatcagtgtgcctactataagcaaaaaggccactggcaatcacagcatcctaaccatccccgggccagataccaaattaatgcagaatagtggaaagtccacttttaaacgaacacagatagaccatctcatgaatgtccttgtactctggtggtccacagaacgttggaccaactacggcataaaagctctacatcggggggcaagactcatggttgacactggggtctttatcaaaatctccctggattaaatggtcctagtttactaatgtccagtctgaggagagtcaggagggacagaagtacttttctgaagtagagagctgtctttgacttggcaagaccccacagggtataacaaggcaagcattaaatgcaatagtttgaggtgaaattgacttggctatgttaataactagatggtcagcaatagcgcgaggaacgaaagatgagtaatagaatagatgaaaagagatttttcgtatctttagtttggcaggggtttcctctgggactgtggcccatgactctggagggggtggcc

SEQ ID NO: 119492 - DNA, 462 bp, Homo sapiens
atggggaagtttgtcttagttttaaaaagggggggcagcctggccaaggatgttccaaatcacggatttcgtgtaggaatgaaattagaagcagtagatctcatggagccacgtttaatatgtgtagccacagtaactcgaattattcatcgtctcttgaggatacattttgatggatgggaagaagagtatgatcagtgggtagactgtggggtgcggaggagcttctctggtgacgaagagttgactcctcctccatatcgaacccttccagcacagacagccccggaggccttcccacctcccagcactagccgagagttcagtcccagcctcaaaacagtgacaacactgcagctgaaggaggagttgctggatggagaggattataatttccttcaaggagcgtctgatcaggaaagcaatggctctgccaacttctacatcaaacaagagccatga

SEQ ID NO: 119493 - DNA, 478 bp, Homo sapiens; identical to SEQ ID NO: 117934
  misc_feature (1)...(478): n = a,t,c or g

SEQ ID NO: 119494 - DNA, 1251 bp, Homo sapiens
atgaagccacagaccctcgcagtgagtgttacagttcttgaagatggtgtgtccagactttgttccttcagatgttcagatgtgtcaggagttttttccttccagtgggttcgtggtctcgctgacttcacaagtgaagctgcagacctttgcatgttggaagttctggccagggcaattaggcaggagaaggaaataaagggtattcaattaggaaaagaggaagtcaaattgtccctgtttgcagatgacatgattgtatatctagaaaaccccattgtctcagcccaaaatctccttaagctgataagcaacttcagcaaagtctcaggatacaaaatcaatgtacaaaaatcacaagcattcttatacaccaacaacagacaaacagagagccaaatcatgagtgaactcccattcacaattgcttcaaagagaataaaatacctaggaatccaacttacaagggaggtgaaggacctcttcaaggagaactacaaaccactgctcaaggaaataaaagaggatacaaacaaatggaagaacattccatgttcatgggtaggaagaatcaatatcgtgaaaatggccatactgcccaagttcatttacagattcaatgccatccccatcaagctaccaatgactttcttcacagaattggaaaaaactactttaaagttcatatggaatcaaaaaagaccccgcattgccaagtcaatcctaagccaaaagaacaaagctggagcaatcacactacctgacttcaaactatactacaaggctacagtaaccaaaacagcatggtactggtaccaaaacagagatatagatcaatggaacagaatagagccctcagaaataacgctgcatacctacaactatctgatctttgaaaaacctgagaaaaacaagcaatggggaaaggattccctatttaataaatggtgctgggaaaactggctagccatatgtaggaagctgaaactggatcccttccttacaccttatacaaaaatcaattcaagatggattaaagatttaaacgttagacctaaaaccataaaaaccctagaagaaaacctaggcattaccattcaggacataggcatgggcaaggacttcatgtccaaaacaccaaaagcaatggcaacaaaagacaaaattgacaaatgggatctaattaaactaaagagcttctgcacagcaaaagaaactaccatcagagtgaacaggcaacctacaaaatga

SEQ ID NO: 119495 - DNA, 1260 bp, Homo sapiens
atgggcactgtctggctggatcagaagtgcagtggacaccctgctggatctggaggggtggaagtcagccgtgggtctgtgatggcagcaaacagcagtggtggatggtgggctgaaacgactgagtctactgaactgcagagatggcgactgcccttccccccaggaacctggtcccaactcaggcagattccagcctgctgccaccgactggctggaattccaagccaggagacggatgaagttgaaagccatcattctcagcaaactaacacaggaacagaaaaccaaacaccacatgttctcactcataagtgggagttgaaaaatgagaatacatggacacaaggaggggaacatcattcaccggggcctgtcgagggagtttccatgccaacagagagccaaatcatgagtgaactcccattcacaattgcttcaaagagaattaaatacttaggaatccaacttacaagggatgtgaaggacctcttcaaggagaactacaaaccactgctcaatgaaataaaagaggatacaaacaaatggaagaacattccatgctcatgggtaggaagaatcaatattgtgaaaatggccatactgcccaagggaatttatagattcaatgccatccccatcaagctaccaatgactttcttcacagaattggaaaaaactactttaaagttcatatggaaccaaaaaagagcccgcatcgccaagtcaatcctaagccaaaagaacaaagctggaggcatcacactacctaacttcaaactgtactacaaggctacagtaaccaaaacagcatggtactggtaccaaaacagagatatagatcaatggaaaagaacagagccctcagaaataatgccacatatctacaactatctgatctttgacaaacctgagaaagacaagcaatggggaaaggattccctatttaataaatggtgctgggaaaactggctagccatatgtagaaagctgaaactggatcccttccttacaccttatactaaaattaattcaagatggattaaagacttaaatgttaggtttaaaaccataaaaaccctagaagaaaacctaggcattaccatgcgggacataggcatgggcaaggacttcatgtctaaaacaccaaaagcaatggcaacaaaagccaaaattgacaaatgggatctaattaaactaaagtgcttctgtacagcaaaagaaactaccatcagagtgaacaggcaacctacaaaatga

SEQ ID NO: 119496 - DNA, 1659 bp, Homo sapiens
atgggagactttaacaccccactgtcaacattagacagatcaacgagacagaaagtcaacaaggatacccaggaattgaactcagctctgcaccaagcggacctaatagacatctacagaagtctccacgccaaatcaacagaatatacatttttttcagcaccacaccacacctattccaaaattgaccacatacttggaagtaaagctctcctcagcaaatgtaaaagaacagagattataacaaactatctctcagaccacagtgcaatcaaactagaactcagaattaagaatctcactcaaaaccgctcaactacatggaaactgaacaacctgctcctgaatgactactggatacatgacgaaatgaaggcagaaataaagatgttctttgaaaccaacgagaacaaagacacaacataccagaatctctgggatgcattcaaagcaaccgctagcaagactaataaagaaaaagagaagaatcaaatagacacaataaaaaatgataaaggggatatcaccaccgatcccacagaaatacaaactaccatcagagaatactacaaacacctctatgcaaataaactagaaaatctagaagaaatggataaattcctcgacacatacactctcccaagactaaaccaggaagaagttgaatctctgaatagaccaataacaggagctgaaattgtggcaataatcaatagtttaccaaccaaaaagagtccaggaccagatggattcacagccgaattctaccagaggtacaaggaggaactgcatataaacagagccaaagacaaaaaccacatgattatctcaatagatgcagaaaaggcctttgacaaaattcaacaacccttcatgctaaaaactctcaataaattaggtattgatgggacgtatttcaaaataataagagctatctatgacaaacccacagccaatatcatactaaatgggcaaaaactggaagcattccctttgaaaactggcacaagacagggatgccctctctcaccactcctattcaacatagtgttggaagttctggccagggcaattaggcaggagaaggaaataaagggtattcaattaggaaaagaggaagtcaaattgtccctgttcgcagacgacatgactgtatatctagaaaaccccattgtctcagcccaaaatctccttaagctgataagcaacttcagcaaagtctcaggatacaaaatcaacgtgcaaaaatcacaagcattcttatacaccaacaacagacaaacagagagccaaatcatgagtgaactcccattcacaattgcttcaaagagaataaaatacctaggaatccaacttacaagggatgtgaaggacctcttcaaggagaactacaaaccactgctcaaggaaataaaagaggatacaaacaaatggaagaacattccatgctcatgggtaggaagaatcaatatcatgaaaatggccatactgcccaaggtaatttacagattcaatgccatccccataaagctaccaatgactttcttcacagaattggaaaaaactactttaaagttcatatggaaccaaaaaaagagcccgcatcgccaaggcaatcctaagccaaaagaacgaagctggaggcatcacactacctga

SEQ ID NO: 119497 - DNA, 1719 bp, Homo sapiens
  misc_feature (1)...(1719): n = a,t,c or g
atgcacaatacagatggaaacagatttctgagccactggggctaccgtcaagctctctccatctccaagccagcaagtgcttctttgcaccccagctctaaaacaaagcccttggggacacaatcaaagacagtagttgccaagaggaatagggagcatggaaagaaggaacgcagttcctcaccagcaatggaacaaagctggatggagaatgattttgacgagctgagagaagaaggcttcagacgatcaaattactctgagctacgggaggacattcaaaccaaaggcaaagaagttgaaaactttgaaaaaaatttagaagaatgtataactagaataaccaatacagagaagtgcttaaaggagctgatggagctgaaaaccaaggctcgagaactacgtgaagaatgcagaagcctcaggagccgatgcgatcaactggaagaaaggagaaagcaggaaagatccaaaattgacaccctaacatcacaattaaaagaactagaaaagcaagagcaaacacattcaaaagctggcagaaggcaagaaataactaaaatcagagcagaactgaaggaaatagagacacaaaaaacccttcaaaaaatcaatgaatccaggagctggttttttgaaaggatcaacaaaattgatagaccgctagcaagactaataaagaaaaaaagagagaagaatcaaatagacacaataaaaaatgataaaggggatatcaccaccgatcccacagaaatacaaactaccatcagagaatactacaaacacctctacgcaaataaactagaaaatctagaagaaatggatacattcctcgacacatacactctcccaagactaaaccaggaagaagttgaatctctgaatagaccaataacaggctctgaaattgtggcaataatcaatagtttaccaaccaaaaagagtccaggaccagatggattcacagccgaattctaccagaggtacaaggaggaactgcatataaacagagccaaagacaaaaaccacatgattatctcaatagatgcagaaaaagcctttgacaaaattcaacaacccttcatgctaaaaactctcaataaattagtgttggaagttctggccagggcaatcaggcaggagaaggaaataaagggtattcaattaggaaaagaggaagtcaaattgtccctgtttgcagacgacatgatcgtttatctagaaaaccccatcgtctcagcccaaaatctccttaagctgttaagcaacttcagcaaagtctcaggatacaaaatcaatgtacaaaaatcacaagcattcttatacaccaacaacagacaaacagagagccaaatcatgagtgaactcccattcacaattgcttcaaagagaataaaatacctaggaatccaacttacaagggatgtgaagcacctcttcaaggagaactacaaaccactgctcaaggaaataaaagaggacacaaacaaatggaagaacattccatgctcatgggtagngaagaatcaatatcgtgaaaatggccatactgcccaaggtaatttacagattcaatgccgtccccatcaagctaccaatgactttcttcacagaattggaaaaaactactttaaagttcatatggaaccaaaaaagagcctgcatcgccaagtcaatcctaagccaaaagaacaaagctggaggcatcacactacctga

SEQ ID NO: 119498 - DNA, 1020 bp, Homo sapiens
atgaggaggaaaatggtacaaaataagattggagagctagacagaaagggggaggaggaggaggaggaggaagttggtgatggtgatgatgacgatgatgctgctgatgttattgcagtagacggggttttggacatgaatggagctgaaagcctttatcatcagccaattaatgcaggaacagaaaacccaacactgcatgttctcacttataagtgggagctgaatgatgagaacacatggacacatggttggggcaggcatataaacggaaccaaagacaaaaaccacatgattatctcaatcgatgcagaaaaggcctttgacaaaattcaacaacgcttcatgctaaaaactctcaataaatttggtattgatgggacgtatctcaaaataataagagatgacatgattgtatatctagaaaaccccatcgtctcagcccaaaatctccttaagctgataagcaacttcagcaaagtctcaggatacaaaatcaatgtacaaaaatcacaagcattcttatacacaaataacagacaaacagagagccaaatcatgagtgaactcccattcacaattgcttcaaagaggataaaatacctaggaatccaacttacaagggatgtgaaggacctcttcaaggagaactacaaaccacttctcaatgaaataaaagaggatacaaacaaatggaagaacattccatgctcatgggtaggaagaatcaatatcgtgaaaattgccatactgcccaaggtaatttatagattcaatgccatccccatcaagctaccaatgactttcttcacagaattggaaaaaacttctttaaagttcatatggaaccaaaaaagagccctcatcaccaagtcaatcctaagcctaaagaacaaagctggaggcatcatgctacctgacttcaaactatactacaaggctacagtaaccaaaacagcatggtactggtaccaaaacagagatatagatcatggaacagaacagagccctcagaaataa

SEQ ID NO: 119499 - DNA, 1665 bp, Homo sapiens
atggataaatttctcgacacatacactctcccaagactaaaccaggaagaagttgaatctctgaatagaccaataacaggagctgaaattgtggcaataatcaatagcttaccaaccaaaaagagtccaggaccagatggattcacagctgaattctaccagaggctgataagcaacttcagcaaagtctcaggatacaggatcaatgtacaagaatctacaagcattcttatacaccatcaacagacaaacagagagccaaatcatgagtgcactcccactcacaattgcttcaaagagaataaaatacctaggaatccaacttacaagggatgtgaaggacctcttcaaggagaactacaaaccactgctcaacgaaataaaagaggatacaaacaaatggaagaacattccatgctcatgggtaggaagaatcaatatcgtgaaaatggccatactgcccaagaattggaagaaactactttaaagttcatatggaaccaaaaaagagcccgcatcgccaagtcaatcctaagccaaaagaacaaagctggaggcatcacgctacctgacttcaaactatactacaaggctacagtaaccaaaacagcatggtactggtaccaaaacagagatagagaccaatggaacagaacagagccctcagaaataatgccacatatctacaactatctgatctttgacaagcctgagaaaaacaagcaatggggaaaggattccctatttaataaatggtgctgggaaaactggctagccatatgtagaaagctgaaactggatcccttccttacaccttacacaagaattaattcaagatggattaaagacttacatgttagacgtaaaaccataaaaaccctagaagaaaacctaggcaataccattcaagacataggcatgggcaaggacttcatgtctaaaacaccaaaagccatggcaacaaaagccaaaattgacaaatgggatctaattaaactcaagagcttctgcacagcaaaagaaactaccatcagagtgaacaggcaacctacaaaatgggagaaaatttttgcaacctactcatctgacaaagggctaatatccagaatctacaatgaactcaaacaaatttacaagaaaaaaacaaacaaccccatcaaaaagtgggcgaaggatatgaacagacacttctcaaaagaagacatttatgcagccaaaaaacacatgaaaaaatgctcatcatcactggccatcagagaaatgcaaatcaaaaccacaatgagataccatctcacaccagttagaatggcgatcattaaaaagtcaggaaacaacagtggcacctggaactccagagagacagaaccattcactctcctggaaagggagctgaagccaggagccaagtggtcttgctcagtggatcccacttccatggagcccagcaagctaagacccactggcttgaaattcttgctgccagcacagctgtctgaagtcgacctgggatgctcaggcttgtgcaaggaagctaagaaccttgataaaaggttacaggaactgccaactagaatagctagtttagagaaaaagaaaagtgacctgatggaactgaaaaacacagcacgagaacttcgtgaagcatacacaagtatcaatagctga

SEQ ID NO: 119500 - DNA, 987 bp, Homo sapiens; identical to SEQ ID NO: 115400

SEQ ID NO: 119501 - DNA, 1566 bp, Homo sapiens
atgagtgaactcccattcacaattgcttcaaagagaataaaatacctaggaatccaacttacaagggatgtgaaggacctcttcaaggagaactacaaaccactgctcaatgaaattaaagaggatacaaacaaatggaagaacattccatgctcatgggtaggaagaatcaatatcgtgaaaatggccatactgcccaagatgcttcttcacaaatattctagctacagaaactgtgaatcaaatattctttctcctaataaaagtatccaatgcaatgccaaagaaaacttactgaatgaagataattactgtgcaaaaatggttttcattcttccctttgcatttgaaaatcggaagatccaagattactcagccaatgtgatgattcatttgagaccaccacatcacacttattccaaaattgaccacatagttgggagtaaagcactcctcagcaaatgtaaaagaacagaaattataacaaactgtctctcagaccacagtgcaatcaaactagaactcagaattaagaaactcactcaaaactgctcaactacattgaaactgaacaacctgctcctgaatgactactgggtacataataaaatgaaggcagaaataaagacgttctttgaaaccaatgagagcaaagacacaacacagcagaatgtctgggacacattcaaagcagtgtgtagagggaaatttatagcactaaatgcccataagagaaagcaggaaagatctaaaattgccaccctaacatcacaattaaaagaactagagaagcaagagcaaacacattctaaagctggaaggcaagaaataactaagatcagagcagaactgaaggagatagagacacgaaaaacccttcaaaaaatcaatgaatccaggagctggttttttgaaaagatcaacaaaatccatagactgctagcaagactaataaagaagaaaagagagaagaatcaaatagatgcaataaaaaatgataagggggatatcaccacagatcccacagaaatacaaactaccatcagaggatactataaacaccactacacaaataaactagaaaatctagaagaaatgcataaattcctggacatgtacaccctcccaagactaaaccaggaagaagttgaatctctgaatagaccaataataggttctgaaattgaggcaataattaatggcctaacaaccaaaaaaaagtccaggaccagacggattctcagcagaattctaccagagagaataaaatacctaggaatccaacttacaaaggatgtgaaggatctcttcaaggagaactacaaaccactgctcaatgaaataaaagaggacacaaacaaatggaagaacattccatgctcatggacaggaatcatcaatattgtgaaaatggccatagtgccgaagtctctcacaatgcttccattggtcatcggtagtctgggagcaagggagcccgaagttactgagtccatagaattcagtctctcaactcacagaatatgttcaaacagagaactgccagcacaaaatgcaaagcactaa

SEQ ID NO: 119502 - DNA, 1452 bp, Homo sapiens
atggagctgaaagacaaggctcgagaactacgtgaagaatgcagaagcctcaggagcagatgcgatcagctggaagaaaaggtatcagtgatggaagatgaaattaatgaaatgaaactaaatcaggaagaagttgaatctctgaatagaccaataacaggctctgaaattgtggcagtaatcaacagctcaccaaccaaaaagagtccaggaccagatggattcacagccaaattctaccagaggtacaaggaggaactgcatataaacagagccaaagacaaaaaccacatgattatctcaatagatgtagaaaaggcctttgacaaaattcaacaacccttcatgctaaaaactctcaataaattaggtattgatgggacatatctcaaaataataagaactatctatgacaaactcacagccaatatcatactgaatgggcaaaaactggaagcattccctttgaaaactggcacaagacagggatgccctctctcatcactcccattcaacatagtgttggaagttctggccagggcaattaggcaggagaaggaaataaagggtattcaattaggaaaagaggaagtcaaattgtccctgtttgtagacgacatgattgtatatctagaaaaccccattgtctcagcccaaaatctccttaagctgataagcaatttcagcaaagtctcaggacacaaaatcaatgtacaaaactcacaagcattcttatacaccaataacagacaaacagagagccaaatcatgagtgaactcccattcacaattgcttcaaagagaataaaatacctaggaatccaacttacaagggatgtgaaggacctcttcaaggagaactacaaaccactgctcaatgaaataaaagaggatataaacaactggaagaacattccatgctcatgggtaggaagaatcaatatcgtgaaaatggacatactgcccaaggtaatttatagacccaatgccatccccatcaagctaccaaggactttcttcacagaattggaaaaaactactttaaacttcatatggaaccaaaaaagagcctgcattgccaagtcaatcctaagccaaaagaacaaagctggaggcatcatgctacctgacttcaaactatactacaaggctacagtaaccaaaacagcatggtactggtaccaaaacagagatatagatcaatggaacagaacagagccctcagaagtaacgctgcatatctacaactatctgatctttgacaaacctgagaaaaacaagcaatggggaaaggactccctatttaataaatggtgctgggaaaactggctagccatatgtagaaagctgaaactggatcccttccttacaccttatacaaaaattaattcaaaatggattaaagacttaaacgttacacctaaaaccataaaaaccctagaagaaacctag

SEQ ID NO: 119503 - DNA, 1605 bp, Homo sapiens
atgatccacaatcgagagaaaaaaacagtcaatggagttaaattcccagataatccagttccttatgtggaagaaagggattttctgctgactacttatgtctacaaaaggacatccaggcttttctcacaaaagctcagaaacaatggagaactgggtagagacaagggcaaatattcaaaagtgggggagaagatcaggaacagatcaacagaggggccacagggactctgggcagcccacattaaatgtagagaagttcatgaaaaagatcatttaaaagttctgttcaaaaagcgacctcatcgccagagaggggatgaagtatttattcgcgataagctcatggagcggcgtaaccgtcgcacaggaaggacagagaaagcgcggatctgggaagtgacggacagaacggtcaggacctggattggggaggcggttgccgccgctgctgctgacggtgtgacgttctctgttccggtcacaccacatacgttccgccattcctatgcgatgcacatgctgtatgccggtataccgctgaaagttctgcaaagcctgatgggacataagtccatcagttcaacggaagtctacacgaaggtttttgcgctggatgtggctgcccggcaccggagaataaaatacctaggaatccaacttacaagggatgtgaaggacctcttcaagcagaactacaaaccacggctcaaggaaataaaagaggatacaaacaaatggaagaacattccatgctcatgggtagaaagaatctatatcgtgaaaatggccatactgcccaaggagctttatgaacatatgaatagttccttgggaggtgcttcattagaaggatcccaagtatatcttgtgttggaagttctggccagggcaattaggcaggagaaggaaataaagagtattcaattaggaaaagaggaagcgaaattgtccctgtttgcagacaaaatgattgtatatctagaaaaccccattgtctcagcccaaaatctccttaagctgataagcaacttcagcaaagtctcaggatacaaaatcaatgtacaaaaatcacaagcattcttatacaccaacaacagacaaacagagagccaaatcatgagtgaactcccattcacaattgcttcaaagagaataaaatacctaggaatccaacttacaagggatgtgaaggacctcttcaagcagaactacaaaccactgctcaaggaaataaaagaggatacaaacaaatggaagaatattccatgctcatgggtaggaagaatcaatatcgtgaaaatggccatactgcccaaggtaatttacagattcaatgccatccccatcaagctaccaatgcctttcttcacagaattggaaaaaactactttaaagttcatatggaaccaaaaaagagcccgcatcgccaagtcaatcctaagccaaaagaacaaagctggaggcatcacactacctgacttcaaactatactacaaggctacagtaaccaaaacagcatggtactggtaccaaaacagagatatagatcaatgggacagaacagagccctcagaaatatgccgcatatctacagctatctga

SEQ ID NO: 119504 - DNA, 1569 bp, Homo sapiens; identical to SEQ ID NO: 115452

SEQ ID NO: 119505 - DNA, 690 bp, Homo sapiens
atgagtgaactcccattcacaattgcttcaaagagaataaaatacctaggaatccaacttacaagggatgtgaaggacctcttcaaggagaactacaatccactgctcaatgaaataaaagaggatacaaacgaatggaagaacattccatgctcatgggtaggaagaatcaatatcgtgaaaatggccatactgcccaaggctacagtaaccaaaatagcatggtactggtaccaaaacagagatatagatcaatggaacagaacagagcgctcagaaataatgccgcatatctacaactacctgatctttaagaaacctgagaaaaacaagcaatggggaaaggattccctgtttgataaatggtgctcggaaaactggctagccatatgtagaaagctgaaactggatcccttccttacaccttatacaaaaattaattcaagatggattaaagacttaaacgttagacctaaaaccataaaaaccctagaagaaaacctaggcattactattcaggacataggcatcggcaaggacttcatgtctaaaacaccaaaagcaatggcaacaaaagccaaaattgacaaatgggatctaattaaactaaagcttctgcacagcaaaagaaactaccatcagagtgaacaggcaatctacaaaatgggaaattatatcttctttagatga

SEQ ID NO: 119506 - DNA, 1919 bp, Homo sapiens
atggataaattcctcgacacatacactctcccaagactaaaccaggaagaagttgaatctctgaatagaccaataacaggagctgaaattgtggcaataatcaatagcttaccaactaaaaagagtccaggaccagatggattcacagccaaattctaccagagtaaaatactggcaaaccaaatccagcagcacatcaaaaagcttacccaccaggatcaagtggacttcatccctgggatgcaaggctggttcaatatacgcaaatcaataaatgtaatccagcatataaacagaagcaaagacaaaaaccacatgattatctcaatagatgcagaaaaggcctttgacaaaattcaacaacacttcatgctaaaaactctcaataaattacgtattgatgggacgtatctcaaaataataagagctatctatgacaaacccacagccaatatcatactgaatgggcaaaaactggaagcattccctttgaaaactggcacaagacagggatgctctctctcaccactcctattcaacatagtgttggaagttctggccagggcaattaggcaggagaaggaaataaagggtattcaattaggaaaagaggaagtcaaattgtccctgtttgcagatgacatgattgtatatctagaaaaccccattgtctcagcccaaaatctccttaagctgataagcaacttcagcaaagtctcaggatacaaaatcaatgtacaaaaatcacaagcattcttatacaccaacaacagacaaacagagagccaaatcatgagtgaactcccattcacaattgcttcaaagagaataaaatacctaggaatccaacttacaagggatgtgaaggacctcttcaaggagaactacaaaccactgctcaaggaaataaaagaggatacaaacaaatggaagaacatcccatgctcatgggtaggaagaatcaatatcgtgaaaatggccatactgcccaagataatttacagattcaatgccatccccatcaaactaccaatgactttcttcacagaattggaaaaaactactttaaagttcatatggaaccaaaaaagagcccgcattgccaaggcaatcctaagccaaaagaacaaagctggaggcatcacgctacctgacttcaaactatactacaaggctacagtaaccaaaacagcatggtactggtaccaaaacagagatatagatcaatggaacagaacagagccctcagaaataacgctgcatatctacaactttctgatctttgacaaacctgagaaaaacgagcaatggggaaaggattccctatttaataaatggtgctgggaaaactggctagccatatgtagaaagctgaaactggatcccttccttacaccttatacaaaaatcaattcaagatggattaaagacttaaacgttagacctaaaaccataaaaaccctagaagaaaacctaggcattaccattcaggacataggcatgggcaaggacttcatgtctaaaacaccaaaagcaatggcaacaaaagccaaaattgacaaatgggatctaattaaactaaagaacttctgcacagcaaaagaaactaccatcagagtgaacaggcaacctacaaaatgggagaaaattttcacaacctactcatctgacaaagggctaatatccagaatctacaatgaactccaacaaatttacaagaaaaaaacaaacaaccccatcaaaaagtgggcaaaggacatgaacagacacttctcaaaagaagacatttatgcagccaaaaaacacatgaaaaaatgctcaccatcactggccatcagagaaatgcaaatcaaaaccacaatgagataccatgtcacaccagttagaatggcaaccattaaaaagtcaggaaacaacag

SEQ ID NO: 119507 - DNA, 1419 bp, Homo sapiens
atgattatcttaatagatgcagaaaaagcctttgacaaaattcaacaacccttcatgctaaaaactctcagtaaattaggtactgatgggacgtatctcaaaataataagagctatctatgacaaacccacagccaatatcatactgaatgggcaaaaactggaagcattccctttgaaaactggcacaagacagggatgccctctctcaccactcctattcaacatagggttggaagatctggccagggcaatcaggcaggagaaggaaataaagggtattcaattaggaaaagaggaagtcaaattgtccctgtttgcagacgacatgattgtttatctagaaaaccccatcgtctcagcccaaaatctccttaagctgataagcaacttcagcaaagtctcaggatacaaaatcaatgtacaaaaatcacaagcattcctatacaccaacaacagacaaacagagagccaaatcatgagtgaactcccattcacaattgcttcaaagagaataaaatacctaggaatccaacttacaagggatgtgaaggacctcttcaaggagaactacaaaccactgctcaaggaaatcaaagaggatacaaacaaatggaagaacattccatgctcatgggtaggaagaatcaatatcgtgaaaatggccatactgcccaagagatatagatcaatggaacgaacagagccctcagaaataatgccgcatacctacaactatctgatctttgacaaacctgagaaaaacaagcaatggggaaaggattccctatttcataaatggtgctgggaaaactggctagccgtatgtagaaagctgaaactggatcccttccttacaccttatacaaaaatcaattcaagatggattaaagatttaaacattagacctaaaaccataaaaactctagaagaaaacctaggcattaccattcaggacataggcgttggcaaggacttcatgtccaaagcaccaaaagcaatggcaacaaaagccaaaattgacaaatgggatctaattaaactaaagagcttctgcacagcaaaagaaactaccatcagagtgaacaggcaacctacaacatgggagaaaatttttgcaacctactcatctgacaaagggctaatatccggaatctacaatgaactcaaacaaatttacaagaaaaaaacaaacaaccccatcaaaaagtgggcgaaggacatgaacagacacttctcaaaagaagacattcatgcagccaaaaaacacatgaaaaaatgctcatcatcactggccatcagagaaatggacatcaaaaccactatgagatatcatctcacaccagttagaatggcaatcattaaaaagtcaggaaacaacaggtgctggagaggatgtggagaaataggaacactttga

SEQ ID NO: 119508 - DNA, 1055 bp, Homo sapiens; identical to SEQ ID NO: 117976

SEQ ID NO: 119509 - DNA, 1368 bp, Homo sapiens
atggtggataagctttttgatgtgctgctggattcggtttgccagtattttattgaggatttttgcatcaaagtctcaggatacaaaatcaatgtacaaaaatcacaagcattcttatacaccaacaagagacaaacagagagccaaatcatgggtgaactcccattcacaattgcttcaaagagaataaaatacctaggaatccaacttacaagggatgtgaaggacctcttcaaggagaactacaaaccactgctcaaggaaataaaagaggacacaaacaaatggaagaacattccatgctcatgggtaggaagaatcaatatcgtgaaaatggccatactgcccaaggtaatttacagattcaatgccatccccatcaagctaccaatgactttcttcacagaattggaaaaaactactttaaagttcatatggaaccaaaaaagagcccgcattgccaagtcaatcctaagccaaaagaacaaagctggaggcatcacactacctgacttcaaactatactacaaggctacagtaatcaaaacagcatggtactggtaccaaaacagagatatagatcaatggaacagaacagagccctcagaaataatgccgcatatctacaactatctgatctttgacaaacctgagaaaaacaagcaatggggaaaggattccctatttaataaatggtgctgggaaaactggctagccatatgtagaaagctgaaactggatcccttccttacaccttatacaaaaatcaattcaagatggattaaagatttaaacgttaaacctaaaaccataaaaaccctagaagaaaacctaggcattaccattcaggacataggcgtaggcaaggacttcatgtccaaaacaccaaaagcaatggcaacagaagacaaaattgacaaatgggatctaattaaactaaagagcttctgcacagcaaaagaaactaccatcagagtgaacaggcaacctacaacatgggagaaaattttcgcaacctactcatctgacaaagggctaatatccagaatctacaatgaactcaaacaaatttacaacaaaaaaacaaacaaccccatcaaaaagtgggcgaaggacatgaacagacacttctcaaaagaagacatttatgcagccaaaaaacacatgaaaaaatgctcatcatcactggccatcagagaaatgcaaatcaaaaccactatgagatatcatctcacaccagttagaatggcaatcattaaaaagtcaggaaacaacaggtgctggagaggatgcggagaaataggaacacttttacactgttggtgggactgtaaactagttcaaccattgtggaagtcagtgtggtga

SEQ ID NO: 119510 - DNA, 1701 bp, Homo sapiens
atggtggataagctttttgatgtgctgctggattcggtttgcttcatgcctgggatgcaaggctggttcaatatacgcaaatcaataaatgtaatccagcatataaacagaaccaaagacaaaaaccacatgattatctcaatagatgcagaaaagacctttgacaaaattcaacaacccttcatgctaaaaactcttaatcaattaggtattgatgggacgtatctcaaaataataagagctatctatgacaaacccacagccaatatcacactgaatgggcaaaaactggaagcattccctttgaaaactggcacaagacagggatgccctctctcaccactcctattcaacatagtgttggaagttctggccagggcaattaggcaggagaaggaaataaagggtattcaattaggaaaagaggaagtcaaattgtccctgtttgcagacgacatgattgtatatctagaaaaccccattgtctcagcccaaaatctccttaagctgataagcaacttcagcaaagtctcaggatacaaaatcaatgtacaaaaatcacaagcattcttatacaccaacaacagacaaacagagagccaaatcatgagtgaactcccattcacaactgcttcaaagagaataaaatacctaggaatccaacttacaagggatgtgaaggacctcttcaaggagaactacaaactactgctcaatgaaataaaagaggatacaaacaaatggaataacattccatgctcatgggtaggaagaatcaatatcgtgaaaatggccatactgcccaaggtaatttatagattcaatgccatccccatcaagctaccaatgactttcttcacagaattggaaaaaactactttaaagttcatatggaaccaaaaaggagcccgcatcgccaagtcaatcctaagccaaaagaacaaagctggaggcatcacgctacctgacttcaaactatattacaaggctacagtaaccaaaacagcatggtactggtaccaaaacagagatatagatcaatggaacagaacagagccctcagaaataatgccgcatatctacaactatctgatctttgacaaacctgagaaaaacaagcaatggggaaaggattccctacttaataaatggtgctgggaaaactggctagccatatggagaaagctgaaactggatcccttccttacaccttatacaaaaatcaattcaagatggattaaagacttaaacattagacctaaaaccataaaaaccctagaagaaaacctaggcattaccattcaggacataggcatgtgcaaggacttcatgtctaaaacaccaaaagcaatggcaacaaaagccaaaattcacaaatgggatctaattaaactaaagagcttctgcacagcaaaagaaactaccatcagagtgaacaggcaacccacaaaatgggagaacattttcccaacctactcatctgacaaagggctaatatccagaatctacaatgaactcaaacacatttacaagaaaaaaacaaacaaccccatcaaaaagtgggcgaaggacatgaacagacacttctcaaaagaagacattgatgcagccaaaaaaacacatgaaaaaatgctcaccatcaatggccatcagagaaatgcaaatcaaaaccacaatgagttatcatctcacaccagttag

SEQ ID NO: 119511 - DNA, 1398 bp, Homo sapiens
atgttctttgaagccaacgagaacaaagacacaacataccagaatctctgggacgcattcaaagcagtgtgtagagggaaatttatagcactacatgcccacaagagaaagcaggaaagatccaaaattgacaccctaacaccgcaattaaaagaactagagaaacaagagcaaacacattcaaaagctagcagaaggcaagaaataactaagatcagagcagaactgaaggagatagagacacaaagaactcttcaaaaaatcaatgaatccaggagctggttttttgaaaagagcaacaaaatagatagaccgctagcaggactaataaagaagaaaagagagaagaatcaaatagacgcaataaaaaatgacaaaggggatatcaccaccgatcccacagaaatacaaactaccatcagacaatattataaaaacctctatgcaaataaactagaaaaactagaagaaatggataaattcctggacacatccaccctcccaagactaaaccaggaagaagttgaatctctgaatagaccaataacaggctctgaaattaaggcaataatcaatagcttaccaaccaaaaaaagtccaggaccagatggattcacagccgaattctaccagaggtacaaagaggagctggtatcattccttctgaaactattccaatcagtagaagaaaagggaatcctccctaactccttttatgaggccagcataatcctgataccaaagcctggcagagacacaataaaaaaagagaattttagaccaatatccctgatgaaccttgatgcaaaaatcctcaataaaatactggcaaaccaaatccagcaacacatcaaaaagcttatccaacatgatcaagtgggctacatccctgggatgcaaggctggttcaacctatgcaaatcaataaatgtaatccagcatataaagagaaccaatgacaaaaaccacatgattatctcaaaagatgcagaaacggcctttgataaaattcaacaattcttcatcctaaaaattctcaataaattaggtattgatgagagacaaacagagagccaaatcgtgagtgaactcccattcacaactgcttcaaagagaataaaatacctaggaatccaacttacaagggatgtgaaggacctcttcaaggagaactacaaaccactgctcaatgaaataaaagaggatacaaacaaatggaagaacattccatgctcatgggaaggaagaatcaatatcgtgaaaatggccatactgcccaagataatttatagattcaatgccatccccatcaagctaccaatgactttcttcacacaattggaaaaaactactttaaacttcatatggaaccaaaaaagagcccgcattgccaaataa

SEQ ID NO: 119512 - DNA, 1646 bp, Homo sapiens
agaattttagaccaatatccttgatgaacattgatgcaaaaatcctcaataaaatactgggagccaaagacaaaaaccacatgattatctcaatagatgcagaaaaagcctttgacaaaattcaacaacccttcatgctaaaaactctcaataaattaggtattgatgggacgtatttcaaaataataagagctatctatgaccaacccacagccaatatcatactgaatgggcaaaaactggaagcattccctttgaaaactggcacaagacagggatgccctctctcaccactcctattcaacatagtgttggaagttctggccagggcaattaggcaggagaaggaaataaagagtattcaattaggaaaagaggaagcgaaattgtccctgtttgcagacaaaatgattgtatatctagaaaaccccattgtctcagcccaaaatctccttaagctgataagcaacttcagcaaagtctcaggatacaaaatcaatgtacaaaaatcacaagcattcttatacaccaacaacagacaaacagagagccaaatcatgagtgaactcccattcacaattgcttcaaagagaataaaatacctaggaatccaacttacaagggatgtgaaggacctcttcaagcagaactacaaaccactgctcaaggaaataaaagaggatacaaacaaatggaagaatattccatgctcatgggtaggaagaatcaatatcgtgaaaatggccatactgcccaaggtaatttacagattcaatgccatccccatcaagctaccaatgcctttcttcacagaattggaaaaaactactttaaagttcatatggaaccaaaaaagagcccgcatcgccaagtcaatcctaagccaaaagaacaaagctggaggcatcacactacctgacttcaaactatactacaaggctacagtaaccaaaacagcatggtactggtaccaaaacagagatatagatcaatggaacagaacagagccctcagaaataatgccgcatatctacagctatctgatctttgacaaacctgagaaaaacaagcaatggggaaaggattccctatttaataaatggtgctgggaaaactggctagccatatgtagaaagctgaaactggatcccttccttacaccttatacaaaaatcaattcaagatggattaaagacttaaacgttagacctaaaaccataaaaaccctagaagaaaacctaggcatcaccattcaggacctaggcatgggcaaggacttcatgtccaaaacaccaaaagcaatggcaacaaaagacacaattgacaaatgggatctaattaaactaaagagcttctgcacagcaaaagaaactaccatcagaatgaacaggcaacctacaaaatgggagaaaattttcacaagctactcatctgacaaagggctaatatccagaatctacaatgaactcaaacaaatttacaagaaaaaaacaaacaaccccatcaaaaaatgtcaacaggcctcacagctgaaggctttacccacccaatcctgctccccctcttctaacagctatgaaaccttcctagtttcaccccttcacccgttccagttttacataagttttcctcactacacagagatg

SEQ ID NO: 119513 - DNA, 762 bp, Homo sapiens
atgagtgaactcccattcacaattgcttcaaagagaataaagtatctaggaatccaacttacaagggatgtgaaggacctcttcaaggagaactacaaaccactgctcaatgaaataaaagaggatacaaacaaatggaagaacattccatgctcatgggtaggaagaatcaatatcgtgaaaatggccatactgcccaagacaccggcgttcggtcgaagagtatctggtgtcatagaaattgccgatgggagtcgctgtcgtaaagctgctgcacttaccgaaagtgattatcgtgttctggttggcgagctggatgatgagcagatggctgcattatccagattgggtagcgattatcgcccaacaagtgcttatgaacgtggtcagcgttatgcaagccgattgcagaatgaatttgctggaaatatttctgcgctggctgatgcggaaaatatttcacgtaagattattacccgctgtatcaacaccgccaaattgcctaaatcagttgttgctcttttttctcaccccggtgaactatctgcccggtcaggtgatgcacttcaaaaagcctttacagataaagaggaattacttaagcagcaggcatctaaccttcatgagcagaaaaaagctggggtgatatttgaagctgaagaagttatcactcttttaacttctgtgcttaaaacgtcatctgcatcaagaactagtttaagctcacgacatcagtttgctcctggagcgacagtattgtaa

SEQ ID NO: 119514 - DNA, 5976 bp, Homo sapiens
  misc_feature (1)...(5976): n = a,t,c or g
cctccggtctacagctcccagcgtgagcgacgcagaagacgggtgatttctgcatttccatctgaggtaccgggttcatctcactagggagtgccagacagtgggcgcaggccagtgggtgcgcgcaccgtgcggagccgaagcagggcgaggcattgcctcacctgggaagcgcaaggggtcagggagttccctttccgagtcaaagaaaggggtgacggacgcacctggaaaatcgggtcactcccacccgaatattgcgcttttcagaccggcttaaaaaacggcgcaccacgagactatatcccacacctggccttcggagggtcctacgcccacggaatctcgctgattgctagcacagcggtctgagatcaaactgcaaggccgcagcaaggctgggggaggggcgcccgccattgcccaggcttgcttaggtaaacaaagcagccggggaagctcgaactgggtgcagcccaccacagctcaaggaggcctgcctgcctctgtaggctccacctctgggggcagggcacagacaaacaaaaagacagcagtaacctctgcagacttaaatgtccctgtctgacagctttgaagagagcagtggttctcccagcacgcagctggagatctgagaacgggcagactgcctcctcaagtgggtccctgacccctgacccccgagcagcctaactgggaggcaccccccagcaggggcacactgacacctcacacggcagggtattccaacagacctgcagctgagggtcctgtctgttagaaggaaaactaacaaacagaaaggacatccacaccgaaaacgcatctgtacatcaccatcatcaaagaccaaaagtagataaaaccacaaagatggggaaaaaacagaacagaaaaactggaaactctaaaacgcagagcacctctcctcctccaaaggaacgcagttcctcaccagcaacggaccaaagctggatggagaatgattttgacgagctgagagaagaaggcttcagacgctcaaattactctgagctacgggaggacattcaaaccaaaggcaaagaagttgaaaactttgaaaaaaatttagaagaatgtataactagaataaccaatacagagaagtgcttaaaggagctgatggagctgaaaaccaaggctcgagaactacgtgaagaatgcagaagcctcaggagccaatgcgatcaactggaagaaagggtatcagcaatggaagatgaaatgaatgaaatgaagcaagaagggaagtttagagaaaaaagaataaaaagaaacgagcaaagcctccaagaaatatgggactatgtgaaaagaccaaatctacgtctgattggtgtacctgaaagtgatgcggagaatggaaccaagttggaaaacactctgcaggatattatccaggagactttccccaatctagcaaggcaggccaacgttcagattcaggaaatacagagaacgccacaaagatactcctcgagaagagcaactccaagacacataattgtcagattcaccaaagttgaaatgaaggaaaaaatgttaagggcagccagagagaaaggtcgagttaccctcaaagggaagcccatcagactaacagcggatctctcggcagaaaccctacaagccagaagagagtgggggccaatattgaacattcttaaagaaaagaattttcaacccagaatttcatatccagccaaactaagcttcataagtgaaggagaaataaaatactttacagacaagcaaatgctgaccgattttgtcaccagcaggcctgccctaaaagagctcctgaaggaagcgctaaacatggaaaggaacaaccggtaccagccactgcaaaatcatgccaaaatgtaaagaccatcgagactaggaagaaactgcatcaactaacgagcaaaatcaccagctaacatcataatgacaggatcaaattcacacataacaatattaactttaaatgtaaatggactaaattctccaattaaaagacacagactggcaagttggataaagagtcaagacccatcagtgtgctgtattcaggaaacccatctcatgtgcagagacacacataggctcaaaataaaaggatggaggaagatctaccaagcaaatggaaaacaaaaaaaggcaggggttgcaatcctagtctctgataaaacagactttaaaccaacaaagatcaaaagagacaaagaaggccattacatgatggtaaagggatcaattcaacaagaggagctaactatcctaaatatgtatgcacccaatacaggagcacccagattcataaagcaagtcctgagtgacctacaaagagacttagactcccacacattaataatgggagactttaacaccccactgtcaacattagacagatcaacgagacagaaagtcaacaaggatacccaggaattgaactcagctctgcaccaagcagacctaatagacatctacagaactctccaccccaaatcaacagaatatacatttttttcagcaccacaccacagctattccaaaattgaccacatacttggaagtgaagctctcctcagcaaatgtaaaagaacagaaattataacaaactatctctcagaccacagtgcaatcaaactagaactcaggattaagaatctcactcaaagccgctcaactacatggaaactgaacaacctgctcctgaatgactactgggtacataacgaaatgaaggcagaaataaagatgttctttgaaaccaacgagaacaaagacacaacataccagaatctctaggacgcattcaaagcagtgtgtagagggaaatttatagcactaaatgcccacaagagaaagcaggaaagatccaaaattgacaccctaacatcacaattaaaagaactagaaaagcaagagcaaacacattcaaaagctagcagaaggcaagaaataactaaaatcagagcagaactgaaggaaatagagacacaaaaaacccttcaaaaaatcaatgaatccaggagctggttttttgaaaggatcaacaaaattgatagaccgctagcaagactaataaagaaaaaaagagagaagaatcaaatagacacaataaaaaatgataaaggggatatcaccaccgatcccacagaaatacaaactaccatcagagaatactacaaacacctctacgcaaataaactagaaaatctagaagaaatggatacattccttgacacatacactctcccaagactaaaccaggaagaagttgaatctctgaatagaccaataacaggagctgaaattgtggcaataatcaatagtttatcaaccaaaaagagtccaggaccagatggattcacagccgaattctaccagaggtacaaggaggaactggtaccattctttctgaaactattccaatcaatagaaaaagagggaatcctccctaactcattttatgaggccagcatcattctgataccaaagccgggcagagacacaaccaaaaaagagaattttagaccaatatccttgatgaacattgatgcaaaaatcctcaataaaatactggcaaaccaaatccagcagcacatcaaaaagcttatccaccatgatcaagtgggcttcatccctgggatgcaaggctggttcaatatacgcaaatcaataaatgtaatccagcatataaacagagccaaagacaaaaaccacatgattgtctcaatagatgcagaaaaagcctttgacaaaattcaacaacccttcatgctaaaaactatcaataaaataggtattgatgggatgtatttcaaaataataagagctatctatgacaaaaccacagccaatatcatactgaatgggcaaaaactggaagcattccctttgaaaaccggcacaagacagggatgccctctctcaccgctcctattcaacatagtgttggaatttctggccagggcaatcaggcaggagaaggaaataaagggtattcaattaggaaaagaggaagtcaaattgtccctgtttgcagatgacatgattgttgatctagaaaaccccatcgtctcagcccaaaatctccttaagctgataagcaacttcagcaaantctcaggatacaaaatcaatgtacaaaaatcacaagcattcctatacaccaacaacagacaaacagagagccaaatcatgagtgaactcccattcacaattgcttcaaagagaataaaatacctaggaatccaacttacaagggatgtgaaggacctcttcaaggagaactacaaaccactgctcaaggaaataaaagaggatacaaaaaaatggaagaacantccatgctcatgggtaggaagaatcaatatcgtgaaaatggccatactgcccaaggtaatttacagattcaatgccatccccatcaagctaccaatgactttcttcacagaattggaaaaaactactttaaagttcatatggaaccaaaaaagagcccgcattgccaagtcaatcctaagccaaaagaacaaagctggaggcatcacactacctgacttcaaactatactacaaggctacagtaaccaaaacagcatggtactggtaccaaaacagagatatagatcaatggaacagaacagagccctcagaaataacgnngcttacctacaactatctgatctttgacaaacctgagaaaaacaagcaatggggaaaggattccctatttaataaatggtgctgggaaaactggctagccatatgtagaaagctgaaagtggatcccttccttacaccttatacaaaaatcaattcaagatggattaaagacttaaacgttagacctaaaaccataaaaaccctagaagaaaacctaggcattaccattcaggacataggcgtgggcaaggacttcatgtccaaaacaccaaaagcaatggcaacaaaagccaaaattgacaaatgggatctaattaaactaaagagcttctgcacagcaaaagaaactaccatcagagtgaacaggcaacctacaacatgggagacaattttcacaacctactcatctgacaaagggctaatatccagaatctacaatgaactcaaacaaatttacaagaaaaaaacaaacaaccccatcaaaaagtgggcgaaggacatgaacagacacttctcaaaagaagacatttatgcagccaaaaaacacatgaaaaaatgctcatcatcactggccatcagagaaatgcaaatcaaaaccactatgagatatcatctcacaccagttagaatggcaatcattaaaaagtcaggaaacaacaggtgctggagaggatgtggagaaataggaacacttttacactgttggtgggactgtaaactagttcaaccattgtggaagtcagtgtggcgattccttagggatctagaactagaaataccatttgacccagccatcccattactgggtatatacccaaatgactataaatcatgctgctataaagacacatgcacacgtatgtttattgcggcattattcacaatagcaaagacttggaaccaacccaaatgtccaacaatgatagactggattaagaaaatgtggcacatatacaccatggaatactatgcagccataaaaaatgatgagttcatgtcctttgtagggacatggatgaaattggaaaccatcattctcagtaaactatcgcaagaacaaaaaaccaaacaccgcatattctcactcataggtgggaattgaacaatgagatcacatggacacaggaaggggaatatcacactctggggactatggtggggaggggggaggggggagggatagcattgggagatatacctaatgctagatgacgagttagtggtgcagtgcaccagcatggcacatgtatacatatgtaactaacctgcacaatgtgcacatgtaccctaaaac

SEQ ID NO: 119515 - DNA, 2025 bp, Homo sapiens
atggggaaaagacagagcagaaaaactggaaactctaaaaagcagagcgcctctcctcctccaaaggaacacagttcctcattagcaatggaacaaagctggacagagaatgactttgacaagttgagagaagaaggcttcagacgatcaaactactccgagctacgggaggaaattcaaaccaaaggcaaagaagttaaaaactgtgaaaaacatttagacgaatgtataactagaataaccaatacagagaagtgcttaaaggagctgatggacctgaaagccaaggctcgagaactacaaatacaaactaccatcagagaatcctataaacacctctatgcaaataaactagaaaatctagaagaaatggataaattcctcgacacatacactctcccaagactaaaccaggaagaatttgaatctctgaatagaccaataacaggctctgaaattgtggcaataatcaatagcttaccaaccaaaaagagtccaggaccagatggattcacagccgaattcaaccagaggtacaaggaggagctgcatataaacagaaccaaagacaaaaaccacatgattatctcaatagatgcagaaaaggcctttgacaaaattcaacaacgcttcatgctaaaaactctcaataaattaggtattgatgggacgtatctcaaaataataagagctatctatgacaaacccacagccaatatcatactgaatgggcaaaaactggaagcattccctttgaaaacgggcacaagacagggatgccctctctcaccactcctattcaacatagtgttggaagttctggccagggcaattagtcaggagaaggaaataaagggtattcaattaggaaaagaggaagtcaaattgtccctgtttgcagatgacatgattgtagatctagaaaaccccattgtctcagcccaaaatctccttaagctgataagcaacttcagcaaagtctcaggatacaaaatcaatgtacaaaaatcacaagcattcttatacaccaataacagacagacagagagccaaatcatgagtgaactcccattgacaattgcttcaaagagaataaaatacctaggaatccaacttacaagggatgtgaaggacctcttcaaggagaactacaaaccactgctcaatgaaataaaagaggatacaaacaaatggaagaacattccatgctcatgggtaggaagaatcaatatcctgaaaatggccatactgcccaaggtaactgatagattcaatgccatccccatcaagctaccaatgactttcttcacagaattggaaaaaactactttaaagttcatatggaagcaaaaaagagcccgcatggccaagtcaatcctaagccaaaagaacaaagctggaggcatcacgctacctgacttcaaactatactacaaggctacagtaaccaaaacagcatggtactggtaccaaaacagagatatagatcaatggaacagaacagagccctcagaaataacgccacatatctacaactatctgatctttgacaaacctgagaaaaccaagcaatggggaaaggattccctatttaataaatggtgctgggaaaactggctagccatatgtagaaagctgaaactggatcccttccttacaccttataccaaaatcaattcaagatggattaaagacttacacgttagacctaaaaccataaaaaccctagaagaaaacctaggcattagcattcaggacataggcatgggcaaggacttcatgtctaaaacaccaaaagcaatgacaacaaaagccaaaattgacaaatgggatctaattcaactaaagagcttctgcacagcaaaagaaactaccatcagagtgaacaggcaacctacaaaatgggagaaaattttcacaacctactcatctgacaaagggctaatatccagaatctacaatgaactcaaacaaatttacaagaaaaaacaaacaaccccatcaaaaagtgggcaaaggacatga

SEQ ID NO: 119516 - DNA, 3666 bp, Homo sapiens; identical to SEQ ID NO: 116259

SEQ ID NO: 119517 - DNA, 2265 bp, Homo sapiens; identical to SEQ ID NO: 116371

SEQ ID NO: 119518 - DNA, 2244 bp, Homo sapiens
atggtggtgaaggtttggaaatactatgttttggataacattgactcagcaacactgaaagtgttggaagttctggccagggcaatcaggcaggagaaggaaataaagggtattcaattaggaaaagaggaagtcaaattgtccctgtttgcagatgacatgattgtatatctagaaaaccccattgtctcagcccaaaatctccttaagctgataagcaactttagcaaagtctcaggatacaaaatcaatgtacaaaaatcacaagcattcttatacaccaacaacagacaaacagagagccaaatcatgagtgaactcccattcacaattgcttcaaagagaataaaatacctaggaatccaacttacaagggatgtgaaggacctcttcaagcagaactacaaaccactgctcaatgaaataaaagaggatacaaacaaatggaagaacattccatgctcatgggtaggaagaatcaatatcgtgaaaatggccatactgcccaaggaacgcagctcctcaccagcaacggaacaaagctggatggagaatgactttgatgagttgagagaagaaggcttcagacgatcaaacttctccgagctaaaggagaaagttcgaacccatcacaaacaagataaaaaccttgaaaaaaggagctggttttttgaaaagatcaacaaaatcgatagacctctagcaagactaataaagaagaaaagagagaagagtcaaataaacgcaataaaaaacgataaaggggatatcactgccgatcccacagaaatacaaactaccatcacagaatactataaacacctctatgcaaataaactagaaaatctagaagcaatggataaattccttgacacatacaccctcccaagaataaaccaggaagaagttgaatctctgaataggccaataacaggctctgaaactgaggcaataattaatagcttaccaaccaaaaaaagtccaggaccagatggattaacagctgaattctaccagaggtacaaggaggagctggtaccattccttctgaaactattccaatcaatagaaaaagagcgaatcctcccgaactcattttatgagggcatcatcctcctgataccaaagcctggcagagacaacacaaaaaaagataattttaaaccaatatccctgatgaacatggatgcaaaaatcctcaataaaatactggcaaaccgaatccagcagcacatcaaaaagcttatccaccatgatcaagtgggcttcatccctgggatgcaaggctggttcaacatatgcaaatcaataaatgtaatccagcatataaacagaaccaaagacaaaaaccacatgattatctcaacagatgcaggaaaggcctttgacaaaattcaacagcccttcatgctaaaaactctcaataaattaggtattgatgggatgaatctcaaaataataagagctatttatgacaaacccacagccaatatcatactgaatagacaaaaactggaagcattccctttgaaaactggcacaagacagggatgccctctctcaccactcctattcaacatagtgttggaagttctggccagggcaatcaggcaggagaaggaaataaagggtattcaattaggaaaagaggaagtcaaattgtccctgtttgcagatgacatgattgtatatctagaaaaccccatcgtctcagcccaaaatctccttaagctgataagcaacttcagcaaagtctcaggatacaaaatcagtgtgcaaaaatcacaagcattcttatacaccaataacagacaaacagagagccaaatcatgagtgaaatcccattcccaattgcttcaaagagaataaaatacctaggaatccaacttacaagggatgtgaaggacctctttaaggagaactgcaaaccactgctcaaggaaataaaagagaacacaaacaaatggaagaacattccatgctcatggatagaaagaatcaatattgtgaaaatggccatactgcccaaggtaatttatagtttcaatgccatccccatcaagcacccaatgactttcttcacagaattggaaaaaacaactttaaagttcatatggaaccaaaaaagagcccgcatcaccaagtcaatcctaagacaaaagaacaaagctggaggcatcacgctacctgaattcaaactatactacaagactacagtaaccaaaatagcatggtacgggtaa

SEQ ID NO: 119519 - DNA, 2481 bp, Homo sapiens; identical to SEQ ID NO: 118549

SEQ ID NO: 119520 - DNA, 2070 bp, Homo sapiens
atggagctgaaaaccaaggctcgagaactacgtgaagaatgcagaagcctcaggagccgatgcgatcaactggaagaaagggtatcagcgatggaagatgaaatgaatgaaatgaagcgagaagggaagtttagagaaaaaagaataaaaagaaatgagcaaagcctccaagaaatatgggactatgtgaaaagaccaaatctacatctgattggtgtacctgaaactgatggggagaatggaaccaagttggaaaacactctgcaggatattatccaggagaacttccccaatctagcaaggcaggccaatgttcagattcaggaaatacagagaacgccacaaagatactcctcgagaagagcaactccaagacacataattgtcagattcaccaaagttgaaatgaaggaaaaaatgttaagggcagccagagagaaagaaatacaaactaccatcagagaatattacaaacaccttcacgcaaataaactagaaaatctagaagaaatggataaattcctcgacacatacactctcccaagactaaaccaggaaaaagtagaatctttgaatagaccaataacaggagctgaaattgtggcaataatcaatatttaccaaccaaaaagagtccaggaccagatggattcacagccgaattttaccagagagggaatcctccctaactcattttatgaggccagcatcattctgataccaaagctgggcagagacacagccaaaaaagagaattttagaccaatatccttgatgaacattgatgcaaaaatcctcaataaaatactggcaaaacgaatccagcagcacatcaaaaagcttatccaccatgatcaagtgggcttcatccctgggatgcaaggttggttcaatatacgcaaatcaataaatgtaatccagcatgtaaacagaaccaaagacaaaaaccacatgattatctcaatagatgaagaaaaggcctttgacaaaattcaacagcccttcatgctaaaaactctcaataaattaggtattgatgggatgtatttcataataataagagctatctatgacaaacccacagcccatatcatactgaatgggaaaaaactggaagcattccctttgaaaactggcatgagacagggatgccctctctcaccactcctattcaatatagtgttcaaagttctggccagagcaattaggcaggagaaggaaataaagggtattcaattaggaaaagaggaattcaaattgtccctgtttgcagacgacatgattgtatatctagaaaaccccattgtctcagcccaaaatctccttaagctgataagcaacttcagcaaagtctcaggatacaaaatcaatgtacaaaaatcacaaacattcttatacaccaacaacagacaaacagagagccaaatcatgagtgaactcccattcacaattgcttcaaagagaataaaatacctaggaatccaacttacaagggatgtgaaggacctcttcaaggagaactacaaaccactgctcaaggaaataaaagaggatacaaacaaatggaagaacattccatgctcatgggtaggaagaatcaatatcgtgaaaatggccatactgcccaaggtaatttacagattcaatgccatccccatcaaggtaccaatgactttcttcacagaattggaaaaaactactttaaagttcatatggaaccaaaaaagagcctgcatcgccaagtcaatcctgagccaaaagaacaaagctggaggcatcacactacctgacttcaaactatactacaaggctacagtaaccaaaacagcatggtactggtaccaaaacagagatatagatcaatggaacagaacagagccctcagaaataacgccacatatctacaactatctgatctttgacaaacctgagaaaaacaagcaatggggaaaggattccctatttaataaatggtgctgggaaaactggctagccatatgtagaaagctgaaactggatcccttccttacaccttatacaaaaatcaattcaagatggattaaagactga

SEQ ID NO: 119521 - DNA, 2991 bp, Homo sapiens; identical to SEQ ID NO: 116249

SEQ ID NO: 119522 - DNA, 2061 bp, Homo sapiens
atgcagaagaattacctgtgtaggcattcaaaagctagcagaaggcaagaaataactaaaatcagagcagaactgaaggaaaaagagacacaaaaaacccttcaaaaaattaatgaacccaggagctggttttttgaaaggatcaacaaaattgatagaccgctagcaagactaataaagaaaaaaagagagaagaatcaaatagacgcaataaaaaatgataaaggggatatcaccacggatcccacagaaatacaaactatcatcagagaatactacaaacacctctacgcaaataaactagaaaatctagaagaaatggataaattccttgacacatacactctcccaagactaaaccaggaagaagttgaatctctgaatagaccaacaacaggatctgaaattgtggcaataatcaatagcttaccaaccaaaaagagtccaggaccagatggattgacagccgaattctaccagaggtacaaggaggaactggtaccattccttctgaaactattccaatcaatagaaaaagagggaatcctccctaactcattttatgaggccagcatcatcctgataccaaagccgggcaaagacacaaccaaaaaagagaattttagaccaatatccttgatgaacattgatgcaaaaatcctcaataaaatactggcaaaccgaatccagcagcacatcaaaaagcttatccaccatgatcaagtgggcttcatccctgggatacaaggctggttcaatatacgcaaatcaataaatgtaatccagcatataaacagaaccaaagacaaaaaccacatgattatctcaatagatgcagaaaaggcctttgacaaaattcaacagcccttcatgctaaaaactctcaataaattaggtattgatgggacgtatctcaaaataataagagctatctatgacaaacccacagccaatatcatacggaatgggcaaaaactggaagcattccctttgaaaactggcacaagacagggatgccctctctcaccactcccattcaacatagtgttggaagttctggccagggcaatcagacaaacagagagccaaatcatgagtgaactcccattcacaattgcttcaaagagaataaaatacctaggaatccaacttacaagggatgtgaaggacctcttcaaggagaactacaaaccacggctcaatgaaataaaagaggatacaaacaaatggaagaacattccatgctcatgggtaggaagaatcaatatcgtgaaaatggccatactgcccaaggtaatttacagattcaatgccatccccatcaagctaccaatgactttcttcacagaattggaaaaaactactttaaagttcatatggaaccaaaaaagagcccgcatcaccaagtcaatcctaagccaaaagaacaaagctggaggcatcacactacctgacttcaaactatactacaaggctacagtaaccaaaacagcatggtactggtaccaaaacagagatatagatcaatggaacagaacagagccctcagaaataacaccgcatatctacaactatctgatctttgacaaacctgagaaaaacaagcaatggggaaaggattccctatttaataaatggtactgggaaaactggctagccatatgtagaaagctgaaactggatcccttccttacaccttatacaaaaatcaattcaagatggattaaagacttaaacgttagacctaaaaccataaaaaccctagaagaaaacctaggcattaccattcaggacataggcatgggcaaggacttcatgtctaaaacaccaaaagcaatggcaacaaaagccaaaattgacaaatgggatctaattaaactcaagagcttctgcacagcaaaagaaactaccatcagagtgaacaggcaacctacaaaatgggagaaaattttcgcaacctactcatctgacaaagggctaatatccagaatctacaatgaacttaaacaaatttacaagaaaaaacaaacaaccccatcaaaaagtgggcgaaggacatga

SEQ ID NO: 119523 - DNA, 2141 bp, Homo sapiens
atgaaggcagaaataaagatgttctttgaaaccaacgagaacaaagacacaacaaaccagaatctctgggacgcattcaaagcagaagaagttgaatctctgaatagaccaataacaggagctgaaattggggcaataatcaatagtttaccaaccaaaaagagtccaggaccagatggattcacagccgaattctaccagaggtacaaggaggaactggtaccattccttctgaaactattccaatcaatagaaaaagaggaaatcctccctaactcattttatgaggccagcatcattctgataccaaagccgggcagagacacaaccaaaaaagagaattttagaccaatatccttgatgaacatcgatgcaaaaatcctcaataaaatactggcaaaccgaatccagcagcacatcaaaaagcttatccaccatgatcaagtgggcttcttccctgggatgcaaggctggttcaatatacgcaaatcaataaatgtaatccagcatataaacagagccaaagacaaaaaccacatgattatctcaatagatgcagaaaaagcctttgacaaaattcaacaacccttcatgctaaaaactctcaataaattaggtattgatgggacgtatttcaaaataataagagctatctatgacaaacccacagccaatatcatactgaatgggcaaaaactggaagcattccctttgaaaactggcacaagacagggatgccctctctcaccgctcctattcaacatattgttggaagttctggccagggcaatcaggcaggagaaggaaataaagggtattcaattaggaaaagaggaagtcaaattgtccctgtttgcagacgacatgattgtttatctagaaaaccccatcgtctcagcccaaaatctccttaagctgataagcaacttcagcaaagtctcaggatacaaaatcaatgtacaaaaatcacaagcattcttatacaccagcaacagacaaacagagagccaaatcatgagtgaactcccattcacaattgcttcaaagagaataaaatacctaggaatccaacttacaagggatgtgaaggacctcttcaaggagaactacaaaccactgctcaaggaaataaaagaggatacaaacaaatggaagaacattccatgctcatgggtaggaagaatcaatatcgtgaaaatggccatactgcccaaggtaatttacagattcaatgccatccccatcaagctaccaatgactttcttcacagaattggaaaaaactactttaaagttcatatggaaccaaaaaagagcccacatcaccaagtcaatcctaagccaaaagaacaaagctggaggcatcacactacctgacttcaaactatactacaaggctacagtaaccaaaacagcatggtactgctaccaaaacagagatatagatcaatggaacagaacagagccctcagaaataacaccgcatacctacaactatctgatctttgacaaacctgagaaaaacaagcaatggggaaaggattccctatttaataaatggtgctgggaaaactggctagccatatggagaaagctgaaactggatcccttccttacaccttatacaaaaatcaattcaagatggattaaagatttaaacgttagacctaaaaccataaaaaccctagaagaaaacctaggcattaccattcaggacataggcatgggcaaggacttcatgtccagaacaccaaaagcaatggcaaccaaagccaaaattgacaaatgggatctaattaaactaaagagcttctgcacagcaaaagaaactaccatcagagtgaacaggcaacctacaacatgggagaaaattttcgcaacctactcatctgacaaagggctaatatccagaatctacaatgaactcaaacaaatttacaagaaaaaaacaaacaaccccatcaaaaagtgggagaaggacatgaacagacacttctcaaaagaagacatttatgcagccaaaaaacacatgaaaaaatgctcatcatcactggccatcagagaaatgcaaatcaaaaccactatgagatatcatctcacaccagttagaatggcaatcattaaaaagtcaggaaacaacag

SEQ ID NO: 119524 - DNA, 400 bp, Homo sapiens
atgagtgaactcccattcacaattgcttcaaagagaataaaatacctaggaatccaacttacaagggatgtgaaggacctcttcaaggagaactacaaaccactgctcaatgaaattaaagaggatacaaacaaatggaagaacattccatgctcatgggtaggaagaatcaatatcgtgaaaatggccatactgcccaagatgcttcttcacaaatattctagctacagaaactgtgaatcaaatattctttctcctaataaaagtatccaatgcaatgccaaagaaaacttactgaatgaagataattactgtgcaaaaatggttttcattcttccctttgcatttgaaaatcggaagatccaagattactcagccaatgtgatgattcatttgagac

SEQ ID NO: 119525 - DNA, 2507 bp, Homo sapiens
gcagaaaccttcattctttgaaaccaacgagaacaaagacacaacataccagaatctctgggatgcattcaaagcagtgtgtagagggaaatttatagcactaaatgcccacaagagaaagcaggaaagatccaaaattgacaccctaacatcacaattaaaagaactagaaaagcaagagcaaacacattcaaaagctagcagaaggcaagaaataactaaaatcagagcagaactgaaggaaatagagacacaaaaaaccattcaaaaaattaatgaatccaggagctggttttttgaaaggatcaacaaaattgatagaccgctagcaagactaacaaagaaaaaaagagagaagattcaaatagacgcaataaaaaatgataaaggggatatcaccactgatcccacagaaatacaaactaccatcagagaatactacaaacacctctatgcaaataaactagaaaatctagaagaaatggataaattccttgacacatacactctcccaagactaaaccaggaagaagttgaatctctgaatagaccaataacaggatctgaaattgtggcaataatcaatagcttaccaaccaaaaagagtccaggaccagatggattcacagccgaattctaccagaggtacaaggaggagctggtaccattccttctgaaactattccaatcaacagaaaaagagggaatcctccctaactcattttatgaagccagcatcatcctgataccaaagccaggcagagacacaaccgaaaaagagaattttagaccaatatccttgatgaacattgatgcaaaaatcctcaataaaatactgccaaacagaatccagcagcacatcaaaaaccttttgcaccatgatcaagtgggcttcatccctgggatgcaaggctggttcaatatatgcaaattaataaatgtaatccagcatataaacagaaccaaagacaaaaaccacatgattatctcaatagatgcagaaaaggcctttgacaaaattcaacaacccttcatgctaaaaactctcaataaattaggtattgatggcacatatctcaaaataataagagctatctatgacaaacccacggccaatatcatatggaatgggcaaaaactggaagcattccctttgaaaactggcacaagacagggatgccctctctcaccactcctattcaacatagtgttggaagttctggccagggcaattaggcaggagaaggaaataaagggtattcaattaggaaaagaggaagtcaaattgtccctgtttgcagacgacatgattgtatatctagaaaaccccattgtctcagcccaaaatctccttaagctgataagcaacttcagcaaagtctcagcatacaaaatcaatgtacaaaaatcacaagcattcttatacaccaacaacagacaaacagagagccaaatcaggagtgaactcccattcacaattgcttcaaagagaataaaatacctaggaatccaacttacaagggatgtgaaggacctcttcaaggagaactacaaaccactgctcaatgaaataaaagaggatacaaacaaatggaagaacattccatgctcatgggtaggaagaatcaatatcgtgaaaatggccatactgcccaagataatttacagattcaatgccatccccatcaagctaccaatgactttcttcacagaattggaaaaaactactttcaagttcatatggaaccaaaaaagagcccgcatcgccaagtcaatcctcagccaaaagaataaagctggaggcatcacactacctgacttcaaactatactacaaggctacagtaaccaaaacagcatggtactggtaccaaaacagagatatagatcaatggaacagaacagagccctcagaaataacgccgcctatctacaactatctgatctttgacaaccctgagaaaaacaagcaatggggaaaggattccctatttaataaatggtgctgggaaaactggctagccatatgtagaaagctgaaactggatcccttccttacaccttatacaaaaatcaattcaagatggattaaagacttaaaggttagacctaaaaccataaaaacgctagaagaaagcctaggcattaccattcaggacataggcatgtgcaaggacttcatgtctaaaacaccaaaagcaatggcaacaaaagccaaaattgacaaatgggatctaattaaactaaagagcttctgcacagcaaaagaaactaccatcagactgggagtggagttacacaagcacccctgtggccaccaccactatgacaccactggatcagatctgaagccagcacagcactgggtctcacccaaagcttattataaccactcacaggctattgccaatgttcactcaaggccctgtgactttacaatcagcatgtggcagagccagtcaggcctgtgtccttcccttcaggatggcaaggtttcccatgccctag

SEQ ID NO: 119526 - DNA, 771 bp, Homo sapiens
atgaacattgatgcaaaaatcctcaataaaacactggcaaaccgaatccagcagcacatcaaaaagcttatccaccatgatcaagtgggcttcatccctgggacgcaagtgttggaagttctggccagggcaatcaggcaggagaaggaaataaagggcactcaattaggaaaagaggaagtgaaattgtccctgtttgcagatgacatgattgtatatctagaaaaccccatcgtctcagcccaaaatctccttaagctgataggcaacttcagcaaagtctcaggatacaaaatcaatgtacagaaatcacaagcattcttatgtactaataacagacaaacagagagccaaatcatgagtgaactcccattaacaattgcttcaaagagaataaaatacctaggaatccaacttacaagggatgtgaagcacctcttcaaggagaactacaaaccactgctcaatgaaataaaagaggatacaaacaaatggaagaatattccatgctcatgggtaggaagaatcaatatcgtgaaaatggccatactgcccaagatgttacattcagcagagaataaacaatggcttagccccaaacagagaggtggcagcatggagaacaggattgatgtttggaatattgttcttaaggggctaagcacatcatccaacactgtcctggattcgagccccatagtattagtgacagattccccaggccacatctacattgatctttgtggaacatataacaacagggaaaattag

SEQ ID NO: 119527 - DNA, 1530 bp, Homo sapiens; identical to SEQ ID NO: 118547

SEQ ID NO: 119528 - DNA, 1296 bp, Homo sapiens
atgcacacagccccgtttatttttccagtgaagcgcactgtccctgaccccggtgaatactgggatggtagtcctgtagccacgggaccggaaagtctgggagtctttatgaaactacatctcccagcaaccctggcgacctggggctccagtcccaccgcagactctggtgggacgtgggtggcgcaagcacatcttggccctgcgactcagcttgagggggcccaagctgtcccactgagcaagcgcccagcaggccgccgtgctgtgggtcctggtcctcctggcatttgttggggtgcggaggccaccgaggagtctgaggtgttggaagttctggccagggcaatcaggcaggagaaggaaataaagggtattcaattaggaaaagaggaagtcaaattgtccctgtttgcagacgacatgattgtttatctagaaaaccccatcgtctcagccgaaaatctccttaagctgataagcaacttcagcaaagtctcaggatacaaaatcaatgtacaaaaatcacaagcattcttatacaccaacaacagacaaacagagagccaaatcatgggtgaactcccattcacaattgcttcaaagagaataaaatacctaggaatccaacttacaagggatgtgaaggacctcttcaaggagaactacaaaccactgctcaaggaaataaaagaggacacaaacaaatggaagaacattccatgctcatgggtaggaagaatcaatatcgtgaaaatggccatactgcccaaggtaatttacagattcaatgccatccccatcaagctaccaatgactttcttcacagaattggaaaaaactactttaaagttcatatggaaccaaaaaagagcccgcattgccaagtcaatcctaagccaaaagaacaaagctggaggcatcacactacctgacttcaaactatactacaaggctacagtaaccaaaacagcatggtactggtaccaaaacagagatatagatcaatggaacagaacagagccctcagaaataatgccacatatctacaactatctgatctttggcaaacctgagaaaaacaagcaatggggaaaggattccctatttaataaatggtgctgggaaaactggctagccatatgtagaaagctgaaactggatcccttccttacaccttatacaaaaatcaattcaagatggattaaagatttaaacgttaaacctaaaaccataaaaaccctagaagaaaacctaggcattaccttttcaaaaaagattccttcatttaattag

SEQ ID NO: 119529 - DNA, 1041 bp, Homo sapiens
gccccgagatcccactcgaggaggctcatcggaggaacagtgaggaacagtacactacaggtcaaagacaacagtgccatgggacgcagaaggacaatcgacccgttcaccaccggactcttcgacggtgtcgcaaatgaccggcactgtatcctagtgacaatccaccgcgcccgaccaaccgcgatcagtaggtccgaggggacaaccgttttccgccgtagtgttcaacggacgaacgtcaccgtaaatcgcagcagagtcctcaccatcaaacgagtgtttctggatgacgggacgttggagaatgatctaactacttctgacggcctggactcgcgtataaagacggaggggtggctcgggttgagggttcgtgtttggcgatgggacgggacatgggggtttaagggggtttacgaccttacggataacgagagggagggagacttttttgacggcgaagcccaaaatctccttaaggtgataagcaacttcagcaaagtctcaggatacaaaatcaatgtacaaaaatcacaggcattcttatacaccaacaacagacaaacagagagccaaatcatgagtgaactcccattcacaattgcttcaaagagaataaaatacctaggaatccaacttacaagggatgtgaagcacctcttcaaggagaactacaaaccactgctcaatgaaataaaagaggatacaaacaaatggaagaacattccatgctcatgggtaggaagaatcaatatcgtgaaaatggccatactgcccaaggtaatttacagattcaatgccatccccatcaagctaccaatgacttttcccgcggccatggaaaaaactactttaaagttcatatggaaccaaaaaagagcccgcattgccaagtcaatcctaagccaaaagaacaaagctggaggaatcacactacctgactttaaactatactacaaggctacagtaaccaaaatagcatggtactggtaccaaaacagagatatagatcaatggaacagatcagagccctcataa

SEQ ID NO: 119530 - DNA, 1575 bp, Homo sapiens
atggttgcatacctgtctgtggactctagaggatcccctttactagccaaagaggacattggctcatatttgcacgtccttggatgtggctgtgttgcccaagctattctcagtcgaggacgttttggaggggtcatcactatcaatgttggattttcaatggcagttgcaatggccatttatgtggctggcggtgtctctgtgttggaagttctggccagggcaatcatgcaggagaaggaaataaagggtattcaattaggaaaagaggaagtcaaattgtccctgtttgcagacgacatgattatttatctagaaaaccccatcgtctcagcccaaaatctccttgagctgataagcaacttcagcaaagtctcaggatacaaaatcaatgtacaaaaatcacaagcattcttatacaccaacaacagacaaacagagagccaaatcatgagtgaactcccattcacaattgcttcaaagagaataaaatacctaggaatccaacttacaagggatgtgaaggacctcttcaaggagaactacaaaccactgctcaaggaaataaaagaggatacaaacaaatggaagaacattccatgctcatgggtaggaagaatcaatatcgtgaaaatggccatactggccaagaagacagatggatcttggagaatgacagtggattatcgtaagcttaaccttgtggtgagtccagttgcagctgctgtaccagatgtggttgtactgcttgagcaaattaacacatctcctggtactcggtatgcagtcattgacttggcaaatgcctttttctccattcctggccataaggcccaccggaagcaatttgccttcagctggcaaagccagcaatatacctttactgtcctacctcatgggtatatcaactctctgccttggtgtcataatctttttctgagagaccttgatcgcttttcgcttccacaagatatcacactggtccatgacattgatgacattatgctgattggatccagtgagcaagaagtaacaagcacactggacttactcatgagatatttttgtgccagaggatgggaaataaatccaactaaaattcagggaacttctatgtcagtaaaatttctacgggtctggtgttctcccactggctatggttctgtgttatttttgagggatctgaactgcaaaagcgagttcccgcacagcttttctcagtcagtggccaccgcatgtgtggggagtgattgttggaaattttcaggaagttgccatgggtggatgaggatgcgcctctgtgactgcatgcagggaaaccaggaagtagtgaaggggcaaattttgttctataagataggtaccaacagttggcgtatttcctcagcacattctgaagtagaaagtgtggagtcttgccatttctggggcagaggctcaatcttacgtctgtcctgtccggaagttcttactcatatctccagaaccaagtcagctctcacatttgcagtcatgtctttccctgcttccctggcagttactcacacgttatctgtgttcctgcagcacttttag

SEQ ID NO: 119531 - DNA, 1293 bp, Homo sapiens
atgattatctcaatagatgcagaaaaagcctttgacaaaattcaacaacccttcatgctaaaaactctcaataaattaggtattgatgggacgtatttcaaaataataagagctatctatgacaaacccacagccaatatcatactgaatgggcaaaaactggaagcattccctttgaaaactggcacaagacagggatgccctctctcaccgctcctattcaacatagtgttggaagttctggccagggcaatcaggcaggagaaggaaataaagggtattcaattaggaaaagaggaagtcaaattgtccctgtttgcagaccacatgattgtttatctagaaaaccccattgtctcagcccaaaatctccttaagctgataagcaacttcagcaaagtctcaggatacaaaatcaatgtacaaaaatcacaagcattcttatacaccaacaacagacaaacagagagccaaatcatgggtgaactcccattcacaattgcttcaaagagaataaaatacctaggaatccaacttacaagggatgtgaaggacctcttcaaggagaactacaaaccactgctcaaggaaataaaagaggacacaaacaaatggaagaacattccatgctcatgggtaggaagaatcaatatcgtgaaaatggccatactgcccaaggatattgcagcctctgccctgggagtgaactgggatgagggtgatcaggacccagtgtccttggcctgctgcacctggagtggagacttagcgggaggagctcccattttcttggctacccatggaggagcctctgtaacccagagctggggaaagtgtctcttgggcctacttgatcacacggtctcatctattaattgtgagtattctaagagttgggacgtgttcatcaatccaagtatccccacagtgcctgacacatatgtgcaaatccagttacagctccatgatttaccagaaagtgaagacacccgtgtatccaagggtgacgtagtgctgcaaagtgagcctccttttgagcagatccacacaaaatgtgcagataaacaagccttctacctcaggcctgcagcacgcctgctttctgacctgcttgagtgccagaaagaagaacctgctgactccaccactcgtctatatgtcttgactgtaggagagagagctttcctgatcccattcctatttgtggagtctgtgggagagcaagccatcttgccttcttgttatttctctccttcacccatgcatgacactgcaaagggtttgctggcttga

SEQ ID NO: 119532 - DNA, 987 bp, Homo sapiens
atgagtgaactcccattcagaattgcttcaaagagaataaaatacctaggaatccaacttacaagggacgtgaaggacctcttcaaggagaactacaaaccactgctcaatgaaataaaagaggatacaaacaaatggaagaacatttcatgctcatgggtaggaagaatcaatatcgtgaaaatggccatactgcccaagggaagcataggtttctgcctgcctgcagagtttaggcagaagtgggaccactgggctggaagcactagcaatgtgacccatctggccacaggaggtggaatgagtgaagtttcctgccctgccatctggtgcttccagtacaaaaggtggctgtgtaccttgacaaattcaggtagaagaaagactgctcagctggaagctctagcaagcataaacttcctggctaccagaggcagaggaggagcgactcaagccttcgcgaaagaaaataaccaaaaagcatacaaagaaacgtacggcgtctctcatattacacgccatgatatgctgcagatccctaaacagcagcaaaacgaaaaataccaagtgcctcaattcgatcaatcaacgattaaaaatattgagtctgcaaaaggacttgatgtgtgggacagctggccgctgcaaaacgctgacggaacagtagctgaatacaacggctatcacgttgtgtttgctcttgcgggaagcccgaaagacgctgatgacacatcaatctacatgttttatcaaaaggtcggcgacaactcaatcgacagctggaaaaacgcgggccgtgtctttaaagacagcgataagttcgacgccaacgatccgatcctgaaagatcagacgcaagaatggtccggttctgcaacctttacatctgacggaaaaatccgtttattctacactgactattccggtaaacattacggcaaacaaagcctgacaacagcgcaggggggtgctttagagtcgcactga

SEQ ID NO: 119533 - DNA, 1549 bp, Homo sapiens
gtccaatatttccctgtattcagttgtttcattacggccacttcctgcagattatgtcccttcaatagtcatgcttcctggtacttgtcaaacccaagatgtagaagtatcagaagaaacagtagaaccaagtgatgaattgatagaatatgattcgccagaacagttgaatgagcaattggtgactctttcacttcttcctgaatcacgatggaaaaaccttcttaaccttgatgttattaagagggccctagaactacgatacaatatcaatgtgcaaaaatcacaagcattcctgtacaccaacaacagacaaacagagagccaaatcatgagtgaactcccattcacaatggcttcaaagagaataaaatacctaggaatccaacttacaagggatgtgaaggacctcttcaaggagaactacaaaccactgctgaaggaaataaaagaggatacaaacaaatggaagaacattccatgctcatgggtaggaagaatcaatatcgtgaaaatggccatactgcccaaggtaatttacaggttcagtgccatccccatcaagctaccaatgactttcttcacagaattggaaaaaactactttaaagttcatatggaaccaaaaaagagcccgcatcgtcaagtcaatcctaagccaaaagaacaaagctggaggcaccacactacctgacttcaaactatactacaaggctacagtaaccaaaatagcatggtactggtaccaaaacagagatatagatcaatggaacagaacagagccctcagaaataatgccgcatatctacaactatctgatctttgacaaacctgagaaaaacaagcaatggggaaaggattccttatttaataaatggtgctgggaaaactggctagccatatgtagaaagctgaaactggatcccttccttacaccttatacaaaaatcaattcaagatggattaaagacttaaacgttagacctaaaaccataaaaaccctagaagaaaacctaggcattaccattcaggacataggcatgggcaaggacttcatgtctaaaacaccaaaagcaatggcaacaaaacccaaaattgacaaatgggatctaatgaaactaaagagcttctgcacagcaaaagaaactaccatcagagtgaacaggcaacctacaaaatgggagaaaatttttgcaacctactcatctgacaaagggctaatatccagaatctacaatgaactcaaacaaatttacaagaaaaaaacaaacaaccccatcaaaaagtgggcaaaggacatgaacagacacttctcaaaagaagacatttatgcagccaaaaaacacatgaaaaaatgctcaccatcactggccatcagagaaatgcaaatcaaaaccacaatgagataccatctcccaccagttagaatggcaatcattaaaaagtcaggaaacaacaggtgctggagaggatgtggagaaataggaacacttttacactgttggagggactgtaaactagttcaaccattgcggaagacagtatggtga

SEQ ID NO: 119534 - DNA, 2379 bp, Homo sapiens
atggataaattccttgacacatacactctcccaagactaaaccaggaagaagttgaatctctgaatagaccaataacaggatctgaaattgtggcaataatcaatagcttaccaaccaaaaagagtccaggaccagatggattcacagccgaattctaccagaggtacaaggaggaactggtaccattccttctgaaactattccaatcaatagagaaagagagaatcctccctagctcattttatgaggccagcatcattctgataccaaagcctggcagagacacaaccaaaaaagagaattttagaccaatatccttgatgaacattgatgcaaaaatcctcaataaaatagtggcaaaacaaatccagcagcacatcaaaaagcttatccaccatgatcaagtgggcttcatccctgggatgcaaggctggttcaatatactcaaatcaataaatgtaatccagcatataaacagagccaaagacaaaaaccacatgattatctcaatagatgcagaaaaggcctttgacaaaattcaacaacccttcatgctaaaaactctcaataaattaggtattgatgggacgtatttcaaaataataagagctatctatgacaaacccacagccaatatcatactgaatgggcaaaaactggaagcattccctttgaaaacgggcacaagacagggatgccctctctcaccactcctattcaacatagtgttggaagttctggccaggccaattaggcaggagaaggaaataaagggtattcaattaggaaaagaggaagtcaaattgtccctgtttgcagatgacatgattgtatatctagaaaaccccattgtctcagcccaaaatctccttaagctgataaacaacttcagcaaagtctcaggatacaaaatcaatgtacaaaaatcacaagcattcttatacaccaacaacagacaaatagagagccaaatgatgagtgaactcccattcacaattgcttcacagagaataaaatacctaggaatccaacttacaagggatgtgaaggacctcttcaaggagaactacaaaccactgctcaatgaaataaaagaggatacaaacaaatggaagaacattccatgctcatgggtaggaagaatcaatatcgtgaaaatggccatactgcccaaggtaacttacagattcaatgccatccccatcaagctaccaatgcctttcttcacagaattggaaaaaactactataaagttcatatggaaccaaaaaagagcccgcatcgccaagtcaatcctaagccaaaagaacaaagctggaggcatcacactaccagacttcaaactatactacaaggctacagtaaccaaaacagcatggtactggtaccaaaacagagatatagatcaatggaacagaacagagccctcagaaataacgccgcatatctacgactatctgatctttgacaaacttgagaaaaacaagcaatggggaaaggattccctatctaataaatggtgctgggaaaactggctagccatatgtagaaagctgaaactggatcccttccttacaccttatataaaaatcaattcaagatggattaaagacttaaacgttagacctaaaaccataaaaacgctagaagaaagcctaggcattaccattcaggacataggcatgggcaaggacttcatgtctaaaacaccaaaagcaatggcaacaaaagacaaaattgacaaatgggatctaattaaactaaagtgcttctgcacagcaaaagaaactaccatcagagtgaacaggcaacctacaacatgggagaaaattttcgcaacctactcatctgacaaagggctaatatccagaatctacgatgaactcaaacaaatttacaagaaaaaaacaaacaaccccatcaaaaagtgggcaaaggacatgaacagacacttctcaaaagaagacatttatgcagccaaaaaacacatgaaaaaatgctcatcatcactggccatcagagaaatgcaaatcaaaaccacaatgagataccatctcacaccagttagaatggcaatcattaaaaagtcaggaaagaacagacgcacagcaactttaagtttgctgccagctatacgtcatgaaagggaagcttttcatcaaagggaagaagaaaaggaagggggaagaatcctacctttacaaaacagagtaattctttgcttctgctccctttgcccacatctctcacctgcgtccaaaccaaaacacaggggcctaggtcgctttaagtcacaaagcacctctatgttctcaggtgtgctcagcgttcggaattctctgcatgctcctcaggttgtttcctggttgcagcgctaa

SEQ ID NO: 119535 - DNA, 1827 bp, Homo sapiens
atgccagccataagcaaactgcttctggtgagccttatggaaagctatggagaaaaaggcattcgccagtccaatagctatgtaccaagtttggaacgtgggcacacttgtgttggcagtggcaccagtggccaaggatcaggctcccattacagcagtggcacaagtgtgcaaggcacagctgctcacagaccagccacagagctagggtcaggagcatgggtatgcatgggtgggccatgcccaggaaaagaggaagtcaaattgtccctgtttgcagatgacatgattgtatatctagaaaaccccattgtctcagcccaaaatctccttaagctgataagcaacttcagcaaagtctcaggatacaaaatcaatgtacaaaaatcacaagcattcttatacaccaataacagacaaacagagagccaaatcatgagtgaactcccattcacaattgcttcaaagagaataaaatacctaggaatccaacttacaagggatgtgaaggacctcttcaaggagaactacaaaccactgctcaaggaaataaaagaggatacaaacaaatggaagaacattccatgctcatgggtaggaagaatcaatatcgtgaaaatggccacactgcccaaggcaatttacagattcaatgccatccccatcaagctaccaatgcctttcttcacagaattggaaaaaactactttaaagttcatatggaaccaaaaaagagcccacatcgccaagtcaatcctaagccaaaagaacaaagctggaggcatcacactacctgacttcaaactatactacaaggctacagtaaccaaaacagcatggtactggtaccaaaacagagatatagatcaatggaacagaacagagccctcagaaataaagccgcatatctacaactatctgatatttgacaaacctgagaaaaacgagcaatggggaaaggattccctatttaataaatggtgctgggaaaactggctagccatatgtagaaagctgaaactggatcccttccttacaccttatacaaaaatcaagtcaagatggattaaagacttaaacgttagacccaaaaccataaaaaccctagaagaaaacctaggcattaccattcaggacataggcatgggcaagggcttcatgtccaaaacaccaaaagcaatggcaacaaaagacaaaattcacaaatgggatctaattaaactaaagagcttctgcacagcaaaagaaactaccatcagagtgaacaggcaacgtacaacatgggagaaaattttcgcaacctacttatctgacaaagggctaatatccagcatctacaatgaactcaaacaaatttacaagaaaaaaacaaacgaccccatcaaaaagtgggcgaaggacatgaacagacacttctcaaaagaagacatttatgcagccaaaaaacacatgagaaaatgctcatcatcactggccatcagagaaatgcaaatcaaaaccacaatgagataccatctcacaccagttagaatggcaatcattaaaaagtcaggaaacaacagaggtttgaccgaggaggaaagaatggcagttccacatcatgactgtcaactgagcatctcagctaagccatgtaacagaacaggtgggggagaaaaggaagaagcagcagcaaggagttttccccagagaaagaggactggcagtgtccgcggcagggaggcagcacgctggcttggtttccatcttgctacaatcccaaatatatccatgagtagggagacagtagtgggtttccaggggagatggagaaatgatgctagttaa

SEQ ID NO: 119536 - DNA, 1074 bp, Homo sapiens
atgaaggcagaaataaagatgttctttgaaaccaacgagaacaaagacacaacataccagaatctctgggacacattcaaagcagtgtgtagagggaaatttatagcactaaatgcccacaagagaaagcaggaaagatccaaaattgacaccctaacatcacaattaaaagaactagaaaagcaagaacaaacacatttaaaagccagcagaaggcaagaagtaactaaaatcagagcagaactgaaggaaatagagacacaaaaaacctttcaaaaaattaatgaatcaaggagctggttttttgaaaggatcaacaaaattgatagaccactagcaagactaataaagaaaagagagaagaatcaaatagatgcaataaaaaatgataaaggggatatcaccaccgatcccacagaaatacaaactgccatcagagaatactacaaacacctctacgcaaataaactagaaaatctagaagaaatggataaattcctcgacacatacaccctcccaagactaaaccaggaagaagttgaatctctgaatagaccaataacaggctctgaaattgcagcaataatcaatagcttaccaaccaaaaagagtccaggaccagatggattcacagccgaattctaccagagacaaacagagagccaaatcatgagtgaactcccattcacaattgcttcaaagagaataaaatacctaggaatccaccttacaagagatgtgaaggacctcttcaaggagaactacaaaccactgctcaatgaaataaaagaggatacaaacaaatggaagaacattccatgctcatgggtaggaagaatcaatatcgtgaaaatggccatactgcccaaggccagtgcccatggaagttccaggtctgcccccacatacttaatcaacaggtccaccccagtggatctaggttccaggctcaatttccaacctggatccacagggacccagtatgttcccagcaaagccaatatgcaaagactggagtactttttcaaatacgttgccaccaatgcaaggccatttcactgggtacctggttaa

SEQ ID NO: 119537 - DNA, 1839 bp, Homo sapiens
atggatacattcctcgacacatacactctcccaagactaaaccaggaagaagttgaatctctgaatagaccaataacaggagctgaaattgtggcaataatcaatagtttaccaaccaaaaagagtccaggaccagatggattcacagccgaattctaccagaggtacaaggaggaactgggatgccctctcttaccgctcctattcaacatagtgttggaagttctggccagggcaatcaggcaggagaaggaaataaaaggtattcaattaggaaaagaggaagtcaaattgtccctgtttgcagacgacatgattgtttatctggaaaaccccatcgtctcagcccaaaatctccttaagctgataagcaacttcagcaaagtctcaggatacaaaatcaatgtacaaaaatcacaagcattcttatacaccaacaacagacaaacagagagccaaatcatgagtgaactcccattcacaattgcttcaaagagaataaaatacctaggaatccaacttacaagggatgtgaaggacctctttgaggagaactacaaaccactgctcaatgaaataaaagaggatacaaacaaatggaagaacattccatgctcatgggtaggaagaatcaatatcgtgaaaatggccatactgcccaaggtaatttacagattcaatgccatccccatcaagctaccaatgactttcttcacagaattggaaaaaactactttaaagttcatatggaaccaaaaaagagcccgcatcaccaagtcaatcctaagccaaaagaacaaagctggaggcatcacactacctgacttcaaactatactacaaggctacagtaaccaaaacagcatggtactggtaccaaaacagagatatagatcaatggaacagaacagagccctcagaaataatgccgcatacctacaactatctgatctttgacaaacctgagaaaaacaagcaatggggaaaggattccctatttaataaatggtgctgggaaaactggctagccatatgtagaaagctgaaactggatcccttccttacaccttatagaaaaatcaattcaagatggattaaagatttaaatgttagacctaaaaccataaaaaccctagaagaaaacctaggcattaccattcaggacataggcgtgggcaaggacttcatgtccaaaacaccaaaagcaatggcaacaaaagccaaaattgacaaatgggacctaattaaactaaagagcttctgcacagcaaaagaaagtaccatcagagtgaacaggcaacctacaacatgggagaaaattttcacaacctactcatctgacaaagggctaatatccagaatctacaaagaactcaaacaaatttacaagaaaaaaacaaacaaccccatcaaaaagtgggtgaaggacatgaacagacacttctcaaaagaagacatttatgcagccaaaaaacacatgaaaaaatgctcatcatcactggccatcagagaaatgcaaatcaaaaccactatgagatatcatctcacaccaacccagaaagaagagggcagcacacctcagggccagcaggaggaaggggagtcatccaggacatgtactctcaactggcggttgggaagaagacagaaagagatagacatgtgggtcgaagtctttactggggtccgtcgtgttacccaaggtacagttgtcagagaaggctgtggtgaagttgtgctgagatccgggatgccagtcttcaggcttcagtggtggcagcagggagctgactgtgcctgcccttgggcccaaggtggcatacattggtaccagtgttag

SEQ ID NO: 119538 - DNA, 1368 bp, Homo sapiens
atggccctggaggcctcaggaaacttacaatcatggccaatggcgaaggggaagcaaggcatcttcttcacaaggaggcaggaaggacaagtgccaagagaagcaggaagagctcctataaaaccatcagatcttattctggatattagccctttgtcagatgagtgggttgcgaaaattttctcccattttgtgggttgccggttcactctgacggtagtttcctttgctgtgcagaagctctttagtttaattacatcccatttgtcaattttggcttttgttgccattgcttttggtgttttagacatgaagtccttgcctgtgcctatgtcttttaggcaggagaaggaaataaagggtattcaattaggaaaagaggaagtcaaattgtccctgtttgcagatgacatgattgtatatctagaaaaccccattgtctcagcccaaaatctccttaagctgataagcaacttcagcaaagtctcaggatacaaaatcaatgtgcaaaaatcacaagcattcttatacaccaataacagacaaacagagagccaaatcatgagtgaactcccattcacaattgcttcaaagagaataaaatacctaggaatccaccttacaagggacgtgaaggacctcttcaaggagaactacaaaccactgctcaatgaaataaaagaggatacaaacaaatggaagaacattccatgctcatgggtaggaagaatcaatatcgtgaaaatggccatactgcccaaggtaatttatagattcaatgccatccccatcaagctaccaatgactttcttcacagaattggaaaaaactactttaaagttcatatggaaccaaaaaagagcccgcatcgccaagtcaatcctaagccaaaagaacaaagctggaggcatcacgctacctgacttcaaactatactacaaggctatagtaaccaaaacagcatggtactggtaccgaaacagagatatagatcaatggaacaaagcagagccctcagaaataatgccacatatctacaactatctgatctttgacaaccctgagaaaaacaagcaatggggaaaggattccctatttaataaatgtgtggaagaatcattagttaataagtcactgcagctgaagcagggagtgcctcctaagtcctttgcctgtgaagtcaacgttcttccctccaccccacctgctttatgccttgttattgtccacaaggatgatttttcaaagcagatgatagaggccagagttcataaagtagaaactcactctaaggaacaatggaaaagaaaatcttcaagaatttgcagtattttctacggaaaacgaggggtccatggggaccattga

SEQ ID NO: 119539 - DNA, 1887 bp, Homo sapiens
atgaaactcatggaaacacttaaccagtgcataaacgctggtcatgaaatgacgaaggctatcgccattgcacagtttaatgatgacagcccggaagcgaggaaaataacccggcgctggagaataggtgaagcagcggatttagttggggtttcttctcaggctatcagagatgccgagaaagcagggcgactaccgcacccggatatggaaattcgaggacgggttgagcaacgtgttggttatacaattgaacaaattaatcatatgcgtgatgtgtttggtacgcgattgcgacgtgctgaagacgtatttccaccggtgatcggggttgctgcccataaaggtggcgtttacaaaacctcagtttctgttcatcttgctcaggatctggctctgaaggggctacgtgttttgctcgtggaaggtaacgacccccagggaacagcctcaatgtatcacggatgggtaccagatcttcatattcatgcagaagacactctcctgcctttctatcttggggaaaaggacgatgtcacttatgcaataaagcccacttgctggccggggcttgacattattccttcctgtctggctctgcaccgtattgaaactgagttaatgggcaaatttgatgaaggtaaactgcccaccgatccacacctgatgctccgactggccattgaaactgttgctcatgactatgatgtcatagttattgacagcgcgcctaacctgggtatcggcacgattaatgtcgtatgtgctgctgatgtgctgattgttcccacgcctgctgagttgtttgactacacctccgcactgcagtttttcgatatgcttcgtgatctgctcaagaacgttgatcttaaagggttcgagcctgatctgataagcaacttcagcaaagtctcaggatacaaaatcaatgtacaaaaatcacaagcattcttatacaccaacaacagacaaacagagagccaaatcatgagtgaactcccattcacaattgcttccaagagaataaaatacctaggaatccaacttacaagggatgtgaaggacctcttcaaggagaactacaaaccactgctcaaggaaataaaagaggatacaaacaaatggaagaacattccatgctcatgggtaggaagaatcaatatcgtgaaaatggccatactgcccaagttttctgctgaagtgaggaaggaacaggcacccacactgactgggtacatgaggattccagagaacaagccatttcacaatcagaatttcatcaaatcctcctgtttctggtctcttttgcagccctattttaataggtacctggtgttgacaatttctaaccctttctttgttcggtgtggagttttatgggacaatggaggtagagcaaaacagaaaagggataccattgctactgcctctaaaccaggtctagtaattgctactactgtaaacctgaaagggcaagaagagagagcagttgtaggaccgggcaagtactttagctgtaagagaagagctgtggcttttagtcaagcagagttgtcactgcataaagtggacagccagggaggacccagagtgctgattggtgcatttttacagagtgctgattggtgcatttacaatcctctagctagacagaaaagttctccaagtccccacttgacccaggaattccagctggcttcacctctcaatcccccctctaatcacgacaccccaacagctgttgggaattgggcaatgaccactctagctacttccaaaataagagtcgtcagcatgcaagttcagacagtcacaaaattgaaaacagttactaatgttgttggatttgtaatgggcttgacatctccaggcaagtcttcctactga

SEQ ID NO: 119540 - DNA, 1056 bp, Homo sapiens
atggatagagctgaaggccattatcctaagtcaactagaacaggaagagaaagccaaataccacatgttcttacttataaatgggagctaaaactgagtacatgtggacacaaaaaagggaacaacaggtgcttgggcctatttgaggtgttggaagttctggccagggcaatcaggcaggagaaggaaataaagggtattcaattaggaaaagaggaagtcaaattatccctgtttgcagatgacatgattgtatatctagaaaaccccattgtctcagcccaaaatctccttaagctgataagcaacttcagcaaagtctcaggatacaaaatcaatgtacaaaaatcacaagcattcttatacaccaataacagacaaacagagagccaaatcatgagtgaactcccattcacaattgcttcaaagagaataaaatacctaggaatccaacttaaaagggatgtgaaggacctcttcaaggagaactacaaaccactgctcaatgaaataaaagaggatacaaagaaatggaagaacattccatgctcatgggtaggaagaatcaatatcgtgaaaatggccatactgcccaagataatttatagattcaatgccatccccatcaagctaccaatgactttcttcacagaattggaaaaaactactttaaagttcatatggaaccaaaaaagagcccgcaccaccaagtcaatccttagccaaaagaacaaagctggaggcatcatgctacctcacttcaaactatactacaaggctacagtaaccaaaacagcatgggccacttttaagaaagaattaggattgtttattgtcttactcactttgggctgctgtaacaagtatcagagactaaatggcttaaacagaaatttatttctcacatttctggaggctagaaagtccaagatcaaggtgctggcagacccgatgtctggctcttctgctctgcttaagaaggagccctcagggaacatacgacctgcacaattattgcccctcttattttctgcagacccgtgtaattacgggtaa

SEQ ID NO: 119541 - DNA, 2532 bp, Homo sapiens
atggagaagaattttattgagcgatggaacagctctcagcggagaggggatgtggtaggtggaggtggtcccccacccctgcagtcaggtggtttctcacccaatgtggctaggtctgggcatttatggattcagaatggaaagtgtgtgctgattggtttaaatgcaagggaagtgatacgtttttatatcaatcagggtccattcagaaacagatatcatattggcgattttaacaggaaaaatttaaagaattattttctagtaaaagatgatcagttactaaaagaggactctatgatacagaagaagcagctacgaaaaggagctgttacttctagggctgaagaagagttaataaaggagttacttaagttaaaggaaatgctcccttccccacctgcaagattagagattcagatctctgaggggagggacaagaactcgggacctgccgaacagcgggtgcaaaagaacagcaggctcccaaagtgtggggattaccggcatgagccactgcacctgacctttgaagttccgcagttgctggtgtcttttgagttttttggacgccactgcgttcccttcgttcatatgccagtgcccaaggcagaagctgcttgcagtatacctgatccagccacagcttcacatgaagctggtgcctggagaaccaaagacaaaaaccacatgattatctcaatagatgcagaaaaggcctttgacaaaattcaacaacacttcatgctaaaaactctcaataaattaggtattgatgggatgtatctcaaaataataagagctatctatgacaaacccacagctgatatcatactgaatgggcaaaaactggaagcattccctttgaaaatgggcacaagacagggatgccctctctcaccactcctattcaacatagtgttggaagttctggccagggcaatcaggcaagagaaggaaataaagggtattcaattaggaaaagaggaagtcaaattgtccctgtttgcagatgacatgattgtatacctagaaaaccccattgtctctgcccaaaatctcctcaagctgataagcaacttcagcaaagtctcaggatacaaaatcaatgtacaaaaatcacaagcattcttatacaccaataacagacaaacagagagccaaatcatgagtgaactcccattcacaattgcttcaaagagaataaaatacctaggaatccaacttacaagggatgtgaaggacctcttcaaggagaactacaaaccactgctcaatgaaataaaagaggacacaaagaaatggaagaacattccatgctcatgggtaggaagaatcaatatcgtgaaaatggccatactgcccaaggtaatttatagattcaatgccatccccatcaagctagcaatgactttcttcacagaattggaaaaaactactttgaaattcatatggaaccaaaaaagagtccacattgccaagtcaatcctaagccaaaagaacaaagctggaggcatcacgctacctgaattcaaactgtactacaaggctacagtaaccaaaacagcatggcttgcagtggtgtcaatgcgtttgaaacagcagtcacctcttactgcctgcaagggtagtggctgggtgaggtgcatggtgcactgggtcagcatgggactggagacttgtggggcacatatgggcactagttctaaagggtgtgtcatggcattgggtctgatagagggtgtggctgaggctctagctttggagggggtgcagcagtgtgagttctgggcagctccatcggctggtgtcagcattcttgaagactgtgggggtccttggcagttaaggctgtgggtatttgtggcagtggggatggctgctagagtcctgagtggcacagattcacatattgaagccctaatcctcagtgtgactgtatttggagatggagtgtttaaggaagtaattaaggttaaatcaggttacaaggagttgcctacggcaacccaagcccagaatgactatggaccacagcaaaaatcttcctcttccaggccttcttgttcttgccttgtggcaatagctttggggcttctgactgcagttcttctgagtgtgctgctataccagtggatcctgtgccagggctccaactactccacttgtgccagctgtcctagctgcccagaccgctggatgaaatatggtaaccattgttattatttctcagtggaggaaaaggactggaattctagtctggaattctgcctagccagagactcacacctccttgtgataacggacaatcaggaaatgagcctgctccaagttttcctcagtgaggccttttgctggattggtctgaggaacaattctggctggaggtgggaagatggatcacctctaaacttctcaaggaatacaaatggaacaattatccgcaaaagaaagcaccttcataagaaccaaaaatcagatgagcagtcacagtacctggttttaacatcatatcaacaaaagaggcactga

SEQ ID NO: 119542 - DNA, 2376 bp, Homo sapiens
atgtcagtaaaatttccaacaggtataatcaagccaaattcaattacttctcttaatctggttaatgacaccaaatgcccaccaaaggccagcattgtttcacttaatgcccctgcctttgagtctgacagcaatgacaataatgtcactaccatgcctaaggtagatggtgtcagctccataaaattaagatttctattaattccctatcaaaaagtaactagaatggcacttcctcttggtgaaaatgatgaatctttatctgatacactggtgacattagaggtatcagagccactgggagaacactctaccatcaccaaccaaaactgggaaatcaccaaagcacaaagtgcctttcagccttttcccatggtctttcctattcctctggtagatcctgctactttttcagagaaacccataaatgtagccactgacatacctaccactgaaaatgaggtcattaatgataaaactaacaccagggtcttttcacctaatatggtccttcaacctgtaatccacaaaaatgaaggaataaataaaactcctaactatgatgtaaatcaagcagttattaaattttctgcaaaagaaattgctactgcaggaactaaggctaatgcattcctcaatagcaataaggctgttgcagaagatgaattctatatttctgaagccaatattccagtgaacttaagagatataaatgcagtgggagttgatcctttcatccttaagcctgatgcggcttctgctgaacagaaagcacctgaaaattccaaagaaacattttaccttgcttccacaatgagcacaacaaagcagacaaagatcagggttaggggctcattttctcttgataatgattacttagagaggtccatcacaaactcttatgataaagtgtatcaactacccctgaaatcaactcttttgcccactaattttattgaaatctataattctgaacttgcttcagcactcattataggagagagcaacataatgactgatgactttatcatatctaatgatataattggtctatctgacgaagaaaccatttcacctgacaatatcatctttattgaaaacatgaacaacataaatctttccagcacatggagcaccagtccaacaggcattacaactgaacccaccagtgtaaataatacctcaactagtacaagcaaccctgtacctagagtcactactaatttagccacaatcactagtactttatccaacagcaaaatgtctacgtcagttgctccaactagggcaactgccactactgctaagggactagatggaatcaccagaacacctcaaaccctatcccctgtcactgtaaccccaatgacatcaaacactaactcagaaatagctgctgtatctacaaagccggcatcaactgcaactgtcccagcatctgtgttggcctcagaggcaccttcagtggaatccacacctcaagggtctgctgcttccagtgcctcagcccctaccaacccaggagtgttggaagttctggccagggcaatcaggcaggagaaggaaataaagggtattcaattaggaaaagaggaagtcaaattgtccctgtttgcagacgacatgattgtttatgtagaaaaccccatcgtctcagcccaaaatctccttaagctgataagcaacttcagcaaagtctcaggatacaaaatcaatgtacaaaaatcacaagcattcttatacaccaacaacagacaaacagagagccaaatcatgggtgaactcccattcacaattgcttcaaagagaataaaatacctaggaatccaacttacaagggatgtgaaggacctcttcaaggagaactacaaaccactgctcaatgaaataaaagaggacacaaacaaatggaagaacattccatgctcatgggtaggaagaatcaatattgtgaaaatggccatactgccccaggtcatttacagattcaatgccatccccatcaagctaccaatgcctttcttcacagaattggaaaaaactactttaaagttcatatggaaccaaaaaagagccctcatcgccaagtcaatcctcagccaaaagaacaaagccggaggcatcacgctgcctgacttcaaactatactacaaggctacaataaccttaccctggggcacagcactatcctccaagtcacagggagcttctgaccacaaaaagagagggagagaagccaatcttaagaggcaaagactcctgaccatgaagaaagaacgttaccctgaggagattcccaaagttaaactagctctacatgaggatgcattaaagaacactcataacttcaaggcaccaagaacagtgggaaattaa

SEQ ID NO: 119543 - DNA, 2364 bp, Homo sapiens
atgacaatagctcattcttttgactactggatctttgtagaaagttttgaatacagaaaggaacaatgtctgatgttgaattctctactaagtaacagaattgggattgctattgatttagtaaagaagaaaggtggatattttctgcacgtgagagactgtgccttaaaattgatacctgttgcgcaaaaacagtctttgggaataagaaaggaaagtagtacctttctcagtgacagctacccctcagacagaattgccttcagctcctgtgacaaattaggaatgaatcccaacgtcatatctaaggtccctgcatctttattagtggtggatgacatcatctctgtgaagtcaaaaaggaggggtgaaaggaaagaagttgaatctctgaatagaccaataacaggatctgaaattgtggcaataatcaatagtttaccaaccaaaaagagtccaggaccagatggattcacagccgaattctaccagaggtacaaggaggaactggtaccattccttctgaaactattccaatcaatagaaaaacagggaatcctccctaactcattttatgaggccagcatcattctgataccaaagcctggcagagacacaaccaaaaaagagaattttagaccaatatccttgatgaacattgatgcaaaaatcctcaataaaatactggcaaaccgaatccagcagcacatcaaaaagcttatccaccatgatcaagtgggcttcatccctgggatgcaaggctggttcaatatacgcaaatcaataaatgtaatccagcatataaacagagccaaagacaaaaaccacatgattatctcaatagatgcagaaaaagcctttgacaaaattcaacaacccttcatgctaaaaactctcaagaaattaggtattgatgggacgtatttcaaaataataagagctatctatgacaaacccacagccaatatcatactgaatgggcaaaaactggaagcattccctttgaaaactggcacaagacagggatgccctctctcaccgctcctattcaacatagtgttggaagttctggccagggcaatcaggcaggagaaggaaataaagggtattcaattaggaaaagaggaagtcaaattgtccctgtttgcagacgacatgattgtttatctagaaaaccccatcgtctcagcccaaaatctccttaagctgataagcaacttcagcaaagtctcaggatacaaaatcaatgtacaaaaatcacaagcattcttatacaccaacaacagacaaacagagagccaaatcatgagtgaactcccattcacaattgcttcaaagagactaaaatacctaggaatccaacttacaagggatgtgaaggacttcttcaaggagaactacaaaccactgctcaaggaaataaaagaggacacaaacaaatggaagaacattccatgctcatgggtaggaagaatcaatatcgtgaaaatggccatactgcccaaggtaatttacagattcaatgccatccccatcaagctaccaatgactttcttcacagaattggaaaaaactactttaaagttcatatggaaccaaaaaagagcccgcatcgccaagtcaatcctaagccaagagaacaaagctggaggcatcacactacctgacttcaaactatactacaaggctacagtaaccaaaacagcatggtactggtaccaaaacagagatatagatcaatggaacagaacagagccctcagaaataatgccgcatatctacaactatctgatctttgacaaacctgagaaaaacaagcaatggggaaaggattcactactaaaagtctttaaaacaactgtcttatatatactaaaaaagcctaaggaaaatgtggacaaacaactaaaagaaattagaaaactgatacatgaacaaaacaagtctgctccagaacatggccagccctacagctccggctggaaggccagtccacaaagatttggaatccagttatgtctagactctagaacagccccagtgctgctaaggccccaggtgttaggcttgccccaggctgcagaccagcaactacagatttcagatctaggccagcacccatcatccaaggcaccagtctttgctcagttccaggcccattccaggttccagactggtctccacagacacaagctccagagaaaccaagatccaagtcaacctcagtggattctagtgctgggtcaaccatcacagactcagctacagaaccaaccctgcagacacaatctccaggcagatacccatgttctcattattcaggcttgtccacagactcaagttctaggcctgcccattcactga

SEQ ID NO: 119544 - DNA, 2277 bp, Homo sapiens
atggataaattcctcgacacacacactctcccaagactaaaccaggaagaagttgaatctctgaatagaccaataacaggatctgaaattgtggcaataatcaatagcttaccaactgaaaaaagtccaggaccagatggattcacagccaaattctaccagagatgcagaaaagcctttgacaaaattcaacaacctttcatgctaaaaactctcaataaattaggtattgatgggacgtatttcaaaatgataagagctatctatgacaaacccacagccaatatcatactgaatgggcaaaaactggaagcattccccttgaaaactggcacaagacagggatgccctctctcaccactcctattcaacatagtgttggaagttctggccagggcaattaggcaggagaaggaaataaaaggtattcaattaggaaaagaggaagtcaaattgtccctgtttgcagacgacatgattgtatatctagaaaaccccatcgtctcagcccaaaatctccttaagctgataagcaacttcagcaaagtctcaggatacaaaatcaatgtacaaaaatcacaagcattcttatacaccaataacagacaaacagagagccaaatcatgagtgaactcccattcacaattgcttcaaagagaataaaatacctaggaatccaacttacaagggatgtgaaggacctcttcaaggagaactacaaaccactgctcaaggaaataaaagaggatacaaacaaatggaagaacattccatgctcatgggtaggaagaatcaatatcgtgaaaatggccatactgcccaaggtaatttacagattcaatgccatccccatcaagctaccaatgactttcttcccagaattggaaaaaactactttaaagttcatatggaaccaaaaaagagccctcatcgccaagtcaatcctgagccaaaagaacaaagccagaagcatcacgctacctgacttcgaactatactacaaggctacagtaaccaaaacagcctggtactggtaccaaaacagagatatagaccaatggaacagaacagagccctcagaaataatgccgcatatctacaactatctgatctttgacaaacctcacaaaaacaagcaatggggaaaggattccctatttaataaatggtgctgggaaaaatggctaaccatatgtagaaagctgaaactggatcccttccttacaccttatacaaaaattaattcaagatggattaaagacttacatgttagagctaaaaccataaaaaccctagaagaaaaactaggcaataccattcaggacataggcatgggcaaggacttcatgtctaaaccaccaaaagcaacggcagcaaaagccaaaattgacaaatgggatctaattaaactaaagaacttctgcacagcaaaagaaactaccatcagagtgaacaggcaacctacaaaatgggagaaaattttcacaacctactcatctgacaaagggctaatatccagaatctacaatgaactccagcaaatttacaagaaaaaaacaaacaaccccatcaaaaagtgggcgaaggacatgaacagacacttctcaaaagaagacatttatgcagccaaaaaacacatgaaaaaatgctcaccatcactggccatcagagaaatgcaaatcaaaaccacaatgagataccatctcacaccagttagaatggcaatcattaaaaagtcaggaaacaacaggagacatttggcagtgtctggagacatttctggctgtcacaacctagggaggaaagttgcaggtattgagtgggtcgagggtggtgatgctgctaaacatcctgcaaggcacaggataatagcccgcaacaaagaactgtcccaaaatgccaatcatgccaagcttgagaagccctgtatgaggtggtggcaagagttacagggaaaacaatccgagaaaggtcaaagggagtcccaggggcaaggtggagggggtgaggagttgttcagggaagagctcaccaggaagatgacatctgaacaaaaacctgcaaaaggagcagcggggagctgctgtagatatctgcaggaagagcatcataggacaggaaatgacaaatgtgaaggccctgagggaggaacatgttgggcaagttccgggaaagcaggagaccaatgtggcaggggcagagtgagcaaaaggaggaggagcagaaatgaaaatcttacggggcccagatgtgtcgagcgtcagcttgtgctctga

SEQ ID NO: 119545 - DNA, 2044 bp, Homo sapiens
atggcgtccccaggacctgcacccacagccagtcccaaaatccactctgagctgttaacagcaaccagagaagctcagagacatcatcctgtgccccgtggtcaagacctagtgacctcagaatcattctcgctctccttctgcttctcagctgccatcttcatttttgaacttttgggttcaaactcagaaggagtcacagatcttagactgtggctatgccagccagcgcccaggtgcggggagtggacctacaaccccttggagcagtgctgtgatgacggtgtcatcctagacttgaaccagacccggctctgcggctccagctgcaccttctggccctgcttccagcactgctgcctggagtctttgggctctcagaaccagacagttgtgaggttcaaggtcccaggcatgaagccagattgcaagtcctcccctatcaccaggatctgtgcccaggctggagtgcaaataagcaacttcagcaaagtctcaggatacaaaatcaatgtacaaaaatcacaagcattcttatacaccaacaacagacaaacagagagccaaatcatgagtgaactcccattcacaattgcttcacagagaataaaatacctaggaatccaacttacaagggatgtgaaggacctcttcaaggagaactacaaaccactgctcaaggaaataaaagaggatacaaacaaatggaagaacattccatgctcatgggtaggaagaatcaatatcgtgaaaatggccatactgcccaaggtaatttacagattcaatgccatccccatcaagctaccaatgactttcttcacagaattggaaaaaactactttaaagttcatatggaaccaaaaaagagccctcatcgccaagtcaatcctaagccaaaagaacaaagctggaggcatcacactacctgacttcaaactatactataaggctacagtaaccaaaacagcatggtactggtaccaaaacagagatatagatcaatggaacagaacagagccctcagaaataacgccgcatatctacaactatctgatctttgacaaacctgagaaaaacaagcaatggggaaaggattccctatttaataaatggtgctgggaaaactggctagccatatgtagaaagctgaaactggatcccttccttacaccttatacaaaaatcaattcaagatggattaaagacttaaacgttagacctaaaaccataaaaaccctagaagaaaacctaggcattaccattcaggacataggcatgagcaaggacttcatgtctaaaacaccaaaagcaatggcaacaaaagacaaaattgacaaatgggatctaattaaactaaagagcttctgcacagcaaaagaaactaccatcagagttgaacaggcaacctacaaaatgggagaaaatttttgcaacctactcatctgacaaagggctaatatccagaatctacaatgaactcaaacaaatttataagaaaaaaacgaacaaccccatcaaaaagtgggcgaaggacatgaacagacacttctcaaaagaagacatttatgcagccaaaaaacacatgaaaaaatgctcactatcactggctatcagagaaatgcaaatcaaaaccacaaatcaaaaccacaatgagataccatctcacaccaggacatggatgaaattggaaatcatcattctcattaactatcgcaagaacaaaaaaccaaacaccgtattgaacaatgagaacacatggacacaggaaggggaacatcacactctggggaatgttgtgggctcactcgctatggtgtggagaattcctgcaggagcacacagtgggagccggaagggcagtcagaaagctgttgtggggctctgggtgaaacttggtggctattctcaccagggtactgtgtctgtgtacctcattccttttggtcataagacaagaactcagaactcaccaaactgtgagagtaaaatagctgtaacactccctcctgctcgccaaactctgggagaaaagaagctgtaa

SEQ ID NO: 119546 - DNA, 1875 bp, Homo sapiens
atgcctcttgcctccttcatcatctgtctccctcacatctgccctgcctttgacaatgtacaaatagctttgaagccctcacagagcgtggctgtgcgaattgcagacttggtggatgacggctgtggggagttagagctgggcctagtcatgacaagcactccaaaacccacaggtcccaggtccccatacacctgggaaacaaaagcatctaacatcaaaaaggaccacggccataaggaggaagaaacaccttctcaggacgacatgattgtttatctagaaaaccccatcgtctcagcccaaaatctccttaagctgataagcaacttcagcaaagtctcaggatacaaaatcaatgtacaaaaatcacaagcattcttatacaccaacaacagacaaacagagagccagatcatgggtgaactcccattcacaattgcttcaaagagaataaaatacctaggaatccaacttacaagggatgtgaaggacctcttcaaggagaactacaaaccactgctcaaggaaataaaagaggagacaaacaaatggaagaacattccatgctcatgggtaggaagaatcaatatcgtgaaaatggccatactgcccaaggtaatttacagattcaatgccatccccatcaagctaccaatgactttcttcacagaattggaaaaaactactttaaagttcatatggaaccaaaaaagagcccgcatcgccaagtcaatcctaagccaaaagaacaaagctggaggcatcacactacctgacttcaaactatactacaaggctacagtaaccaaaagagcatggtactggtaccaaaacagagatatagatcaatggaacagaacagagccctcagaaataatgccgcatatctacaactatctgatctttgacaaacctgagaaaaacaagcaatggggaaaggattccctatttaataaatggtgctgggaaaactggctagccatatgtagaaagctgaaactggatcccttccttacaccttatacaaaaatcaattcaagatggattaaagatttaaacgttaaacctaaaaccataaaaaccctagaagaaaacctaggcattaccattcaggacataggcgtgggcaaggacttcatgtccaaaacaccaaaagcaatggcaacaaaagacaaaattgacaaatgggatctaattaaactaaagagcttctgcacagcaaaagaaactaccatcagagtgaacaggcaacctacaacatgggagaaaatttttgcaacctactcatctgacaaagggctaatatccagaatctacaatgaactcaaacaaatttacaagaaaaaaacaaacaaccccatcaaaaagtgggcgaaggacatgaacagacacttctcaaaagaagacatttatgcagccaaaaaacacatgaagaaatgctcatcatcactggccatcagagaaatgcaaatcaaaaccactatgagatatcatctcacaccagttagaatggcaatcattaaaaagtcaggaaacaacaggtgctggagaggatgcggagaaataggaacacttttacactgttggtgggactgtaaactagttcaaccattgtggaagtcagtgtggcgattcctcagggatctagaactagaaataccatttgacccagccatcccattactgggtatatacccaaatgagtataaatcatgctgctataaagacacatgcacacctattatcaccaccatcatcatcatcatcgacttcatcaacattactgacatcatcatcaccatcatcttcatcatttcatcatcaccatcagcatcattactgccattatcatcattctcatcattgacatga

SEQ ID NO: 119547 - DNA, 1560 bp, Homo sapiens
  misc_feature (1)...(1560): n = a,t,c or g
atgtgggaggaagaatcaccgttgacgcatcttgatttggttggtttttacatgtgtaaagaagaggatcccctgttcccgagccaaggcctccagactagcaggaccgagatccacaagtaccgctacaaccccggaatgcggtggagggctggggatgcgagcggtccacagcgggaggagacgctgcatgaccacccggacagcatcttcaaaggcgctgtctcctccgcgtctccgggttctcagaaaatgcgaagaaaggcatgttggaagttctggccagggcaatacagacaggagaaaaaaataaagggtattcaatcaggaaaagaggaagtgaaattgtccctgtttgcagatgacatgattgtatatttagaaaaccccatcgtctcagcccaaaatctccttaagctgataagcaacttcagcaaagccttaggatacaaaatcagtgtgcaaaaatcacaagcattcttatacaccaataacagacagacagagagccaaatcatgagtgaactcccattcacaattgcttcaaagagaataaaatacctaggaatccaacttacaagggatgtgaaggacctcttcaaggagaactacaaaccactgctcaatgaaataaaagaggacacaaacaaatggaagaacattccatgttcatggataggaagaatcaatatcgtgaaaatggccatactgcccaaggtaatttatggattcaatgccatccccatcaagctaccaatgactttcttcacagaattggaaaaaactactttaaagttcatatggaaccaaaaaagagcccgcatcgccaagtcgatcctaagccaaaaggacaaagctggaggcatcacgctacctgacttcaaactatactacaaggctacagtaaccaaaacagcatgcaatagtaatggctctcagtccccgtggatggaggagcaaattcgggatgcctggggaagcatggttctaaaaaatgttgtacgtgaaacggatgaagttggtaaaggtcagatccggatgagaactgtttttgaacaggccattgatcaacgctcttcaactgatacttcgttatcgacaccagctgccccgatggtggattcgttaattgcgcgcgtaggagtaatggctcgcggtaatgccattactttgcctgtatgtggtcgggatgtgaagtttactcttgaagtgctccggggtgatagtgttgagaagacctctcgggtatggtcaggtaatgaacgtgaccaggagctgcttactgaggacgcactggatgatctcatcccttcttttctactgactggtcaacagacaccggcgttcggtcgaagagtatctggtgtcatagaaattgccgatgggagtcgccgtcgtaaagctgctgcacttaccgaaagtgattatcgtgttctgggtggcgagctggatgatgagcagatggctgcattatccagattgggtaacgattatcgnccaacaagtgcttatgaacgtggtcagcgttatgcaagcccattgccgacctgtgttgcatga

SEQ ID NO: 119548 - DNA, 1848 bp, Homo sapiens
gaaggtatggacccccatccaaaatttagtttggatgttgatactgataatgctatgcctacaccaagaggtatgaaaaggtttattatgatgagggtttttgaagacagcaaagcaggcctcctgaactggtccaaaaatggcttaagagagagaggaaaggtgcctggcttgggatttattgtgattggtagctccttcaatcctatcaccaacaggcacctaaggttgtttgagctggccaaggactatatgaatggaacaggaagatatagagttgtcaaacacatgatctttcctgttggtgatgcttataagaagaaaggactcattcctgcccatcaccaggtcatcatagccgaacttgccaccaagaattccaaactaaaccaggaagacattgaatccctgaacagaccaataacaggttctgaaattgaggcaataattaatagcctaccaaccaaaaaaagtccaggaccagatggattcacagccgatttctaccagaggtacaaacaggagctagtaccattccttctgaaactattccaatcaatagaaaaagagggaatcctccctaattcatttgatgaggccagcatcatcctgataccaaagcctggcagagacacaacaaaaaaagagaattttagaccaatatccctgatgaacattgatgcaaaaattctggcaaaccaaatccagcagcagatcaaaaagtttatccaccacgatcaagttggcttcatccctgggatgcaaggctggttcaacatacacaaatcaataaatgtaatccagcatataaacagaaccaaagacaaaaaccacacgattatctcaacagatgcagaaaaggccttcgacaaaattcaacagcccttcatgctaaaaactctgaataaactaggtattgatgggacgtatctcaaaataataagagctatttatgatgaacccacagccaatatcatactgaatgggcaaaaactggaagcattccctttgaaaactggcacaagacagggatgtcctctctcaccactcctattcaacatagtattggaagttctggccagggcaatcaagcaggataaagaaatacaggatattcagttaggaaaagaagtcaaattgtccctatttgcagatgtcatgattgtatatttagaaaactccatcgtctcagtccaaaatctccttaagctgataagtaacttcagcgaagtctcaggatacaaaatcaatgtgcaaaaatcacaagcattcctctacaccaataaaagacaaagagagagccaaatcatgagtgaactcccattcacaattgcttcaaagagaataaaatacctaggaatccaacttacaagggatgtgaaggacctcttcaaggagaactacaaaccactgctcaatgaaataaaagaggacacaaacaaatggaagaacattccatgctcatggattggaagaatcaatatcgtgaaaatggccatactgcccaagataatttatgcagccaaaaaacacatgaaaaaatgctcatcatcactggccatcagagaaatgcaaatcaaaaccacaatgagataccatctcacaccagttagaatggcgatcattaaaaagtcaggaaacaacagaagtacccgtggcctgctcagctgtgactctgctgacctcaggacctcactggtcaaggtatgtagggacccttgcaggagacttggtaatggtgaaatgatcctatcgttacattatctatggagcaacaactttgtacagagaaccagctgcttggctttttctcccagtgcccaggatgctgctgatgcggccgtgtaa

SEQ ID NO: 119549 - DNA, 2112 bp, Homo sapiens
atgaaggcagaaataaagatgttctttgaaaccaatgagaacaaagacacaacataccagaatctctgggatgcattcaaagtagtgtgtagagggaaatttatagcactaaatgcccacaagagaaagcaggaaagatccaaaattgacaccctaacatcacaattaaaagaactagaaaagcaagagcaaacacattcaaaagctagcagaaggcaagaaataactaaaatcagagcagaactgaaggaaatagagacacaaagaacccttcagaaaattaatgaatccaggagctggttttttgaaaggatcaacaaaattgataggctgctagcaagactaataaagaaaaaaagagagaagaatcaaatagacacaataaaaaatgataaaggggatatcaccaccgatcccacagaaatacaaactaccatcagagaatactacaaacacctctacacaaataaactagaaaatctagaagaaatggataaattcctcgacacatacactctcccaagactaaaccaggaagaagttgaatttctgaatagaccaataacaggatctgaaattgtggcaataatcaatagcttaccaaccaaaaagagtccaggaccagatggattcacagccgaattctaccagagacaaacagagagccaaatcatgagtgaaatcccattcacaattgcttcaaagagaataaaatacctaggaatccaacttacaagggaagtgaaggacctcttcaagaagaactacaaaccactgctcaatgaaataaaagaggatacaaacaaatggaagaacattccatgctcatgggtaggaagaatcaatatcgtgaaaatggccatactgcccaaggtaatttatagattcaatgccatccccataaagctaccaatgcctttcttcacagaattggaaaaaactactttaaagttcatatggaaccaaaaaagagcccgcatcgccaagtcaaacctaagtcaaaagaacaaagctggaggcatcacactacctgacttcaaactatactacaaggctacagtaaccaaaacagcatggcactggtaccaaaacagaaatatagatcaatggaatagaacagagccctcagaaataatgccacatatctacaactatctgatctttgacaaacctgagaaaaacaagcaatggggaaaggattctctatttaacaaatggtgctgggaaaacaggctagccatatgtagaaagctgaaactggatctcttccttacatcttatacaaaaatcaattcaagatggattaaagacttaaacgttagacctaaaaccataaaaaccccagaagaaaacctaggcaataccattcaggacataggcatgggcaaggacttcatgtctaaaacaccagaagcaatggcaacaaaagccaaaattgacaaatgggatctaattaaactaaagagcttctgcacagcaaaagaaactaccatcagagtgaacaggcaacctacaaaatgggagaaaattttcgcaacctactcatctgacaaagggctgatatccagaatctacaatgaactcaaacaaatttacaagaaaaaaacaaacaaccccatcaaaaagtgggtgaaggacatgaacagatacttctcaaaagaagacatttatgcagccaaaaaacacatgaaaaaatgctcaccatcactggccatcagagaaatgcaaatcaaaaccacaatgagataccatctcacaccagttagaatggcgatcattaaaaagtcaggaaacaacaggatggtgactaataggtactcaatgtatatttgccgagagaacaagccagaaaatacaactagaattgaatgctcagatactgaagaggggactggggtgggggccatggaagtagcagacctggatctagcactcagcagggcctacttctgtctcaaaagcttcaaaagggtggagggggcaggagacagtttcaatgagctgaagagtgagtgggaagaggagactgagtgtagagaacttgcaaagcagattgtcaatgaaagcaaaggcagaaaagatacagtaattgaaggagaatttatgtcataa

SEQ ID NO: 119550 - DNA, 2629 bp, Homo sapiens; identical to SEQ ID NO: 118554

SEQ ID NO: 119551 - DNA, 2285 bp, Homo sapiens
acagatcaaccagacagaaagttaacaaggatatccaggacttgaactcagctctgcaccaagcggacctaatagacatctacagaactctccaccccaaatcaacagaatatacatttttttcagcaccacaccacacctgttccaaaattgaccacatagttggaagtaaagcactgctcagcaaatgtaaaagaacagaaattatcagaaactatctctcagaccacagtgcaatcaaactagaactcaggattaagaaactcactcaaaaccactcaactacatggaaactgaacaacctgctcctgaatgactactggatgcagaaaaggcctttgaaaattcaacaatgcttcatgctaaaaactctcaataaattaggtattgatgggacgtatctcaaaataataagagctatctatgacaaacctacagccaatatcatactgaatgggcaaaaactggaagcattccttttgaaaactggcacaagacagggatgccctctctcaccactcctattgaacgtagtgttggaagttctggccagggcaatcaggcaggagaaggaaataaagggcattcaattaggaaaagaggaagtcaaactgtccctgtttgcagatgacatgattgtatatctagaaaaccccatcgtctcagcccaaaatctccctaagttgataagcaacttcagcaaagtctcaggatacaaaatcaatgtgcaaaaatcacaaacattcttatacaccaataacagacaaacagagagccaaatcatgagtgaactcccattcacaattgcttcaaagagaataaagtacctaggaatccaacttacaagggatgtgaaggacctcttcaaggagaactacaaaccactgctcaaggaaataaaagaggatacaaacaaatggaagaacattccatgctcatgggtaggaagaatcaatatcgtgaaaatggccatactgcccaaggtaatttacagattcaatgccatccccatcaagctaccaatgactttcttcacagaattggaaaaaactactttaaagttcatatggaaccaaaaaagagcctgcatcgccaagtcaatcctaagccaaaagaacaaagctggaggcatcacactacctgacttcaaactatactacaaagctacagtaaccaaaacagcatggtactggtatcaaaacagagatatagatcaatggaacagaacggagccctcagaaataacgccgcatatctacaactgtctgatctttgacaaacctgagaaaaacaagcaatggggaaaggattccctatttaataaatggtgctgggaaaactggctagccatatgtagaaagctgaaactagatcccttccttacatcttatacaaaaatcaattcaagatgtattaaagacttaaatgttagacctaaaaccataaaaaccctagaagaaaacctaggcattaccattcaggacataggcatgggcaaggacttcatgtctaaaacaccaaaagcaatggcaacaaaagccaaaattgacaaatgggatctaattaaactaaagagcttctgcacagcaaaagaaactaccatcagagtgaacaggcaacctacaaaatgggagaaaattttcgcaacctactcatctgacaaagggctgatatccagaatctacaatgaactcaaacaaatttacaagaaaagaacaaacaaccccatcaaagagtgggcaaaggacatgaacagacacttctcaaaagaagacatttatgcagccaaaaaacacatgaaaaaatgctcaccatcactggccatcagagaaatgcaaatcaaaaccacaatgagataccatctcacaccagttagaatggcaatcattaaaaaggcaggaaacaacaggtgctggagaggatgtggagaaataggaacacttttacactgttggtgggactgtaaactagttcaaccattgtggaagtcagtgtggcgattcctcagggatctagaactagaaataccatttgacccagccatcccattactgggcatatacccaaaggactgtaaatcatgctgctataaagacacatgcacacaatgtatgttagtgaagctaagtgtagtcaaaggattgattctggaatcacaaatccaggttcctgatagtaagcaacagaaactaacaaaagctagtgtaagcaaaaatgatgatgatgatgatgatgatgatgatgatgatgatgatggaatgctttggaggagctctctgaattga

SEQ ID NO: 119552 - DNA, 1248 bp, Homo sapiens
atggataaattcctcaacacatacactctcccaagactaaaccaggaagaagttgaatctctgaatagaccaataacaggagctgaaattgtggcaataatcaatagcttaccaaccaaaaagagtccaggaccagatggattcagagccgaattctaccagaggtacaaggaggaactgctgataagcaactttggcaaagtctcaggatacaaaatcaatgtacaaaaatcacaagcattcttatacaccaataacagacaaacagagagccaaatcatgagtgaactcccattcacaattgcttcaaagagaataaaatacctaggaatccaacttacaagggatgtgaaggacctcttcaaggagaactacaaaccactgctcaatgaaataaaagaggatacaaacaaatggaagaacattccatgctcatgggtaggaagaatcaatatcgtgaaaatggccatactgcccaaggtaatttatagattcaatgccatccccatcaacctaccaatgactttcttcacagaattggaaaaaacgactttaaagttcatatggaaccaaaaaagagcccacatcaccaagtcaatcctaagccaaaagaacaaagctggaggcatcaccctacctgacttcaaactatactacaaggctacagtaaccaaaacaggatggtactggtaccaaaacagagatatagatcaatggaacggaacagagccctctgaaataatgccgcatatctacaactatctgatctttgacaaacctgagaaaaacaagcaatggggaaaggattccctatttaataaatggtgctgggaaaactggctagccatatgtagaaagctgaaactggatcccttccttacaccttatacaaaaattaattcaagatggattaaagacttaaatgttagacctaaaaccataaaaaccctagaagaaaacctaggcaataccattcaggacataggcatgggcaaggacttcatgtctaaaacaccaaaagcaatggcaacaaaagccaaaattgacaaatgggatctaattaaactaaggagcttctgcacagcagaagaaattaccatcagagatcatgaagacgccagatcctgctggcttgcattctcagaggagggaataccaggtggaattgtggccatgcggcattgtcatgaagaatatgagatttgcagctgtcatggcaaggaaaccctggagcttcagagattttag

SEQ ID NO: 119553 - DNA, 1143 bp, Homo sapiens
atgaaggaaactgtggcacatgctattgcatggatgcaccttgaagagattatgctaagtgagggattttactttgtaataatctcccatgagaactggccaaacagctgtgaaggcaagagagagctacaagaggcaatcatatttttcaaagcagggcaacaagagagtgaagctggtcaaaatgaatcttttctgcatttcgctgtgttggaagttctggccagggcaattaggcaggagaaggaaataaagggtattcaattaggaaaagaggaagtcaaattgtccctgttcgcagacgacatgattgtatatctagaaaactccattgtctcagcccaaaatctccttaagctgataagcaacttcagcaaagtctcaggatacaaaatcaatgtacaaaaatcacaagcattcttatacaccaacaacagacaaacagagagccaaatcatgagtgaactcccattcacaattgcttcaaagagaataaaatacctaggaatccaacttacaagggatgtgaaggacctcttcaaggagaactacaaaccaatgctcaaggaaataaaagaggacacaaacaaatggaagaacattccatgctcatggttaggaagaatcaatatcgtgaaaatggccatactgcccaaggtaatttacagatttaatgccatccccatcaagctaccaatgcctttcttcacagaattggaaaaaactactttaaagttcatagggaaccaaaaaagagcccacattgccaagtcaatcctaagccaaaagaacaaagctggaggcatcacactacctgacttcaaactatactacaaggctgcagtaaccaaaacagcatgcgctcaggctctacagtcagcaggtggcaaatcctgtcatgcctctgtgcttcccttcagggcactgaaggcccccaggccctgggagggctctatggatagcttatatgagccaatcccagagcaacaagctaaccaagaaaacatgtctagtagaactgattctcctatcccaccctttggagagagtgaacaaacaccaaacaatctcttcgtgcctactcaatgtgaagatgacaggaataaagacctttatgatgatccacttccacttactgaataa

SEQ ID NO: 119554 - DNA, 1185 bp, Homo sapiens
  misc_feature (1)...(1185): n = a,t,c or g
atgtcgtacagcagcaagtctgctttgcacttgaaaatccttcaggcaggacaggaggttcttaagtgtgacaatctaaaaacttgtcacacttcacatggatctgtcatggcggaaacagcggttatcaatcacaagaaacgtaaaaatagcccgcgaatcgtccagtcaaacgacctcactgaggcggcatatagtctctcccgggatcaaaaacgtatgctgtatctgttcgttgaccagatcagaaaatctgatggcaccctacaggaacatgacggtatctgcgagatccatgttgctaaatatgctgaaatattcggattgacctctgcggaagccagtaaggatatacggcaggcattgaagagtttcgcggngaaggaaagtgttttttatcgccctgaagaggatgccggcgatgaaaaaagctatgaatcttttccttggtttatcaaacgtgcgcacagtccatccagagggctttacagtgtacatatcaacccatatctcattcccttctttatcgggttacaagacccggttacgcagtttcggcttagtgaaacaaaagaaatcaccaatcctgttggaagttctggccagggaaatcaggcaggagaaggaaataaagggtattcaattaggaaaagaggaagtcaaattgtccctgtttgcagatgacatgattgtatatctagaaaaccccattgtctcagcccaaaatctccttaagctgataagcaactttagcaaagtctcaggatacaaaatcaatgtacaaaaatcacaagcattcttatacaccaacaacagacaaacagagagccaaatcatgagtgaactcccattcacaattgcttcaaagagaataaaatacctaggaatccaacttacaagggatgtgaaggacctcttcaagcagaactacaaaccactgctcaatgaaataaaagaggatacaaacaaatggaagaacattccatgctcatgggtaggaagaatcaatatcgtgaaaatggccatactgcccaaggaacgcagctcctcaccagcaacggaacaaagctggatggagaatgactttgatgagttgagagaagaaggcttcagacgatcaaacttctccgagctaaaggagaaagttcgaacccatcacaaacaagataaaaaccttgaaaaaag

SEQ ID NO: 119555 - DNA, 3159 bp, Homo sapiens
atgttggaagttctggcctgggcagttaggcaggagaaggaaataaagggtattcaactaggaaaagaggaagtcaaattgtccctgtttgcagacaacatgactgtatatctggaaaaccccatcgtctcagcccaaaatctccttaagctgataagcaacttcagcaaagtctcaggatacaaagtcagtggacaaaaatcacaagcattattatacaccaataacagacaaacagagagccaaatcatgagtgaactcccattcacaattgcttcaaagagaataaaatacctaggaatccaccttacaagggatgtgaaggacctcttcaaggagaactacaaaccactgctcaaggaaataaaaaaggatacaaacaaatggaagaacattccatgctcatgggtaggaagaatcaatatcgtgaaaatggccatactgcccaaggacatcatccaggagaacttccccaatctagcaaggcaggccaacattcagattcaggaaatacggaaaacaccacaaagatattcctcgagaagagcaactccaagacacataattgtcagattcaccaaagttgaaatgaaggaaaaaatgttaagggccgccagagagaaagcatcacaccacacctattccaaaattgaccccatacttggaagtaaacctctcctcagcaaatgtaaaagaacagaaattataacaaactatctctcagaccacagtgcaatcaaactagaattcaggattaagaatctcactcaaaactgctcaactacgtggaaaccaaacaacctgctcctgaacgactactgggtacataacgaaatgaaggcagaaataaagatgttctttgaaaccaacgagaacaaagacacaacataccagaatctctgggacacattcaaagcagtgtgtagagggaaatttatagcaacaaatgcccataagaggaagcaggaaagatccaaagttgacaccctaacatcacagttaaaagaactagaaaagcaagagcaaacacattcaaaagctagcagaaggcaagaaataactaaaatcagagcagaactgaaggaaatagagacacagaaaacccttcaaaaaattaatgaatccaggagctggttttttgaaaggatcaacaaacttgacagacctctagcaagactagtaaagaaaaaaagagagaagaatcaaatagatgcaataaaaaatgataaaggggatatcaccaccaatcccacagaaatacaaactaccatcagagattattacaaacacctctatgcaaataaactagaaaatctagaagaaatggataaattcctggacacatacactctcccaagactaaaccaggaagaagttgaatctctgaatagaccaataacaggatctgaaattgtggcaataatcaatagcttaacaaccaaaaagagtccaggaccagatggattcacagccgaattctaccagagggcaattaggcaggagaaggaaataaagggtattcaattaggaaaagaggaagtcaaattgtccctgtttgcagatgacatgattgtatatctagaaaaccccattgtctcagcccaaaatctccttaagctgataagcaacttcagcaaagtctcaggatacaaaatcaatgtacaaacatcacaagcattcttatacaccaacaacagacaaacagagagccaaatcatgagtgaactcccattcacaattgcttcaaagagaataaaatacctaggaatccaacttacaagggatgtgaaggacctcttcaaggagaactataaaccactgctcaatgaaataaaagaggatacaaagaaattgaagaacattccatgctcatgggtaggaagaatcaatatcgtgaaaatggccatactgcccaaggtaatttacagattcaatgccatccccatcaagctaccaatgactttcttcacagaattaaaaaaaactactttaaatttcatatggaaccaaaaaaagagcccacatcgccaagtcagcctaagccaaaagaacaaagctggaggcatcacactacctgacttcaaactatactacaaggctacagtaaccaaaacagcatggtactggtaccaaaacagagatacagatcaatggaacagaacagagccctcagaaataatgccgcgtatctacaactatctgatctttgacaaacctgagaaaaacaagcaatggggaaaggattccctgtttaataaatggtgctggaaaaactggctagccatatgtagaaagctgaaactggatcctttccttacaccttatacaaaaattaattcaagatggattaaagacttaaacattagacctaaaaccataaaaaccctagaagaaaacctaggcattaccattcaggacataggcatgggcaaggacttcatgtctaaaacaccaaaagcaatggcaacaaaagccaaaattgacaaatgggatctaattaaactaaagagcttctgcacagcaaaagaaactaccaacagagtgaacaggcaacctacaaaatgggagaaaatttttgcaacctactcatctgacaaagggctaatatccagaatctacaatgaactcaaacaaatttacaagaaaaaaacaaacaaccccatcaaaaagtgggcgaaggacatgaacagacacttctcaaaagaagacatttatgcagccaaaaaacacatgaaaaaatgctcatcatcactggccatcagagaaatgcaaatcaaaaccacaatgagataccatctcacactagttagaatggcaatcattaaaaagtcaggaaacaacaggtgctggagaggacgtggagaaataggaacacttttacactgttggtgggactgtaaactagttcaatcattgtggaagtcagtgtggcaattcctcagggatctagaactggaaataccatttgacccagccatcccattactgggaaaactgtctcataaattagggaagtgctcaattacaagcctgacagagattgattttggttctgctgttggtcactaccagcaagtgaaggccgcagaaaccacaactccagctaatgctggaatcgcttcagaggtgctcactgaacaagtgttcattaagaagtga

SEQ ID NO: 119556 - DNA, 2516 bp, Homo sapiens
aaatacaaactaccatcagtgaatactacaaacacctctacacaaataaactagaaaatctagaagaaatggataaattccttgacacatacactctcccaacactaaaccaggaagaagttgaatctctgaatagaccaataacaggagctgaaattgtggcaataatcaatagcttaccaacgaaaaagagtccaggaccagatggattcacagccgaattctaccagaggtacaaggaggaactggtaccattccttctgaaactattccaatcaatagaaaaagagggaatcctccctaactcattttatgaggccagcatcattctgataccaaagtcaggcagagacacaacaaaaaaagagaattttagaccaatatccttgatgaacattgatgcaaaaatcctcaataaaatactggcaaaccgaatccagcagcacatcaaaaagcttatccaccatgatcaagtgggcttcattcctgggatgcaaggctggttcaatatacgcaaatcaataaatataatccagcatataaacagagccaaagacaaaaaccacatgattatctcaatagatgcagaaaaagcctttgacaaaattcaacaacccttcatgctaaaaactctcaataaattagctgataagcaacttcagcgaagtctcaggatacaaaatcagtgtacaaaaatcacaagcattcttatacaccaacaacagacagagagccaaatcatgagtgaactcccattcacaattgcttcaaagagaataaaatacctaggaatccaacttacaagggatgtgaaggacctcttcaaggagaactacaaaccactgctcaaggaaataaaagaggatacaaacaaatggaagaacattccatgctcatgggtaggaagaatcaatatcgtgaaaatggccatactgcccaaggcaatttacagattcaatgccatccccatcaagctaccaatgactttcttcacagaattggaaaaaactactttaaagttcatatggaaccaaaaaagagcccgcatcgccaagtcaatcctaagccaaaagaacaaagctggaggcatcacactacctgacttcaaactatactacaaggctacagtaaccaaaacagcatggtactggtaccaaaacagagatatagatcaatggaacagaacagagccctcagaaataacgccgcatatctacaactatctgatctttgacaaacctgagaaaaacaagcaatggggaaaggattccctatttaataaatggtgctgggaaaactggctagccatatgtagaaagctgaaactggatcccttccttacaccttatacaaaaatcaattcaagatggattaaagacttaaatgttggacctaacaccataaaaaccctagaagaaaacctaggcattaccattcaggacataggcacgggcaaggacttcatgtctaaaacaccaaaagcaatggcaacaaaagccaaaattgacaaacgggatctaattaaactaaacagcttctgcacagcaaaagaaactaccatcagagtgaacaggcaacctacaaaatgggagaaaattttcacaacctactcatctgacaaagggctaatatccagaatctacaatgaactcaaacaaatctacaagaaaaaaacaaacaaccccatcaaaaagtgggcgaaggacatgaacagacacttctcaaaagaacacatttatgcagccaaaaaacacatgaaaaaatgctcaccatcactggccatcagagaaatgcaaatcaaaaccacaatgagataccatctcacaccagttagaatggcaatcattaaaaagtcagaaaacaacagccttctagcagcaggaggaggaaaccgtcgaactgccaatgtggtggcccacgggtttgccaatcttttaactctagacaaaaagaccctccaagaaattctagtgcattatccagattctgaaaggatcctcatgaagaaagccagagtgcttttaaagcagaaggctaagaccgcagaagcaacccctccaagaaaagatcttgccctcctcttcccaccgaaagaagagacacccaaactgtttaaaactctcctaggaggcacaggaaaagcaagtcttgcaagactactcaaattgaagcgagagcaagcagctcagaagaaagaaaattctgaaggaggagaggaagaaggaaaagaaaatgaagataaacaaaaagaaaatgaagataaacaaaaagaaaatgaagataaaggaaaagaaaatgaagataaagataaaggaagagagccagaagagaagccactggacagacctgaatgtacagcaagtcctattgcagtggaggaagaaccccactcagttagaaggacagttttacccagagggacttctcgtcaatcactcattatcagcatggctccttctgctgagggcggagaagaggttcttactattgaagtcaaagaaaaggctaagcaataa

SEQ ID NO: 119557 - DNA, 2466 bp, Homo sapiens
atgggagactttaacaccccactgtcaacattagacagatcaacgagacagaaagccaacaaggatacccaggaattgaactcagctctgcaccaagtggacctaatagacatctacagaactctccaccccaaatcaacagaatatacattcttttcagcaccacaccacacctattccacaactgaccacatacttggaagtaaagctctcctcagcaaatgtagaagaacagaaattataacaaactatctctcagaccacagtgcaatcaaactagaactcagaattaagaatctcactcaaaaccgctcaactacatggaaactgaacaacctcctcctgaatgactacggggtgcataatgaaatgaaggcagaaataaagatgttctttgaaaccaatgagaacaaagacacaacataccagaatctctgggacacattcaaagcagtgtgtagagggaaatttatagcactaaatgcccacaagagaaagcaggaaagatccaaaattgacaccctaacatcacaattaaaagaactagaaaagcaagagcaaacacattcaaaagctagcagaagacaagaaataactaaaatcagagcagaactgaaggaaatagagacacaaaaaacccttcaaaaaattaatgaatccaggagctggttttttgaaaggatcaacaaaatagatagactgctagcaagactaataaagaaaaaaagagagaagaatcaaatagatgcaataaaaaatgataaaggggatatcaccactgatcccacagaaatacaaactaccatcagagaatactacaaacacctctacgcaaataaactagaaaatctagaagaaatggataaattcctgcacacatacactctcccaagactaaaccaggaagaagttgaatctctgaatagaccaataacaggatctgaaattgtggcaataatcaatagcttaccaaccaaaaagagtccaggaccagatggattcacagccgaattcgaccagaggtacaaggaggaactggtaccattccttctgaaactattccaatcaatagaaaaagagggaatcctccctaactcattttatgaggccagcatcatcctgatacgaaagcctggcagagacacaaccaaaaaagagaattttagaccaatatccttgatgaacactgatgcaaaaatcctcaataaaatactggcaaaacgaatccagcagcacatcaaaaagcttatccaccatgatcaagtgggcttcatccctgggatgcaaggctggttcaatatacacaaatcaataaatgtaatccagcatataaacagagccaaagacaaaaaccacatgattatctccatagatgcagaaaaggcctttgacaaaattcaacaacccttcatgctaaaaactctcagtaaattaggtattgacgggacatatttcaaaataataagagctatctatgacaaacccacagccaatatcatactgaatgggcaaaaactggaagcattccctttgaaaactggcacaagacagggatgccctctctcaccactcctattcaacatagtgttggaagttctggccagggcaattaggcaggagaaggaaataaaggggaacttcagcaaagtctcaggatacaaaatcaatgtacaaaaatcacaagcattcttatacaccaacaacagacaagcagagagccaaatcatgagtgaactcccattcacaattgcttcaaagagaataaaatacctaggaatccaacttacaagggatgtgaaggacctcttcgaggagaactacaaaccactgctcaatgaaataaaagaggatacaaacaaatggaagaacattccatgctcatgggtaggaagaatcaatatcgtgaaaatggccatactgcccaagatggctgcattatccagattgggtaacgattatcgcccaacaagtgcttatgaacgtggtcagcgttatgcaagccgattgcagaatgaatttgctggaaatatttctgcgctggctgatgcggaaaatatttcacgtaagattattacccgctgtatcaacaccgccaaattgcctaaatcagttgttgctcttttttctcaccccggtgaactatctgcccggtcaggtgatgcacttcaaaaagcctttacagataaagaggaattacttaagcagcaggcatctaaccttcatgagcagaaaaaagctggggtgatatttgaagctgaagaagttatcactcttttaacttctgtgcttaaaacgtcatctgcatcaagaactagtttaagctcacgacatcagtttgctcctggagcgacagtattgtataagggcgataaaatggtgcttaacctggacaggtctcgtgttccaactgagtgtatagagaaaattgaggccattcttaaggaacttgaaaagccagcaccctga

SEQ ID NO: 119558 - DNA, 1221 bp, Homo sapiens; identical to SEQ ID NO: 119269

SEQ ID NO: 119559 - DNA, 4497 bp, Homo sapiens
atgggagactttaacaccccactgtcaacattagacagatcaacaagacagaaagtcaacaaggatacccaggaattgaactcagctctgcaccaagtggacctaatagacatctacagaattctccaccccaaatcaacagaatatacatttttttcagcaccacaccacacctattccaaaattgaccacatacttggaagtaaagctctcctcagcaaatgtgaaagaacagagattataacaaactatctctcagaccacagtgcaatcaaactagaactcaggattaagaatctcactcaacactgctcaacttcatggaaactgaacaaactgctcctgaatgactactgggtacataacgaaatgaaggcagagataaagatgttctttgaaaccaatgagaacaaagacacaacataccagaatctctgggatgcattcaaagcagtgtgtagagggaaatttatagcactaaacgcccacaagagaaagcaggaaagatccaaaattgacaccctaacatcacaattaaaagaactagaaaagcaagagcaaacacattcaaaagctagcagaagtcaacaaataactaaaatcagagcagaactgaaggaaatagagacacaaaaaacccttcaaaaaattaatgaatccaggagcttgttttttgaaaggatcaacaaaattgatagactgctagcaagactaataaagaaaaaaagagagaagaatctaatagacgcaataaaaaatgataaaggggatatcaccaccgatcccacagaaatacaaactgccatcagagaatattacaaacacctctacgcaaataaactagaaaatctagaagaaatggataaattccttgacacatacaccctcccaagactaaaccaggaagaagttgaatctctgaatagaccaataacaggatctgaaattgtggcaataatcaatagcttaccaaccaaaaagaatccaggaccagatggattcacagccgaattctaccagaggttcaaggaggaactgcatataaagagagccaaagacagaaaccacatgattatctcaatagatgcagaaaaagcctttgacaaaattcaacaacccttcatgctaaaaactctcaataaattaggtattgatgggacatatttcaaaataataagagctatctatgacaaacccacagccaatatcatactgaatgggcaaaaactggaagcattccctttgaaaactggcacaagacagggatgccctctctcaccactcttattcaatatagtgtttgaagttctggccagggcaattaggcaggagaaggaaataaagggtattcaattaggaaaagaggaaatcaaattgtctctgtttgccgatgacatgattgtatatctagaaaaccccattgtctcagcccaaaatctccttaagctgataagcaacttcagcaaagtctcaggatacaaaatcaatgtacaaaaatcacaagcattcttatacaccaacaacagacaaacagagagccaaatcatgagtgaactcccattcacaattgcttcaaagagaataaaatacctaggaatccaacttacaagggatgtgaaggacctcttcaaggagaactacaaaccactgctcaaggaaataaaagaggatacaaacaaatggaagaacattccatgctcatgggtaggaagaatcaatatcgtgaaaatggccatactgcccaagctaccaatgcctttcttcacagaattggaaaaaactactttaaagttcatatggaaccaaaaaagagcctgcatcaccaagtcaatcctaagccaaaagaacaaagctgaaggcatcacactacctgacttcaaactatactacaaggctacagtaaccaaaacagcatggtactggtaccaaaacagagatatagatcaatggaacagaacagagccctcagaaataatgccacatatctacagctatctgatatttgacaaacctgagaaaaacaagcaatggggaaaggattccctatttaataaatggtgctgggaaaactggctagccatatttagaaagctgaaactggatcccttccttacaccttatacaaaaatcaattcaagatggattaaagacttaaacgttagacctaaaaccataaaaaccctagaagaaaacctaggcattaccattcaggacataggcatgggcaaggacttcatgtctaaaacaccaaaagcaatggcaacaaaagccaaaattgacaaatgggatctaattaaactaaagagcttctgcacagccaaagaaactaccatcagagtgaacaggcaacctacaaaatgggagaaaattttcgcaacttactcatctgacaaagggctaatatccagaatctacaatgaactcaaagaaatttacaagaaaaaaacaaacaaccccatcaaaaagtgggcaaaggacatgaacagacacttctcaaaagaagacatttatggagccaaaaaacacatgaaaaaatgctcatcatcactggccatcagagaaatgcaaatcaaaaccacaatgagatatcatctcacactagttagaatggcaatcattaaaaagtcaggaaacaacagtcttgctagtggtctatcaattgacaaaattcaacaacccttcatgctaaaaactctcaataaattaggtattgatgggacgtatttcaaaataataagagctatctatgacaaacccacagccaatatcatactgaatgggcaaaaactggaagcattccctttgaaaactggcacaagacagggatgccctctctcaccgctcctattcaacatagtgttggaagttctggccagggcaatcaggcaggagaaggaaataaagggtattcaattaggaaaagaggaagtcaaattgtccctctttgcagacgacatgattgtttatctagaaaaccccatcgtctcagcccaaaatctccttaagctgataagcaacttcagcaaagtctcaggatacaaaatcaatgtacaaaaatcacaagcattcttatacaccaacaacagacaaacagagagccaaatcatgagtgaactcccattcacaattgcttcaaagagaataaaatacctaggaatccaacttacaagggatgtgaaggacctcttcaaggagaactacaaaccactgctcaaggaaataaaagaggatacaaacaaatggaagaacattccatgctcatgggtaggaagaatcaatatcgtgaaaatggccatactgcccaaggtaatttatagattcaatgccatccccatcaagctaccaatgactttcttcacagaattggaaaaaactactttaaagttcatatggaaccaaaaaagagcccgcattgccaagtcaatcctaagccaaaagaacaaagccggaggcatcacactacctgacttcaaactatactacaaggctacagtaaccaaaacagcatggtactggtaccaaaacagagatatagatcaatggaacagaacagagccctcagaaataacgccgcttacctacaactatctgatctttgacaaacctgagaaaaacaagcaatggggaaaggattccctatttaataaatggtgctgggaaaactggctagccatatgtagaaagctgaaactggatcccttccttacaccttatacaaaaatcaattcaagatggattaaagatttaaacgttagacctaaaaccataaaaaccctagaagaaaacctacgcattaccattcaggacatagggatgggcgaggacttcatgtccaaaacaccaaaagcaatggcaacaaaagccaaaattgacaaatgggatctaattaaactaaagagcttctgcacagcaaaagaaactaccatcagagtgaacaggcaacctacaaaatgggagaaaattttcgcaacctactcatctgacaaagggctaatatccagaatctacaatgaactcaaaccaatttacaagaaaaaaacaaacaaccccatcaaaaagtgggcgaaggacatgaacagacacttctcaaaagaagacatttatgcagccaaaaaacacatgaaaaaatgctcatcatcactggccatcagagaaatgcaaatcaaaaccacaatgagatatcatctcacaccagttagaatggcaatcattaaaaagtcaggaaacaacagaagtaaagacataaaagatagagaagatcctttggcttatggagtttttgctccagtcgtaagggtggaatcaagtttacaggaaggaagctggtgggtttcattttggacagaacgaggacgagctatgtgggagaacattcaaatagagctaggattcaggaagaagcaggacccaggatgccaccttacgtggaaatgtggatactacttctatgatggacgaagaggaggaagttgtttgcagatgcaactgactctgtag

SEQ ID NO: 119560 - DNA, 2827 bp, Homo sapiens
atggccaggacaagttacgggcagcacttcttcccaaccctcatttccatgaatatagacagtggtaggcagaataatggcatccccaaattgtccacatcctactcactgaaacctatgaatacattatgttacctggtaaaaagggacttggaaggtgtgcttaagttaaggatcttgacatgggagagtagcctggattatccaggtgggcctagtgtaatcacaaaggtccttataagacagaaggagggccagagtcagagaacgagatatgacaatggaagcagaggttggagtgatgccatcgctgtaaaaaggccacaagccaaggaatgtgggtggccactagaggctggaaaaggcaaggaatggattcttagaaaggaatgcatccctgccaacaccttgatgttagcccagtgcccacccacactcagggtgggtggaagtgtctgcagtgcctggaggatgattcagaactcagatggggagaggaggaaaaggaacagaatccagcttcaggcagtaagactctcaaaagttatacatgatacttttagaaactttccaaggtttgttcattccagagagctatcaaagggagctgagaaaagctcctctttgaagaagggtttggagcaagtcattatctggacaaaatgtagacaatgtggagaaagcaggtgtacaaagaaagtggaggaacggaaagtacttcataacaccttcatcagtaccagcaccactataaccactctaggacagaagcatcaatttgctgtgaagaaatatgccagaattaccacctacctcacatcttctagggaaaatcaagggaaaggtttatgtcctcagctaaacaaaatcgctgcctctttcaccaaggggccaatcagcactgaccctgggatagcagagccctgtgcaggggtggcagatggagtgagacccctggaaaccaccatttcattctttggttctgtaaattttgagcacttttctatgcctcagatcccagaacagagtcagccagacttgtacctaccagacaggtcactgaaaatcttccacaaggaaatacaatcaaccaaagagaaaacaaaaaagaaaatggtcgaatctatcagggaaaagaaatggaaaacaaggtggttttgcacaggattaaagaattatctggccagggcaattaggcaggagaaggaaataaagggtattcaattaggaaaagaggaagtcaaattgtccctgtttgcagatgacatgattgtatatctagaaaaccccattgtctcagcccaaaatctccttaagctgataagcaacttcagcaaagtctcaggatacaaaatcaatgtacgaaaatcacaagcattcttatacaccaataacagacaaacagagagccaaatcatgagtgaactcccattcacaattgcttcaaagagaataaaatacctaggaatccaacttacaagggatgtgaaggacctcttcaaggagaactacaaaccactgctcaatgaaataaaagaggatacaaacaaatggaagaacattccatgctcatgggtaggaagaatcaatatcatgaaaatggccatactgcccaaggtaatttatagattcaatgccatccccatcaagctaccaatgactttcttcacagaattggaaaaaaactactttaaagttcatatggaacctaaaaagagcccgcattgccaactcaatcctaagccaaaagaacaaagctggaggcatcacactacctgacttcaaactatactacaaggctacagtatccaaaacagcatggtactggtaccaaaacagagatatagaccaatggaacagaacagaaccctcagaaataatgccgtacatctacaatcatctgatctttgacaaacctgagaaaaacaagcaatggggaaaggattccctatttaataaatggtgctgggaaaactggctagccatacgtagaaagctgaaactggatcccttccttacaccttacacaaaaattaattcaagatggattaaagacttacatgttagacctaaaaccataaaaaccgtagaagaaaacctaggcattaccattcaggacataggcatgggcaagcacttcttgtctaaaacaccaaaagcaatggcaacaaaagccaaaattgacaaatgggatctaattaaactaaagagcttctgcacagcagaagagactaccatcagagtgaacaggcaacctacgcaatgggagaaaatttttgcaacctactcatctgacaaagggctgatacccagaatctacaatgaactcaaacaaatttacaaggaaaaaacaaacaaccccatcaaaaagtgggcaaagaatatgaacagacacttctcaaaagaagacatttatgcagccaacagacacatgaaaaaatgctcatcatcactggctatcagagaaatgcaaatcaaaaccacaatgagataccatctcacaccagttagaatggcaatcattaaaaagtcaggaaacaacagtcttattctagtgcccctattaaaaaaagaagaacgtgctttgcagagtgacaccactacaaagccaagtagaaccagtgtccaaaggtcaccaattcaagataagcccagatttggcattcatctgaagagtccagtaaagatccagaggacatcgtgtcagttcaagtgtggcaggccaggtctcactaacacaggcctccgtaacaactgtttccatactgaccgagtggttaagttaaatattgaaagtcaaagcccttatacaaagcctgggatataa

SEQ ID NO: 119561 - DNA, 906 bp, Homo sapiens
atgagtgaactcccattcacaattgcttccaagagaataaaatacctaggaatccaacttacaagggatgtgaaggacttcttcaaggagaactacaaaccactgctcaatgaaataaaagaggaaacaaacaaatggaagaacattccatgctcatgggtaggaagaatcaatatcgtgaaaatggccatactgccccagaggttgcctcatggttttctgccaaatatgaaacttgaagttgtggataaacggaaccccaggttaattcgtgttgctacgattgtagatgttgatgaccaaagagtaaagcactcaatgacagccagctcagggtctggggtttcggcagatctcaacacagccagccagcccctatggcttctgaaaactgcactggctgtgtcttcctctgtcaaagtccatccccctgtgtcaggtttgatcttcagctcctccagaaccctgctttcctttatgggaattatgagagaagacttagggttttccaggaggcagatcctccatttccccatggctttgtccaagagtgcaggaagaagatctaagattggtcaattggatgctctttcccaggactttggcttgagggacagagactctagcaagaagggaacaggttatcccaatccagaaaatttttcctggacagaatacctggaagctactcaaaccaatgcagttcctgccaaagtttttaaaatggacagtgatgttggggagaacagaaagattctccgggatgaaagacctaattacagtcagtatactccatttagtagatgtgataatgcatcttacaaagaaaatgtgtttctacaaaagctggagagaaacacaccagatattgcagaaagatttgactgtttattactgacatattag

SEQ ID NO: 119562 - DNA, 4794 bp, Homo sapiens; identical to SEQ ID NO: 118075

SEQ ID NO: 119563 - DNA, 2234 bp, Homo sapiens
ttagcaggttcttaatcggaaagttgaaaaaggcgacacattgccatgtgcgcattttttattgcttattccgggggcggcttcaacgggaagcggccgcgcaccagcacaaagaacagcggcacgaagtaaatagccagaataatggccgatatcatgccgcccattatcccagttcccagggcatgctgaccaccggaaccggcacccgtactggttgccattcgccatgaggccgaagataaatgccagccgaggcatcataatcgggggtaaacgctgaatgcaggtcgtgagcgacacctcaaaccggtcgtggcctcttttggttctcttgggcagtatggccattttcacgatattgattcttcctacctacgagcatggaatgttcttccgtttgtttgtatcctcttttatttcattgagcagtggtttgtagttctccttgaggaggtccttcacatcccttgtaagttggattcctaggtattttattctctttgaagcaataacagaatgggagttcactcatgatttggctctctgtttgtctgttattggtgtataagaatgcttgtgatttttgtacattgattttgtatcctgaggagtttgctgaagtcgcttatcagttgatcatggtggataagctttttgatgtgctgctggattcgttttgccagtattttattgaggatttttgcatcaatgttcatcaaggatattggtctaaaattctcttttttggttgtgtctctgcccggctttggtatcaggatgatgctggcctcataaaatgtgttggggaggagttgctctttttctattgtttggaaccatttcagaaggaatggtaccagctcctctctgtacctctggtagaatttggctgtgaatccgtctggtcctgggctttttttggctgggacatggatgaagctggaaaccatcattctcagcaaactaacacaccaacagaaaaccgaacagcacatcttctcactcataagtgggaattgaacaatgaaaacacatggacacatggagggaaacatcacacaccagggcctgttgggggatgttcacttatccaagtggaaatcagatggtttatcgaaatggtatgtaagagagaagtttacagatacgaccattcatggtggtggcagttgcagcaacagcagcaggatccccagggcagactgcaggcctctgggggctgggctctcagaagggtgccaggccacagccaaaatgctcaggcagaagcaaggtggctgtactgtgagcctagggaaggcaggtcccccttagcgggaacagtgaaagcaagggtgctcaatgtgcttgctcctttaccctgcagcagcagcagccgtgatacacatttttgggcttcctcaggcatgagccaaatatcagacactctatccctcaaactccaagagaccctcacgttcctcaacatccttctcttccaaagaaagggagaggggaagaacagcatgtcaacaacactctccaaagaattcctgactctcagcttctttgacttcaacctgtttcaaaactcaatgttggaagttctggccagggcaattaggcaggagaaggaaataaagggtattcaattaggaaaagaggaagtcaaattgtccctgtttgcagatgacatgattgtatatctagaaaacccccttgtctcagcccaaaatctccttaagctgataagcaacttcagcaaagtctcagaatacaaaatcaatgtacaaaaatcacaagcattcttacacaccaataacagacaaacagagagccaaatcatgagtgaactccccttcacaattgcttcaaagagaataaaatacctaggaatccaacttacaagggatgtgaaggacctcttcaaggagaactacaaaccactgctcaatgaaataaaagaggatacaaacaaatggaagaacattccatgctcatgggtaggaagaatcaatatcgtgaaaatggccatactgcccaaggtaatttatagattcaatgccatcctcatcaagctaccaatgactttcttcacagaattggaaaaaactactttaaagttcatatggaaccaaaaaagagcccacgtcgccaagtcaatcctaagccaaaagaacaaagctggaggcatcacactacctgacttcaaatacaaggctacagtaaccaaaacagcatggtatatataa

SEQ ID NO: 119564 - DNA, 4131 bp, Homo sapiens; identical to SEQ ID NO: 118110
  misc_feature (1)...(4131): n = a,t,c or g

SEQ ID NO: 119565 - DNA, 4911 bp, Homo sapiens
atgaaggcagaaataaaaatgttctttgaaaccaacgagaacaaagacacaacataccagaatctctgggacgcattcaaagcagtgtgtagagggaaatttatagcactaaatgcccacaagagaaagcaggaaagatccaaaattgacaacctaacatcacaattaaaagaactagaaaagcaagagcaaacacattcaaaagctagcagaaggcaagaaataactaaaatcagagcagaactgaaggaaatagagacacaaaaaacccttcaaaaaatcaatgaatccaggagctggttttttgaaaggatcaacaaaattgatagaccgctagcaagactaataaagaaaaaaagagagaagaatcaaatagacacaataaaaaatgataaatgggatatcaccaccgatcccacagaaatacaaactaccatcagagaatactacaaacacctctacgcaaataaactagaaaatctagaagaaatggataaattcctcgacacatacactctcccaagactaaaccaggaagaagttgaatctctgaatagaccaataacaggatctgaaattgtggcaataatcaatagcttaccaaccaaaaagagtccaggaccagatggattcacagccgaattctaccagaggtacaaggaggaactggtaccattccttctgaaactattccaatcaataggaaaagagggaatcctccctaactcattttatgaggccagcatcattctgataccaaagccaggcagagacacaaccaaaaaagcaaattttagaccaatatccttgatgaacattgatgcaaaaatcctcaataaaatactggcaaaacgaatccagcagcacatcaaaaagcttatccaccatgatcaacatataaacaaagccaaagacaaaaaccacatgattatctcaatagatgcagaaaaagcctttgacaaaattcaacaacccttcatgctaaaaactctcaataaattaggtattgatgggacgtatttcaaaataataagagctatctatgacaaacccacagccaatatcatactgaatgggcaaaaactggaagcattccctttgaaaactggcacaagacagggatgccctctctcaccactcctattcaacatagtgttggaagttctggccagggcaattaggcaggagaaggaaataaagggtattcaattaggaaaagaggaagtcaaatttgtccctgttggcagatgacatgatggtatatcttagaaaatcccaatgtctcagccccaaaatcttctttaaggctggttaagcaacttcagcaaaagtcttcaggttacaaaatcaatgtgcaaaaatcacaagcattcttatacaccaacaaaagacaaacagagagccaaatcataagtgaattcccattcacaattgcttcaaagagaataaaatacctaggaatccaacttacaagggatgtgaaggacctcttcaaggagaactacaaaccactgctcaaggaaataaaagaggatacaaacaaatggaagaacattccatgctcatgggtaggaagaatcaatatcgtgaaaaatggccatactgcccaaggtaatttatagatacaatgccatccccatcaagctaccaatgactttcttcacagaattggaaaaaactactttaaagttcatatggaaccaaaaaagagcctacatcaccaagtcaatcctaagccaaaaggacaaagctggaggcatcacgctacctgacttcaaactacactacaaggctacacagggtactccaacagacctgcagctgagggtcctctctgttagaaggaaaactaacacaaaggacatccacaccaaaaacccatctgtacaacaccatcatcaaagaccaaaagtagataaaaccacaaagatggggaaaaaacagaacagaaaaactggaaactctaaaaagcagagcgcctctcctcctccaaaggaacgcagttcctcaccagcaatggaacaaagctggatggagaatgactttgatgagttgagagaagaaggcttcagacgatcaaattactctgagctacgggaggacattcaaaccaaaggcaaagaagttgaaaactttgaaaaaaatttagaagaatgtataactagaataaccaatacagagaagtgcttaaaggagctgatggagctgaaaaccaaggctcgagaactacatgaagaatgcagaagcctcaggagccgatgcgatcaactggaagaaagggtatcagcaatggaagatgaaatgaatgaaatgaagcgagaagggaagtttagagaaaaaagaataaaaagaaatgagcaaagcctccaagaaatatgggactatgtgaaaagaccaaatctacgtctgattggtgtacctgaaagtgatggggagaatggaaccaagttggaaaacactctgcaggatattatccaggagaacttccccaatctagcaaggcaggccaaccatataaacagagccaaagacaaaacccacatgattatctcaatagatgcagaaaaagcctttgacaaaattcaacaactcttcatgctaaaaactctcaataaattaggtattgatgggacgtatttcaaaataataagagctatctatgacaaacccacagccaatatcatactgaatgggcaaaaactggaagcattccctttgaaaactggcacaagacagggatgccctctctcaccgctcctattcaacatagtgttggaagttctggccagggcaatcaggcaggagaaggaaataaagggtattcaattagcaaaagaggaagtcaaattgtccctgtttgcagacgacatgattgtttatctagaaaaccccatcgtctcagcccaaaatctccttaagctgataagcaacttcggcaaagtctcaggatacaaaatcaatgtacaaaaatcacaagcattcttatacaccaacaccagacaaacagagagccaaatcatgagtgaactcccattcacaattgcttcaaagagaataaaatacctaggaatccaacttacaagggatgtgaaggacctcttcaaggagaactacaaaccacttgctcaatgaaataaaagaggatacaaacaaatggaagaacattccatgctcatgggtaggaagaatcaatatcgtgaaaatggccatactgcccaaggtaatttacagattcaatgccatccccatcaagctaccaatgactttcttcacagaattggaaaaaactactttaaagttcatatgggaaccaaaaaagagcctgcatcgccaagtcaatcctaagccaaaagaacaaagctgggaggcatcacactacctgactttcaaactattacttacaaggctacagtaaccaaaacagcatggtactggtaccaaaacagagatatagatcaatggaacagaacagagccctcagaaataacactacatatctacaactatctgatctttgacaaacctgagaaaaacaagcaatggggaaaggattccctatttaataaatggtgctgggaaaactggctagccatatgtagaaagctgaaactggatcccttccttacaccttatacaaaaatcaattcaagatggattaaagacttaaacgttagacctaaaaccataaaaaccctagaagaaaagctaggcattaccattcaggacataggcattggcaaggacttcatgtctaaaacaccaaaagcaatggcaacaaaagacaaaattgacaaatgggatctaattaaactaaagagcttctgcacagcgaaagaaactaccatcagagtgaacaggcaacctacaaaatgggaggaaattttcgcaacctactcatctgacaaagggctaatatccagaatctacaatgggctcaaacaaatttacaagaaaaaaacaaacaaccccatcaaaaagtgggcgaaggacatgaacagacacttctcaaaagaagacatttatgcagctaaaaaacacgtgaaaaaatgctcatcatcactggccatcagagaaatgcaaatcaaaaccacaatgagataccatctcacaccagttagaatggcaatcattaaaaagtcaggaagcaacagatgctggagaggatgtggagaaataggaacacttttacactgttggtgggactgtaaactagttcaaccattgtggaagtcagtgtggcgattcctcagggatctagaactagaaataccatttgacccagccatcccattactgggtatatacccaaacgactataaatcatgctgctataaagacacatgcacattgagtctaccagaaatccgcaactgcccaacgaaaagtgtcccagtccccttctctgttgatgaaactcagtatcatgttgaagatactagtcctgtaagctggcaagtaaaagttctaggcaagcatatacatcagggaagcagctatgaagatgtttggctgcctcagcgcatgcaaggaaaactaacaaacagaaaggacatccacaccaaaaacccatctgtacatcaccatcatcaaagaccaaaagtagataaaaccacaaagatggggaaaaaacagaacagaaaaactggaaactctaaaaagcagagcgcctctcctcctccaaaggaacgcagttcctcaccagcaatgcaacaaagctggacggagaatgactttgacgagctgagagaagaaggcttcagacgatcaaattactctgagctacgggaggacattcaaaccaaaggcaaagaagttgaaaactttgaaaaaaatttagaagaatgtataactagaataaccaatacagagaagtgcttaaaggagctgatggagctgaaaaccaaggcttga

SEQ ID NO: 119566 - DNA, 3121 bp, Homo sapiens
atgggtaccgagcgtgcattcgaggtcatcggtacccggaactgtcagttaagaaatagtgatactgcattgctgactcacagtcagctcatgggtcactatgctgcccccattctgttgagatttcagtacactttccgtatatggagtttctgtgttgatgactccctgttggccaaagggaccccagaaaagactgaagaactgagttcgtggccattgatggaagcgagtgggcttcatccctgggatgcaaggctggttaaacatacgcgaatcagtagggaatttatagcactaaatgcctacaagagaaagcaggaaagatccaaaattgacaccctaacatcacaattaaaagaactagaaaagcaagagcaaacacattcaaaagctagcagaaggcaagaaataactaaaatcagagcagaactgaaggaaatagagacacaaaaaacccttcaaaaaatcaatgaatccaggagctggttttttgaaaggatcaacaaaattgatagaccgctagcaagactaataaagaaaaaaagagagaagaatcaaatagacacaataaaaaatgataaaggggatatcaccaccgatcccacagaaatacaaactaccatcagagaatactacaaacacctctacgcaaataaactagaaaatctagaagaaatggatacattcctcgacacatacactctcccaagactaaaccaggaagaagttgaatttctgaagagaccaatatcaggctctgaaattgtggcaataatcaatagtttaccaaccaaaaagagtccaggaccagatggattcacagccgaattctaccagaggtacaaggaggaactggtaccattccttctgaaactattccaatcaatagaaaaagagggaatcctccctaactcattttatgaggccagcatcattctgataccaaagccgggcagagacacaaccaaaaaagagaattttagaccaatatccttgatgaacattgatgcaaaaatcctcaataaaatactggcaaaccgaatccagcagcacatcaaaaagcttatccaccatgatcaagtgggcttcatccctgggatgcaaggctggttcaatatacgcaaatcaataaatgtaatccagcatataaacagagccaaagacaaaaaccacatgattatctcaatagatgcagaaaaaaagcctttgacaaaattcaacaacccttcatgctacaaactctcaataaattaggtattgatgggacgtatttcaaaataataagagctatctatgacaaacccacagccaatatcatactgaatgggcaaaaactggaagcattccctttgaaaactggcacaagacagggatgtcctctctcactgctcctattcaacatagtgttggaagttctggccagggcaatcaggcaggagaaggaaataaagggtattcaattaggaaaagaggaagtcaaattgtccctgtttgcagacgacatgattgtttatctagaaaaccccatcatctcagcccaaaatctccttaagctgataagcaacttcagcaaagtctcaggatacaaaatcaatgtacaaaaatcacaaacattcttatacaacaacaacagacaaacagagagccaaatcatgagtgaactcccattcacaattgctttaaagagaataaaatacctaggaatccaacttacaagggatgtgaaggacctcttcaaggagaactacaaaccactgctcaaggaaataaaagaggacacaaacaaatggaagaacattccatgctcatgggtaggaagaatcaatatcgtgaaaatggccatactgcccaaggtaatttacagattcaatgccatccccatcaagctaccaatgactttcttcacagaattggaaaaaactactttaaagttcatatggaaccaaaaaagagcccgcatcgccaagtcaatcctaagccaaaagaacaaagctggaggcatcacactacctgacttcaaactatactacaaggctacagtaaccaaaacagcatggtactggtaccaaaacagagatatagatcaatggaacagaacagagccctcagaaataatgccgcatatctacaactatctgatctttgacaaacctgagaaaaacaagcaatggggaaaggattccctatttaataaatggtgctgggaaaactggctagccatatgtagaaagctgaaactggatcccttccttacacgttatacaaaaatcaattcaagatggattaaagatttaaatgttagacctaaaaccataaaaaccctagaagaaaacctaggcattaccattcaggacataggcgtgggcaaggacttcatgtccaaaacaccaaaagcaatggcagcaaaagccaaaattgacaaatgggatctaattaaactaaagagcttctgcacagcaaaagaaactaccatcagagtgaacaggcaacctacaacatgggagaaaattttcgcaacctactcatctgacaaagggctaatatccagaatctacaatgaactccaacaaatttacaagaaaaaaacaaacaaccccatcaaaaagtgggcgaaggacatgaacagacacttctcaaaagaagacatttatgcagccaaaaaacacatgaaaaaaatgctcatcatcactggccatcagagacaatgcaaatcaaaaccactatgagatatcatctcacaccagttagaatggcaatcattaaaaagtcaggaaacaacagaatcagaaggcatttccagccaagatcagccatgttcttctgctgctgccctgggggcgagggctcagggctgcagtgggagctgctgctggcagcatggactgtgctcccctacccctgccctgcagccacagttgggagattcctcaagcaggcacagactgctgaccattccttcctgggccatgtttggagggtgcccagcagcaggagctggactgataaagaaatcctgagcttggtcgtcaacagacagaaccaggaagttgtgcagctcatagggggcctctgtgggacacacaccatctcgcccacacagcacccagccacgggttga

SEQ ID NO: 119567 - DNA, 5719 bp, Homo sapiens
atgagtgaactcccattcacaattgcttcaaagagaataaaatacctaggaatccaacttacaagggatgtgaaggacctcttcaaggagaactacaaaccactgctcaaggaaataaaagaggatacaaacaaatggaagaacattccatgctcatgggtagaaagaatcaatatcgtgaaaatggccatactgcccaagggattttgccgatttcggaaccaccatcaaacaggattttcgcctgctggggcaaaccagcgtggaccgcttgctgcaactctctcagggccaggcggtgaagggcaatcagctgttgcccgtctcactggtgaaaagaaaaaccaccctggcgcccaatacgcaaaccgcctctccccgcgcgttggccgattcattaatgcagctggcacgacaggtttcccgactggaaagcgggcagtgagcgcaacgcaattaatggattttgccgatttcggaaccaccatcaaacaggattttcgcctgctggggcaaaccagcgtggaccgcttgctgcaactctctcagggccaggcggaagaaagtatgaagacagtgagagaattgatcaagatttcacaggaggcacgtgaagagaaaatgaaaccagtgctcagtgacttcatcagtcggagcaggaaagattctagctttttcatcgcgggctcctttcagggcgatgaaaaaccccttccttctcggcgaaattttcaatgctgccgtatatccttactggcttccgcagaggtcaatccgaatattcaggcatatttagcaacatggatctcgcagataccgttcatgtcctgtaagggtgccatcagattttctgatctggtcaacgaacagatacagcatacgtttttgatcccggaagagactatatgccgcctcattattaggtccctcgactatagggtcaccgtcgacagcgacacacttgcatcggatgcagcccggttaacgtgccggcacggcctgggtaaccagggattttgccgatttcggaaccaccatcaaacaggattttcgcctgctggggcaaaccagcgtggaccgcttgctgcaactctctcagggccaggcggtgaagggcaatcagctgttgcccgtctcactggtgaaaagaaaaaccaccctggcgcccaatacgcaaaccgcctctccccgcgcgttggccgattcattaatgcagctggcacgacaggtttcccgactggaaagcgggcagtgagcgcaacgcaattaatagtcccccacggacggttttcaagcccaagtcgaaaacctttgcggaatttccagaagaattccccttttagcaggcaggcacctcagattcaggaaagcaggaccccccaagatactcctcgagagagcagtccaagacaaatatgtcaattcaccaaagtgaaagaagaaaaaatgtctgccctaaaagagctcctgaaggaagcactaaacatggaaaggaacaaccggagctggttttttgaaaagatcaacaaaattgatagaccactagcaagagtaataaagaagaaaagagagaagaatcaaatagacgcaataaaaaatgataaagaggatatcaccaccaatcccacagaaatacaaactatcatcagagaatactacaaacacctctacccaaataaactagaaaatctagaagaaatggatacattcctcgacacatacaccttcccaagactaaaccaggaagaagttgaatctctgaatacatcaataacaggctctgaaattgtggcaataatcagtatagcataccaaccaaaaaaagtccaggaccagatggatccacagccgaattctaccagaggtacaaggaaggagctgtgttggaagttctggccagggcaatcaggcaggagaaggaaataaagggtattcaattaggaaaagaggaagtcaaattgtccctctttgcaggtgacatgattgtatatctagaaaaccccattgtctcagcccaaaatctccttaagctgataagcaacttcagcaaagtctcaggatacaaaatcaatgtgcaaaaatcacaagcattcttatacaccaataacagacaaacagagagccaaatcatgagtgaactcccattcacaattgcttcaaagagaataaaatacctaggaatccaacttacaagggatgtgaaggacctcttcaaggagaactacaaaccactgctcaatgaaataaaagaggatacaaacaaatggaagaacattccatgctcatgggtaggaagaatcaatatcgtgaaaatggccatactgcccaaggtaatttacggattcaatgccatccccatcaagctaccaatgactttcttcacagaattggaaaaaaactactttaaagttcatatggaaccaaaaaagagcccacatcgccaagtcaatcctaagccaaaagaacaaagctaagaggcatcatgctacctgacttcaaactatactacaaggctatagtaactcaaaacagcatggtactggtaccaaaacagcatggtactggtaccaaaacagagatatagatcaatggaacagaacagagccctcagaaataacgccgcatatctacaactatctgatatttgacaaacctgacaaaaacaagaaatggggaaaggattccctatttaataaatggtgctgggaaaactggctagtcatatgtataaagctgaaactggatcccttccttacaccttatacaaaaattaattcaagatggattaaagacttaaatgttagacctaaaaccataaaaaccatagaagaaaacctaggcaataccattcaggacataggcatgggcaaggacttcatgtctgaaacactaaaagcaagggcaacaaaagccaaaattgacaaatgggatctaattaaactaaagagcttctgcacagcaaaagaaactaccatcagagtgaacaggcaacctacaaaatgggagaaaatttttgcaatctactcatctgacaaagggttaatacccagaatctacaaagaactcaaacaaatttacaagaaaaaaacaaacagccccatcaaaaagtgggtgaaggatatgaacagacacttctcaaaagaagacatttatgcagccaaaaaacacatgaagaaatgctcatcatcactggccatcagagaaatgcaaatcaaaaccgctatgagataccatctcacaccagttagaatggcaatcattaaaaagtcaggaaacaacagaatctttgatcacctgctcagctttctgctgctgctgtccttttctgctgttataccttatgatgtctttgtctttgacagttacaaaccactaattccaccaacccctccttttgaactctccacatctgtatttcaacatataatggttgtcaagaaaacaaagttacctgtcaaacagactcaggcaggtccttcaaaaggtattccagaagacgccattgttatcataggaaatgacagcttcatgcatgttactgtccctgaagacctttcagtgggacaagatgtggaggtggaagacagtgatattgaggtcaaatggccacaggaaaaaagcagcagcgcattttcagctcacctccctgtggttctgccctctccaaagcctcagaccttcaggtcctcatggcttcagcagatctccattgcctttaagccaattattcttacatttcatcttgatttattacttgttttagaagaaacattgactatggaaacgatgttagacaaaaagcaaattcaggcaattttcttattcgagttcaaaatgggtcgcaaagcagtggagacaactcgcaacatcagcaacacattgggcccagaaactgctaatgaatgtacaaagtttggcaaaggagaaaagagccttgaagataaggagcatagttgtcggccatgggaagttgacaatgaccaactgagagcaatcatcgaagttgatcctcttacagctatgagagaagtggcagaagaactcaacgtcaaccgttctacagtctttcagcatttgaagcaaattgcaagatatggtaaactctttcgaagtcctcctacatcttgggcacaatggcagacacttgagcatgtgttgtctctgttcatcgtcacaataaccttttgggtgttggaagttctggccagggcaattaggcaggagaaggaaataaagggtattcaattaggaaaagaggaagtcaaattgtccctgtttgcagatgacatgattgtatatctagaaaaccccattgtctcagcccaaaatctccttaagctgataagcaacttcagcaaagtctcaggatacaaaatcaatgtacaaaaatcacaagcattcttatacaccaacaacagacaaacagagagccaaatcatgagtgaactcccattcacaattgcttcaaagagaataaaatacctaggaatccaacttacaagggatgtgaaggacctccttcaaggagacctacaaaccactgctcaatgaaataaaagaggatacaaacaaatggaagaatattccatgctcatgggtaggaaaaatcaatatcgtgaatatggccatactgcccaaggtaacttatagattcaataccatccccatcaagctaccaatgactttcttcacagaattggaaaaaactactttcaagttcatatggaaccaaaagagagcccgcatcgccaagtcaatcctaagccaaaagaataaagctgaaggcatcatgctacctgacttcaaactatactacaaggctacagtaaccaaaacagcatggtactggtaccaaaacagagatatagatcaatggaacagaacagagccctcagaaataacgccgcatatctacaactatctgatctttgacaaacctgagaaaaacaagcaatggggaaaggattccctatttaataaatggtgctgggaaaactggctagccatatgtagaaagctgaaactggatcccttccttacaccttatacaaaaatcaattcaagatggattaaagacttaaacgttagacctaaaaccataaaaaccctagaagaaaacctaggcaataccattcagaacataggcatgggcaaggacttcatgtctaaaacaccaaaagcaatggcaacaaaagacaaaattgacaaatgggatctaattaaactaaagagcttctgcacagcaaaagaaactacaatcagagtgaacaggcaacctacaaaatgggagaaaatttttgcaacctactcatctgacaaagggctaatatccagaatctacaatgaactcaaacaaatttacaagaaaaaaacaaacaaccccatcaaaaagtggacaaaggacatgaacagatacttctcaaaagaagacatttatgcagccaaaaagcacatgaaaaaatgctcatcatcactagccatcagagaaatgcaaatcaaaaccacaatgagataccatctcacaccagttagaatggcaatcattaaaaagtcaggaaacaacagccatgctgacatcttggcccctgcactgcaaaatgtgaagaatggaggacaagatcaagagcacagaatccttcaggatacacgccaagctctgggaccatctgctcttccactgacatcttctctgtgtattcacaaaagagtatctgattag

SEQ ID NO: 119568 - DNA, 5584 bp, Homo sapiens
atgggagactttaacaccccactgtcaacattagacagatcaacgagacagaaagtcaacaaggatacccaggaattgaactcagctctgcaccaagcggacctaatagatatctaccaaactctccaccccaaatcaacagaatatacatttttttcagcaccacaccacacctattccaaaattgaccacatacttggaagtaaagctctcctcagcaaatgtaaaagaacacaaattataacaaactatctctcagaccacagtgcaatcaaactagaactcaggattaagaatctcactcaaaaccactcaactacatggaaactgaacaacctgctcctgaatgactactgggtatataacgaaatgaaggcagaaataaagatgttctttgaaaccaacgagaacgaagacacaacataccagaatctctgggatgcattcaaagcagtgtgtagagggaaatttatagcactaaatgcccacaagagaaagcaggaaagatccaaaattgacaccctaacatcacaattaaaagaactagaaaagcaagagcaaacacattcaaaagctagcagaaggcaagaaataactaaaatcagagcagaactgaaggaaatagagacacaaaaaacccttcaaaaaattaatgaatccaggagctggttttttgaaaggatcaacaaaattgatagaccgctagccagactaataaagaaaaaaagagagaagaatcaaatagacacaataaaaaatgataaaggggatatcaccaccgatcccacagaaatacaaactaccatcagagaatactacaaacacctctacgcaaataaactagaaaatctagaagaaatggataaattcctcgacacatacactctcccaagactaaaccaggaagaagttgaatctctgaatagaccaataacaggagctgaaaatgtggcaataatcaatagtttaccaaccaaaaagagtccaggaccagatggattcacagccgaattctaccagaggtacaaggaggaactgctgataagcaacttcagcaaagtctcaggatacaaaatcaatgtacgaaaatcacaagcattcttatacaccgacaacagacaaacagagagccaaatcatgagtgaactcccattcacaattgcttcaaagagaataaaatacctaggaatccaacttacaagggatgtgaaggacctcttcaaggagaactacaaaccactgctcaaggaaataaaagaggatacaaacaaatggaagaacattccatggtcatgggtaggaagaatcaatatcgtgaaaatggccatactgcccaagaggaaacagccttctgcactcacagccgaagggaaagcagcaggttggggcttcttgtggccaacttcagagcctgtcaccaggaaaggtttagaagagaacgctcagtcccggcaggagtccacgcggaggctcatccttgttgggagaacaggggccgggaagagcgccactgggaacagcatcctgggccagagacggttcttctccaggctgggggccacgtctgtgaccagggcctgcaccacgggcagccgcaggtgggacaagtgccacgtggaagtcgtggacactccggacattttcagctcccaagtgtccaagacagatcctggctgtgaggagagaggtcactgctacctgctctcggcccccggaccccacgcgctgctcctggtgacccagttgggtcggttcaccgcccaggaccagcaggcggtgaggcaggtgagggacatgttcggggaggacgtcctaaaatggatggtcatcgtcttcaccaggaaggaggacctggccgggggctccctgcacgattacgtgagcaacacagagaaccgggccttgcgcgagctggtggccgagtgcgggggccgggtctgtgcctttgataaccgggccaccggccgggagcaggaagcccaggtggagcagctgctggggatggtcgagggcttggtgctggagcacaagggcgcccattactccaacgaggtgtatgagctggcgcaggtgctgcgctgggcaggccctgaggagcggctccggcgggtggcggagcgcgtggcagccaggggagaatggacagaagaaatatttgaaaaggaaatggttaagacttttctaaaagtattgaaggacaccaaactacagatccaagaaacagagagctccaagcagggctcccctttgtcttccacaatgattggaagcctcctgaggccctcaccagaagaagatgccagcactgtgaggccctcaccagaagaagatgccagcactgtgcttcctgcacagcctgcaaactggtgggctccatcacgtgccagacagcttaccagggtcagtcacgagcccagagtcaaaccctgcaagggcttgttctggtcctctttggaccagagtgcctttctgatcctggttagcagaaactttccagaagcagagcctctgagtcatggagctttcagccccagcacatggctcctccttaactgcgtctgctcaacctccctcagccctgtgaacagcatccccgcacacagacgcagagcaggactctctctgctgccacttcaccttcctgagagaggaccagcggccagagcctcagtgactgccaccctggaggacagggcacaacaaccgtttctggagagaatgggaggattccagaggggcaaatatggaactatggctgaaggtagatcagaagataacttgtctgcaacaccaccggcattgaggattatcctagtgggcaaaacaggctgcgggaaaagtgccacagggaacagcatccttggccagcccgtgtttgagtccaagctgagggcccagtcagtgaccaggacgtgccaggtgaaaacaggaacatggaacgggaggaaagtcctggtggttgacacgccctccatctttgagtcacaggccgatacccaagagctgtacaagaacatcggggactgctacctgctctctgccccggggccccacgtcctgcttctggtgatccagctggggcgtttcactgctcaggacacagtggccatcaggaaggtgaaagaggtctttgggacaggggccatgagacatgtggtcatcctcttcacccacaaagaggacttagggggccaggccctggatgactatgtagcaaacacggacaactgcagcctgaaagacctggtgcgggagtgtgagagaaggtactgtgccttcaacaactggggctctgtggaggagcagaggcagcagcaggcagagctcctggctgtgattgagaggctggggagggagcgagagggctccttccacagcaatgacctcttcttggatgcccagctgctccaaagaactggagctggggcctgccaggaagactacaggcagtaccaggccaaagtggaatggcaggtactgcctgtagtcttcttggcaggccccagccctgcctctctggagcagctgggcatccaggaagaggttattgctgtagaaggagccctctcgctccctccccagcctctcgatcgcagccaggagctctgcctgctgctgcctctgctcctccccggcagcccggttgttgaaggcacagtaccttctctcacattcctgcaccagtgctcgggtagaaaatccacccaggccccacagaagaataacttctcaggcttcgctactatgaaaaacccatacaacccattccagagcaacatgaggaccttgctgtgtgcaaagtttcacacaatgaagcatgcaggcctgggtgaaggaatacctcctgacaactccgggaatgatggctatgctaataatgggtatagtgcccgtgaagaagaaaatgagacactcactgaaaatctgagaagcaaagtaactgctataaaatctttttccattgaaataggccatgaagttaaaacccaaaataaattattagctgtaatggattcacaatttgattctacaactggatttctagtgttggaagttctggccagggcaatcaggcaggagaaagaaataaagggtattcaattaggaaaagaggaagtcaaattgtccctgtttgcagatgacatgattgtacatttagaaaaccccatcgtctcagcccaaaatctctttaagctgataagcaacttcagcaaagtctcaggatacaaaatcaatgtgcaaaaatcacaagcattcttatacaccaataacagacaaacagagagccaaatcatgagtgaactcccattcacaattgcttcaaagagaataaaaaacctaggaatccaacttacaagggatgtgaaggacctcttcaaggagaactacaaaccactgctcaaccgaaataaaagaggacacaaacaaatggaagaacattccatgctcatggataggaagaatcaatattgtgaaaatggccatactggccaaggtaatttatagattcaatggcatccccatcaagctacaaatgactttcttcacagaattggaaaaaaactactttaaagttcatatggaaccaaaaaaagagcccgcatcgccaaggcaatcctaagccaaaagaacgaagctggaggcatcacactacctgacttcaaactatactacaaggctacagtaaccaaaacagcatggtactggtaccaaaacagagatatagatccatggaacagaacagagccctcagaaataacgcagcatatctacaactatctgatctttgacaaacctgagaaaaacaagcaacggggaaaggattccctatttaataaatggtgctgggaaaactggctagccatatgtagaaagctgaaactggatcccttccttacaccttatacaaaaatcaattcaagatggattaaagacttaaacgttagacctaaaaccataaaaaccctagaagaaaacctaggcattaccattcaggacataggcatgggcaaggacttcatgtctaaaacaccaaaagcaatggcaacaaaagacaaaattgacaaatgggatctaattaaactaaagagcttctgcatagcaaaagaaactaccatcagagtgaacaggcaacctacaaaatgggagaaaattttcacagcctactcatctgacaaagggctaatatccagaatctacaatgaactccaacaaatttacaagaaaaaaacaaaacaactgcatcaaaaagtgggcgaaggacatgaacagacacttctcaaaagaagacatttatgcagccaaaaaacacatgaaaaaatgctcaccatcactggccatcagagaaatgcaaatcaaaaccacaatgagataccatctcacaccagttagaatggcaatcattaaaaagtcaggaaacagcagagtatactccttccacttaaatataaaagttaactgtaagacagcctcaggaggtgttccaaaaggcattgttaatataggagatgacagttccatgcatgttattgcccctgaagaccttctagtgggacaggctgtggagatggaagacagatactag

SEQ ID NO: 119569 - DNA, 5377 bp, Homo sapiens
atgacaggatcaaattcacacataacaatattaactttaaatataaatggactaaattctgcaattaaaagacacagactggcaagttggataaagagtcaagacccatcagtgtgctgtattcaggaaacccatctcatgtgcagagacacacataggctcaaaataaaaggatggaggaagatctaccaagcaaatggaaaacaaaaaaaggcaggggttgcaatcctagtctctgataaaacagactttaaaccaacaaagatcaaaagagacaaagaaggccattacataatggtaaagggatcaattcaacaagaggagctaactatcctaaatatttatgcacccaatacaggagcacccagattcataaagcaagtcctgagtgacctacaaagagacttagactcccacacattaataatgggagactttaacaccccactgtcaatattagacagatcaacgagacagaaagtcaacaaggatacccaggaattgaactcagctctgcaccaagcagacctaatagacatctacagaactctccaccccaaatcaacagaatatacatttttttcagcaccacaccacacctattccaaaatcgaccacatagttggaagtaaagctctcctcagcaaatgtaaaagaacagaaattataacaaactatctctcagaccacagtgcaatcaaactagaactcaggattaagaatctcactcaaagccgctcaactacatggaaactgaacaacctgctcctgaatgactactgggtacataacgaaatgaaggcagaaataaagatgttctttgaaaccaacgagaacaaagacaccacataccagaatctctgggacgcattcaaagcagtgtgtagagggaaatttatagcactaaatgcctacaagagaaagcaggaaaagatccaaaattgacactctaacatcacaattaaaagaactagaaaagcaagagcaaacaacattcaaaagctagcagaaggcaagaaataactaaaatcagagcagaactgaaggaaatagagatacaaaaaacccttcaaaaaattaatgaatccaggagctggtttttttgaaaggatcaacaaaattgatagaccgctagcaagactaacaaagagaaaaagagagaagaatcaaatacacgcaataaaaaatgataaaggggatatcaccaaccgatcccacagaaatacacactaccatcagagaatactataaaaacctctacgcaaagaaactagaaaatctagaagaaatggataaattcctggacacataacactctcccaagactaaaccaggaagaagttgaatctctgaatagaccaataacaggagctgaaattgtggcaataatcaatagtttaccaaccaaaaagagtccaggaccagatggattcacagccgaattctaccagaggtacaaggaggaactggtaccattccttctgaaactattccaatcaatagaaaaacagggaatcctccctaactcattttatgaggccagcaccattctgataccaaagccgggcagagacacaaccgaaaaagagaattttagaccaatatccttgatgaacattgatgcaaaaatcctcaataaaatactggattcggcaaaccgaatccagcagcacatcaaaaagcttatccaacatgatcaagtgggcttcatccctgggaatgcaaggcttggttcaatatacgcaaatcaataaaggtaatccagcatataaacagagccaaagacaaaaaccacatgattatctcaatagatgcagaaaaagcctttgacaaaattcaacaacccttcatgctaaaaactctcaataaattaggtattgatgggacgtatttcaaaataataagagctatctatgacaaacccacagccaatatcatactgaatgggcaaaaactggaagcattccctttgaaaactggcacaagacagggatgccctctctcaccgctcctattcaacatagtgttggaagttctggccagggcaatcaggcaggagaaggaaataaaaggtattcaattaggaaaagaggaagtcaaattgtccctgtttgcagacgacatgattgtttatctagaaaaccccattgtcctcagccccaaatctcccttaagctgataagcaacgtcagccaaagtctgaggatacaaaatcaatgtacaagaatctacaagcattcttatacaccatcaacagacaaacagagagccaaatcatgagtgcactcccagttcacaattgcttcaaagagaataaaatacctaggaatccaacttaacaagggaatgtgaaggaactcttcaaggagaactacaaaccaactgctcaaggaaataaaagaggacacaaacaaatggaagaacattccatgctcatgggtaggaaagaatcaatatcgtgaaaatgggccatacttgcccaaggtaatttacagattcaatgccatccccatcaagctaccaatgactttcttcacagaattggaaaaaaactactttaagtaaagttcattatggaaccaaaaaagagcccgcgtcgccaagtcaatcctaagccaaaagaacaaagctggaggaggcatcatgctacctgacctcatcaaacttcaaactatactgtaaaggctacagtaaccaaaacagtatgttatcagcatggtactggtaccaaaacagcatggtactggtaccaaaacagagatatagaccagtggaacagaatagagcccttggaaataataccatacacctacaaccatctgatcttcgaaaaacctgaacaaaaacaagaaatggggaaaaggattccctatttaataaatggtgctgggaaaactggctagccatatgtaggagaaagctgaaactggatcccttccttacaccttatacaaaaattaattcaagatggattaaagacttaaacatcattagacctaaaaccataaaaaccctagaagaatacctaggcattaccattcaggacataggcatgggcaaggacttcatgtctaaaacaccaaagacaaaagcaatggcaccaaaagcaatggcaacaaaagccaaaattgacaaatgggatctaataattaaacttaagagcttctgcacatctgcacagcaaaaagaaactaccatcagagtgaacaggcaacctgttgggagaaaattcaggcaacctgaatgggagaaaattttcacaacccactcatctgacaaagggctaatatccagaatctacaatgaactcaaacacatttacaagaaaaaaaacaaacaaccccatcaaaaagtggacgaaggcacatgaacagacacttctcaaaagaagacatttatgcagccaaaaaaacacatgaaaaaatgctcaccatcactggccatcagagaaatgcaaatcaaaaccacaatgagataccatctcacaccagttagaatggcaatcattaaaaagtcaggaaacaacaggagctggtattttgaaaagatcaacaaaattgatagactgctagcaagactaataaagaaaaaaagagagaagaatcaaatagacgcaataaaaaatgataaaggggatatcaccactgatcccacagaaatacaaactaccaccagagaatactataaacacctctatgcaaataaactagaaaatctagaagaaatggataaattcctcgacacatacaacctcccaagactaaagcaggaagaagttgaatctctgaatagaccaataagaggctctgaaattgtggcaataatcaatagcttaccaaccaaaaaaagtccaggaccagatggattcacagccgaattctaccacaggtacaaagaggagctggtaccattgcttctgaaactattccaatcaatagaaaaagaggtaatcctccctaactcattttatgaggccagcatcatcctgataccaaagcctgacagagacacagcaaaaaaagagaattttagaccaatatccttgatgaacatcgatgcaaaaatcctcaataaaatactggcaaaccgaatccagcagcacatcaaaaagcttatccaccatgatcaagtgggcttcatccctgggatgcaaggctggttcaacatacgcaaatcagtaaatgtaatccagcatataaacagaaccaaagacaaaaaccacatgatcatctcaatagatgcagaaaagtcctttgataaaattcaacaacacttcatgctaaaaactctcaataaattaggtattgatgggacatatctgacatatctcaaaataataagagctatttatgacaaacccacagccaatatcatactgaatgggcaaaaactggaagcattcccttttaagactggcacaagacagggatgtcctctctcaccactcctattcaacatagtgttggaagctctggccagggcaatcaggcaagagaaagaaataaagggtattcaattaggaaaagaggatgtcaaattgtccctgtttgcagatgacatgattgtatatttagaaaaccccatcgtctcagcccaaaatctccttaagctgataagcaacttcagcgaagtctcaggatacaaaatcaatgtgcaaaaatcacaagcattcctatacaccaataacagacagacagagagccaaatcatgagtgaactcccattcacaattgcttcaaagagaataaaatacctaggaatacaacttacaagggatgtgaaggacctcttcaaggagaactacaaaccactgctcaatgaaataaaagaggacacaaacaaatggaagaacattccatgctcatggataggaagaatcaatattgtgaaaatggccatactgcccaagacttgcacttatgatgatgaatataaaaagaaagacataaagagtgttgcattttggaggatctggcaagatggccaaataggaagagctccggtctgcagcttccagcagaccaacatagaagatcatcagcctcaaagatcaaaggcagataaacccacaaagatgaggaaaaatcagcgcaaatatgctgaaaattccaaaaaccagaatgcctcttctcttccaaatgatcgcaactcctctccagaaagggcacaaaactggttggagaataaatgtgatgaattgtcagaagtaggcttcaaaaggtgggtaataacaaactcctctgagctaaaggagcatgttctaacccaatgcaaggaagctaagaaccttgataaaaggttacaggaactgctaactaaaataaccagtgtagagaagaacacaaatgacctgatggagctgaaaaacacagcatga

SEQ ID NO: 119570 - DNA, 4037 bp, Homo sapiens
ggccgcgctcgtctcgccgggctgttcgcgggcaggccctgccctgaagggacgaatcggcttggagcgcgggaggtggagtcggccccggcggtcgctccctggacccaacccgaggctgacccaggcccctgcccatgcggggcgcccctggctcggaagagtcccccgggccgggagcagctccaggcagcggccccggaggaagaggaagaagggacagtgctcagcttgggggacccggaccctcgccgcggcatttggagccgggggcagtcccgaactctgtgcttggcaccgccgctccgagtagggcagcgcctgccgggaccctgacccggaccccctgcgcctcgtaggcggcggcgccgccgcgccaccctgttcttccgtgtctccctctgcctggcggcagtcacggccaagagagtattatgagggaggccgaggacttcatgctccggacagagaaacggcgctgggattagggattgccacttctgagaggatgctgggaatctgcagggggagacggaaattcttggctgcctcgttgagtcttctctgcatcccagccatcacctggatttacctgttttctgggagcttcgaagatggaaagcccgtgtctctgtcaccgctggagtcccaggcacacagccccaggtacacggcctccagccagcgggagcgcgagagcctggaggtgcgcatgcgcgaggtggaggaggagaaccgcgccctccgcaggcagctcagcctggcccagggccgagccccatcccatcgccgaggcaaccactccaagacctactccatggaggagggcactggagacagcgagaaccttcgggctggcatcgtggcaggcaacagctccgagtgtgggcagcagccggtcgtggagaaatgcgagacggaaccctctgcacttccaccttattgctgactccattgcggagcagatcctggccacgctcttccagacctggatggtgcccgctgtgcgtgtggacttctacaatgcagacgagctcaagtctgaagtttcctggatccccaataaacattactctgggatttatggtctgatgaagcttgtcctgaccaagactcttcctgccaacctggagagagtcatcgtccttgacacggatatcacctttgccactgacattgcagagctgtgggctgtgttccacaagttcaaaggtcagcaagtcctgggcttggtggagaaccagagtgactggtaccttggaaacctgtggaaaaatcaccgcccatggccagcccttggaagaggctacaacacaggggtgatcctgttacttctggataagctgcggaagatgaaatgggagcagatgtggaggctgaccgcagagagggagctcatgggcatgctctctacatccttagctgaccaggatattttcaatgccgtcatcaaacaaaaccccttccttgtgtaccagctcccctgcttctggaatgtgcagctgtcagaccacacccgctccgagcagtgctacagagacgtgtctgatctaaaggtcattcactggaactcccccaagaagctccgggtgaagaacaagcatgtggagttttttcgcaacctctacctgaccttcctggagtatgacggcaatcttctgaggcgggaactgtttggctgccccagtgaggctgatgtcaacagtgaaaacctccagaagcagctgtctgagctggacgaggacgacctgtgctatgagttccggcgagagcgcttcactgtccaccgcacccacctgtacttcctgcactacgagtatgagcctgcagcagacagcacggacgtcaccctggtcgctcagctgtccatggacaggctccagatgctggaggccatctgcaagcactgggaggggcccatcagcctggccctctacctgtcagacgccgaggcccagcagttcctccgctacgcacagggctctgaggtgcttatgagccgccacaacgtgggctaccacatcgtgtacaaggagggccagttctaccccgtgaacctgctgcgcaacgtggccatgaagcacatcagcactccctacatgttcctgtctgacattgacttcctgcccatgtatgggctctatgagtacctcaggaagtctgtcatccagctcgatcttgccaacaccaagaaagcaatgattgtccccgcgttcgagacactgcgctaccggctgtccttccccaagtcaaaagcggagttgctgtcaatgctggacatggggaccctcttcacattcaggtaccacgtctggacgaaaggccacgcacccacaaacttcgccaagtggcggaccgccaccacgccttaccgggttgagtgggaggccgattttgagccgtatgttgttgtgagacgtgactgcccggagtacgaccggaggtttgtaggctttggctggaacaaagtggctcatatcatggagctggatgtgcaggagtatgagttcattgtgctgcccaacgcctacatgatccacatgcctcatgcccccagcttcgacattaccaagttccgttccaacaagcaataccgcatctgtctcaaaaccctcaaggaagagtttcagcaggacatgtcccgccgctacggctttgctgccctgaaatatctcacagccgagaacaacagctagcaccaagaagcccaccactagggggagacatgctgtaggggaagtgccactcgctgtttggggcccggccttcaaattcaaaattgagccatgctttttcggtttgtttttatttatctctttggcccagccaagctgccctcactacagagaccttggacaaggatccagccagtccctctctgccccacaaccctgcattcccagaggttagctatgcagcccacctagatgagtctcttcaagaatgggaaatcaaggggtgacagggagtaaaagggttatcatcttactgcaaagccacaagatcagggcagggctttaggatgttctggatgctttttaataattatgcttcccatcataactggggagaaagggaagtcagggttctaggggttattcgtcccaggaaatagaagtgaaattgtctttattaagtgaaaactttcccctttgccctgcaatgtagctgggcattcaaacggagggcaaaccgatgatctaaaccaaccacttggaaaaacccaatggggacattgtaaccagagggtcctggaggtggggttgatgggtttccttatccccaaagtcactcctgttttgttttgtttttctttgggggttttgtttatttttggggctggcaatccaaaatagaaaatctgatcctttgaggctctaaaggaaaatcagctgcctctaccaaccaccctctatcagcagtggcccaggaaggaggtcaagcatcttcggccgatatttaaacatgggcagcttccttcaggatgatcaccgaggctcccgtgactttgaactccctactctccagaatccaggggctatagcgatggggactgcggaattacgagggctggctgttttacaccggtcacattttctattggcagtgactgattcatgggaaagggctttgaaggaactacttcagtgcacacacaaggtacgaacctctcaggcctttcgaagaactttcataattcatgaaagcccagttctgaagattcacgtatccatctggagacctacaggaagaagtgattgggttcctctggttcttgcctgcttcactgtggatgggaagaggtgacaacctcagtctccctttgggacctgtccaagggtaggcaaccaccttcaccttcacacagattgaggagacactggactttttacccattttctttaatcttcaatattaatattgtgtttacattgatgagaacaagagttaatgccctaccctctgctgggctgtttgtattgagttgcaatgtgaccagcgaaagctgcatttaataaatgaaagtacagactgtt

SEQ ID NO: 119571 - DNA, 2082 bp, Homo sapiens
atggaaagcccgtgtctctgtcaccgctggagtcccaggcacacagccccaggtacacggcctccagccagcgggagcgcgagagcctggaggtgcgcatgcgcgaggtggaggaggagaaccgcgccctccgcaggcagctcagcctggcccagggccgagccccatcccatcgccgaggcaaccactccaagacctactccatggaggagggcactggagacagcgagaaccttcgggctggcatcgtggcaggcaacagctccgagtgtgggcagcagccggtcgtggagaaatgcgagacggaaccctctgcacttccaccttattgctgactccattgcggagcagatcctggccacgctcttccagacctggatggtgcccgctgtgcgtgtggacttctacaatgcagacgagctcaagtctgaagtttcctggatccccaataaacattactctgggatttatggtctgatgaagcttgtcctgaccaagactcttcctgccaacctggagagagtcatcgtccttgacacggatatcacctttgccactgacattgcagagctgtgggctgtgttccacaagttcaaaggtcagcaagtcctgggcttggtggagaaccagagtgactggtaccttggaaacctgtggaaaaatcaccgcccatggccagcccttggaagaggctacaacacaggggtgatcctgttacttctggataagctgcggaagatgaaatgggagcagatgtggaggctgaccgcagagagggagctcatgggcatgctctctacatccttagctgaccaggatattttcaatgccgtcatcaaacaaaaccccttccttgtgtaccagctcccctgcttctggaatgtgcagctgtcagaccacacccgctccgagcagtgctacagagacgtgtctgatctaaaggtcattcactggaactcccccaagaagctccgggtgaagaacaagcatgtggagttttttcgcaacctctacctgaccttcctggagtatgacggcaatcttctgaggcgggaactgtttggctgccccagtgaggctgatgtcaacagtgaaaacctccagaagcagctgtctgagctggacgaggacgacctgtgctatgagttccggcgagagcgcttcactgtccaccgcacccacctgtacttcctgcactacgagtatgagcctgcagcagacagcacggacgtcaccctggtcgctcagctgtccatggacaggctccagatgctggaggccatctgcaagcactgggaggggcccatcagcctggccctctacctgtcagacgccgaggcccagcagttcctccgctacgcacagggctctgaggtgcttatgagccgccacaacgtgggctaccacatcgtgtacaaggagggccagttctaccccgtgaacctgctgcgcaacgtggccatgaagcacatcagcactccctacatgttcctgtctgacattgacttcctgcccatgtatgggctctatgagtacctcaggaagtctgtcatccagctcgatcttgccaacaccaagaaagcaatgattgtccccgcgttcgagacactgcgctaccggctgtccttccccaagtcaaaagcggagttgctgtcaatgctggacatggggaccctcttcacattcaggtaccacgtctggacgaaaggccacgcacccacaaacttcgccaagtggcggaccgccaccacgccttaccgggttgagtgggaggccgattttgagccgtatgttgttgtgagacgtgactgcccggagtacgaccggaggtttgtaggctttggctggaacaaagtggctcatatcatggagctggatgtgcaggagtatgagttcattgtgctgcccaacgcctacatgatccacatgcctcatgcccccagcttcgacattaccaagttccgttccaacaagcaataccgcatctgtctcaaaaccctcaaggaagagtttcagcaggacatgtcccgccgctacggctttgctgccctgaaatatctcacagccgagaacaacagctag

SEQ ID NO: 119572 - DNA, 4326 bp, Homo sapiens
cggccccggcggtcgctccctggacccaacccgaggctgacccaggcccctgcccatgcggggcgcccctggctcggaagagtcccccgggccgggagcagctccaggcagcggccccggaggaagaggaagaagggacagtgctcagcttgggggacccggaccctcgccgcggcatttggagccgggggcagtcccgaactctgtgcttggcaccgccgctccgagtagggcagcgcctgccgggactctgacccggaccccctgcgcctcgtaggcggcggcgccgccgcgccaccctgttcttccgtgtctccctctgcctggcggcagtcacggccaagaacctacattaagaaacgcattcagatgcatcagccgtttgtaaagcacctgtcgtgagccagagagtattatgagggaggccgaggacttcatgctccggacagagaaacggcgctgggattagggattgccacttctgagaggatgctgggaatctgcagggggagacggaaattcttggctgcctcgttgagtcttctctgcatcccagccatcacctggatttacctgttttctgggagcttcgaagatggaaagcccgtgtctctgtcaccgctggagtcccaggcacacagccccaggtacacggcctccagccagcgggagcgcgagagcctggaggtgcgcatgcgcgaggtggaggaggagaaccgcgccctccgcaggcagctcagcctggcccagggccgagccccatcccatcgccgaggcaaccactccaagacctactccatggaggagggcactggagacagcgagaaccttcgggctggcatcgtggcaggcaacagctccgagtgtgggcagcagccggtcgtggagaaatgcgagacaatccacgttgctattgtctgcgctggatacaatgccagccgggatgtcgtcaccctggtcaaatccgtcctgttccatagacggaaccctctgcacttccaccttattgctgactccattgcggagcagatcctggccacgctcttccagacctggatggtgcccgctgtgcgtgtggacttctacaatgcagacgagctcaagtctgaagtttcctggatccccaataaacattactctgggatttatggtctgatgaagcttgtcctgaccaagactcttcctgccaacctggagagagtcatcgtccttgacacggatatcacctttgccactgacattgcagagctgtgggctgtgttccacaagttcaaaggtcagcaagtcctgggcttggtggagaaccagagtgactggtaccttggaaacctgtggaaaaatcaccgcccatggccagcccttggaagaggctacaacacaggggtgatcctgttacttctggataagctgcggaagatgaaatgggagcagatgtggaggctgaccgcagagagggagctcatgggcatgctctctacatccttagctgaccaggatattttcaatgccgtcatcaaacaaaaccccttccttgtgtaccagctcccctgcttctggaatgtgcagctgtcagaccacacccgctccgagcagtgctacagagacgtgtctgatctaaaggtcattcactggaactcccccaagaagctccgggtgaagaacaagcatgtggagttttttcgcaacctctacctgaccttcctggagtatgacggcaatcttctgaggcgggaactgtttggctgccccagtgaggctgatgtcaacagtgaaaacctccagaagcagctgtctgagctggacgaggacgacctgtgctatgagttccggcgagagcgcttcactgtccaccgcacccacctgtacttcctgcactacgagtatgagcctgcagcagacagcacggacgtcaccctggtcgctcagctgtccatggacaggctccagatgctggaggccatctgcaagcactgggaggggcccatcagcctggccctctacctgtcagacgccgaggcccagcagttcctccgctacgcacagggctctgaggtgcttatgagccgccacaacgtgggctaccacatcgtgtacaaggagggccagttctaccccgtgaacctgctgcgcaacgtggccatgaagcacatcagcactccctacatgttcctgtctgacattgacttcctgcccatgtatgggctctatgagtacctcaggaagtctgtcatccagctcgatcttgccaacaccaagaaagcaatgattgtccccgcgttcgagacactgcgctaccggctgtccttccccaagtcaaaagcggagttgctgtcaatgctggacatggggaccctcttcacattcaggtaccacgtctggacgaaaggccacgcacccacaaacttcgccaagtggcggaccgccaccacgccttaccgggttgagtgggaggccgattttgagccgtatgttgttgtgagacgtgactgcccggagtacgaccggaggtttgtaggctttggctggaacaaagtggctcatatcatggagctggatgtgcaggagtatgagttcattgtgctgcccaacgcctacatgatccacatgcctcatgcccccagcttcgacattaccaagttccgttccaacaagcaataccgcatctgtctcaaaaccctcaaggaagagtttcagcaggacatgtcccgccgctacggctttgctgccctgaaatatctcacagccgagaacaacagctagcaccaagaagcccaccactagggggagacatgctgtaggggaagtgccactcgctgtttggggcccggccttcaaattcaaaattgagccatgctttttcggtttgtttttatttatctctttggcccagccaagctgccctcactacagagaccttggacaaggatccagccagtccctctctgccccacaaccctgcattcccagaggttagctatgcagcccacctagatgagtctcttcaagaatgggaaatcaaggggtgacagggagtaaaagggttatcatcttactgcaaagccacaagatcagggcagggctttaggatgttctggatgctttttaataattatgcttcccatcataactggggagaaagggaagtcagggttctaggggttattcgtcccaggaaatagaagtgaaattgtctttattaagtgaaaactttcccctttgccctgcaatgtagctgggcattcaaacggagggcaaaccgatgatctaaaccaaccacttggaaaaacccaatggggacattgtaaccagagggtcctggaggtggggttgatgggtttccttatccccaaagtcactcctgttttgttttgtttttctttgggggttttgtttatttttggggctggcaatccaaaatagaaaatctgatcctttgaggctctaaaggaaaatcagctgcctctaccaaccaccctctatcagcagtggcccaggaaggaggtcaagcatcttcggccgatatttaaacatgggcagcttccttcaggatgatcaccgaggctcccgtgactttgaactccctactctccagaatccaggggctatagcgatggggactgcggaattacgagggctggctgttttacaccggtcacattttctattggcagtgactgattcatgggaaagggctttgaaggaactacttcagtgcacacacaaggtacgaacctctcaggcctttcgaagaactttcataattcatgaaagcccagttctgaagattcacgtatccatctggagacctacaggaagaaagtgattgggttcctctggttcttgcctgcttcactgtggatgggaagaggtgacaacctcagtctccctttgggacctgtccaagggtaggcaaccaccttcaccttcacacagattgaggagacactggactttttacccattttctttaatcttcaatattaatattgtgtttacattgatgagaacaagagttaatgccctaccctctgctgggctgtttgtattgagttgcaatgtgaccagcgaaagctgcatttaataaatgaaagtacagactgtttcttccccattcccctcccactcttgcaggaagctactgagacacaccttgacatagagagctaaattgcagtggataaacagcaacttcacactttctgttcccccattctatttttctcatcatttgaactttagccttttttttccccttttgcctgaagttagatcccactctgtctctaactcaaaccatcttcaagttttccattccgcatctttctc

SEQ ID NO: 119573 - DNA, 408 bp, Homo sapiens
acactggtgcaatgggcaggctcccaaagccttgggcaggaacactcctgtggctttgcagtgtacagcccctgcagctgctctcatgggttggagttgagtgtctgttgcttttcactccccacagacggaaccctctgcacttccaccttattgctgactccattgcggagcagatcctggccacgctcttccagacctggatggtgcccgctgtgcgtgtggacttctacaatgcagttcatccctaggatgatgaaactcaaggaaaattgtcaagcaccaaaaggaattgtatacctgcagatcaaaaggagccttccactcctaggtgttcaaccaagagaaataaaacctatgtccactggaaaacttgtatgtggatattcgtggcagctttattcatag

SEQ ID NO: 119574 - DNA, 380 bp, Homo sapiens
cgaccactccaaacgttcagcaattgaggacaacaaatacatcgaccaaaaacttcgcaagtctgttttcagcatcagggcaaggaaccttctggaaaaggagaccgcagtcactaaaatcttaagcaagagtccattaccgacgagctcacccattagcatccgctgttgtctctacttgggaagatcacattgtcactctagtggagtcagaatgtataggaattttccacagccttgttctgggacattaagaaagacgacatggagacaaagaagaaaagaaccggggaccccctgctactgtgtctctaatcaacttgctggtgtttaaaggctaataaagcttcaatgatctctgtgataaaaaaaaaaaaaaa

SEQ ID NO: 119575 - DNA, 1359 bp, Homo sapiens
gtgagcttgatatttctttgttggatgcctcaaaatgtacctgctgaatcgggagctcagcttctaatggtccttcggtgcctgagacctctgcgcatattcaaactggtgccccagatgaggaaagttgttcgagaacttttcagcggcttcaaggaaatttttttggtctccattcttttgctgacattaatgctcgtttttgcaagctttggagttcagctttttgctggaaaactggccaagtgcaatgatcccaacattattagaaggaacatatcacagtgtagcttaacattacatggagatgagtttcgggtgagccagagtctggctcctggaaacacacctacggaccctttggagggggttaccctttcccagcacaaagccctttgccgcaaggctcaagaggactcagatgatgtggccctaggcagtgactactgggctctccaggaacaccagataaccctgctctccagatgtgcatgtgttggaggtggcgtctgtgggacagcctatgcaagcatcagcctgggggtgatccccacgttccgcgtcaagttcctgctgcggctactgcgtgggaggctggaggtggacctggacaaggacaagctcctgtttaagcacatgtgctacgaaatggagaggctccacaatggcggcgacgtcaccttccatgatgtcctgagcatgctttcataccggtccgtggacatccggaagagcttgcagctggaggaactcctggcgagggagcagctggagtacaccatagaggaggaggtggccaagcagaccatccgcatgtggctcaagaagtgcctgaagcgcatcagagctaaaacagcagcagtcgtgcagtatcatccacagcctgagaaagagtcagcagcaaaagctggagcccggtttctgaacccgcccagcatggagaccacccagcccaagcctttacaatatggaatcatctatattatccagcacaagcaagtctgccgatttcagatgagttatattactggcaaagatgaaagaggagtaatgacaagttacatcagattttctattagaaacaaaatcacaaaaagcatttggctcttgataaagagctcatcctggaaaccacattgcatttcattgtcacatctgaagtttctcttggctgtgacaattcctctaattcttcttgttgttaatgactttgatggtttcgaggagtatcagtcaggtcttctttattttctggcaccacaaaatgtcctatcctcatcttgtgttctctttaattcagctctaaagccagccatttcttcagagtgccgacttgttttattggagaatgttatttag

SEQ ID NO: 119576 - DNA, 1113 bp, Homo sapiens
atggagcaaagagcttgcacccgacagcgcatgctgagcggatcatttgaggggcagcccgcaaaggagaggtcaatcctcagcgtgcagcatcatatccgccaagagcgcaggtcactaagacatggatcaaacagccagaggatcagcaggggaaaatctcttgaaactttgactcaagatcattccaatacagtgagatatagaaatgcacaaagagaagacagtgaaataaagatgattcaggaaaaaaaggagcaagcagagatgaaaaggaaagtgcaagaagaggaactcagagagaaccacccatacttcgataagccactgttcattgtcgggcgagaacacaggttcagaaacttttgccgggtggtggtccgagcacgcttcaacgctgatttgctgggattggtcacttacctggactgggtcatgatcatcgtaaccatctgctcttgcatttccatgatgtttgagtccccgtttcgaagagtcatgcatgcacctactttgcagattgctgagtatgtgtttgtgatattcatgagcattgagcttaatctgaagattatggcagatggcttatttttcactccaactgctgtcatcagggacttcggtggagtaatggacatatttatatatcttaaacagcagcagtcgtgcagtatcatccacagcctgagagagagtcagcagcaagagctgagccggtttctgaacccgcccagcatcgagaccacccagcccagtgaggacacgaatgccaacagtcaggacaacagcatgcaacctgagacaagcagccagcagcagctcctgagccccacgctgtcggatcgaggaggaagtcggcaagatgcagccgacgcagggaaaccccagaggaaatttgggcagtggcgtctgccctcagccccaaaaccaataagccattcagtgtcctcagtcaacttacggtttggaggaaggacaaccatgaaatctgtcgtgtgcaaaatgaaccccatgactgacgcggcttcctgcggttctgaagttaagaagtggtggacccggcagctgactgtggagagcgacgaaagtggggatgaccttctggatatttag

SEQ ID NO: 119577 - DNA, 2529 bp, Homo sapiens
ggggtgatccccacgttccgcgtcaagttcctgctgcggctactgcgtgggaggctggaggtggacctggacaaggacaagctcctgtttaagcacatgtgctacgaaatggagaggctccacaatggcggcgacgtcaccttccatgatgtcctgagcatgctttcataccggtccgtggacatccggaagagcttgcagctggaggaactcctggcgagggagcagctggagtacaccatagaggaggaggtggccaagcagaccatccgcatgtggctcaagaagtgcctgaagcgcatcagagctgcatttatgtccatgttccagatcctcacccaggaaggatgggtggacgtaatggaccaaactctaaatgctgtgggacatatgtgggcacccgtggttgccatctatttcattctctatcatctttttgccactctggtactaacctacgtcctggccaaagtgggaaagagcttaattcatgtcctcttaggggctacaaataattggaaattagcaataacgaacacagacaggctaaccaacaaacaaataaaaccagtggttccaaggcctaaagatgcaaatggaaagccctgtgatgtgaatactgaaaagaaagaaaatgtaattaagcgttcattagcttgcacccgacagcgcatgctgagcggatcatttgaggggcagcccgcaaaggagaggtcaatcctcagcgtgcagcatcatatccgccaagagcgcaggtcactaagacatggatcaaacagccagaggatcagcaggggaaaatctcttgaaactttgactcaagatcattccaatacagtgagatatagaaatgcacaaagagaagacagtgaaataaagatgattcaggaaaaaaaggagcaagcagagatgaaaaggaaagtgcaagaagaggaactcagagagaaccacccatacttcgataagccactgttcattgtcgggcgagaacacaggttcagaaacttttgccgggtggtggtccgagcacgcttcaacgctgatttgctgggattggtcacttacctggactgggtcatgatcatcgtaaccatctgctcttgcatttccatgatgtttgagtccccgtttcgaagagtcatgcatgcacctactttgcagattgctgagtatgtgtttgtgatattcatgagcattgagcttaatctgaagattatggcagatggcttatttttcactccaactgctgtcatcagggacttcggtggagtaatggacatatttatatatcttgtgagcttgatatttctttgttggatgcctcaaaatgtacctgctgaatcgggagctcagcttctaatggtccttcggtgcctgagacctctgcgcatattcaaactggtgccccagatgaggaaagttgttcgagaacttttcagcggcttcaaggaaatttttttggtctccattcttttgctgacattaatgctcgtttttgcaagctttggagttcagctttttgctggaaaactggccaagtgcaatgatcccaacattattagaaggcttcgcaagtctgttttcagcatcagggcaaggaaccttctggaaaaggagaccgcagtcactaaaatcttaagaattattgtttttagtcttatccaagaggttcctcgccagggagcaagaggccattaccgacgagctcacccattagcatccgctgttgtctctacttgggaagatcacattgtcactctagtggagtcagagtggggggctactataaggatacctgaaaatgtggaagcgactttggaactgggtaacaggcagaggttggaacaatttggaggactcagaagaagacaggaagatatgggaaagtttggaacttcctacttgttggatagctttgaccaaaatactgatagtgatatggacagtgaagtccaggctgagctttgggacatggtgccctgccttccagcagcttctgctccagccatggctaaaaggtgccaatatacagctcaggctgatgcttcaaagagtgcaagccccacgacttggtggcttacacatggttttgggcctgtgggtgaacagaagtcaagaactgaggtttgggaacctctgcctagatttcacaggatgtatagaaacaactggatgtccaggcagaagtttgctgtgggggtagagccctcatggagaacctctgctggggcagtgcggaaggaaaatgtgtggttggagtccacacacagagtccccactggagcactgcctagtggagctgtgagaagagggccaccatcctccagactccagaatggtagatccactgacagcttgcactgtgtgcctggaaaagccacagacactcaataccagtccaggagggggtctgtaccctgcaaagccacaatggtggagctgcccaaggccatgggagcccacctcttgcatcagtgtgccctggatatatataagacagagtcaaaggagattattttggaactttaa

SEQ ID NO: 119578 - DNA, 555 bp, Homo sapiens
caccgatgagtcccttccctgaggactgtgggaaactggaggtggagcgaggtggagatcaagtcccactgggcaactggagctcagaaactgtgggacggggcctcttccacccaccctgtggaccacagaagcaaaggacttctagcttcagagaaagcagcatgaagcggaaggaatctagacctaaaaccacactaaagcacagacttattcagagagaccttgatcacttttcacttctgcaagatatcacactggtctattacacggatgacattatgctgattgcatccggtgagcaggaagtagcaaacacgctggactcccaggctgcactgatggcctcatggggagttccctatgatcacttgaaagaggaagagaagaccagggcctggttcacagatggttctgcacaatatgcaggcaccacccaaaagtgggcagctgcaacactacagccccttgctaggacatccctgaaggacagcggggaagggaaatcttcccagtgggcagaacttcaagcagtgcacctggttgtccaccttg

SEQ ID NO: 119579 - DNA, 1713 bp, Homo sapiens
atgtcgcaggggacgactccctgggggccgaccccggcgggaaccacgcccgaatcggaggtacaccgcccctttcccttcccggtaccggtgccggtaccagagacctccgagcgctcattcccagtccgcggagtctgcggccaagccaaatccggtctccgaagaggcgccgcacgtctggccccggctgcttatctcttcacccggcagcagacaagggagttaatacacagcgcgtgtgtgtccatttccgttaacacaatgcacgggctatcagtcgctattaattccaggaggtgtacctattatagaaaatatgttattgatttttccaaatctgagatcattggaataccaatatccaagaatatagatctaacagtgggaaccacagtcactcaactacaaaatttaaatacagtgggaataattggatcccgaggtggcagaggccaagtggcagcactcaactgtgacaggcaaggacacctctggctttttaccagggtaactgtgcactggagaatgggaaatgatcggacattttggggactactggacactgtctctgagctgatgtttattccagggaacccaaaacatcattgtggccctccagttaaagtaggggcttatggagtaacatttctaggggtccactggtgtggggcctgtcaagatactccttgtaagatgaaggataagttgctgcatttggcccctcctacaactaagaaaaaggcacaatatgtagtgggcctacttggattttggaggcccatttatcgagtgactcaaaaggctgccagttttgagtggggtccagaacaggataaggctctgcctcaggtccaggctgctgtccaacctgctctgctgtttgggccatatgactcagcagatccaatggtgcttgaggcatcagtggcagatagggatgctgtttggagcctttggcaggcccccacagccataaaatgggtcatgcacagcagcattccatcatcaaatggaagtgatatatatgtgattgggctcgagcaggtcctaaaggcacaacctgcaccgatggcctcatggggagttctctatgatcagttgacagaggaagagaagactagggcctggttcacagatggttctgcacgatatgcaggcaccacccaaaagtggacagctgcagcactacagcccctttctaggacatcactgaagggcagtggtgaagggaaatcttcccagtgggcagaacttcaagcagtgcacctggttgtgcacttttcatggaaggataaatggccagatgtgcgattatatattgattcatgggctgtagccaatggtttggctggatggtcagggacttggaagaagcatgattggaaaattggtgacaaagaaatttggggaagaggtatgtggatggacctctctgagtggccaaaacctgtgaagatatttggatcccatgtgagtgctcaccaatgggtgatctcagcagaggaggattttaataatcaagtggataagatgacctgttctgtggacatcactcagcctctttccccagccacccctgttatcacccaatgggcccataaacaaagtggccatggtggcagggatggaggttatacatgggctcagcaacatggacttccactcaccaaaactggcctggctatggctacagctgagtgcccaatttga

SEQ ID NO: 119580 - DNA, 441 bp, Homo sapiens
atgggtttctacagtgacggttatgaagcacagtttggagtgcagccaactttcgtttttctggttgccagcacaactattgaatgcggacgttatccggttgaaattttcatgatgggcgaagaagcaaaactggcagtgatgccacaacttatggaggagacagaacagttcatgcctaattccatcatgattgtcaggagggccattgaaaatgatttggtggtggctggtggtggggctattgagataaagctctccaagttaataaaaacaatttatatgcagggtagtgaacaagagaaaagttatggaaaacatttctcaaccaaggacagtgtaccagatgtgctaagacttatgggagcaatcagaggtgaccaactctctgtggcgggccttattaagttagactgtgaaccagaaccttcaacttattaa

SEQ ID NO: 119581 - DNA, 615 bp, Homo sapiens
atggggaattaccaggcaattgttgatgctgagtggaacattctctatgacaagttagcaaggatccatcattctggagccaaagttgtcttgtccaaactctccaatggggatgtggtcactcagtactttgctgacaggggcaggacaacacatgcacctttatcctccacagtgatgccacaacttatggaggagacagaacagttcatgcctaattccatcatgattgtcaggagggccattgaaaatgatttggtggtggctggtggccatcagtggtcacaacacaattttttccaccagtatgttgaccaggttcacaagggtgtcacacacggtcaatgtcacacagggtcacacccaacaagtccaggagtggcaatcacagtttcacacgcccacacagacaggccacagagcagatcaccaagcagggatcaaggcaggactccagttatacaggacgactcacccccacaaggacacagacaggcgccaccgcccagtttaaccacagaaaaccgctatcatcaaggagtagctatgaacaaaggtgcggacagctttacgcccacacgaacgagggagtatcacagaaaagacgacatctag

SEQ ID NO: 119582 - DNA, 736 bp, Homo sapiens
ggaaaagtgtgccatgaccgctctgagctccaagctgatctcccagcagaaagctttctttgctaagatggtggtggatgcagtgatgatgctcgatgatttgctgcagcttaaaatgattggaatcaagaaggtacagggtggagccctcgaggattctcagctggtagctggtgttgcattcaagaagactttctcttacgctgggtttgaaatgcaacccaaaaagtaccacaatcccaagattgcccttttgaatgtcgagctcgagttgaaagctgagaaagacaatgctgagataagagtccacacagttgaggattatcaggcaattgttgatgctgagtggaacattctctatgatcaagttagagaagatccatcattctggagccaaagttgtcttgtccaaactccccattggggatgtggccacccagtactttggctgacagggacatgttctgtgctggccgagtacctgaggaggatctgaagaggacaatgatggcctgtggaggctcaatccagaccagtgtgaatgctctgtcagcagatgtgctgggtcgatgccaggtgtttgaagagacccagattggaggcgagaggtacaatttttttactggctgccccaaggccaagacatgcaccttcattctccgtggcggcgccgagcagtttatggaggagacagagcggtccctgcatgatgccatcatgatcgtcaggagggccc

SEQ ID NO: 119583 - DNA, 474 bp, Homo sapiens
ggaatagtacaacaattatgagccgtcacagcctggtaagtatagaagaagaaggcctggatatggtgaacagagaaactgcacatgaaagggaaatgcaaacggcaatgcagataagccaatcatgggatgagagcttgagcctgagtgacagtgattttgacaagccggagaaattatattctcctaagagaattgacttcactccagtttctccagcaccttcacccaccaggggattcggaaagatgttcgtgagcagcagtggattgccaccaagtccagttcccagtccaagacgattttcaagcaggagaagtcagagtccagtcaagtgcattagacccagtgttcttggtcctcttaaaagaaaaggtgaaatggagacagaaagtcagcccaagagactcttccaaggcactaccaatatgttatctccagatgccgcgcaactgtctgatctcagttcatggt

SEQ ID NO: 119584 - DNA, 970 bp, Homo sapiens
gaagaactggcccagcggaggttcccgcttctgaagcgtgggaggcggaagagactgcagcccccgcccccgtccccaagcctccgccccttagcccccgcccccagctgccagtccccagcagctcagtcctgcagtgagagtcttgggagtccatagctaagcaccaggagctgagcactgcccgctgtgcctgcctgcaagtctgacatggctcaggagaaaatggagctggaccttgagcctgacacatcttatgggggaaccctgaggagatccagcagcgctcccctaatccatgggctcagtgacctttcacaggttttccaaccttacacacttataactcggaggaatagtacaacaattatgagccgtcacagcctggaagaaggcctggatatggtggaacagagaaactgcacatgaaagggaaatgcaaacggcaatgcagataagccaatcatgggatgagagcttgagcctgagtgacagtgattttgacaagccggagaaattatattctcctaagagaattgacttcactccagtttctccagcaccttcacccaccaggggattcggaaagatgttccgtgagcagcagtggattgccaccaagtccagttcccagtccaagaccgattttcaagcaggagaagtcagagtccaagtcaagtgcattaagacccaagtgttcttgggtcctcttaaaaagaaaaaggtgaaatggagaccagaaagtcagccccaagagactctttccaaaggcactaccaatatgttatctccagatgccgcgcaactgtctgatctcagttcatgttcagatattttggatggcagtagtagcagcagtggcttatcctcagacccgctggctaaaggcagcgctaccgcagagtctccagtagcatgctccaattcatgctcttcgttcatcttgatggatgatctctcacccaagtga

SEQ ID NO: 119585 - DNA, 568 bp, Homo sapiens
atgcctcagcaagtacaaaatcatggaaatcgtaacagtctctcagaccacagtgcaatcaaattagaactcaggattaagaaactcactcaaaaccacacaattacatggaaactgaacaatctgctcctgaatgactactggataaataacgaaattaaggtggaaataaataagttctttgataccaataagaacaaagacacaacgtaccagaatctctgggacacaggatttccaatttccaagcctgatgggctctcccagctggaacaggatctacaggtctttgatctggaaactaagactagagaagtcttaagagatgacttctcagagtttaggcaaataacaatcagcaaagaagccttcaccagtgagaagaacaatgaatgtaataaacctgaaaaaagcttcagtctggactctactattgatgcagatcagaaagttcttagaatacagaacactgatgataatgataagaacgacatgagcttcagccagaattcagcctctggtaaacatgaacacataaatctaacacaggattttcagagtagtatat

SEQ ID NO: 119586 - DNA, 2139 bp, Homo sapiens
atggagggcagtgggaccggaaaaagacgtggaaaagctgcgaaaacgagccttcgaatcatggacgcgcgggcccagctcctcctccgagttcctcatccggggccgtcactcacatccggggccctcactcacatccgggaccctcatccggggctctcacccacatccgggaccctcatgcctgggcggaggagggggggccctcattcgggaccctgcactccgtcgccggaagtgccaccgagaagcgccggcctcggggctgtctacagcggcccgggagaggctgtggtggccccgagcgcgagtgtagcagtgatggaggaaataccagcccaggaagcagcagggtcaccaagggtccagtttcagtctttggagacccagtctgagtgtctgtccccagagcctcagtttgtgcaggacaccgacatggaacagggactcactggggctccacctgttcctcaggtgcctgctcttccccgtgagggaagcccaggagaccaggcagctgcgctcttgacagccaggtaccagagcagccaggatgtgttatttcaggagtttgtgacattcgaggatgtggctgtgcaccttactcgagaggaatggggatacctggaccctgttcagagggacctctacagagaagtgatgttagagaattatgggaacgtggtctcactgggatttccaatttccaagcctgatgggatctcccagctggaacaggatctacaggtctttgatctggaaactaagactagagaagtcttaagagatgactgctcagatggagagaccagagaagagaacaagctgttgattcctaagcagaaaatttcggaagaagtgcattcatacaaagtgagagtaggaagactcaaacacgatattacccaagttcctgagactagagaagtgtataagtctgaggacagattagaaagacttcaggaaattctaaggaaatttctgtacctggagagagagtttaggcaaataacaatcagcaaggaaaccttcaccagtgagaagaacaatgaatgtcatgaacccgaaaaaagcttcagtctggactctactattgatgcagatcagagagttcttagaatacagaataccgatgacaatgataagtatgacatgagcttcaaccagaattcagcctctggtaaacatgaacacttaaatctaacagaggattttcagagtagtgaatgtaaggaaagcttaatggatctctcccaccttaataaatgggagagcatccctaacactgagaaatcctataaatgtgatgtatgtgggaaaattttccatcagagctcagcccttactagacatcagagaatccatactagagagaagccctacaaatgtaaagaatgtgaaaagtctttcagtcagagctcaagtcttagtcgacataaaagaatacacactagagaaaaaccttacaaatgtgaagcatctgataaatcctgtgaagcgtctgataaatcctgtagtccaagctcaggcataattcagcataagaaaattcacaccagagccaaatcttacaaatgtagcagttgtgaaagagtcttcagtcgtagtgtccaccttactcaacatcagaaaattcacaaagagatgccctgtaagtgtactgtatgtggcagtgacttctgccatacttcatacctacttgaacatcagagggtccatcatgaagagaaagcctatgagtatgatgaatatgggttggcctatattaaacaacaaggaattcatttcagagaaaagccctatacgtgtagtgaatgtggaaaagacttcagattgaattcacatcttattcagcatcaaagaattcacacaggagagaaagcacatgaatgtaatgaatgtggaaaagctttcagtcaaacctcatgccttattcagcatcacaaaatgcataggaaagagaaatcgtatgaatgtaatgagtatgagggcagtttcagtcatagctcagatcttatcctgcaacaagaagtcctcaccagacagaaagcctttgattgtgatgtatgggaaaagaactccagtcagagagcacatctagttcaacatcagagcattcataccaaagagaactcatga

SEQ ID NO: 119587 - DNA, 243 bp, Homo sapiens
atggcgggaacccaggaggcggagcttgcggtgaggcaggcgactaatcagattgtgatgaattgtgctgatattgatattattacagcttcatatgcaccagaaggagatgaaggttgggcccatgagatgtgtgctctgtatattccggaggtacaatttgccagtgtttccacaatggaaccaattgttttacagtctgttccacatgatcattgtaataaggtatcaagagtctggtaa

SEQ ID NO: 119588 - DNA, 1036 bp, Homo sapiens
gcttttcttctcaacattccactttatattatagtccttcctcttttctttcacatatacttgctttagtgcttttatccagctgtcctcagaatgtttggtcctgggttggggggtgcaggcatcatgtaataattttctgtaccacgttgcacccacctggttagctggcaaagggtgagcgcaagggaaaaaagactggctaagtgattatatggaggatctctaatatcccttcctcttttgaccacctgataatgtggagatcattgataacaacatgagatgtgtgactcttacttgttccagctgctccagcaaagctcagtgggcaccagaaacagagctggctgtaaccacctccaggccatcactaactctatggcccaatgcaggagcactatggaacaaatcaggtatcttgatttttctgtcctcaagacactggttcttcaaggtcctaggggataaagtagcagaatctgaaggccccaacatcatcctgaaaccaaaacttggcaaagacacaccagaaaaagaaaatttcaggcccgtatccctgatgaatatcgatgcgaaaatcctcaataaaatactggcaaaccgaatccagcagcacatcaaaaagcttatccaccacgatctagtcagcttaatccctcggatgcaaagcttgttcaacatatgcaaatcaataaatgtattccatcacataaacagaactaatgacaaaaaccacatgattatctcaatagatgcaaaaaaggccttcagcaaaattcaacacctcttcatggtaaaaactctcaatgaattatgtattcatggaacttatctcaacatactaagagctatttatgacaaacgcacagccaatatactgaatgggaaaaaacttgaaacattccttttgaaaatctgcacaaaacaagaataccctctctcatcactcctattcaatatagtattggaagttctggccagggcaatcagtcaagagaaagaaacaaagcgtaatcaaataggaagatcctaa

SEQ ID NO: 119589 - DNA, 1605 bp, Homo sapiens
atgaagaaactcactcaaaaccgctcaactacatggaaactgaacaacctgctcctgaatgactactgggtacataacaaaatgaaggcagaaataaagatgctctttgaaaccaacaaaaacaaagacacaacataccagaatctctgggacacatttaaagcagtgtgtagagggaaatttatagtactaaatgcccacaagagaaagcaggaaagatctaaaattgacaccctaacatcacaattaaaagaactagagaagcaagagcaaacacattcaaaagctagcagaaggcaagaaataactaagatcagagcagaactggaggaggtagagacacaaaaaacccttcaaaaaatcaatgaatccaggagctggttttttgaaaagatcaacaaaattgatagaccgctagcaagactaataaagaagaaaagagagaagaatcaaatagatgcaataaaaaatgataaaggggatatcaccaccgatcccacagaaatacaaactaccatcagagaatactataaacacctctacgcaaataaactagaaaatctagaagaaatggataaattcctcgacacatacaccctcccaagactaaaccaggaagaagttgaatctctgaatagaccaataacagactctgaaattgaggcaataattaatagcttaccaaccaaaaaaagtccaggactagacggattcacagccgaattgtaccagagcaaggtaactgagtcgttcaccaagaggtttggtccaggtcatcaggaacacctttcagttgtagctaacatcctgccttcaccctttcctacagtgaatggaggcattgagaacacattagagaaggaggtgatgcagtatgactactattcttcatattttgatatatttcttctggcagtttttcgatttaaagtgttaatacttgcatatgctgtgtgcagactgcgccattggtgggcaatagcggtgagtatgccctgcatgagtgggtcatctcctccagtgctggtggccaagtcctgctctcaacaggcctgggctgggagaagatacagttctaatgcagttgacaacggcagtgaccagtgcctttttactagcaaaagtgatcctttcgaaggtatggcctaccactttttctatacagttaccatcttcagtgatgaagcctcgtttttcagtcttttctctcaaggggcttttggctatgtgctgcccatcatttcattcatccttgcctggattgagacgtggttcctggatttcaaagtgttacctcaagaagcagaagaagaaaacagactcctgatagttcaggatgcttcagagagggcagcacttatacctggtggtctttctgatggtcagttttattcccctcctgaatccgaagcagggcagctctcacgggggtatcgtgaggatcaggaaacacagtgtctgcgaaacactctacagctgagctcacacgcagaaagccgttcttctaagcagacagcaggtgatgatggcaaaatagaccacactcttgaggagcaggaggaggtacgtgtaatatgcagaggtgtttgtgagctgcagcagtag

SEQ ID NO: 119590 - DNA, 340 bp, Homo sapiens
ttatgtttcaaagttggcgccctcggacctgccgtagtggcagagggcacagcccatgcaaaggccctgagagaggacctcgcctggggtgttggagaaacaggaggaggccagtgtgactactctcgaagcagagtccgtacgtccaaccgtcgggggtccgtccagccgcctccgtgggccggggccgttgccgcggcggtgggagcagcgccggagccggggccggggccggggcggggcgggcagcgcggccccgccctccactcgcctcgcccctcggcaggccacgccctccactcgccccgcccgcgcggaagggaccggagagttgccaggc

SEQ ID NO: 119591 - DNA, 753 bp, Homo sapiens
tgatgaagatgatgacgatgatgatgaagaggatgatgatgaagatgatgatgatgatgattttgatgatgaggaagctgaagaaaaagcgccagtgaagaaatctatacgagatactccagcccaaaaatgcacaaaagtcaaatcagaatggaagagactcaaaacctatcatcaacaccaagatcaaaaggacaagaatccttcaaaaaacaggaaaaaactcctaaaacacctaaaaggacctagttctgtagaagacattaaagcaaaaatgcaagcaagtatagaaaaaggtggttctcttcccaaagtggaagccaaattcatcaattatgtgaaggattgctttccggatgactgaccaagaggctatttcaagatctctggcagtggagaaagtctctttaagaaaatagtttaaacaaattgtttaaaaaatttcccgtcttatttcatttctgtaacagttgatatctggctgtcctttttataatgcagagtgagaactttccctaccgtgtttgataaatgttgtccaggttctattgcccaagaatgaaattgtccaaaatgcctgtttagtttttaaagatggaactccaccctttgcttggttttaagtatgtatggaatgttatgataggacatagtagtagcggtggtcagacatgggaaatggtggggagacaaaaatatacatgtgaaataaaactcagtattttaataaagtaaaaaaaaaaaaaaaagggc

SEQ ID NO: 119592 - DNA, 1301 bp, Homo sapiens
atggtaaatatgaaattacttcagagtgactggcaaacttggtacaagcagcccatgggtgttgcggaccctccacagtatttctggacaaattcactacttacccaaagtccttgtgagcttcgtggactttattggagactgtctatgggagagaagatggatgaggtgaggcattgggaagggttgatagtggtcgtttatctccatccaccttctctcctacctaagtgcgtgccaccacctgatggaagattcgtggacatggggatgaggcccctgaggccccagaactatcttttcagttgtgaactaaaggccaacaaagattatcactttaaggtagataataatgaaaatgagcaccagttacctttaacaacaatcaatttaggggctggtgcaatggatgaattggacattgttgaagcagaggcaatgaattacgaaggcagtccaattaaagtaatactggcaactttgaaaatgtctgtacagccaacggtttcccttgggggactttgaaataacaccaccagtggtctttaaggttgaagtgtggttcagggccagtgcatattagtggacagcacttagtagctgtggaggaagatgcagagtcagaagatgaagaggaggaggatgtgaaactcttaagtatatctggaaagcggtctgcccctggaggtggtagcaaggttccacagaaaaaagtaaaacttgctgctgatgaagatgatgacgatgatgatgaagaggatgatgatgaagatgatgatgatgatgattttgatgatgaggaagctgaagaaaaagcgccagtgaagaaatctatacgagatactccagccaaaaatgcacaaaagtcaaatcagaatggaaaagactcaaaaccatcatcaacaccaagatcaaaaggacaagaatccttcaagaaacagcaaaaaactcctaaaacaccaaaaggacctagttctgtagaagacattaaagcaaaaatgcaagcaagtatagaaaaagcgcattgaacagtcctgggcactacatgtaaattaagcccaaagatggggagaaaggaaaaggagagacaaatatagtccatactgagtgtcatcaacaatccagactgaagtcttctattttaattctcatccccctttcttgattggccacccatgcctcttcaggctggaaacaatctcttggttccctaaagcactttcttctgactgctgtgattcagtgaaccttgccctttgctttctattacttggtgcatttgcctcacctgacaatgtttt

SEQ ID NO: 119593 - DNA, 367 bp, Homo sapiens
  misc_feature (1)...(367): n = a,t,c or g
tgtcaaaaccagantccgaatacctttggctcttnacaagcatccggcccgtctncagctctgtaaacaaacttctttgcatcgaagccgccacttcaatgacgttgttgaggagggcaaacacaggtgcccaggggaaaggaggccacgaagagggtgacaaaaccaaactggatgatcatttccatgtactccggagtcagtcctgtgtatggttccaagctgtagtctaggtcccactgctctggatgtttcgaatgggcagagtcagtttctccagcttcggtctcatctttcagctttcgaaatagtttctttagcttcgggactccaatctcaaagatgttgttctggatcaactgcttcc

SEQ ID NO: 119594 - DNA, 2324 bp, Homo sapiens
atggcctgggtgaactggacccagtccgaggggaaaagggatgatgaagataaacttgacctggaaggatcgtttcccaggttacctgatgaactttgcctccatcttattcatgattgccctgacattctcaatcgtctttggggtgatagtgtatcgaataacaactgcagccgctctgtctctcaataaggctacacgctccaatgtccgggtgacagtgacagcaacagcagtcatcatcaacctcgtggtcatcctcatcctggacgagatctacggcgctgtggccaagtggctcaccaaaattgatctcttgatagttgaggaggctgtgagtatacgctttgctcaccaggtgcaaacagctggtgtcaataaccccaaaaagtttaaatttattgggagagcaacaggaaacaccacaaaggttccagaagatttagaatgcagtgcactcacatatgtgaatgacaagaggtcgagtatttctggggatggggacaaccgtgtggaggttccgaaaacagaacagacttttgaagagcgcctgatcctcaaagctttcttgctcaagtttgtcaatgcctactcccccatcttctatgtggcctttttcaaagggaggtttgtgggcaggcctggaagctacgtctatgtattcgatggttaccgcatggaagaggcaagtacagccactggtgtttcatgcctggcaccccaacccagccccattcttatctccagcacagcatggcttcattcgcgcccctgcttctcagagctcccttttgttctaaccggtcctttccttatcttctccctgcagtgtgctccagggggctgtctcatggagctctgcattcagctcagcatcatcatgttggggaagcagttgatccagaacaacatctttgagattggagtcccgaagctaaagaaactatttcgaaagctgaaagatgagaccgaagctggagaaactgactctgcccattcgaaacatccagagcagtgggacctagactacagcttggaaccatacacaggactgactccggagtacatggaaatgagtgagaacccatggtcctgccttccactgggggcaggttcagacaaggggtctgtggggttgaagggggaagtcatccagtttggttttgtcaccctcttcgtggcctcctttcccctggcacctgtgtttgccctcctcaacaacgtcattgaagtgcggctcgatgcaaagaagtttgttacagagctgagacggccggatgctgtaagaaccaaagatatcggaatctggtttgacattctctctggaattggcaagttctctgttatcagcaacgcttttgtcattgcgatcacctccgacttgtatcccccgcctggcgtaccagcactcctaccgccacaatgggactctgcacggctttgtcaaccacaccctctcctttttcaacggcagccagctgaacgaggggacccagccagaaaactcacagtttgaccaagaagttcagatctgcaggataaatgatcaccgagagcctccatgggccccgaacccttatgagttttcgaaacagtactggtttattctgtccgcccgtctggcttttgtcataatcttccagaacctcgtgatgttcctgagcgtcctcgtggactggatgattccagacatccccacggacatcagcgaccagatcaagaaagagaagagcttattagtggatttcttcctgaaagaggagcatgagaagctcaagctgatggatgagccggctctgaggagcccaggagatacccctgtaaagttcttctccacgtatgtggacagcagaagtacagcacttttccatgtacgttatgtcaaaagcagactcggacacagccttctcacacattccctgctcttcaagcttcttccaccaaccccctgctgctttgcctgggcactggcagcttcagagcagagctcccactcaatggaaagggatcaagcagtagtactggtgctggctcctctcctcaaggccacatcagggctgcctggtagcctctgctccagtcatcccttcattccagggaaagatgcagaaaaagcacttggcaaaatccagcatccttttatgattaaaattctcagcacaatcggcatagaagggacatacctcaaggctgattcctcttgtggtcagaagttggctgcagtctttccaggcatcccatccagaaatgacaatgtccaaaggaagaatcttgcatctcttgtcaagaatgaagaaacaaccatggtctcccctgaagagtaa

SEQ ID NO: 119595 - DNA, 543 bp, Homo sapiens
atgagagacagaagcaacacaatacttggtgctgagaagcttaagcggaagcatggagaaagtgtgtctggaccactgacggtcaacacagggcagcatcctcatcatcacgtcacatcagctcacaataccccatattcatccgaaccgttaccaccacacaacatcaagctcaacatcacgaacagcatcatcaccatcataatcagtgcacatcattctccaccgttgcaggcaacacttggggttcacagtggttcgggttattatggtatatccaatatggcaaacacaatggtggcacaggtgaaatctgtgactgttgctgaaggactcatagaagaccattttgatgtcactgtgaagatgagcacctatctggtggccttcatcatttcagattttgagtctgtcagcaagataaccaagagtggagtcaaggaaaaagctaaagctgaacatagagacaagcttggagaaagagatgacactatcccacctgaatacagacatctcctggatgataatggacaggtaaactga

SEQ ID NO: 119596 - DNA, 2252 bp, Homo sapiens
atggatgctgctttggatgacttaatagatactttaggaggacctgaagaaactgaagaagaaaatacaacgtatactggaccagaagtttcagatccaatgagttccacctacatagaggaattgggtaaaagagaagtcacaattcctccaaaatatagggaactattggctaaacccatagggccagatgatgctatagacgccttgtcatctgacttcacctgtgggtcgcctacagctgctggaaagaaaactgaaaaagaggaatctacagaagttttaaaagctcagtcagcagggacagtcagaagtgctgctccaccccaagagaagaaaagaaaggtggagaaggatacaatgagtgatcaagcactcgaggctctgtcggcttcactgggcacccggcaagcagaacctgagctcgacctccgctcaattaaggaagtcgatgaggcaaaagctaaagaagaaaaactagagaagtgtggtgaggatgatgaaacaatcccatctgagtacagattaaaaccagccacggataaagatggaaaaccactattgccagagcctgaagaaaaacccaagcctcggagtgaatcagaactcattgatgaactttcagaagattttgaccggtctgaatgtaaagagaaaccatctaagccaactgaaaagacagaagaatctaaggctgctgctccagctcctgtgtcggaggctgtgtctcggacctccatgtgtagtatacagtcagcaccccctgagccggctaccttgaagggcacagtgccagatgatgctgtagaagccttggctgatagcctggggaaaaaggaagcagatccagaagatggaaaacctgtgatggataaagtcaaggagaaggccaaagaagaagacctggaaaagcttggtgaaaaagaagaaacaattcctcctgattatagattagaagagggcaaggagaaagatggaaagccactcctgccaaaagagtctaaggaacagcttccacccatgagtgaagacttccttctggatgctttgtctgaggacttctctggtccacaaaatgcttcatctcttaaatttgaagatgctaaacttgctgctgccatctctgaagtgctttcccaaaccccagcttcaacgacccaagctggagccccaccccgtgatacctcgcagagtgacaaagacctcgatgatgccttggataaactctctgacagtctaggacaaaggcagcctgacccagatgagaacaaaccaatggaagataaagtaaaggaaaaagctaaagctgaacatcgagacaagcttggagaaagagatgacactatcccacctgaatacagacatctcctggatgataatggacaggacaaaccagtgaagccacctacaaagaaatcagaggattcaaatgaaacctgccgatgaccaagaccccattgatgctctctcaggatatctggacaggtgtccctccactacagaaacctcacagaacacagcaaaggataagtgcaagaaggctgcttccagctccaaagcacctaagaatggaggtaaagcgaaggattcagcaaagacaacagaggaaacttccaagccaaaagatgactaaagaaatacaagttaaggtatctggtatctgcatgtaaaatcttcagctggtggatggtgacttttgaagaacaaaaggctttggcaacagaaaacaattgttctgggtgatttctagaatggtttttgttgagtctctgaacatcctaaatattggtttgttattcttttccagaaagaaaatgaatttgactggttcacctgtgtactgagtattgataaactttgaatttttttaattgccttcaattgggagagaaagctttatatttgtaagaaatatatttgataaagtttattaaagcaacaccaaaaaaacaaaagaaaagctaagtgaattttttgcacattctacacacagtgcctgtaaatctcatttgtattttcagtttgcccttaattttttttgttagtgtttagaaaacaatgttttaaacattcttcagtgttctgatttcttattaccccctttcctcttgggcttttgaactgtatttgatgttgctttgggataatgtttataagtgaaacataagatattgtacattgggcacatatctcctcttgggctgctaaataataaattaataacaggtaacctggacaaaccaggaagcatt

SEQ ID NO: 119597 - DNA, 933 bp, Homo sapiens
atgtcaatatatgcagaaaaagcactagacaaaatccagcaacactttatgattaaaattttcaacaaaatcggcatacaagggacataccttaatgtaataaaagccatatatgacaaacccacagccaaaataatactgaatgaggaaaagttgaaagcattccctctgagagctggaacaagacaaggatgcccactttcaccactcttcttcaacataatactggaagtcctagccagggcaatcaggcaagagaaagaaagaaagggcatccaagtcagtaaagaggaagtcaaactgtcactgtttgctgatgatatgatcatttaccttgaaaaccctgaactcttccaccagcattctcaggccttggaggtgctgaccgatgctgcagccggggctgcgtatgacaaggtcaggaaagccaagaagcaggcagcagagaggactcagaaactagatgaaaaaaggaataaagtgaagcttgatctggaggcccggaagcgggagcggcagcaccaggcggagggggagggagagggggaggaggaggaggaaggggaggggggaggaggaggaggaagaggaggaggagctggaggagagcctgagcaccaggacactagagcgagagatcaaacgcctgataagaaggtaggcactgctgtggtggagtttgcgactgccaaggctgcggagctggctgtccagaatgaagttggcctggtggataaccctctgaagatttcctggttggagggacagccccagagcaccgtgggccccagccgcccagcactgtcaaagggctcagtgctgtcggtgagggaatacgagagcgtcatcgtgatgcacatgcgccatgcggccgagctgcaatggctgatctcagacatgcaccagcaagaccgagaggggcagcccacgtaa

SEQ ID NO: 119598 - DNA, 186 bp, Homo sapiens
atgaggcgaggtggatggaggaagcgagctgaaaatgatggctgggaaacatggggtgggtatatggctgccaaggtccagaaattggaggaacagtttcgatcagatgctgctatgcagaaggatgggacttcatctacaatttttagtggagttgccatctatgttaatggatacacaggttga

SEQ ID NO: 119599 - DNA, 558 bp, Homo sapiens
atggcaaaagatgccggtctaattgaagccaatggagacctcaaggtcttcacagaccagaaccttagtcctggaaaaggcgtggtgtccctcgtggccgttcacccctccaccgtcaacccgctcggggagcagctcttggcaaaaacctctggacagtccaatgtcaacattgcccagcaagtggtagttggtacacctcagagaccggcagcgtcaaacgccctggggaaccagccttccgactcctcaccttggtctgccgggaagcgcaacagaaaaggagaggataatggcaggggcctgcggcatttctccatgaaggtctgcgagaaggtgcagaggaaagggaccacttcctacaaccaagtggcggatgagctggtcgcgaagttcagtgctgccgacaaccacatcttaccaaacgagtcagcttgtgaccagaagaacataagacggcgcgtctgcgatgccttaaacgtgctgagggccgtgagcatcatctccaaggagaaaaaggagatcaagtggattggtctgcccaccaactcggcttaa

SEQ ID NO: 119600 - DNA, 499 bp, Homo sapiens
  misc_feature (1)...(499): n = a,t,c or g
gccagggtgagccccgcgtcccggcgccactcggcccgcgcctctccgcgccgccccgcgctccgcaccgcgccctctccgcgtccccgcccgcgcggccggaccgggcagccagaaaaatcatttttcttctctgggaaggtgaacatttgtagcattgatttcccggatctggtaacatggcaaaagatgccggtctaattgaagccaacggagaactcaaggtcttcatagaccagaaccttagtcccgggaaaggcgtggtgtccctcgtggccgttcacccctccaccgtcaacccgctcgggaagcagctcttgccaaaaacctttggacagtccaatgtcaacattgcccagcaagtggtaattggtacgcctcagagaccggcagcgtcaaacaccctgggtgggtaggaagcccacacacccccagcactcactttgcctctcaagaaccagncttccgactcctcaccttgggtctgccgggaagcgca

SEQ ID NO: 119601 - DNA, 464 bp, Homo sapiens
gctggttgcggagttcagtgctgccgacaaccacatcttaccaaacgagtcagcttatgaccagaaaaacataagacggcgcgtctacgatgccttaaacgtgctaatggccatgaacatcatctccaaggagaagaaggagatcaagtggattggtctgcccaccaactcggctcaggaatgtcagaacttagaggtggaaagacagaggagacttgaaagaataaaacagaaacagtctcaacttcaagaacttattctacagcaaattgccttcaagaacctggtgcagagaaaccgggcatgcggagcagcaggccagccggccaccgccacccaactcagtcatccacctgcccttcatcatcgtcaacaccagcaagaagacggtcatcgactgcagcatctccaatgacaaatttgagtatctgtttaattttgacaacacataaaaaaaaaaaaaa

SEQ ID NO: 119602 - DNA, 162 bp, Homo sapiens
ttatgcttccggctcgtatgttgtgtggaattgtgagcggataacaatttcacacaggaaacagctatgaccatgattacgaattcgagctcggtacccgtaggttttcccgtccttgaatttccatatccgggtgcggaagtcgcctgctttctcgggcat

SEQ ID NO: 119603 - DNA, 1383 bp, Homo sapiens
  misc_feature (1)...(1383): n = a,t,c or g
ttatgcttccggctcgtatgttgtgtggaattgtgagcggataacaatttcacacaggaaacagctatgaccatgattacgaattcgagctcggtacccgcccgggtgtggaacaggcacagctgcagccctccgatgcggccagcgcgctgggccagatcgatgtggtgctgccgatcgtgcacgggccgggggatcctctagagaaaactgcatggcagccaaagttccattactattgctgtatttggtaagcaaaatacgtacatcaggctcgaaccctttaagatcaacgttcttgagcagatcacgaagcatatcgaaaaactgcagtgcggaggtgtagtcaaacaactcagcaggcgtgggaacaatcagcacatcagcagcacatacgacattaatcgtgccgatacncaggttaggcgcgctgtcaataactatgacatcatagtcatgagcaacagtttcaatggccagtcggagcatcaggtgtggatcggtgggcagtttaccttcatcaaatttgcccattaactcagtttcaatacggtgcagagccagacaggaaggaataatgtcaagccccggccagcaagtgggctttattgcataagtgacatcgtccttttccccaagatagaaaggcaggagagtgtcttctgcatgaatatgaagatctggtacccatccgtgatacattgaggctgttccctgggggtcgttaccttccacgagcaaaacacgtagccccttcagagccagatcctgagcaagatgaacagaaactgaggttttgtaaacgccacctttatgggcagcaaccccgatcaccggtggaaatacgtcttcagcacgtcgcaatcgcgtaccaaacacatcacgcatatgattaatttgttcaattgtataaccaacacgttgctcaacccgtcctcgaatttccatatccgggtgcggtagtcgggggatcctagttctggagactgggaagtggaagatcaaggtgctggcagatttggtgtctggcgagggctccttttctgcctcatagatagagccttgttgacaaatttctgcaggcagcttaaatttctctccagaaaatgggtttttcttttctactgcattgtcaggctgcaaattttccaaagttttatgctctgtcacctcttgaatgttttggtgcttagaaatttcttccaccagataccccaaatcatctctctcaagttcaaggttccacagatctctagggcaggggcaaaattctgccagtctctttgcatagcaagtggcctttactccaattcccaacaagttcctcatctccatctgagaccacctcagcctggattttattgtccatatcactgtcagcat

SEQ ID NO: 119604 - DNA, 1407 bp, Homo sapiens
atggaagccatcacaaacggcatgatgaacctgaatcgccagcggcatcagcaccttgtcgccttgcgtataatatttgcccatggtgaaaacgggggcgaagaagttgtccatattggccacgagatccccttacctggcactacaggtactgcactagaaggattgggacttaaagtttatgaactcacccaaactttacaacacccacgttatggtgttccggaaagatttggtaccaagatcagaaaatctgatggcaccctacaggaacatgacggtatctgcgagatccatgttgctaaatatgctgaaatattcggattgacctatgcggaagccagtacggatatacggcaggcattgaagagtttcgcggggaaggaagtggttttttatcgccctgaagaggatgccggcgatgaaaaaggctatgaatcttttccttggtttatcaaaccctcagacattacaccgcagcctcggacattacaccgcagccacggacattacaccgcagccacggacattacaccgcagcctcgtaaattacaccgcagccacggacattacaccgcagcctcggacattacaccgcagcctcggagagtacaccgcaacctcggacattacaccgcagccacggacattacaccgcagcctcggacattacaccgcagccacggacattacaccgcagcctcggacattacaccgcagcgcctgacattacaccgcagccacggacattacaccgcagtcactgacattacaccggagccacggacattacaccgcagcctcggacattacaccgcagccacggacattacaccgcaggcactgacattacaccggaggcacggacattacaccgcagtcacggacattacaccgtggcctcggaaattacaccgtaggctagtatcttacagcggagccaccggctttacaccgcaggctcagactttacaccgaaggcggggacattacaccggaagccccggactttacaaccggaatcactgtacattacgccgggagtcgctggacattacaccgaaaggcagggacattacaccgaaggggtggtacataaaccgcaggcctcgaacttacacgggggcaatggacttccaccggaaccttggacttatcaccgaaagccgggacattaacgggacccccctcggacattacaccgcagcctcggacattacaccgcagccacggacattacaccgcagcctcggacattacaccgcagcctcggacattacaccgcagccacggacattacaccgcagcgggtaccgagctcgaattcgtaatcatggtcatagctgtttcctgtgtgaaattgttatccgctcacaattccacacaacatacgagccggaagcataa

SEQ ID NO: 119605 - DNA, 603 bp, Homo sapiens
ttatgcttccggctcgtatgtgttgtggaattgtgagcggataacaatttcacacaggaaacagctatgaccatgattacgaattcgagctcggtacccgatcttaagcttaattaaaacttttattttcctgaactctgcctgactgacagttacctgcaggaagcggggaaggaccctatcatctggaggggcagctttcttattgccacagagggggagagaaagcccttgctgcacttttgtcatctcccacgagcaaaacacgtagcccttcagagccagatcctgagcaagatgaacagaaactgaggttttgtaaacgccacctttatgggcagcaaccccgatcaccggtggaaatacgtcttcagcacgtcgcaatcgcgtaccaaacacatcacgcatatgattaatttgttcaattgtataaccaacacgttgctcaacccgtcctcgaatttccatatccgggtgcggtagtcgccctgctttctcggcatctctgatagcctgagaagaaaccccaactaaatccgctgcttcacctattctccagcgccgggttattttcctcgcttccgggctgtcatcattaaactt

SEQ ID NO: 119606 - DNA, 2229 bp, Homo sapiens
tcactgcccgctttccagtcgggaaacctgtcgtgccagctgcattaatgaatcggccaacgcgcggggagaggcggtttgcgtattgggcgccagggtggtttttcttttcaccagtgagacgggcaacagctgattgcccttcaccgcctggccctgagagagttgcagcaagcggtccacgctggtttgccccagcaggcgaaaatcctgtttgatggtggttccgaaatcggcaaaatcctgcccgctttccagtcgggaaacctgtcgtgccagctgcattaatgaatcggccaacgcgcggggagaggcggtttgcgtattgggcgccagggtggtttttcttttcaccagtgagacgggcaacagctgattgcccttcaccgcctggccctgagagagttgcagcaagcggtccacgctggtttgccccagcaggcgaaaatcctgtttgatggtggttccgaaatcggcaaaattccttataatccactgaattaggggtggggcataagagccttcatttttaccagccactctaggtgattctgatgcctgtgttctggtgtacagaattgcaggtgtggcagggaagatgggaactggtgctccagcgtccaacacgtggcattccctcaggccggcctgcttgcccccacactcctcatcctccttccccatctggttgctcttcacaacagctctgctgacttcatgctcaatgtcttgggccttcctgctgtgggccatgggacctccagcgtccaacacgtggcattccctcaggccggcctgcttgcccccacactcctcatcctccttccccatctggttgctcttcacaacagctctgctgacttcatgctcaatgtcttgggccttcctgattaattgcgttgcgctcactgcccgctttccagtcgggaaacctgtcgtgccagctgcattaatgaatcggccaacgcgcggggagaggcggtttgcgtattgggcgccagggtggtttttcttttcaccagtgagacgggcaacagctgattgcccttcaccgcctggccctgagagagttgcagcaagcggtccacgctggtttgccccagcaggcgaaaatcctgtttgatggtggttccgaaatcggcaaaatcccttcatgggaggagccggatattctacccattttttcgtcccctttttcatttggggctggggctcagtttttccgtttttttttttgaggatggccattgtcctaatccccttgctgtccccatgggttgctccactctgttcaatttttacttttctgatcagggtaccgagctcgaattcgtaatcatggtcatagctgtttcctgtgtgaaattgatatccgctcacaattccacgcctggccctgagagagttgcataagcgggtcccgctgttttgccccatcaggcgaaaatcctggttgatggtggtttcgaaatcggggataattctctgcccgctttccagtcgggaaacctgtcgtgccagctgcattaatgaatcggccaacgcgcggggagaggcggtttgcgtattgggcgccagggtggtttttcttttcaccagtgagacgggcaacagctgattgcccttcaccgcctggccctgagagagttgcagcaagcggtccacgctggtttgccccagcaggcgaaaatcctgtttgatggtggttccgaaaatcggcaaaatccagcttcgccagtcactatggcgtgctgctagcgctatatgcgttgatgcaatttctatgcgcacccgttctcggagcactgtccgaccgctttggccgccgcccagtcctgctcgcttcgctacttggagccatgtcagctgtccttgctccaggatgctgtttttgacaacggatgttttattgcctttgatgttcattaagaagcttggcgcaaatgttgcctttttatcctcgaagaagcctctgtttgtcatgtagcttgtgataaccacattgttgcctttggcttgcggcactgcgaagtgagagtaagtgaatgtcacatcgtttggatcaagacccatttgcagcacaagccctgttttgttcagcggcttgtaagggccggttaaagagtttgatacataaccaagcatgtaaatatcgtttgagttaataccatcgatcgtcatttttgaaccgcgggaattcagtgaacaagtaccattttgccgttgcat

SEQ ID NO: 119607 - DNA, 561 bp, Homo sapiens
atggcgacccggatctctgatgggcgtccctggggggttggagcttttttagcgttgctggcgagcgttgtggcgccgccgctgcgcggggtcgcggtgattgtttccgtgggcggtagagaagcaccgctcctctccgagattacgcacggcggcggtgtggggcgctggatgtggcgcgccatcgtgccgtgtaaccgagcatatcgagcgaactggcgaggagacacagaggaactgttctgtcagatagctcttacgctcatcgcacgaagagaatgcaccgtgggagaaactccacgtggaggtggaggtgttgacacaagccttgaaccctctacaaataagacaacagccacatggtgccttagatcccctgtgctggtctcgatcaccgagatcaccggcgtcagcgacaacctgatcaccacccaggagatgttccgccacgagctgcagatcgggtaccgagctcgaattcgtaatcatggtcatagctgtttcctgtgtgaaattgttatccgctcacaattccacacaacatacgagccggaagcataa

SEQ ID NO: 119608 - DNA, 495 bp, Homo sapiens
atggccggagaggcctcaggaaacttagaatcttggcagaaggcagaggggaagcagagataccggcattggacccaggatgggaacgtggctgttggggagaagatgagcagagaggaaagaggccattacagagaccgtcagcaatcagcttcattctttaggagacatccacatccagggcttccagaggccatggcagggctgggtcaagccctcctgggggaggagggggatcccctggacatccgcctggagtaccaacccctgtcactcagagaccccagaaagatgaaaaacggggtggaaaatgcattggaattgtttacagggaggatgtatgtgaacaccagcattgggggtccaaacgtgccgattcttggaccgccaggagtcgggtaccgagctcgaattcgtaatcatggtcatagctgtttcctgtgtgaaattgttatccgctcacaattccacacaacatacgagccggaagcataa

SEQ ID NO: 119609 - DNA, 1055 bp, Homo sapiens
aggaatccccggtaccgaactcgaattcgaatcctggtcctagcctgttcctgtggaaaatggtaacccgttacaattccacacaacatacgagccccgaagctaaagggatctgcaagtggatatttggaccactctgtggccttcgttcgaaacgggtatatcttcgcataaaatctagaggatccccgggtaccgagctcgaattcgtaatcatggtcatagctgtttcctgtgtgaaattgagggatcccgggtaccgagctcgaattcctaatcatggtcatagctgtttcctgggtaaaatgttatccgctcacaattccacccacataccaaccgggaaccttaagtggatctgcaagtggatatttggaccactctgtggccttcgttcgaaacgggtacatcttcgcataaaatctagaggatccccggatcctcgtagcagtgttctggaatcctatatgagggacaaacattcagagcccagctgcagtgttctggaatcctatgtgagtgacaaaccttcagaacttcttagcagtgttctggaatttgttttggaatcctatgtgagtgaaaaatgttcagaccctcgtagcattgttctggaatccaatatgagggacaaacactcagaatccagtaacagtgttctggaaccctccgtgagggataaacattcagaccctcatagcagtgttctggaatcctatgtgagggacaaacactcagaacccagcagcagtgttctagaatcctttgtgagggacaaacattcagaccctcgtagcagtgttctggaatcctatgtgagggacagacattcagaacccagcattagtgttctggaatcctatgtgaggaactcacattcagacccttgtaccagtgttctggaatcctctgtgggggacaacaattcagaggcttgtagcagtgttctggaatcctttgtgaaggacacatgttcagacgacagcaggagtgttcttgagtcctatgtgggggacaaacacgcagaacacagcagcagtgtcctggaatcatat

SEQ ID NO: 119610 - DNA, 1060 bp, Homo sapiens
atgtttgatagttctgtgtttcttgaggatgcggagagatacgggcagaggcaccctctgcaagttacagaccctcgaggggtccctgcagtcctggagatgagggtgttgggaggggacgtcttcttggtgcccatggaatgggcctgctttgtggattggggcctggtctgggacctcagtgacattgacaaggatgggcacttggatcgagatgagttcgctgtgcgtttgcctcaaacgggtcgcatcgtcttacctacacaaagatcggtagcccctcactgcacagtcccgcattccacgcacgataccgatcctggcgccgctagcggtactaggaccatccggaggtcacgtgcgtatgatccggtatggcgctcggacggcaattcgggggaacgactctctgccctgaagcccctcacgggtaccacatgtgacgtccagctgctagcttgcagctcagccgaccaaaagatgaacaaaaataccagaaagacgataaagctgatgatgacgggcccgggggcggctatggaaaccacctcattacgagtccacgagaaaagagagtatgggaggaaagagggaggcggtgccacccagcgggggccagacacaagagacagatgagctcgccagcagtgccttcccagcagcccaggggacgcgtgtgcttccacataaatccttgggactgaggacttggctgctgagaaaagaaacacatcaagcattgaacataaagaggcaagtgtggtgtttagagagcacgagcgctcactcttattccagggaggaagaggaatccatgacgtacagaggcccaggagcagaagggctccagggaggagccctgggagagagggtggcagcacggagagagctgctggaggcagcagagcaccaaggaaacatccagacatgcgcggcccggcccatccgctcccggaacagcaccaagacgaaatgggaaactacatgtccccagcgcccccccccggaggcggccactttcattctggatgtcttccggggtcggtccttcggcttttaa

SEQ ID NO: 119611 - DNA, 726 bp, Homo sapiens
atgctgggaagtgaatgtgattacctgtgtcagttatccttttctagtcattcatctacgtgctgctttaaagatgctaaaaaagacctggtgtcatccaggaaccagattactcatatttatggaatttcatataatcagtgccataggaccatgagttttaagttgaatgtagacagtcattgtgctctcaaggaagctgtggaggaggaaggacaccaacttcttgagcttattgcatctcacaaagcagaaggactgaaggacatgctgcggatgattgcaagtcaatggaaggagctgcagaggcaaatcaaacggcagcacagctggattctcagggctctggataccatcaaagccgagatactggctactgatgtgtctgtggaggatgaggaagggactggaagccccaaggcagaggagaaacccatccagccctgcaatgttgagacccatgcagccagtgaaaagctcagacaatttacagcttttgaatctcaaacaacgcctttaacttatttgttggaaacagaggatagaatgatgagctcagtttcacttaaagaaacctccatgaagaaggttgcatttcaggaagtacttgaaggaaggaggagagttccatcttcattgaaatctagcaaaactgctgaaggtaaggtagtggcaatggtgcatgaaaaaagggaaaaggagtacagtgattcatggcatacttga

SEQ ID NO: 119612 - DNA, 387 bp, Homo sapiens
atgaaggcggctctggacatcaagccactgaaacaaaacactgaacgtaagttacatcaaatgtggctacaggaaatggaagagtttgtccagagctctggagaaaatggtgttgtggtgttttctctggggtcgatggtcagtaacacatcagaagaaagggccaatgtaattgcatcagcccttgccaagatcccacaaaagaaacaggaaacaaaagggttagtggaccctgaccctgcaagtcaattatttgagaaaccatgttgggatccatcaaaacagcagaggaacacagagagcagagaggagcaaacctgggcactgacctgtctaggcttagaacggagcaaggagaacctctccaacacgagaaaggaagagtga

SEQ ID NO: 119613 - DNA, 795 bp, Homo sapiens
atgctgtttggttactgtacccttgcagtaaaatctgaagtccaggaaatggaagagtttgtccagagctctggagaaaatggtgttgtggtgttttctctggggtcgatggtcagtaacacatcagaagaaagggccaatgtaattgcatcagcccttgccaagatcccacaaaagggattttgccgatttcggaaccaccatcaaacaggattttcgcctgctggggcaaaccagcgtggaccgcttgctgcaactctctcagggccaggcggtgaagggcaatcagctgttgcccgtctcactggtgaaaagaaaaaccaccctggcgcccaatacgcaaaccgcctctccccgcgcgttggccgattcattaatgcagctggcacgacagtagaggaggaggaggaggaggaagaagatgaagaagcagaagaagaaggaggaggaggaggaggagaaggaggagaaggagaaggaggagaaggagaaggagaaggagaaggagaagagaacagaacagaagaaaagaagagggagagaaagaagagaagtagaaggagaagaagaagaaagaaggaggaggaggaggaggagtcaagtagaaggaagccagatgtgggggatcctctagactcaactgcgggtcatgcaacacaagtcgatattgtactgccagttcttggtctcgaggctcaaagggttgatggagagtttcttctcttggtcccagtgtgtgttgttccttgtcatatgtctgtgtcttctcatcgttcagctcccatttataaatga

SEQ ID NO: 119614 - DNA, 1859 bp, Homo sapiens
tgcattgcaccaggatgtctgtgaaatggacttcagtaattttgctaatacaactgagcttttgctttagctctgggaattgtggaaaggtgctggtgtgggcagcagaatacagccattggatgaatataaagacaatcctggatgagcttattcagagaggtcatgaggtgactgtactggcatcttcagcttccattctttttgatcccaacaactcatccgctcttaaaattgaaatttatcccacatctttaactaaaactgagttggagaatttcatcatgcaacagattaagagatggtcagaccttccaaaagatacattttggttatatttttcacaagtacaggaaatcatgtcaatatttggtgacataactagaaagttctgtaaagatgtagtttcaaataagaaatttatgaaaaaagtacaagagtcaagatttgacgtcatttttgcagatgctatttttccctgtagtgagctgctggctgagctatttaacataccctttgtgtacagtctcagcttctctcctggctacacttttgaaaagcatagtggaggatttattttccctccttcctacgtacctgttgttatgtcagaattaactgatcaaatgactttcatggagagggtaaaaaatatgatctatgtgctttactttgacttttggttcgaaatatttgacatgaagaagtgggatcagttttatagtgaagttctaggaagacccactacgttatctgagacaatggggaaagctgacgtatggcttattcgaaactcctggaattttcagtttcctcatccactcttaccaaatgttgattttgttggaggactccactgcaaacctgccaaacccctgcctaaggaaatggaagactttgtacagagctctggagaaaatggtgttgtggtgttttctctggggtcaatggtcagtaacatgacagaagaaagggccaacgtaattgcatcagccctggcccagatcccacaaaaggttctgtgggagatttgatggggattaaaccagataccttaggtctcaatactcggctgtataagtgggataccccagaattgaccttctaggtcatccaaagaccagagcttttataactcatggtggagccaatggcatctacgaggcaatctaccatgggatccctatggtggggattccattgtttgccgatcaacctgataacattgctcacatgaaggccaggggagcagctgttagagtggacttcaacacaatgtcgagtacagacttgctgaatgcattgaagagagtaattaatgatccttcatataaagagaatgttatgaaattatcaagaattcaacatgatcaaccagtgaagcccctggatcgagcagtcttctggattgaatttgtcatgcgccacaaaggagctaaacaccttcgggttgcagcccacgacctcacctggttccagtaccactctttggatgtgattgggttcctgctggtctgtgtggcaactgtgatatttatcgtcacaaaatgttgtctgttttgtttctggaagtttgctagaaaagcaaagaagggaaaaaatgattagttatatctgagatttgaagctggaaaacctgataggtgagactacttcagtttattccagcaagaaagattgtgatgcaagatttctttcttcctgagacaaaaaaaaaaaaaagaaaaaaaaatcttttcaaaatttactttgtcaaataaaaatttgtttttcagagatttaccacccagttcatggttagaaatattttgtggcaatgaagaaaacactacggaaaataaaaaataagataaagcctt

SEQ ID NO: 119615 - DNA, 2802 bp, Homo sapiens
ctgcacaaggatggctctgaaatggactacagttctgctgatacaactcagtttttactttagctctgggagttgtggaaaggtgctggtatgggccgcagaatacagcctttggatgaatatgaagacaatcctgaaagaacttgttcagagaggtcatgaggtgactgtactggcatcttcagcttccattctttttgatcccaacgactcatccactcttaaacttgaagtttatcctacatctttaactaaaactgaatttgagaatatcatcatgcaattggttaagagattgtcagaaattcaaaaagatacattttggttacctttttcacaagaacaagaaatcctgtgggcaattaatgacataattagaaacttctgtaaagatgtagtttcaaataagaaacttatgaaaaaactacaagagtcaagatttgacatcgtttttgcagatgcttatttaccctgtggtgagctgctggctgagctatttaacataccctttgtgtacagtcacagcttcagtcctggctactcatttgaaaggcacagtggaggatttattttccctccttcctacgtacctgttgttatgtcaaaattaagtgatcaaatgactttcatggagagggtaaaaaatatgctctatgtgctttattttgacttttggttccaaatatttaatatgaagaagtgggatcagttttacagtgaagttttaggaagacccactacattatctgagacaatgaggaaagctgacatatggcttatgcgaaactcctggaattttaaatttcctcatccattcttaccaaatgttgattttgttggaggactccactgcaaacctgccaaacccctacctaaggaaatggaggagtttgtacagagctctggagaaaatggtgttgtggtgttttctctggggtcaatggtcagtaacatgacagaagaaagggccaacgtaattgcaacagcccttgccaagatcccacaaaaggttctttgggagattttgatggggattaaaccagatgccttaggtctcaatactcgactgtacaagtggataccccagaatgaccttctaggtcatccaaaaaccagagcttttataactcatggtggagccaatggcatctatgaggcaatctaccatgggatccctatggtgggcattccatttgtttttgatcaacctgataatattgctcacatgaaggccaagggagcagctgttagagtggacttcaacacaatgtcgagtacagacctgctgaatgcactgaagacagtaattaatgatccttcatataaagagaatattatgaaattatcaagaattcaacatgatcaaccagtgaagcccctggatcgagcagtcttctggattgaatttgtcatgcgccacaaaggagccaaacatcttcgagttgcagcccacaacctcacctggttccagtaccactctttggatgtgattgggttcctgctggcttgtgtggcaaccgtgctatttatcatcacaaagtgttgtctgttttgtttctggaagtttgctagaaaaggaaagaagggaaaaagggattagttatatctgagatttgaagctggggaattccgtttattgaagattcaggttaacctgaatcaagttaacccagtctcaaatgctcacttatcctatctccttggcacaaatctctcctctcctggattgccaaagaaaattcaaattattcttcaattagtcaggatgatttgactatcagcagttcatagtacccatcttcataactaagccacctagggatccggcagaaaaaaaagggatgcaggggagtcatcatacagggggtggatcatttaccaggatccacacttcctacaaagcggttgtaatattaaataacaaaactgttttttattccaatcttcacataaaacaggaataattgtatactttcttactaatgtgttccatggagtttttcctccaagaagtggcttaggggaaaatgagccccagtaatgctctgtggcatccaatccttctaccccgaccctttgactttctgccccagcccctcttagttctcctagaattaggactaaggttaagtgccctcttgggatatgacttccttcccttcctcttgatacaaaaagagcctattaccaaccctcatacacacaagagttcccttcctagttgcagactcttctgctccagctggactcccctagctctggactcccactagatcacacaggggtccctgcatgtcagtaaactttggatgaccttgggagaccaaaaaatggaatatcattttttgatctaaacaaaatagtttcctgatttaacactggccaggaaggtgggctgcaccctcagtctctctctcccatcatggttttcacatgatatcaaaggactctcataacagtctgattcttatgagttgggcatcctgtgtttccctttagggcctgcttccttcaaatagaggagatgggtgctatgaaacctattcactctggacttgggatggctcttctccatcttcccaagtctgagctggagcctccatgcccaactctgctctgctcttctatttcctgacagcagctaaggcatgttcctgttctgcccccaaattgaccttactaacagtgagaacttggaggagtcttcgggtcttgggaaatccaagttttcccggaaacgttttgttgtaaacagtgtccacactctttgctccaataaagctcggttccttaagggaattc

SEQ ID NO: 119616 - DNA, 2111 bp, Homo sapiens
agcagcaactggaaaacaagcattgcattgcatcaggatgtctatgaaatggacttcagctcttctgctgatacagctgagctgttactttagctctgggagttgtggaaaggtgctggtgtggcccacagaattcagccactggatgaatataaagacaatcctggatgaacttgtccagagaggtcatgaggtgactgtattggcatcttcagcttccatttctttcgatcccaacagcccatctactcttaaatttgaagtttatcctgtatctttaactaaaactgagtttgaggatattatcaagcagctggttaagagatgggcagaacttccaaaagacacattttggtcatatttttcacaagtacaagaaatcatgtggacatttaatgacatacttagaaagttctgtaaggatatagtttcaaataagaaacttatgaagaaactacaggagtcaagatttgatgttgttcttgcagatgctgttttcccctttggtgagctgctggccgagttacttaaaataccctttgtctacaggcctcgcttctctcctggctacgcaattgaaaagcatagtggaggacttctgttccctccttcctatgtgcctgttgttatgtcagaactaagtgaccaaatgactttcatagagagggtaaaaaatatgatctatgtgctttattttgaattttggttccaaatatttgacatgaagaagtgggatcagttctacagtgaagttctaggaagacccactacgttatctgagacaatggcaaaagctgacatatggcttattcgaaactactgggattttcaatttcctcacccactcttaccaaatgttgagttcgttggaggactccactgcaaacctgccaaacccctaccgaaggaaatggaaggagtttgtccagagctctggagaaaatggtgttgtggtgttttctctggggtcgatggtcagtaacacgtcagaagaaagggccaatgtaattgcatcagcccttgccaagatcccacaaaaggttctgtggagatttgatgggaataaaccagatactttaggactcaatactcggctgtacaagtggataccccagaatgatcttcttggtcacccaaaaaccagagcttttataactcatggtggagccaatggcatctatgaggcaatctaccatggaatccctatggtgggcgttccattgcttgcagatcaacctgataacattgcacacatgaaggccaagggagcagctgttagtttggacttccacacaatgtcgagtacagacttactcaatgcactgaagacagtaattaatgatcctttatataaagagaatgctatgaaattatcaagaattcatcatgatcaaccagtgaagccccttgatcgagcagtcttctggattgaatttgtcatgcgccataaaggagccaagcaccttcgggttgcagcccacgacctcacctggttccagtaccactctttggatgtgactgggttcctgctggcctgtgtggcaactgtgatattcatcatcacaaaatgtctgttttgtgtctggaagtttgttagaacaggaaagaaggggaaaagagattaattacgtctgaggctggaagctgggaaacccaataaatgaactcctttagtttattacaacaagaagacgttgtgatacaagagattcctttcttcttgtgacaaaacatctttcaaaacttaccttgtcaagtcaaaatttgttttagtacctgtttaaccattagaaatatttcatgtcaaggaggaaaacattagggaaaacaaaaatgatataaagccatatgaggttatattgaaatgtattgagcttatattgaaatttattgttccaattcacaggttacatgaaaaaaaatttactaagcttaactacatgtcacacattgtacatggaaacaagaacattaagaagtccgactgacagtatcagtactgttttgcaaatactcagcatactttggatccatttcatgcaggattgtgttgttttaactgttgttgaggaagctaataaataattaaattgtaaaaaaaaaaaaaaaaa

SEQ ID NO: 119617 - DNA, 228 bp, Homo sapiens
atggtggataagcacaaggagaacatagcagccatcatgattacatacccatccaccaatggggtgtttgaagagaacatcagtgaccggaatgaggatgcatgtcctgtgggaaccgtcagtgcggccccatggggctccagttccatcttgaccatttcttgggcttatatcaagatgatgggaggcaagggccttaaacaagcctacggaaagtgtcgatattaa

SEQ ID NO: 119618 - DNA, 3762 bp, Homo sapiens
cccgcgagcgtccatccatctgtccggccgactgtccagcgaaaggggctccaggccgggcgcacgtcgacccgggggaccgaggccaggagaggggccaagagcgcggctgacccttgcgggccggggcaggggacggtggccgcggccatgcagtcctgtgccagggcgtgggggctgcgcctgggccgcggggtcgggggcggccgccgcctggctgggggatcggggccgtgctgggcgccgcggagccgggacagcagcagtggcggcggggacagcgccgcggctggggcctcgcgcctcctggagcgccttctgcccagacacgacgacttcgctcggaggcacatcggccctggggacaaagaccagagagagatgctgcagaccttggggctggcgagcattgatgaattgatcgagaagacggtccctgccaacatccgtttgaaaagacccttgaaaatggaagaccctgtttgtgaaaatgaaatccttgcaactctgcatgccatttcaagcaaaaaccagatctggagatcgtatattggcatgggctattataactgctcagtgccacagacgattttgcggaacttactggagaactcaggatggatcacccagtatactccataccagcctgaggtgtctcaggggaggctggagagtttactcaactaccagaccatggtgtgtgacatcacaggcctggacatggccaatgcatccctgctggatgaggggactgcagccgcagaggcactgcagctgtgctacagacacaacaagaggaggaaatttctcgttgatccccgttgccacccacagacaatagctgttgtccagactcgagccaaatatactggagtcctcactgagctgaagttaccctgtgaaatggacttcagtggaaaagatgtcagtggagtgttgttccagtacccagacacggaggggaaggtggaagactttacggaactcgtggagagagctcatcagagtgggagcctggcctgctgtgctactgaccttttagctttgtgcatcttgaggccacctggagaatttggggtagacatcgccctgggcagctcccagagatttggagtgccactgggctatgggggaccccatgcagcattttttgctgtccgagaaagcttggtgagaatgatgcctggaagaatggtgggggtaacaagagatgccactgggaaagaagtgtatcgtcttgctcttcaaaccagggagcaacacattcggagagacaaggctaccagcaacatctgtacagctcaggccctcttggcgaatatggctgccatgtttcgaatctaccatggttcccatgggctggagcatattgctaggagggtacataatgccactttgattttgtcagaaggtctcaagcgagcagggcatcaactccagcatgacctgttctttgataccttgaagattcattgtggctgctcagtgaaggaggtcttgggcagggcggctcagcggcagatcaattttcggctttttgaggatggcacacttggtatttctcttgatgaaacagtcaatgaaaaagatctggacgatttgttgtggatctttggttgtgagtcatctgcagaactggttgctgaaagcatgggagaggagtgcagaggtattccagggtctgtgttcaagaggaccagcccgttcctcacccatcaagtgttcaacagctaccactctgaaacaaacattgtccggtacatgaagaaactggaaaataaagacatttcccttgttcacagcatgattccactgggatcctgcaccatgaaactgaacagttcgtctgaactcgcacctatcacatggaaagaatttgcaaacatccacccctttgtgcctctggatcaagctcaaggatatcagcagcttttccgagagcttgagaaggatttgtgtgaactcacaggttatgaccaggtctgtttccagccaaacagcggagcccagggagaatatgctggactggccactatccgagcctacttaaaccagaaaggagaggggcacagaacggtttgcctcattccgaaatcagcacatgggaccaacccagcaagtgcccacatggcaggcatgaagattcagcctgtggaggtggataaatatgggaatatcgatgcagttcacctcaaggccatggtggataagcacaaggagaacctagcagctatcatgattacatacccatccaccaatggggtgtttgaagagaacatcagtgacgtgtgtgacctcatccatcaacatggaggacaggtctacctagacggggcaaatatgaatgctcaggtgggaatctgtcgccctggagacttcgggtctgatgtctcgcacctaaatcttcacaagaccttctgcattccccacggaggaggtggtcctggcatggggcccatcggagtgaagaaacatctcgccccgtttttgcccaatcatcccgtcatttcactaaagcggaatgaggatgcctgtcctgtgggaaccgtcagtgcggccccatggggctccagttccatcttgcccatttcctgggcttatatcaagatgatgggaggcaagggtcttaaacaagccacggaaactgcgatattaaatgccaactacatggccaagcgattagaaacacactacagaattcttttcaggggtgcaagaggttatgtgggtcatgaatttattttggacacgagacccttcaaaaagtctgcaaatattgaggctgtggatgtggccaagagactccaggattatggatttcacgcccctaccatgtcctggcctgtggcagggaccctcatggtggagcccactgagtcggaggacaaggcagagctggacagattctgtgatgccatgatcagcattcggcaggaaattgctgacattgaggagggccgcatcgaccccagggtcaatccgctgaagatgtctccacactccctgacctgcgttacatcttcccactgggaccggccttattccagagaggtggcagcattcccactccccttcatgaaaccagagaacaaattctggccaacgattgcccggattgatgacatatatggagatcagcacctggtttgtacctgcccacccatggaagtttatgagtctccattttctgaacaaaagagggcgtcttcttagtcctctctccctaagtttaaaggactgatttgatgcctctccccagagcatttgataagcaagaaagatttcatctcccaccccagcctcaagtaggagttttatatactgtgtatatctctgtaatctctgtcaaggtaaatgtaaatacagtagctggagggagtcgaagctgatggttggaagacggatttgctttggtattctgcttccacatgtgccagttgcctggattgggagccattttgtgttttgcgtagaaagttttaggaactttaacttttaatgtggcaagtttgcagatgtcatagaggctatcctggagacttaatagacatttttttgttccaaaagagtccatgtggactgtgccatctgtgggaaatcccagggcaaatgtttacattttgtataccctgaagaactctttttcctctaatatgcctaatctgtaatcacatttctgagtgttttcctctttttctgtgtgaggttttttttttttttaatctgcatttattagtattctaataaaagcattttgatcgg

SEQ ID NO: 119619 - DNA, 2443 bp, Homo sapiens
  misc_feature (1)...(2443): n = a,t,c or g
ctccgccgtgctaactcctcgctagctctccctctcacacacgctcacacccggctcgagatggcggcggcggcggcggcggcgggggactcggactcctgggacgccgacgctttctccgtggaagacccagtgcggaaggtggggggcggcggcactgccggcggggaccgctggggaggcgaggacgaggacgaggacgtcaaggataactgggatgacgatgatgatgaaaaaaaagaggaagcagaagtaaaaccagaggtaaaaatttcagaaaagaaaaaaatagcagagaagataaaagagaaagaacggcaacagaagaaaaggcaagaagaaattaaaaagaggttagaagaacccgaagaacctaaagtgctaacaccagaagaacaattagcagataaactgcggctaaagaaattacaggaagagtcagacctcgaattagcaaaggaaacttttggtgttaataatgcagtttatggaatagatgctatgaacccatcttcaagagatgactttacagagtttggaaagttactaaaagataaaattacacaatatgaaaagtcactatattatgccagttttttggaagtcttagttcgagatgtgtgtatttcattggaaattgatgacttgaaaaaaattaccaattcactgactgtgctttgcagtgaaaaacagaagcaagaaaagcaaagcaaagccaaaaagaagaagaaaggtgtggttcctggagggggattaaaagccaccatgaaagatgatctggcagattatggtggttatgatggaggatatgtacaagactatgaagacttcatgtgacattttatcttttcttggtgtcatctttatgttgcccacaatcccttgaacatgtagcacaacttcctttcctttcagttctgccaaatgctacaatcagaagtgcagtatcttttgtgctggttaaaattgggaacctaagttgctactaaatcatagttcaaaacctaataatgttgtcgttgttgctatctgatttcatagcagcagtcactaaattggaaacaaaaggttgcaacgtgacaaaaaaaattgtgtagtatttaccagcaccattcagtaatacagccttaaccatacctccttgaactacttcataacttgtcaagaaaagcagtttgcagcaagggcatgtggtgtgcacctagtattaaaattgctttgtcttaaaattgaacatgaggatattaaaaatacattgtgaagaatactgcttatctcagagtgaagatactgcggctgaaaagcactagtttgatataaaattaaaatgaccaaaaccctccaactttgaagctaaagaaggtaaacctttccattattgcattacatgttgtggaatctctcgagtgcaaagactgtctagttatttatcaggctatttctactgatgaactgcttcaggtgggggagggaaacttatttttatttgcctgatttaagtgtctgagaaacaaatctttgttctcttaggctgcaatggaacaactttaccagggttttggcatttcctttcctttcctttataaaacatgctcagcaaactgcaccagttaactacagtttggtaaattgttatgttaacaattatgacatctgcaatgttttataaagcaactaatttaataaaatcactgttgtgaggacttaaattttgtgttacctcccaatatatactttttgagagtatagaacacagctcttgggagtacagttctctacgttctctactaaatcttaataaatgcttggacatagttacagctttaaaacatgagtgatttgccaggtccttatgttgtcaccatagagcaacaaaggtatagggctgccttcctcttatttatttggggacattattttgttatttagataccaaggcctaattaattaagtacctataagaactatttatttggagtaactgagcctgtaactcaggtttatggctgttaagtatagattggggaatctttattatgtcttctcctaagcagtttaaccaaatgtgtggttagtgtttttttattcccctaagacagaaagaacaaaaaatgttttaaatttctcttatataggaaataataggaacgtcaaagctctgtatacctactaagtggaaaacaagaccatcatctaagtgatttgagaaattaacaaaagtagtgactacacagcaataattacagtaaattaaataaagattcctttaaggcagacaagggctaagatttccttagcagtaataatgacatacactgaattgaaaatctattttattacagaaagatcagtttctaacaaatgaaaatgtatcacctgttccttaactgtgtaaataataattaaatttctttgaaactggnnnnnnnnnnnnnnnnnnnnn

SEQ ID NO: 119620 - DNA, 477 bp, Homo sapiens
ccatggctcctgtgaaaaagcttgtggtgaaggggggcaaaaaaaaagaagcaagttctgaagttcactcttgattgcacccaccctgtagaagatggaatcatggatgctgccaattttgagcagtttttgcaagaaaggatcaaagtgtaacggaaaagctgggaaccttggtggaggggtggtgaccatcgataggagcaagagcaagatcaccgtgacatccgaggtgcctttctccaaaaggtattttgaaatatctcaccaaaaaatatttgaagaagaataatctacgtgactggttgcgggtagttgctaacagcaaagagagttacgaattacgttacttccagattaaccaggacgaagaagaggaggaagacgaggattaaatttcatttatctggaaaattttgtatgagttcttgaataaaacttgggacccaaaaaaaaaaaaaaccaaaaaaaaaaaaaaaa

SEQ ID NO: 119621 - DNA, 1317 bp, Homo sapiens
atggcggcggcggcggcggcggcgggggactcggactcctgggacgccgacgctttctccgtggaagacccagtgcggaaggtggggggcggcggcactgccggcggggaccgctggggaggcgaggacgaggacgaggacgtcaaggataactgggatgacgatgatgatgaaaaaaaagaggaagcagaagtaaaaccagaggtaaaaatttcagaaaagaaaaaaatagcagagaagataaaagagaaagaacggcaacagaagaaaaggcaagaagaaattaaaaagaggttagaagaacccgaagaacctaaagtgctaacaccagaagaacaattagcagataaactgcggctaaagaaattacaggaagagtcagacctcgaattagcaaaggaaacttttggtgttaataatgcagtttatggaatagatgctatgaacccatcttcaagagatgactttacagagtttggaaagttactaaaagatattaattacacaatatgaggagtcactatattatgccaggtttttggaagtcttagttcgagatgtgtgtatttcattggaaattgatgacttgaaaaaaattaccaattcactgactgtgctttgcagtgaaaaacagaagcaagaaaagcaaagcaaagccaaaaagaagaagaaaggtgtggttcctggagggggattaaaagccaccatgaaagatgatctggcagattatggtggttatgatggaggatatgtacaagactatgaagacttcatgtgacattttatcttttctttggggggcatcttattgttgcccccaattcccttgaacatgtagcacaacttcctttcctttcagttctgccaaatgctacaatcagaagtgcagtatcttttgtgctggttatttaaccccttgacacttaggtgctaatgtgcaaatgagggaacttggatcttgctgccaaggggttaaaattgggaacctaagttgctactaaatcatagttcaaaacctaataatgttgtcgttgttgctatctgatttcatagcagcagtcactaaattggaaacaaaaggtttgcaacgtgacaaaaaaaattgtgtagtatttaccagcaccattcagtaatacagccttaaccatacctcccttgaactacttcataacttgtcaagaaaagcagtttgcagcaagggcatgtggtgtgcacctagtattaaaattgctttgtcttaaaattgaacatgaggatattaaaaatacattgtgaagaagactgcttatctcagagtgaagatactgcggctgaaaa

SEQ ID NO: 119622 - DNA, 900 bp, Homo sapiens
atgtctttgatgaacacagatgcaaacatcctcaacgaaatactagcaaatgaatccaatagcttgacaaaaagaagtacaaaggatgcctggctttttcctccagaattgacgagccttgtcaggagcagggaggagagcgaggcccaactggagcaggcaagattacagagaggtcacttattactcaaacaaggaaaacttgatgaagcagaagatgattttaaaaaagtgagtacatacgatagaagttctccgtatatttatacagcaggctactgcaatgcaactatttatgtttcacctgacatcccaacaggggcattctttgattctctaatttgtcgaaatcagagacatagggctacatgcttctggggtaaagagactctgcccccaccctcaaggagcccatctgtctctgccccattgctcagctgtgtgatagggacaacaggaagaggccacaaaacaagtctcaataaatttaagaaagtcgagatcatatcaagtatcttctcagacaacagtggaataaaattagaaatcagctcccaaaggaactgtaaacactatacaaatacatggaaattaaataatctgctcctgaatgatttggggattaataatgaaatcaagatggaaattcaaagattctttgaaatgaatggtaatagtgacacaagttatcaaaacctctggaatacaacaaaagcagtgctaagaggaaaagtcatagcatcaaatgcctacatcagaaagtctgaaagagcacaaatagacaacctcaaggaactagagaaacaggaacaaactaaacccaaagccattgaaagaaaagaaatcacaaagatcagagcagaactaaatgaaattgaaacaaacaaaaaagaacaatga

SEQ ID NO: 119623 - DNA, 2661 bp, Homo sapiens
atgtcagggttcagtccggaactcatcgactacttggaagggaaaatctcctttgaggagttcgaacggcggagagaagagagaaaaacccgcgagaagaaaagtcttcaggaaaaaggcaagttatcagctgaagaaaatcccgatgactctgaagttccatcatcatcaggaattaactctaccaaatcccaagacaaagatgtcaatgaaggagaaacatcagatggagtgaggaagtcagttcacaaggtctttgcttccatgcttggagagaatgaagatgatgaggaggaagaggaagaagaggaggaggaggaggaggaggaagaaacacctgagcaacccactgcgggcgatgtatttgtattggagatggttctcaatcgtgaaaccaagaaaatgatgaaagagaaaaggcctcggagtaaacttcccagagctctgagaggtctcatgggtgaagccaacattcgttttgctcgaggagaacgtgaagaggcgatattgatgtgcatggaaatcataagacaagctcctctggcttatgagccattctctactctagccatgatatatgaggaccaaggtgacatggaaaaatcattgcagtttgagttgattgctgcgcatttaaatcccagtgacacagaagaatgggttagactggcagaaatgtctctggaacaagacaatattaagcaggctattttttgctatacaaaagctcttaaatatgaacctactaatgtccgttatctgtgggagcgatcaagcctttatgaacagatgggtgatcataaaatggccatggatggttataggcgtattttaaaccttttgtctccatctgatggcgaacgttttatgcagctggctagagatatggcaaagagttactatgaagccaatgatgttacttctgctattaacataattgatgaagctttctcaaagcaccagggcctagtctccatggaagatgttaacatagcagctgaactatatatttctaacaaacagtatgacaaagctttggagataattacagatttttctggaattgtgctggaaaaaaaaacttcagaagaaggcacctcagaagagaataaagctcctgagaatgttacctgcactatacctgatggcgtgccaatagatatcacagtgaagttgatggtctgccttgtacatctcaacattcttgaaccacttaatcctctcttgacaacactagtagaacagaatcctgaagatatgggagacctatacctagatgttgctgaagcttttctggatgttggtgaatataattctgcacttcccctcctcagtgctcttgtttgctctgaaagatacaaccttgcagtagtttggcttcgtcatgcagaatgtttaaaggccttaggctatatggagcgagctgctgaaagctatggcaaggtggttgatctggccccactccatttggatgcaaggatttcactttctacccttcagcagcagctgggccagcctgagaaagctctggaagctctggaaccaatgtatgatccagatactttagcacaggatgcaaatgctgcacagcaggaactgaagttattgcttcatcgttctactctgttgttttcacaaggcaaaatgtatggttatgtggataccttacttactatgttagccatgcttttaaaggtagcaatgaatcgagcccaagtttgtttgatatccagttccaagtctggagagaggcatctttatcttattaaagtatcgagagacaaaatatcagacagcaatgaccaagagtcagcaaattgtgatgcaaaagcaatatttgctgtgctcacaagcgtcttgacaaaggatgactggtggaatcttctgttgaaggccatatactccttatgtgacctatcccgatttcaagaggctgagttgcttgtagattcctcattggaatattactcattttatgatgacaggcaaaaacgcaaagaactagaatactttggtctgtctgctgcaattctggacaaaaatttcagaaaggcatacaactatatcaggataatggtaatggaaaatgtcaataaaccccagctctggaacattttcaatcaagttaccatgcactcccaagatgtacgacatcatcgcttctgtctccgtttgatgctgaaaaacccagaaaatcatgccctatgtgtcttaaatggacacaatgcatttgtatctggtagttttaagcatgcgcttggacagtatgtgcaagcctttcgcactcaccctgacgaacctctctatagcttctgtataggcctaacctttattcatatggcatctcagaagtatgtgttacggagacatgctcttattgtacagggcttttcctttcttaatcgatacctcagtttacgtgggccctgccaggaatcattctacaatttgggccgtggccttcatcagttggggctgattcatcttgcaatccactattatcagaaggccctggagctccctccacttgtggtagagggtatagaacttgaccagttagacttacgaagagatattgcctacaacttgtctctcatctatcagagcagtgggaataccggaatggctcaaacgcttttgtatacctattgttctatataa

SEQ ID NO: 119624 - DNA, 444 bp, Homo sapiens
atggtggatcaaaacaaacaaaagtgtggttataggcgtattgtaaacctggtgtctccatctgatggcgaacgtgctatgcagctggctagagatatggcaaagagttactatgaagccaatgatgttacttctgctattaacataattgatgaagctttctcaaaacaccagggcctagtctccatggaagatgttaacatagcagctgaactatatatttctaacaaacagtttgacaaagctttggaggcaggaatgcttatgtgtgtctgtgtaaaggtttgcatgtgtagctgtgttctggaaattgttaaaaattggcagctcttcgttgtagatggctgcacacagtccataggagattcccgaagagaacagggagaattctacagcatacaggaagacagggcctctaatttgtccatgggcttgtcactttaa

SEQ ID NO: 119625 - DNA, 428 bp, Homo sapiens
atgagtgccaaaccaaatatggaaatgctaatgcctggagatactgtaccaaagtttttgacatgctcacagtagcagctcttcccgagcgagccctgcggccgccggagcagctcccgcggcggagcaggagccggatggtcagaggagcccggcagccccagcagccgcggagtcgcctggcccccagactgactggcacagtggagaaaccgcctcgaaaacggagaagcagcaaatctcccattgctgctttgaacccttctatgtggaggtgctcaggctcctactttccctgccagtcctccaccctcatgggtgccctcctcctcctccacactcggccttcaacatcctgtgcaagctggctctgcctgcgaatggcctcctcacgtagcttatattccgacaaccatgcagaaaattaa

SEQ ID NO: 119626 - DNA, 953 bp, Homo sapiens
ccgcggcttgttcttcttaaaatggcgccgctagacctggacaagtatgtggaaatagcgcggctgtgcaagtacctgccagagaacgacctgaagcggctatgtgactacgtttgtgacctcctcttagaagagtcaaatgttcagccagtatcaacaccagtaacagtgtgtggagatatccatggacagttttatgacctttgtgaactgttcagaactggaggtcaggttcctgacacaaactacatatttatgggtgattttgtagacagaggttactatagtttggagaccttcacttaccttcttgcattaaaggctaaatggcctgatcgtattacacttttgcgaggaaatcatgagagtagacagataacacaggtctatggattcctatgatgactgcctgaccaaatatggataatgctaatgcctggagatactgtaccaaagtttttgacatgctcacagtagcagctttaatagatgagcagattttgtgtgtccatggaggtttatctcctgatatcaaaacactgggatccaaattcgaaccatcgaacggaatcaggaaattcctcataaaggagcatttttgtgatctgggtttggtcagaatcctgaagatgtggataccctgggctatcaagtccccgaggagcaggttggctttttggagcaaagggtcacaaattgagtttggttcataatcaaccaacttaaaactcatctgcagagcacatcaactagtgcacgaaggctataaatttatgtttgatgagaagctggtgacagtatggtctgctcctaattactgctatcgttgtggaaatattgcttcgatcatggtcttcaaagatgtaaatacaagagaaccaaagttattccgggcagttccagattcagaacgtgttattcctcccagaacgacaacgccatatttcctttga

SEQ ID NO: 119627 - DNA, 588 bp, Homo sapiens
tcgctcaaagctgctgagctctgccctgacggcatgcgcccccgcttctgtgagagcacgcttcctggcatgggggtcgaatcatgtcgataaaatgggctcggtttcatgaagtaccccacataacagtgagattcataggaccaaagcatggggaggaaaaggaaaaagaaaaagataagattaaggagaaggagaaagattctaaagacaaggagaaagataagaagactgtcaacgggcacactttcagttccattcctgttgtgggtcccatcagctgtagccagtgtatgaagcccttcaccaacaaagatgcctatacttgtgcaaattgcagtgcttttgtccacaaaggctgccgagaaagtctagcctcctgtgcaaaggtcaaaatgaagcagcccaaagggagccttcaggcacatgacacatcatcactgcccacggtcattatgagaaacaagccctcacagcccaaggagcgtcctcggtccgcagtccttctggtggatgaaaccgctaccaccccaatattttgcaatagacgatccccacagagtgtctcgctcttcaaagtggcttctt

SEQ ID NO: 119628 - DNA, 4290 bp, Homo sapiens
atgttgtatataaaccgagaaaactggtgtacaatagagccatgccctgatgcagcatctcttctggcttccaagcagagcccagaatgtgagaacttcctggatgttggactgggcagagagtgtacctcaaaacaaggtgtacttaaaagagaatctgggagtgattctgacctctttcactcacccagtgatgacatggacagcatcatcttcccaaagccagaggaagagcatttggcctgtgatatcaccggatccagttcatccaccgatgacacggcttcactggaccgacattcttctcatggcagtgatgtgtctctctcccagattttaaagccaaacaggtcaagagatcggcaaagccttgatggattctacagccatgggatgggagctgagggtcgagaaagtgagagtgagcctgctgacccaggcgacgtggaggaggaggagatggacagtatcactgaagtgcctgcaaactgctctgtcctaaggagctccatgcgctctctttctcccttccggaggcacagctgggggcctgggaaaaatgcagccagcgatgcagaaatgaaccaccggagttcaatgcgagttcttggggatgttgtcaggagacctcccattcataggagaagtttcagtctagaaggcttgacaggaggagctggtgtcggaaacaagccatcctcatctctagaagtaagctctgcaaatgccgaagagctcagacacccattcagtggtgaggaacgggttgactctttggtgtcactttcagaagaggatctggagtcagaccagagagaacataggatgtttgatcagcagatatgtcacagatctaagcagcagggatttaattactgtacatcagccatttcctctccattgacaaaatccatctcattaatgacaatcagccatcctggattggacaattcacggcccttccacagtaccttccacaataccagtgctaatctgactgagagtataacagaagagaactataatttcctgccacatagcccctccaagaaagattctgaatggaagagtggaacaaaagtcagtcgtacattcagctacatcaagaataaaatgtctagcagcaagaagagcaaagaaaaggaaaaagaaaaagataagattaaggagaaggagaaagattctaaagacaaggagaaagataagaagactgtcaacgggcacactttcagttccattcctgttgtgggtcccatcagctgtagccagtgtatgaagcccttcaccaacaaagatgcctatacttgtgcaaattgcagtgcttttgtccacaaaggctgccgagaaagtctagcctcctgtgcaaaggtcaaaatgaagcagcccaaagggagccttcaggcacatgacacatcatcactgcccacggtcattatgagaaacaagccctcacagcccaaggagcgtcctcggtccgcagtcctcctggtggatgaaaccgctaccaccccaatatttgccaatagacgatcccagcagagtgtctcgctctccaaaagtgtctccatacagaacattactggagttggcaatgatgagaacatgtcaaacacctggaaattcctgtctcattcaacagactcactaaataaaatcagcaaggtcaatgagtcaacagaatcacttactgatgagggagtaggtacagacatgaatgaaggacaactactgggagactttgagattgagtccaaacagctggaagcagagtcttggagtcggataatagacagcaagtttctaaaacagcaaaagaaagatgtggtcaaacggcaagaagtaatatatgagttgatgcagacagagtttcatcatgtccgcactctcaagatcatgagtggtgtgtacagccaggggatgatggcggatctgctttttgagcagcagatggatgaaaagctgttcccctgtttggatgagctgatcagtatccatagccaattcttccagaggattctggagcggaagaaggagtctctggtggataaaagtgaaaagaactttctcatcaagaggataggggatgtgcttgtaaatcagttttcaggtgagaatgcagaacgtttaaagaagacatatggcaagttttgtgggcaacataaccagtctgtaaactacttcaaagacctttatgccaaggataagcgttttcaagcctttgtaaagaagaagatgagcagttcagttgttagaaggcttggaattccagagtgcatattgcttgtaactcagcggattaccaagtacccagttttattccaaagaatattgcagtgtaccaaagacaatgaagtggagcaggaagatctagcacagtccttgagcctggtgaaggatgtgattggagctgtagacagcaaagtggcaagttatgaaaagaaagtgcgtctcaatgagatttatacaaagacagatagcaagtcaatcatgaggatgaagagtggtcagatgtttgccaaggaagatttgaaacggaagaagcttgtacgtgatgggagtgtgtttctgaagaatgcagcaggaaggttgaaagaggttcaagcagttcttctcactgacattttagttttccttcaagaaaaagaccagaagtacatctttgcatcattggaccagaagtcaacagtgatctctttaaagaagctgattgtgagagaagtggcacatgaggagaaaggtttattcctgatcagcatggggatgacagatccagagatggtagaagtccatgccagctccaaagaggaacgaaacagctggattcagatcattcaggacacaatcaacaccctgaacagagatgaagatgaaggaattcctagtgagaatgaggaagaaaagaaaatgttggacaccagagcccgagaattaaaagaacaacttcaccagaaggaccaaaaaatcctactcttgttggaagagaaggagatgattttccgggacatggctgagtgcagcacccctctcccagaggattgctccccaacacatagccctagagttctcttccgctccaacacagaagaggctctcaaaggaggacctttaatgaaaagtgcaataaatgaggtggagatccttcagggtttggtgagtggaaatctgggaggcacacttgggccgactgtcagcagccccattgagcaagatgtggtcagtcccgtttccctgccccggagagcagagacctttggaggatttgacagccatcagatgaatgcttcaaaaggaggcgagaaggaagagggaggtgatggccaagatcttaggagaacggaatcagatagtggcctaaaaaagggtggaaatgctaacctggtatttatgcttaaaagaaacagtgagcaggttgtccagagcgttgttcatctctacgagctcctcagcgctctgcagggtgtggtgctgcagcaggacagctacattgaggaccagaaactggtgctgagcgagagggcgctcactcgcagcttgtcccgcccgagctccctcattgagcaggagaagcagcgcagcctggagaagcagcgccaggacctggccaacctgcagaagcagcaggcccagtacctcgaggagaagcgcaggcgcgagcgtgagtgggaagctcgtgagagggagctgcgggacgggaggccctcctggcccagcgcgaggaggaggtgcagcaggggcagcaggacctggaaaaggagcgggaggagctccagcagaagaagggcacatagccagtatgacctggagcgactgcgtgctgcccagaaacagcttgagagggaacaggagcacgtgcgccgggaggcagagcggctcagccagcggcagacagaacgggacctgtgtcaggtttcccatccacataccaagctgatgaggatcccatcgttcttccccagtcctgaggagcccccctcgccatctgcaccttccatagccaaatcagggtcattggactcagaactttcagtgtccccaaaaaggaacagcatctctcggacacacaaagataaggggccttttcacatactgagttcaaccagccagacaaacaaaggaccagaagggcagagccaggcccctgcgtccacctctgcctctacccgcctgtttgggttaacaaagccaaaggaaaagaaggagaaaaaaaagaagaacaaaaccagccgctctcagcccggtgatggtcccgcgtcagaagtatcagcagagggtgaagagatcttctgctga

SEQ ID NO: 119629 - DNA, 510 bp, Homo sapiens
atgtgggaacttgtattaagtgtgacccagtatcagtccttcaatttggaagcaggctatatgaaggaaaaggaaaaagaaaaagataagattaaggagaaggagaaagattctaaagacaaggagaaagataagaagactgtcaacgggcacactttcagttccattcctgttgtgggtcccatcagctgtagccagtgtatgaagcccttcaccaacaaagatgcctatacttgtgcaatgagacgggcacaactgatgtgccttcagcgcctggcccctcagaaagtcgcagcagcggtcaccctggttgtgccccagcagcgaaaatgctggttgatgagacacacacagtaccgtgacgcacgtctgattgtagtccgcaccagttctcgagcattatacatcgaggcctcgagccgcgagcaaaatagatccagtagcgagtgcctctgccgcgtgatagcgctctcacactgcctgcgcagcagggaaagagacctgcactaa

SEQ ID NO: 119630 - DNA, 1419 bp, Homo sapiens
atggtaagagaaagcatccactcttgtgatgggacggaattatgcaaagtagaaaaggtttgtcaggacctgtctccagaaaggatcaagcagaatgcattgaccaagaagatggaatttgaacatctacagaattctgccgattcggagccaccatcaaacaggattttctcctgctgcgcaaaaccagcgtggaccgcttgctccaactctctcacggccatgcgacggtggcaatccgctgctgacctgctcactggaaccactactgccgatgatacgcaactcgcgctcgatgctcggtctacacttcgggatgctggagaagtgcttgtcaagacacagcgaactctcgagccgccagtgtcgaaaaacaaacaggagaaaaaggtgagaagggccaaagaaattttacacaatgggcagaacttctgtcggagaagatatcaagggtgtagagatcttccagaaaagggaaaacccattgtagaagaaagggaaacaggccttggaagggcaggctctgggaatgtgctgaaggtgcagcagctgctccacgtttgcagcgaacactttgactccaaagagaaggaggaagacaaaggcaagaaggaaaagaaggacaaggacaaaaaggaaacccctgctgacatgggagcacatcagggagtggctgttctggggattgcccttattgctgcaggctctgggaatgtgctgaaggtgcagcagctgctccacgtttgcagcgaacactttgactccaaagagaaggaggaagacaaaggcaagaaggaaaagaaggacaaggacaaaaaggaaacccctgctgacatgggagcacatcagggagtggctgttctggggattgcccttattgcttgtgttgtgcgcgtgctcgtcgtctttgctcggataagtagagtcctcagcgaatcacgtgctttagaccgaaatcaccggtgctgtcccgtgactgcgagcacgctcttcgtatatgttcggtccgtaatgccactgccagctcggggatgtacgagagctagcagcatacttatgtcgcgttctatcgatgctgctaaaacgaaccactggggtccatggagtatctcggggatgccctgtcattacctagtcgcaggggtagagtaccttcctccttatcgggtcctgtacactaatatccaatcgggttttagaggacgagttaggctacatgtcctggctagtggagtcggttcgcccataccaacagttgttatcggaggcttatcacatttctcctgtctcagaagagggggagaagtagatattccctctccagatataaagcacttggttcacactctagcccagccagaagctgtgtccctggtgatccttctgttcacagaacttactcactacattgcctattag

SEQ ID NO: 119631 - DNA, 841 bp, Homo sapiens
attctgctgtgggatgtggatggtggcctcacccagattgacaagtacctgtactcctctgaggactacattaagtcaggagctcttcttgcctgtggcatagtgaactctggggtccggaatgagtgtgaccctgctctggcactgctctcagactatgttctccacaacagcaacaccatgagacttggttccatctttgggctaggcttggcttatgctggctcaaatcgtgaagatgtcctaacactgctgctgcctgtgatgggagattcaaagtccagcatggaggtggcaggtgtcacagctttagcctgtggaatgatagcagtagggtcctgcaatggagatgtaacttccactatccttcagaccatcatggagaagtcagagactgagctcaaggatacttatgctcgttggcttcctcttggactgggtctcaaccacctggggaagggtgaggccatcgaggcaatcctggctgcactggaggttgtgtcagagccattccgcagttttgccaacacactggtggatgtgtgtgcatatgcaggctctgggaatgtgctgaaggtgcagcagctgctccacatttgtagcgaacactttgacttccaaagagaaggaggaagacaaagacaagaaggaaaagaaagacaaggacaagaaggaagcccctgctgacatgggagcacatcagggagtggctgttctggggattgcccttattgctatgggggaggagattggtgcagagatggcattacgaacctttggccacttgctgagatatggggagcctacactccggagggctgtacctttagcactggccctg

SEQ ID NO: 119632 - DNA, 433 bp, Homo sapiens
ggcgttcggtgtcactgagccaggctgctatggtgtcatcgatgttgacactgggaagtcgaccctgtttgtgcccaggcttcctgccagccatgccacctggatgggaaaattgccagcgtcctgacgtcacagaagccctctgtcctcctcactttgcgtggcgtcaacacggacagcggcagtgtctgcagggaggcctcctttgacggcatcagcaagttcgaagtcaacaataccattcttcacccagagatcgttgagtgccgagtgtttaagacggatatggagctggaggttctgcgctataccaataaaatctccagcgaggcccaccgtgaggtaatgaaggctgtaaaagtgggaatgaaagaatatgagttggaaaggtaagccaccatgtttctccgggtaaaattaaaaggtaaaaaac

SEQ ID NO: 119633 - DNA, 1933 bp, Homo sapiens
gggggcacttcacgtgacgccggtgccgggcgaacatggcggcggccaccggaccctcgttttggctggggaatgaaaccctgaaggtgccgctggcgctctttgccttgaaccggcagcgcctgtgtgagcggctgcggaagaaccctgctgtgcaggccggctccatcgtggtcctgcagggcggggaggagactcagcgctactgcaccgacaccggggtcctcttccgccaggagtccttctttcactgggcgttcggtgtcactgagccaggctgctatggtgtcatcgatgttgacactgggaagtcgaccctgtttgtgcccaggcttcctgccagccatgccacctggatgggaaagatccattccaaggagcacttcaaggagaagtatgccgtggacgacgtccagtacgtagatgagattgccagcgtcctgacgtcacagaagccctctgtcctcctcactttgcgtggcgtcaacacggacagcggcagtgtctgcagggaggcctcctttgacggcatcagcaagttcgaagtcaacaataccattcttcacccagagatcgttgagtgccgagtgtttaagacggaatatggagctgggaggttctgcgctataccaataaaatctccagcggaggcccaccgtgaggtaaatgaaggctgttaaaagtggggaatggaaagaatatggagttgggaaagcctctttcgagcactactggttactcccgggggcggcatgcgccacagcttcctacacctggcattttgcgggcagttggttgaggaacttcagccgtgcttacatttacgggacacggccggagctcccaacgaccgaacgatccagaatggggatatgtgcctgttcgacatgggcggtgagtattactctgtcgcttccgacatcacctgctcctttccccgcaacggcaagttcactgcagaccaagaaggccgtctatgaagcagtgctgctgagctcccgtgccgtcatgggtgccatgaagccaggtgactggtggcctgacatgcaaccgcctggcttaccgcatccacctggaggagctggcccacatgggcatcctgagcggcagcgtggacgccatggtccaggctcacctgggggccgtgtttatgcctcacgggcttggccacttcctgggcattgacgtgcacgacgtgggaggctacccagagggcgtggagcgcatcgacgagcccggcctgcggagcctgcgcactgcacggcacctgcagccaggcatggtgctcaccgtggagccgggcatctacttcatcgaccacctcctggatgaggccctggcggacccggcccgcgcctccttccttaaccgcgaggtcctgcagcgctttcgcggttttggcggggtccgcatcgaggaggacgtcgtggtgatcgacagcggcatagagctgctgacctgcgtgccccgcactgtggaagagattgaagcatgcatggcaggctgtgacaaggcctttacccccttctctggccccaagtagagccagccagaaatcccagcgcacctgggggcctggccttgcaacctcttttcgtgatgggcagcctgctggtcagcactccagtagcgagagacggcacccagaatcagatcccagcttcggcatttgatcagaccaaacagtgctgtttcccggggaggaaacacttttttaattacccttttgcaggcaccacctttaatctgttttataccttgcttattaaatgagcgacttaaaatgattgaaaataatgctgtcctttagtagcaagtaaaatgtgtcttgctgtcatttatattccttttcccaggaaagaagcatttctgatactttctgtcaaaaatcaatatgcagaatggcatttgcaataaaaggtttcctaaaatg

SEQ ID NO: 119634 - DNA, 380 bp, Homo sapiens; identical to SEQ ID NO: 117799
  misc_feature (1)...(380): n = a,t,c or g

SEQ ID NO: 119635 - DNA, 813 bp, Homo sapiens
atgcctatcaataccacttgggggcattcaggtctgcacaccttgaagcttgctcacattctgcctgaagggtctattctggccttaggagtaggagaagccagcagtatgggaaagttaatgccccagaaacagctctcagccaaaggtgaatggaggggagtagataaatacccccaccttcttcacccctctgtttgggtaactccagatggctgccagaattcctcagcaagacagaccttcagctgcccagggagatggattaaggacttaaatctaagacctgaaactataaaaattccagaagataacactggaaaaacccttctagacattggcttaggcaaggatttcatgaccaagagcccaaaagcaaatgcaataaaaacaaagataaatatctgggacctaattaaactaaagagcttttgcatggcaaaaagaacagtcagcagagtaaacagacaacccacagagtgggagaaaatcttcacaatctacacatctgacaaaacactaatatccagaatctacaacgaactcaaacaaattgagtctctcactctgtcatccaagctggagttcagtggtgtgatcccagctcactgcaatctccatctcccgggttcaagagattcttgtgcccaggcaggcactgaaattgggtatggtcccgagaggaaaattagttctaaagaacatccctgtggagcaaggaggatgcggtattatcatccccagaatacagatatggaaacttcagctcaaactcagcatcatatagggagtcataagttatcaaagcactaa

SEQ ID NO: 119636 - DNA, 1761 bp, Homo sapiens
atgctgaaagaaatcatagatgacacaaacaaatggaaacacatcccatgctcatggatgggcagaatcagtattgtgaaaatgaccatactgccaaaagcaatctacaaattcaatgcagttctcatcaaaataccaccatcattcttcacagaattagaaaaaacaattctaaaattcctatgcaatgaaaaaagagccagcagagcaaaagcaagactaaacaaaaagaacaaatctggaggcatcacattacttgatttcaaacgatactatagtgccatagtcaccaaaacagtgtggtactggtataaaaataggcacatacaccaacggaacagaatagagaacccagaaataaacccaaatacttacagccaactgatcttcaacaaagcaaacaaaaatataaagtggggaaatgacacccttttcagcaaatggtgctgggataattggctagccacatgtaggagaatgaaactggatcctcatctctcacctcatacaaaaatcaactcaagatggatcaaggacttaatcctaagacctgaaactacaaaaattctagaagataacattggaaaaacccttctagacgttggcttaggcaaggatttcatgaccaagaacccaaaagcaaatgcaagaaaagcaaagataaatatctgggacctgattaaactaaagagctttttcacagcaaaaggaacagtcagcagagtaaacaggcaacccacagagtgggagaaaatcttcataatccatacatctgacgaaggactactaatatccagaatctacaacgaactcaaacaaatcagtaagaaaaaaaacaaacaatcccatcaaaaagtgggctaaggacatgaatagacaattctcaaaagaagatgtacaaatggccaacaaatatatgaaaaaatgctcaacatcactaattgcaaatttgatttgcagggaaatgcaaatcaaaaccacaatgcaataccatcttactcctgcaagaatggccataatcaaaaaatcaaaaatcagtagatgttggcatggatgtggtgatcagggaacacttctacactgctggtgggaatgtaaactagtacagccactatggaaaacagtgtggagattccttaaagaactaaaagtagaactaccatttgatccagcaatcccactactgggtacccacccagaggaaaagaagtcattatgcaaaaaagatacttgcacatgcatgcttctagcagcacaattcacaattgcaaaatcgtggaaccaacccaaatgcccatcagtcaacgagtggataaagaaactgtgccctcggtggttgctgtcaaaatgggcaagtgcatgaaacctgggaaagtggtgctggtcctggccagcagtattctggctgaacacaaagctgtcatcgtaaagaacattaatgatggcacctcagactgcccctacatccaagctctcgtggttggaattgatcgctatccctgcaaagtgacagctgccatgggcaaaaagaagattaccaggaggtcaaagatcgagtcttttgtgaaggtttataactacaatcatcttacgcctacagtgcactctgtggatatcctcttacacaaaactgtcatccacaaggatgtcttcagagatcctgctcttaaacacaaggcccaatgggaggccaaggtcaagctcaaagagagatacaaaacgggcaagaacaagcagttcttccagaagctacagttttag

SEQ ID NO: 119637 - DNA, 1727 bp, Homo sapiens; identical to SEQ ID NO: 114826

SEQ ID NO: 119638 - DNA, 429 bp, Homo sapiens
cggacgcgtggggacagaacggatgttcatattcgggttttcagaccacccaactactctggtaccattgctttggccctgttagtgtcgcttgttggaggtttgctttatttgagaaggaacaacttggagttcatctataacaagactggttgggccatggtgtctctgtgtatagtctttgctatgacttctggccagatgtggaaccatatccgtggacctccatatgctcataagaacccacacaatggacaagtgagctacattcatgggagcagccaggctcagtttgtggcagaatcacacattattctggtactgaatgccgctatcaccatggggatggttcttctaaatgaagcagcaacttcgaaaggcgatgttggaaaaagacggataatttgcctagtgggattgggccctgtg

SEQ ID NO: 119639 - DNA, 1152 bp, Homo sapiens
atggatctctcttctaaggaaaggagtcacgacaatgaagaaacaaacaggctgcgttgtgccaggcaagctattggtaagagttttctggaatcacctactgccctgttcttggagagcttgcattccttggtataccagtcctctctgctgggggcaaaatatacagagaggaagctcctgctcctggaggtgaagattcttccaatccacttttcatcttgcattccagattttgaacagttgtcattgatgaggtctcagtgtgagtccaatcttctctctggcactagaagacagttcagaagtaaacgagcaaagcacgtcactagcgttcaacatcatttacttgatcacagagtatctggttttacaggacgcatgatggtgacaactgcttggcttctagaaggcctcaggaaggttacaatcatggcagaagaatttaaagaaagtgctatttgtgaccatctggcaagctgtcattcactaactgctgatgaaacacgcctgagaaaagatccactatgctggctgttgccggcaattgcaatcagatatgatgtagtgaccacctgtcagtcacagcatgactctggggaactcgtatctgtttgctccaaactggaccattacaccggcttgggtaacaccctggaccccagtgaaggatttggctggcaagcgtctctctctctaccttcccatcagcagtttgagcacacatgtcctgaatggctcccaacttacagctggccctgcaaagtaggccctgactacctctctgagatctgtcagccagaatgcaaacaacatttccaagaatccttgactgaatcttccaaacagaacatttatgaaacctgtgctatatatgtgtcaagccctggagaaagaattctgaaccagagatttgggccccatggagcttttattctggtgagagagtatgatgatatacgtttctcacattctgggccaccaagcacctgccctaatttccctggtcccagttactacacagctagagagagtgcctatgccctgaagctcagagccctggaaattattcaaattagccagtccacaaagatgcagagaaacctagggaaccccatactacctgccatacatcagcagcccccacagtag

SEQ ID NO: 119640 - DNA, 807 bp, Homo sapiens
atggtaaatattataggaagagagaaactgagccttttggagatggaagaaccaaatggtgggctagcagctcctaaccagagactagattcagtccacagatttttggttaactgtgaccccatgcttggtcttattcagtcccttcttcataaaaagttatctgtcctgatagtaaaatggagaaatagctctcctgatgagctttacctttattaccctgtcaataagactggtagtctaggtgttcatgactctggggaactcgtatctgtttgctccaaactggaccattacaccggcttgggtaacaccctggaccccagtgaaggatttggctggcaagcgtctctctctctaccttcccatcagcagtttgagcacacatgtcctgaatggctcccaacttacagctggccctgcaaagtaggccctgactacctctctgagatcttaagctcaggaaagaaccagtatcagaacttacaggatggtattacaagcttagaagaaaaccccagagatggcagagacagaccccaccttgattcccacttcacaacacttcaccttcttgcaaatacctacactggaagtctaggttttggggccctgggtccaaggagcacttctcagagctacattcatgggagcagccaggctcagtttgtggcagaatcacacattattctggtactgagtatccttttaagataccgacgaattgaaaagggcaaactaaagctacatgtttttaaattgacatttttcctggcagtaaatatcaagacttttaagagacattaa

SEQ ID NO: 119641 - DNA, 1995 bp, Homo sapiens; identical to SEQ ID NO: 118358

SEQ ID NO: 119642 - DNA, 1131 bp, Homo sapiens
atggcctccgctgaggcagtttccaggcaaggtaatgttgattctcctcagtactcaccctcaacacccctgattgcttctagacctataagtagactaaagtcccagcaggcccctagagatgaggttcagagtgtgacccatgaagaggtgtactacactcaaaaagaactacttgagttttctggtttatataagcagaaatctgtagaacagggtgaaggctattatggtggaaaggccgaatggaagacaatagagctgcctctacctagaaaaacagtgaatcaaaaacaatatcgcatccctggagggattgcagagattagtaccaccatcaaggaactgaacaatgcagggatggtaattcccaccacatccccattcaactctcctatttggcctgtgcagaagatagatggatcttggagaatgacagtggattattgtaagcttaaccaagtagtgactccaattgcagctactgtaccatatgtggtttcatcacttgagcaaattaaccatctcctggtacctgaacaggaaaaggttctgcaacaggtccaggctgctgcacaagctgctctgccacttgggccatatgacccagcagatctaatgtttcttgaggtgtcagtggcacatagggatgctctttggtccagagatatgtggatgtacctctctgagtggtcaaaaactgtgaagatatttgtatcccatgctgccagttttgagtggagtccagaacaggaaaaggctctgcaacaggtccaggctgttgtgcaagctgctctgccacttgggccatatgacccagcagatccagtgttgcttgagatgtcagtggcagacagggatgctgtttggatcctttggcaggcccccataagtgaatcacagtggaggcctccaggattttggagcaaggccctgccatcttctgctgataactactctccttttgagagacagctcttggcctgctactggactttggtggaaactgaacgtttgactatgggtcatcaagtcaccataccacctgaactgcctatcatgaactgggtgttttctgacctatccagccctaaaatgtgtcatccacagcagcattccatcataaaatag

SEQ ID NO: 119643 - DNA, 1413 bp, Homo sapiens
atgattatctcaatagatgcagaaaaggccttcgataaaattcaacagcctttcatgctaaaaacactcagtaaactagaagaaacagcatccccatccccagtagtggcaacatacactccgcaacctatgctaccatcagcctttccacctttgtctgaggagataaatcctgtgctgcctgagacaacagtgatggcctcccctgaggcagttaccaggcaagataatgttgattctcctcagaagccaccccctacacccatgtttgcttctagacctataactagactaaagccccggagagcccctagtgaggaagggatccaaaggcttaaaaagattgggatggtggagtggattagtcactttagacctactcctctcagcatggaaggtccagaacatatactcttgaccaacaccttgttaaatagatatgtgaaggcagcacctgcatctttgaagagccctttaactgctcttctctttatgtcagatctaactgtgggaaccacattctctcaactacaaaatttaaatacaatgggaatatttgggtcctcatgtgacaggagccaagtggcagcactcaaccatcaaaggcaagtgccagaatgcaaaattgtcatagatatacttaacatctggcggattccccacattggctcactgactggtagggtgagggaaattatggtgggaaaggccaaatggaagccattagagcagcctccacctagaaaaatagtaattcaaaaacaatatcacatccctggagctattacagagattagtgccaccattgaggacttgaaagaaacaggggtggtgattctcaccacatccccattcaaatcaagcatttggcctttgcagaagacagatggatcttggagaatgacagtgaattatcataagcttaaccaagtggagactccaattgcagctgctgtaccagatgtggtttcattgcttgagcaaattaacacatctcctggtacctggtatgcggccattgacttggtaaatgtctttttctccattcctgtctataaagctcaccagaagcaatttgccttcagctggcaaggccagcaatatacttttactttcctacctcaggggtatatcaactctccggatatcacactggttcactacattgacgacattatgcttattggatccagtgagcaagaagtagcaaacacactggatttactgcctgccagagtggcctcatggggagttccctatgatcagttgacagaggaagagaagactagggcctgcttcacagatggtcctgcaggatatgcaggcaccacccgtaagtggacagctgcagtactacagccactttctaggacatccctgaaggagagtggtgaagggaaatcttcccagtag

SEQ ID NO: 119644 - DNA, 693 bp, Homo sapiens
aaaaatagtaaatcaaagcaatatcacatccgtggaggaattgcggagattagtgccaccatcaaggactcgaaagacacaggggtggtgattcccaccacatccccattcaactctcccatttggcctgtttggaagacagatggatcttggacaataacagtggattatcataagcttgaccaagtggtgactccaattgcagctgctgtaccagatgtggtttcattgcttgagcaaattaacacatctcctggtacctgttatgcagccattaacttggaaaatgcctttttctccattcctgtccataaggccaaccagagcaatttgccttcagctggcaaggccagcaatataccattgctgtcctaccacagggtaaaatttctagggatccattgttttgtggcctgtcaagatattccttctaagataaaggataagttgctacatttggcccctcctacaaacaagaaagaggcacaatgcctggtcggcctatttggattctggaggcaacacattcctcatttgcgtgtgttactccagcccatttatcaagtgaccctaaaggctgccatttttgagtggggtccagaacaggagaaggctctgcaacaggtccaggctgctgtgcaagctgctctgccacttggaccatatgacccaacagatccaatggtgcttgag

SEQ ID NO: 119645 - DNA, 1011 bp, Homo sapiens
atggtctccactcctgccaccctgccttctctccccaagcctgcactgatggcctcatggggagttccctatgatcagttgacaaaggaagagaagactagggtctggttcacagatggttctgcacgatatgcaggcaccacccaaaagtggacagctgtagcactacagcccctttctaggacatccctaaaggacagcagtgaagggaaatcttcccagtgggcagaacttcaagcagtgtacctggttgtgcactttgcatggaaggagaaatggccagatgtaggattatatactgattcatgggctgtagccaatggtttggctggatggtcagagacttgggagaagcaagattggaaaattggtgacaaagaaatttggggaagaggtatgtggatggacctctctgagtggtcaaaagctgtgaagatatttgtgtctcatgttagtgctcatcaacgggtgacctcagcagaggaggagtttaataatcaagtggataggccacttctgtcttcacccaatgggcccatgaacaaagtggccatagtggcagggatggaggttactcatgggctcagcaaacttggacttccattcaccaaggctgacctggctatggccactgctgagtgcccaatttgccagcagcagagaccaacactgagccctttatatagcaccattcctcagggtgatcagccagccacctggtggcagattgattatattggacctcttccatcatggaaagggcagaagtttgtcctcactgtaatagacacttactccagatataggtttgcctatcctgcacacaatgcttctgccaagactaccatccatggactaatagaatgccttatccattgttatggtattccacacagcattgcctctgaccaaagcattcactttagaccaaagaagtgcagtgatgggctcatgctcatggaattcactggtcttaccatgtttcccatcatcctgaagcagctggattga

SEQ ID NO: 119646 - DNA, 278 bp, Homo sapiens
ccataaagtgcgtcgtgcacagcagcattccatcatcaaatggaagtggtatatacaagatcgggctcaagcaggtcctgaaggcacaaccatccctgtcattgcccaatgggactatgaccataatggccatggtggcagggatggaggttacccatgggctcagcaacatgagcttccactcaccaaggctgacctggctacggccactgctgagtgcccaatttgccagcaacagagaccatcactgagccctcgatgtggcaccattcctcggg

SEQ ID NO: 119647 - DNA, 237 bp, Homo sapiens
atggattatcataagcttaatcaagtggtgactccaattgcagctgctgtacctgatatggtttcattgcttgagctaattaacacatctcctggtagctggtatgcagccattaacttggcaaatgactttttctccattcctgtctccataaagtgggtcgtgcacagcagcattccatcatcaaatggaagtggtatatatgtgatcaggctcgagcaggtcctgaaggcacaa

SEQ ID NO: 119648 - DNA, 225 bp, Homo sapiens
ctctgccatttccatgacagaagagttctaatataatcaacctgccaccaggtagctgactgatgccccaagaaatggtgccataccgaaggctcagtattggtctctgctgctgaaattgggcactcagcagtggttgtgccttcaggacctgctcaagcctgatcacatatacaccacttccatttgatgatggaatgctgctgtgcacaacccactttatgg

SEQ ID NO: 119649 - DNA, 740 bp, Homo sapiens
ccataaaatgggtcatgcacagcagcattccatcatcaaatggaagtgatatatatgtgattgggctcgagcaggtcctaaaggcacaacctgcaccgatggcctcatggggagttctctatgatcagttgacagaggaagagaagactagggcctggttcacagatggttctgcacgatatgcaggcaccacccaaaagtggacagctgcagcactacagcccctttctaggacatcactgaagggcagtggtgaagggaaatcttcccagtgggcagaacttcaagcagtgcacctggttgtgcacttttcatggaaggataaatggccagatgtgcgattatatattgattcatgggctgtagccaatggtttggctggatggtcagggacttggaagaagcatgattggaaaattggtgacaaagaaatttggggaagaggtatgtggatggacctctctgagtggccaaaacctgtgaagatatttggatcccatgtgagtgctcaccaatgggtgatctcagcagaggaggattttaataatcaagtggataagatgacctgttctgtggacatcactcagcctctttccccagccacccctgttatcacccaatgggcccataaacaaagtggccatggtggcagggatggaggttatacatgggctcagcaacatggacttccactcaccaaaactggcctggctatggctacagctgagtgcccaatttga

SEQ ID NO: 119650 - DNA, 354 bp, Homo sapiens; identical to SEQ ID NO: 118356

SEQ ID NO: 119651 - DNA, 593 bp, Homo sapiens
aacaggaaaaggttctgcaacaggtccaggctgctgcacaagctgctctgccacttgggccatatgacccagcagatctaatgtttcttgaggtgtcagtggcacatagggatgctctttggtccagagatatgtggatgtacctctctgagtggtcaaaaactgtgaagatatttgtatcccatgctgccagttttgagtggagtccagaacaggaaaaggctctgcaacaggtccaggctgttgtgcaagctgctctgccacttgggccatatgacccagcagatccagtgttgcttgagatgtcagtggcagacagggatgctgtttggatcctttggcaggcccccataagtgaatcacagtggaggcctccaggattttggagcaaggccctgccatcttctgctgataactactctccttttgagagacagctcttggcctgctactggactttggtggaaactgaacgtttgactatgggtcatcaagtcaccataccacctgaactgcctatcatgaactgggtgttttctgacctatccagccctaaaatgtgtcatccacagcagcattccatcataaaatag

SEQ ID NO: 119652 - DNA, 798 bp, Homo sapiens
tcaatatttcgaatattgagcatactcagaaactttctttgagtctaggttcaagtgggtccctggactcatgcagttgtcatttccccagtgccggaatgcataatgggcacagacatacttagcagctggcagaacctccacattggctccctgactgaaagggtgctggttttgagtggggtccagaacagaagaaggctctgcaataggtccaggctgctgtgcaagctgctctgccacttgggccatatgacccagcagatccaatggtgcttgtggtgtcagtggcagataaggatgctgtttggatctttcatctttcaggatcggatcgttggcgtcgaacttatcgctgtctttaaagacacggcccgcgtttttccagctgtcgattgagttgtcgccgaccttttgataaaacatgtagattgatgtgtcatcagcgtctttcgggcttcccgcaagagcaaacacaacgtgatagccgttgtattcagctactgttccgtcagcgttttgcagcggccagctgtcccacacatcaagtccttttgcagactcaatatttttaatcgttgattgatcgaattgaggcacttggtatttttcgttttgctgctgtttagggatctgcagcatatcatggcgtgtaatatgagagacgccgtacgtttctttgtatgctttttggttattttctttcgcgaaggcttgagtcgctcctcctgccagaagtgcagtcgtaaaagtcagaactgtggcttgttttacaatttttttgatgttcatgttcat

SEQ ID NO: 119653 - DNA, 486 bp, Homo sapiens; identical to SEQ ID NO: 119292

SEQ ID NO: 119654 - DNA, 1911 bp, Homo sapiens; identical to SEQ ID NO: 119293

SEQ ID NO: 119655 - DNA, 1569 bp, Homo sapiens
aaaagaaaaatctcattttctgaggagaaatggaagcaggctgcagaaattcgcctaagtaacgagaagccaaatgttaatcctcaagacaacggggaaaatgtctccagggtctcagttaactcttttggtcttctcaggaagcatcttcttcgtgaaatcatcatcaataaaaatcttcaatgcttagcttcaagtttgcaggtagccagagtgatccctgcagaacatgaatcaggccaggtgcttccctcctcagaattccataaagatttagcatacttagaacaaaatcctccacctccaaattgttccccattcttcacagatattcgaattggctctctcccctccgatgcctcagtttgtggtgataactgtgtgtttgaaagctggattggagacatcatattggacatggacaatgagtttagtgactctatacataatacctttggccatatgtggagaaccaaggaacataatgaagctggttggttgctcctaagttcagtggacaaagtaatgaaagaaaatgatgaactcagggattctatctcctggcttcagaagcagatactgagtctcaaatctgctaagattgccctgagtgagagtcttatctcctgcagggaaagagctgaaattgtggaaaaacagacacaagctgttatcatgcgaatggctgacccgcaaggaaaggtgcatgcgcagcctcaacaggtgtctactgttaaagggaggacattgattggaaaagaatgggaccccgcaacttggaatggggacgtgtgggaggaccctgatgaagctggggacactgagtttgtaaactctgatgaaccttttttgccagaagtaacagcttccccatccccaagagacctctggccttttaccagggtaactttgcactggggaaagggaaatgatcagacattttggggactactggacactggctctgagctggtgatgattccaggggacccaaaatgtcattgtggtcctccagttaaaataggggtttatggtggtcagaagacacatggatcttggggaatgacagtggattatcagaagtttaaccaagtggtgactccaattgtagctgctgtaccagatgtggtttcattgcttgagcatattaacacatctcctggtatctgcctgcaccgatggcctcatggggagttccctatgatccagttgacagaggaagagaagactagggcctggttcacagatggttctgcacgatatgcaggcactacccgaaaaggtagggaagagtatgtacggaatacagcgaatccattagggcgactcttagtattaccatgccctgtgattaaggtcaatgggaaactacaacagcccaatccaggcaggactacaaatggtccagacccttcaggaatgaaggtttgggtcactccaccaggaaaaaaaccacaacctgctgaggtgcttgctgaaggcaaagggaaaacagaatgggtagcagaagagggcagtcaacaataccagttacgactacatgaccagctgcagaaacaaagactgtaa

SEQ ID NO: 119656 - DNA, 1866 bp, Homo sapiens
tgcgtccagtgggtccccggactcatcctgtggtcatttccccagtgccagaatgcataattagcatagacatacttcgaagctggcagaacccccacattggcaccctgactggtagggtgagggctgttatggtgagaaaggccaaatggaagccattagagctgtctctacctagaaaaatagtaaaccaaaaacaatattgtgtccctggagggattgtggagattagtgccaccaccaaggacttgaaagatgcaaaggtggtgattcccaccatatccctgttcaactatcctatttggcttgtgcagaagaatgatggatcttggagaatggcagtggattatcataagcttacccaaggggtgactccaattgcagctgctgtaccaaatgtgatttcattgcttgagcaaattaacacatcttctggtacctggtatgcagccatttacttggtaaatgtctttttctccattcctgtccataaggccctcaagaaacaatttgccttcagctggcaaggtcaaccatatacctttaccattctaccttgggggcatatcaactctccgactttgtgttataatctcatttggagagaacttgatcacttttcgcttccacaagatatcacactggttcattacattgatgacattatgctaattggatccaggacttcaaaggctgccagttttgagtggggtctagaacaggagaagggtctgcaacagattcagtctgctgtgcaagctgctctgccacttgggccatatgacccagcagatccaatggtgcttgaggtgtcagtggcagcagatagggatgctgtttggagcctttggcaggctcccataggtgaatcacagcagaggcctctaggattttggagtaaggccctgccatcttatgcagataactactcttcttttgagagacagctcttggcctgttactgggctttggtggaaactgaatgtttgactctgggtcatcaagtcaccatatgacctgaactgcctatcatgaactgggtgctttctgacccatctagccataaagttggtcatgaacagcagcattccatcatcaaatggaagtggtatatacgtgatcgggcttgagcaggtcctgaaggcacaagttaagttacatgaggaagtggctcaaatgcccatggtctccactcctgccaccctgcctcctctcccctagcctgcaccagtggcttcatggggagttccctatgattagttgacagaggaagagaagactaaggcctggttcacagatgattctgcatgatatgcaggcaccatccgaaggtggacagctgcagcactacagcccctttctaggacatccctgaaggagagcggtgaagggaaatcttcccagtgggcagaagttcgagcagtgcaccttgttgtgcattttacatggaaggagaaatggccagatctgatggtttggctggatgatcaaggacttggaagaagcatgattggaaaattggtgacaaataaatttggggaagagatgtgtggatggacctctctgagtgagtggccaaaaactgtgaaaatattggtatcccgtgtgagtgctcaccaacgggtgacctcagcagaggagaattttaataatcaggtggatgagataagccattctgtggacaccactcagcctctttccccagccacccctgtcattgcccaatgggcccatgaacaaagtggccatggtggcagagatagaggttacgaatgggctcagcaacatgtacttccactcaccaaggctgacctggctacagccactgctgatgcccaatttgccagcagcagagaccaacaatga

SEQ ID NO: 119657 - DNA, 448 bp, Homo sapiens
cggtactgcgccggaatttttcggtcgacccacccgtccgaggggctctgcgttctgtagtggcgcttcttgggcccgtggcggattgtaagctgctggttttgcggctgggaagagcggcgagagggttcggcatttttcgtcgggatccccgcaaggatgagtgctgccagagagtctcacccgcatggggtgaagcgttcagcctccccagacgacgatctgggatctagcaattgggaggcagcatacttgggtaatgaagagagaaaacaaaagttcttgagacttatgggtgccggaaaggggaagaagaccagaaaattaatgaagaactggagtctcaatatcagcatagtatggacagtaaattatcaggaagatatcggcgacattgtggacttggcttcagtgaggtagaagaccatgatggagaaggtgatgtggg

SEQ ID NO: 119658 - DNA, 404 bp, Homo sapiens
ccgtggcggattgtaagctgctggttttgcggctgggaagagcggcgagagggttcggcatttttcgtcgggatccccgcaaggatgagtgctgccagagagtctcacccgcatggggtgaagcgttcagcctccccagacgacgatctgggatctagcaattgggaggcagcagacttgggtaatgaagagagaaaacaaaagttcttgagacttatgggtgcaggaaagaaagaacatactggtcgtcttgttataggagatcacaaatcaacatctcacttccgaaccggtagaagaccatgatggagaaggtgatgtggctggagatgatgatgatgacgatgatgattcacctgatccctgaagtccagatgattctgaaagcgattcagagtcagaga

SEQ ID NO: 119659 - DNA, 434 bp, Homo sapiens
cttgggcccttggcggattgtaagctgctggttttgcggctgggaagagcggcgagagggttcggcatttttcgtcgggatccccgcaaggatgagtgctgccagagagtctcacccgcatggggtgaagcgttcagcctccccagacgacgatttttttctctttgccattatgaatggaaaatgaaaaattgtgaattcccatcggtgttcagtgaaagctaaaagtagacaacagctgggatctagcaattgggaggcagcagacttgggtaatgaagagagaaaacaaaagttcttgagacttatgggtgcaggaaagaaagaacatactggtcgtcttgttataggagatcacaaatcaacatctcacttccgaaccggggaagaagactagaaaattaatgaagaactggagtctcaatatcagcact

SEQ ID NO: 119660 - DNA, 1096 bp, Homo sapiens
  misc_feature (1)...(1096): n = a,t,c or g
caatcatttntagggaaatttgaggaatgntaaatngcttcaccaacaaaaggagcattcccccataaggtgaattagagggttgatgatgctaatatgaaaggaagttgagtactggatttatttcttattttatacaactcttactctttaccaaaaatggttatagtcatgccccataaaaagtgtaaccccatggcatttgaaagcaaacactctttgtaattatttaaaagggcctttttaaaaaattataatacaaaggtctgtgctctataaagcagtcctcccactgtgcattgtaacaataaaggcttaacttttaaatacaaagactaagcggtttgggagttaatgaaccactggatttaacaaacatcaattttataattgcttttttgcatcttttttgtttttgggatcctccacttcatcagggtgctcagcaggcttggagttcttcagcagattcttctttctctgacttctgaatcggctttcaagaatcatctgggactttcagggatcagggtgaatcatcatccgtcatcatcatcatctccagccacatcaccttctccatgcatggtcttctacctcactgaaagccaagtcccacaatgtcgccggatatcttccctggaaaatttactggtccaataactttggctggatattgaggactccaagttcttcagttaattttctttgtcttctttccccgggttcgggaagtgagatgttgatttgtgatctcctataacaagacggaccagtatgttctttctttcctgcacccataagtctcaagaacttttgttttctctcttcattacccaagtctgctgcctcccgaattgctagatcccaagatcgtcgttctggggaaggctgaacggcttcaccccatgcgggtgaagaactctctggcagcactcgatccttgcggggatcccgacgaaaaaatgccgaaccctctcgccgctcttcccagccgcaaaakccagcagcttacaatrccgccaagggccccaagcagcgcacactacagaacgcagagcccctccgggccttctctgccacagtcgtcaccgtt

SEQ ID NO: 119661 - DNA, 504 bp, Homo sapiens
ccccagcctgccgccatggccgcatacatctgggtgctgatccggcacggcgagagcgcatggaacctggagacatccttcagcggctggtacgacgcgaccctgagtctggcgggccacaaggaggcgaagcgcggcgggcaggcgctacgaggtctttttcaggttcccttagcgccagaagcggttggtacagtctggtgctcctggaggacgccctgtgccttaaagcagctgtaaccaaggcctctcaagaggcggctacggatcctagcggatcgacacgccacacagcctcgtccccagcagtaggtggaggccctgggggtgcctaacaagcctcagaacaccaagaaatccgcgtggttgtgcaggtctttgctgttcagtagcattccacaaatagtgtgtccaaaacgcatctgtagatgtaacttgagtgaatgaatgaatgattcgagttgctccttctacccaataaagtagataagattttaaaaaaaa

SEQ ID NO: 119662 - DNA, 1827 bp, Homo sapiens
  misc_feature (1)...(1827): n = a,t,c or g
atttgggcgagaacttgcgcgggagccggactgagcggtgcgagcgcgcatgcgcggccgacggagcgggctgctactccggaatctgctaatcccagtcggtgccgcatccccagcccgccgccatggccgcctacaaacatggtgctgggggcggcacggcgagagcgcatggaacctggagaaccgctttagcggttgtgacgacgccgacctgagcccggcgggccagcgaggaggcgaacggctngccgngcaggcgctacaagatgctggctatgagtttgacatctgcttcacctcagttgcagaagagagcgatccggaccctctgggacagtgctagaatgcctttgatcagatgtggcttgccagtggtgaaggactttggggcttcaatgagcggcactattgggggtcttaacccggtctcaattaaaagcagaaacttgctgcaaagattgggtgagggcccaggttgaagatcttggaggcgctcctatggattgtcccaccacctccgatggagcccgaccatcctttctacagcaacatcagtaaggatcgcaggtatgcagacctcacagaagatcagctaccctcctgttgagagtctgaaggatactattgccagagctctgcccttctggaatgaagaaatagttccccagatcaaggaggggaaacgtgtactgattgcagcccatggcaacagcctccggggcattgtcaagcatctggagggtctctctgaagaggctatcatggagctgaacctgccgactggtattcccattgtctatgaattggacaagaacttgaagcctatcaagcccatgcagtttctgggggatgaagagacggtgcgcaaagccatggaagctgtggctgcccagggcaaggccaagaagtgaaggccggcggggaggatactgtccccaggagcaccctccctgcccgtcttgtccctctgcccctcccacctgcacatgtcacactgaccacatctgtagacatcttgagttgtagctgcagacggggaccagtggctcccattttcattttagccattttgtcgcctgcacccactcccttcatacaatctagtcagaatagcagttctagagcacaggttctcagtctaagctatggaaaagctccccttatccaacagagtttaaaagtagtgacttgggtttttgcgagtgctttgtttactaaggactttggggaggaaccatgctaagccatgaccagtgaggagaagcaacagagcctgtctgtccccatgagcggagtctgtcctctgctcttctgcagtcaggtcactgcctactgcctgggggctctagtcattccagtggaagacgaatgtaacctgcgtggtgatgtgacaactgtttcctccctgaccccagaggatctggctctaggttgggatcaatcctgaatttcgttatgtgttaatttacttttattaaaaaagtatagtatatataatacaaaacaataacccttctggggtttcttgtggcggttgaaatagtcccacatgtggtcatcagaaatagcattcctcataccaatataggatcagctccttgacctctgaggggtcaggagtgcttcctggtgtgtgtattagaatcccttcctgccttgtttcatggcagtgaaatgcctcttggtcctgtccagtgtatctttcactgatttctgaatcatgttctagttgcttgaccctgccacatgggtccagtgttcatctgagcataactgtactaaatcctttttccatatcagtataataaaggagtgatgtgcaat

SEQ ID NO: 119663 - DNA, 450 bp, Homo sapiens
  misc_feature (1)...(450): n = a,t,c or g
ggtgaacaaagctggcggcttgatttaccagttggacagctacgcgccacggntgaggctgagaaaactttcagttatccgctggatctgctgctcaagctacacgatgagcgtgtgttggttgctttcggccagcgggacggcatccgagtgggtcatgcagtgctggccatcaatggcatggacgtgaatggcaggtacacggccgacgggaaagaggtgctggagtatctgggtaaccctgctaattacccggtgtccattcgatttggccggccccgcctcacttctaatgagaagcttatgctggcctccatgttccactcggatcaagtttgtggttctagcagatcctaaggcaagctggaatagattctcttctccgaaagatttatgagatttactcagactttgccctcaagaatccattctattccttagaaatgccta

SEQ ID NO: 119664 - DNA, 666 bp, Homo sapiens
atggcgatttttagtgtgtatgtggtgaacaaagctggcggcttgatttaccagttggacagctacgcgccacgggctgaggctgagaaaactttcagttatccgctggatctgctgctcaagctacacgatgagcgtgtgttggttgctttcggccagcgggacggcatccgagtgggtcatgcagtgctggccatcaatggcatggacgtgaatggcaggtacacggccgacgggaaagaggtgctggagtatctgggtaaccctgctaattacccggtgtccattcgatttggccggccccgcctcacttctaatgagaagcttatgctggcctccatgttccactcgctctttgccatcggctcccagctgtctcctgaacagggaagctcaggcattgagatgctggagacagacacattcaaattgcactgctaccagacactgacagggttttccaagcccctcaacaaagtggtcatccttgtccagaccaaccaaactgggctggtgtcagctgcccacttacaagcctctgttcacctagatgaaggtaacagtggcccttcggctggccacgtcactcccgtgactcatcttaagcttgtaggtgacaaactcccaagtctttctgacgaactgttgttacctggtcctccctaa

SEQ ID NO: 119665 - DNA, 2037 bp, Homo sapiens
atgaagaagacagaagacaacaacgcacttgtgttcactgtgaatgttaaagccaacaagcaccagaagaagctctatgacactgatgtggccaaggcctggaagaatgcaactctggccgagcaggctaagctgcccgccacagagaagcctgtgttgctctcaaaagacattgaagctaagatgatggccctggaccgagaggtgcagtatctgctcaataaggccaagtttaccaagccccggccccggcctaaggacaagaatgggacccgggcagagccacccctcaatgccagtgccagtgaccagggggagaaggtcatccctccagcaggccagactgaagatgcagagcccatttcagaacctgagaaagtagagactgtccaggccgagaggccggcggccctgaaggtgagtgaggccctcggcagctgcagccggggtgtctggtacccccccggcgtggtgcttagcccaggactttcagacgcggccgctggccgggaggctttgttaatgggcatcgttaagctgccgtgcaacatccaggatgtttttggctcctttgctcagcaacaagttggccaggctgatgcccaagttctgggcagccaactggggccctcgtggaatgttacgagcagtgatgcctaccaactgtgggtcatcctcagggccatcttcatgctgtatgagggaaggaggtgggatttggtggagcacaggccctaccaggtgcctcaggaaggccctttcagcgatgcagcgaagcagagtctcgggatcgtgcagcacacccaccagatccaagatgtcctggtccttggctcgcacttccacgcccaaggccccctgatggaaaaacatcctaggacatcaggcctgatctttccccaaccaatggcgcaaagcatgggaccacctctatctacttgctccccagcgccttttggaccggtagcatcccaaggtctgcccctccctgagaatgctattctggggaagcagatgcagaaggttaatatcatgttctatgacatgggctcaggcagcaccgtatgcaccattgtgacctaccagatggtgaagactaaggaagctgggatgcagccacagctgcagatccggggagtaggatttgaccgtaccctggggggcctggagatggagctccggcttcgagaacgcctggctgggcttttcaatgagcagcgcaagggtcagagagcaaaggatgtgcgggagaacccgcgtgccatggccaagctgctgctgggtcatgcagtgctggccatcaatggcatggacgtgaatggcaggtacacggccgacgggaaagaggtgctggagtatctgggtaaccctgctaattacccggtgtccattcgatttggccggccccgcctcacttctaatgagaagcttatgctggcctccatgttccactcgctctttgccatcggctcccagctgtctcctgaacagggaagctcaggcattgagatgctggagacagacacattcaaattgcactgctaccagacactgacagaccacagaacaactctggatgaccagctaaaccaaagaggcgcgcggcacggacccctccgacaaacagatttcatcctaactcgatctcttcgggatcccggggagggaaaagacagctccaaacgaaggatatctccaaagaccaggctccctcggcctgagtcgcagacagtgatgccaggagggaggcaaaggaacttggaagcagcggatccagaagcaggtgtggccccgggagcggccccatcattgctcagcggctccttcaccagctccttgtcgaagaaaacgaagcgccgccactgcagtgctccagccggtgaggagtaccagctggagaatccttttgtcctagtaaccccggcaacgggatgcctaatctcagacccccagcagccccaaaggttccacccagaacttgtggctgcccagagctcagctccgaatcccaacctggaacctccgctgggggaatga

SEQ ID NO: 119666 - DNA, 1390 bp, Homo sapiens
cggcccccattgacgccgcattagaggcctgaagtaccgggtcgacccacgcgtccgggcggaagacaggaagcggattctagttcccaagccgcaccgcctaaatactgccggagtctgcgctagttgtgacgcagtactatagcgctgttttcctgcactgataaacgaaaagcaatccaccaggtctcggcagctaactttccggcactacttatgcccgagcgtgtcgctcccagtgcgcaagtgcagcaggtggctgcacggagggcgcgggaggaggaggaggagaatgaggaggaggatggctgggtggggccggcggcaagtgctgtgatgcggttccggggaggggccgtcgggtagaggctgaataccagtttccgagcggcaaggcagcgattggcgattttttagtgtgtatgtggtgaacaaagctggcggcttgatttaccagttggacagctacgcgcccacgggcttgaggcttgagaaaactttcaagttatccgctggatcttgctggctcaagctaacacgatgagcgtgtgttggttgctttcggccagcggggacggcatcccgagtggggtcatgcagtgctgggccatcaatggcatgggacgtgaatggcaggtacacggccgacggggaaagaggtgctggagtatctggggtaacccctgcttaattacccggtgtccattcgattttggccggccccgcctcaacttctaatgaagaagcttatgctgggcctcccatgtttccactcgctctttgccatcgggctcccaagcttgtcttcctggaacaagggaagcctcaaggcatttgaagatccttggaagacaagacacattcaaatttgcactggctaccagacactgacaagggatcaagtttgtggttctaagcagatcctagggcaagctgggattagattctcttctccgaaagatttatgaggatttacttcagactttgccctcaagaatcccattctaattccttagaaatgcctatcaggtgtgagctctttgaccagaacctgaagctagctctggaggtggcagagaaggctggaacttttggacctgggtcataggctgaacctgttatggacctccaaattctgagagttcctgcaacaagaatactgctgttggacactccagtggaaatcccagcagccttgttagtgcacttgaaagtgggagaatgctgaccctggatgacttgtactgattcctgagccttaacactgtgctctttccttctgtatataccatggtcttactttccaactctgtacagatttatttatggaggagctaggtccataaatgttgtaataaatattcctttgatcttggtgtttgcaaaaaaa

SEQ ID NO: 119667 - DNA, 339 bp, Homo sapiens
atggaagtagggaaattgagtaaaggagtctgggaggaaccagctctgcctgatgagagaaagacatttgcaagtgcacgaggtccagtgagaaaggctgacacccctgtccacagagctgcagcggggacagcatggaggaaggttcagtgtttgacaaaagacgatgcagtgtggtgcgtgaaagagaacgggctggacatcagcagcttgggtctaattccagctcaaacaacttgtgtgatcttgcatccgtacccttccgaagagcagaagaaacagttagcgcaagacacaggacttacaattctccaagtaaacaactggaaggctcattaa

SEQ ID NO: 119668 - DNA, 2229 bp, Homo sapiens
cgtggtagagggccgtatgaccgggccgacccacgcgtccgagctgtttgaaggggaaaatgcccatcgacctcgtcattgatgaaagagactgcagctccaagtcagatcatgaagaactttcaggctcctccacaaatctcgctgaccataacccttcttcttggcgagaccacgatgatgcaacctcaacccactcagcaggcaccccagggccctccagtgggggccatgcttcccagagcggagacaacagcagtgagcaaggggatggtttagacaacagtgtagcttcacctggtacaggtgacgatgatgatccggataaggacaaaaaacgccagaagaaaagaggcattttgcccatagtattccctatatatcatgagagcatggctcttccagcatctcacacatcctgtacccttccgaagagcagaatatacagttagcgcatgacacaggacttacaatttttcaagtaaacaactggtttattaatgccagaataggaatagtacagcccatgattgaccagtctaatcgagcaggttttcttcttgatccttcagtgagccaaggagcagcatatagtccagagggtcagcccatggggagctttgtgtttggatggtcagcaacacatgggggatccggcctgcagggacctatgagtgggatggggcatgaatatgggcatggatggggcaatggcactacatgttaaccttcatcatgtaaagcaatcgcaaagcaaggggaagtttgcagagcatgccaggggactacgtttctcagggtggtcctatgggaatgagtatggcacagccaagttacactcctccccagatgaccccacaccctactcaattaagacatggacccccaatgcattcatatttgccaagccatccccaccacccagccatgatgatgcacggaggaccccctacccaccctggaatgactatgtcagcacagagccccacaatgttaaattctgtagatcccaatgttggcggacaggttatggacattcatgcccaatagtataagggaactcaagggaaaaggaaacacacgcaaaaactattttaagactttctgaactttgaccagatgtgacacttaatatgaaattccagacagctgtgattattttttacttttgtcatttttcatcaagcaacagaggaccaatgcaacaagaacacaaatgtgaaatcatgggctgactgagacaattctgtccatgtaaagatcctctggaaaaagactccgagagttataactactgtagtataaatataggaactaagttaaacttgtacatttctgttgatcacgccgttatgttgcctcaaatagttttagaagagaaaaaaaaatatatccttgttttccacactatgtgtgttgttcccaaaagaatgactgttttggttcatcagtgaattcaccatccaggagagactgtggtatatattttaaacctgttgggccaatgagaaaagaaccacactggagatcatgatgaacttttggctgaacctcatcactcgaactccagcttcaagaatgtgttttcatgcccggcctttgttcctccataaatgtgtcctttagtttcaaacagatctttatagttcgtgcttcataagccaattcttattattatttttgggggactcttcttcaaagagcttgccaatgaagatttaaagacagagcaggagcttcttccaggagttctgagccttggttgtggacaaaacaatcttaagttgggcagctttcctcaacacaaaaaaagttattaatggtcattgaaccataactaggactttatcagaaactcaaagcttgggggataaaaaggagcaagagaatactgtaacaaacttcgtacagagttcggtctattaattgtttcatgttagatattctatgtgtttacctcaattgaaaaaaaaaagaatgtttttgctagtatcagatctgctgtggaattggtattgtatgtccatgaattcttcttttctcagcacgtgttcctcactagaagaaaatgctgttacctttaagctttgtcaaatttacattaaaatacttgtatgaggactgtgacgttatgttaaaaaaaaaaggtgttaagtcacaaaaagcggtaataaatatttcatttttgatttttaaaaaaaaaaaaaaaaaattcctgcggccgcaagg

SEQ ID NO: 119669 - DNA, 293 bp, Homo sapiens
tcttcacagccccatcatggaagctttcgtcaatgttaagaccgtgtacaacaacaactctagtcgctttgggaagtttgttcagctgaacatctgtcagaaaggaaatattcagggcgggagaattgtagattgtatcctctttcatttatttttatctatagtaattgattctctaagtggaaactgttctcactaattataaggattgaaaaagaatgtgaaacatttctttctctggttctttaacgaattagacagttagttattgctctaatgttagtatacctgtt

SEQ ID NO: 119670 - DNA, 449 bp, Homo sapiens
accgaaagcactaaattgatcctcaagtttctgtcagtcatcagtcaacagtctttggaattgtccttaaaggagaagacatcctgtgttgaacgagctattcttgaaagcagccccatcatggaagctttcggcaatgcgaagaccgtgtacaacaacaactctagtcgctttgggaagtttgttcagctgaacatctgtcagaaaggaaatattcagggcgggagaattgtagattatttattagaaaaaaaccgagtagtaaggcaaaatcccggggaaaggaattatcacatattttatgcactgctggcagggctggaacatgaagaaagagaagaattttatttatctacgccagaaaactaccactacttgaatcagtctggatgtgtagaagacaagacaatcagtgaccaggaatcctttagggaagttattacggcaat

SEQ ID NO: 119671 - DNA, 774 bp, Homo sapiens
atgaggaaaccgacctacatcggctccatcctggcctctgtgaacccctaccagcccatcgccgggctgtacgagcctgccaccatggagcagtacagccggcgccacctgggcgagctgcccccgcacatcttcgccatcgccaacgagtgctaccgctgcctgtggaagcgccacgacaaccagtgcatcctcatcagccttgttaactgtgtttgggacctggccaccgcgggcctaaacaacggcagcagctggtctcccgagggacccttcggtccttctagagcttttcctccagagctgcgtttcctacaggtggccttgatgagtggtgaaagtggggcaggtaaaaccgaaagcactaaattgatcctcaagtttctgtcagtcatcagtcaacagtctttggaattgtccttaaaggagaagacatcctgtgttgaacgagctattcttgaaagcagccccatcatggaagctttcggcaatgcgaagaccgtgtacaacaacaactctagtcgctttgggaagtttgttcagctgaacatctgtcagaaaggaaatattcagggcgggagaattgtagattgtatcctctttcatttatttttatctatatttacaaatgtgggtcctcaggtccggaaccgcattgctgcttgcgagagggctggaatgatggaatacagaagtgcttccctctctctgctgaatgcctcggtggctgaaggatatgtacgggaagcctgtcgctacaaagtagttagatga

SEQ ID NO: 119672 - DNA, 736 bp, Homo sapiens
ggcggaattcggcgtgagaagccatgagcagcaaagtctctcgcgacaccctgtacgaggcggtgcgggaagttctgcacgggaaccagcgcaagcgccgcaagttcctggagacggtggagttgcagatcagcttgaagaactatgatccccagaaggacaagcgcttctcgggcaccgtcaggttggcaccgttctgatcccacccagccctcagtgcccccgtgcttgcccctcccctgcaggctcccgctgagccggaggcgggcacgtcggtactgatgtgctagggtagttcagaccccctgctccgggcaggcgcggctggacggacccccaccctgggtcttaaaacatgaggggaggcgtgggtaggcctcggccgagcccgccggccagcctgagaagccaggctggctgctggtgaatgtgaacgctccgggtaaggctcgggtggctgctgcggtcccagacccttcaccgggcccttgggaccccagggctaggcgtaacctgttggtgctgtcccccaaaacgcaggcttaagtccactccccgccctaagttctctgtgtgtgtcctgggggaccagcagcactgtgacgaggctaaggccgtggatatcccccacatggacatcgaggcgctgaaaaaactcaacaagaataaaaaactggtcaagaagctggccaagaagtatgatgcgtttttggcctcagagtctctgatcaagcag

SEQ ID NO: 119673 - DNA, 746 bp, Homo sapiens
cgtggtgcaattccgcggcgtgagaagccatgagcagcaaagtctctcgcgacaccctgtacgatgcggtgcgggaagtcctgcacgggaaccagcgcaagcgccgcaagttcctggagacggtggagttgcagatcagcttgaagaactatgatccccagaaggacaagcgcttctcgggcaccgtcaggcttaagtccactccccgccctaagttctctgtgtgtgtcctgggggaccagcagcactgtgacgaggctaaggccgtggatatcccccacatggacatcgaggcgctgaaaaaactcaacaagaataaaaaaactggttcaagaagctggcccaagaagtatgatgcgtttttggccttcagagtcctctgattcaagcagattcccccaaatccctcggcccacagtttaaataaaggcaggaaaagttccccttccctgctcacacacaagcaaaaacatggtggccaaagtggatgaggtgaagtccacaatcaagtttccaaattggagaaggtgtttatgtctggctgtagctgttggtcacgtgaagatgacagacgatgagcttgtgtataacattcacctggctgtcaactttttggtgtcattgctcaagaaaaactggcagaatgtccgggccttatatatcaagagccccatgggcaagccccagcgcctatattaaggcacatttgaataaattttattaccagtaaaaaaaaaaaaaaaaaa

SEQ ID NO: 119674 - DNA, 846 bp, Homo sapiens
atggccattcccggcatcccctatgagagacggcttctcatcatggcggaccctagagataaggcgcttcaggactaccgcaagaagttgcttgaacacaaggagatcgacggccgtcttaaggagttaagggaacaattaaaagaacttaccaagcagtatgaaaagtctgaaaatgatctgaaggccctacagagtgttgggcagatcgtgggtgaagtgcttaaacagttaactgaagaaaaattcattgttaaagctaccaatggaccaagatatgttgtgggttgtcgtcgacaggtgatagaattacctcttacaaacccagagttatttcagcgtgtaggaataatacctccaaaaggctgtttgttatatggaccaccaggtacgggaaaaacactcttggcacgagccgttgctagccagctggactgcaatttcttaaaggttgtatctagttctattgtagacaagtacattggtgaaagtgctcgtttgatcagagaaatgtttaattatgctagagatcatcaaccatgcatcatttttatggatgaaatagatgctattgatattgatttgccaaatgaacaagcaagattagacatactgaaaatccatgcaggtcccattacaaagcatggtgaaatagattatgaagcaattgtgaagctttcggatggctttaatggagcagatctgagaaatgtttgtactgaagcaggtatgttcgcaattcgtgctgatcatgattttgtagtacaggaagacttcatgaaagcagtcagaaaagtggctgattctaagaagctggagtctaaattggactacaaacctgtgtaa

SEQ ID NO: 119675 - DNA, 1595 bp, Homo sapiens
ggcttctcatcatggcggaccctagagataaggcgcttcaggactaccgcaagaagttgcttgaacacaaggagatcgacggccgtcttaaggagttaagggaacaattaaaagaacttaccaagcagtatgaaaagtctgaaaatgatctgaaggccctacagagtgttcgggcagatcagtgggtgaagtgcttaaacagttaacctgaagaaaaattcattgttaaagctaccaatggaccaagatatgttgtgggttgtccgtcgacagctttgacaaaaagtaagcctgaagccaggaaccaggagttgctttgggatatgactacactaactattcatggaggatattttgccgaggagaggtggatccactggtttataacatgtcttcatgaggaccctggggaatgtttcttattctgagattggagggctatcagaaccagatccggggaatttaaggagaggtgataggattacctctttacaaaccccagagttattttcagcgtgtagggataatacctcccaaaaggctgtttgttatatgggaccaccaggtaccgggaaaaacactccttggcacgagccgttgctagccagctggactgcaatttcttaaaggttgtatctagttctattgtagacaagtacattggtgaaagtgctcgtttgatcagagaaatgtttaattatgctagagatcatcaaccatgcatcatttttatggatgaaatagatgctattggtggtcgtcggttttctgagggtacttcagctgacagagagattcagagaacgttaatggagttactgaatcaaatggatggatttgatactctgcatagagttaaaatgaccatggctacaaacagaccagatacactggatcctgctttgctgcgtccaggaagattagatagaaaaatacatattgatttgccaaatgaacaagcaagattagacatactcgaaaatccatgcaggtcccattacaaagcatgggtgaaatagattatgaagcaattgtgaagctttcggatgggctttaatggagcagatctgagaaatgtttgtacttgaagcaggtatgttcgcaattcgtgctgatcatgattttgttagtacagggaagacttcattgaaagcagtccagaaaagtggctgattctaagaagctggagtctaaattggactacaaacctgtgtaatttactggtaagatttttgatggctgcatgacagatgttggcttattggtaaaaataaagtttaaagaaaataatggtatgtattggcaatgatgtccattaaaagtatatgaataaaaatatgagtaacatcataaaaattagtaattcaacttttaagatacagaagaaatttgtatgtttgttaaagttgcatttattgcagcaagttacaaagggaaagtgttgaagcttttcatatttgctgcgtgagcattttgtaaaatattgaaagtggtttgagatagtggtataagaaagcatttcttatgacttattttgtatcatttgttttcctcatctaaaaagttgaataaaatctgtttgattcagttctcct

SEQ ID NO: 119676 - DNA, 487 bp, Homo sapiens
caggagtctactatgcaactgcatactggatgcctgctgattagacagttcaagtcaaaaatgtaatggacaagaatggggacgcctatggcttttacaataactctgtgaaaaccacaggctggggcatcctggagatcagagctggctatggctctcaaaccctgagcaatgagatcatcatgtttgtggctggctttttggagggttacctcactgccccacacatgaatgaccactacacaaacctctacccacagctgatcacgaaaccttccatcatggataaagtgcaggattttatggagaagcaagataagtggacccggaaaaatatcaaagaatacaagactgattcattttggagacatacaggctatgtgatggcacaaatagatggcctctatgtaggagcaaagaagagggctatattagaagggacaaagccaatgaccctgttccagattcagttcctgaatagtgacga

SEQ ID NO: 119677 - DNA, 1143 bp, Homo sapiens
atggacctctttaagtggtcaaaaactgtgaaggcatttgtatcccctgtgaatgctcaccaatgggtaacctcagcagaggaggatattaataatcaagtccataggatgacccgttctgtggacaccattcggcctctatccgcagccacccgtgtcatcgcccaatgggctcatgaacatagtagccatggtggcagtaatggaggtgatgcctgggctcagcaacatggacttccacttaccaaggctgacgtgactatggctaatgccgagaagcaagataagtggacccggaaaaatatcaaagaatacaagactgattcattttggagacatacaggctatgtgatggcacaaatagatggcctctatgtaggagcaaagaagagggctatattagaagggacaaagaaatccttaggtgctcagatcctctgtgtaaactatccctcacctaacccctgccaaaagggtgaaagagccctgtgcatagctgtaaatatgctcccctggtcacagctgattggaataagactcaacggctgcagacctgggcctaccaggctccacagaacaggcaggcaggagcctgagacaagcagaagccccacgccttccgagttgcacccttcagagttagcgcaggacccaagagtctttgcagcctgcacccctgggaccccggtgaccagggcctgtagaaagagtggaggacttctgcgacagggcataatgccagtgcccagggcagtgcctggactgctcacaccaagaggttcccgctggaggttctactccgttgttggctgcttgcttgattccatgcctaaagagtacagaggggattgttgggaacctgctgctatcataaagcaattggagggcctggtggcacacgctgctacaatcttgatgaacaagaacaaagtcacagaaactgttgaaggatctgctttattgaaagcaatgagactaacaaaaattctaggagggcctatatcagatatggagaaatttctaatgacctggactgaagaccagacacagaagtatatccctctcagcaactatagtcaaagcaaatctcttcaggacaatcggtcaaagcaaaaggtttgcaatgttgaaagaaaatattag

SEQ ID NO: 119678 - DNA, 531 bp, Homo sapiens
atgaatgggccgtcctgtcctaaagagccggaacagctgcggaagctcttcatgggagggctgagctttgaaacaaccgatgagagcctgaggagcccttctgagcagtggagaaggctcacagattgtgtggatgccactgtggaattaagaattaatgaattagagatatttcctgtggaattggatccaaaaagtacaaaaggaaggagcatgcagcttgctcgttcttgggagcataaccggctgagggcaagtgcctttataggaggcaggcagaagggcagtttgacacaagcacagaagagaaggctagggaaaggaggagtagatcgtgatttgaaaatggaagccttgaagactggagtaatggatgcggtcacaagtcaaagaatgttggctgccaccggaagctggaagaggcaggagcagattctccctctagagcttctggagggagcacaatcctgtcgacatcttgatctcaaccctgtgaaactgatttcagaatttctacgtgcagaattgtga

SEQ ID NO: 119679 - DNA, 1086 bp, Homo sapiens
atgccagccagctcttccagattttgctcctccaacccaatgaaaaatgtacagctcttctcagaattatctttcattcctacccgactcactgaacagtgtcagtcagagccctggcatcagaaagtagtcatcttgcgagttggtttaaggttcctaagagccttgcgcctgctagaactccctcaaatcttgcaaattttacgagccatcaagaccagtaactcagtgaagttttccaaactgctgtcaataattctcagtacctggttcacagctgcgggattcattcacctggtggaaaattctggtgatccctggctcaaaggtagaaattcacagaatatatcatattttgagtcaatttacctggtcatggcaacaacgtcaaccgttggatttggagatgtggtagccaagacatccttaggacggaccttcatcatgtttttcacactggggagtttgatattatttgcgaactatatacctgaaatggtggaactgtttgctaacaagaggaaatacaccagttcctatgaagcactcaaaggaaagaagtttattgtggtctgtggaaacatcactgtggacagtgtgaccgctttcctgaggaatttcctccgcgacaaaacccctccttctttggaacttgaaaccatatttaaatgctacttggcatacacaacgttcatttctggatctgcaatgaagtgggaggatctgaggcgagttgcggtttatctgccaaagattcccagctggaactgggacaccggagacaacatcatctgctttgctgaattaaaacttggatttatcgcccaaggctgtttggtgccaggcttgtgtaccttcctaacatctctatttgtggagcaaaacaaaaaggttatgcctaaacagacctggaagaaacacttcttgaatagcatgaaaaacaaaattctgacccaacgtctctctgatgactttgctggaatgagctttcctgaagttgcccggctctgctttctgaagatgcacctcctgttgatagccatcgaatacaagtccctctttacggatggtttctggtaccaataa

SEQ ID NO: 119680 - DNA, 474 bp, Homo sapiens
atgttcggccggacgcggtggctcacgcctgtaatcccagcactttgggaggccgaggcgggcgaatcacgagaaacgtactacccgacggtctggtgctgggagggtcgaggacagaccctgcttagacctttcatcacttcgaagcccccggtgcagtacaggaatgaacttattaaaactgcagatggaggacagatttcactggactggtttgataatgataacagtacgtgttatatggatgccagcaccagacctactatcttattgttgcctggcctcacgggaacaagcaaggagtcatatatccttcatatgatccatcttagtgaagaattaggatacagcaggggtttcaatgggaggttgcaggaagaggcagaggaagaggaagaggaagaggacgtggccgtggcagaggaagagggggtcctaggcgataatgtctctcaagatttcaaagtcatatga

SEQ ID NO: 119681 - DNA, 2325 bp, Homo sapiens
atgaacatgaacatcaaaaaaattgtaaaacaagccacagttctgacttttacgactgcacttctggcaggaggagcgactcaagccttcgcgaaagaaaataaccaaaaagcatacaaagaaacgtacggcgtctctcatattacacgccatgatatgctgcagatccctaaacagcagcaaaacgaaaaataccaagtgcctcaattcgatcaatcaacgattaaaaatattgagtctgcaaaaggacttgatgtgtgggacagctggccgctgcaaaacgctgacggaacagtagctgaatacaacggctatcacgttgtgtttgctcttgcgggaagcccgaaagacgctgatgacacatcaatctacatgttttatcaaaaggtcggcgacaactcaatcgacagctggaaaaacgcgggccgtgtctttaaagacagcgataagttcgacgccaacgatccgatcctgaaagatcagacgcaagaatggtccggttctgcaacctttacatctgacggaaaaatccgtttattctacactgactattccggtaaacattacggcaaacaaagcctgacaacagcgcaggtaaatgtgtcaaaatctgatgacacactcaaaatcaacggagtggaagatcacaaaacgatttttgacggagacggaaaaacatatcagaacgttcagcagtttatcgatgaaggcaattatacatccggcgacaaccatacgctgagagaccctcactacgttgaagacaaaggccataaataccttgtattcgaagccaacacgggaacagaaaacggataccaaggcgaagaatctttatttaacaaagcgtactacggcggcggcacgaacttcttccgtaaagaaagccagaagcttcagcagagcgctaaaaaacgcgatgctgagttagcgaacggcgccctcggtatcatagagttaaataatgattacacattgaaaaaagtaatgaagccgctgatcacttcaaacacggtaactgatgaaatcgagcgcgcgaatgttttcaaaatgaacggcaaatggtacttgttcactgattcacgcggttcaaaaatgacgatcgatggtattaactcaaacgatatttacatgcttggttatgtatcaaactctttaaccggcccttacaagccgctgaacaaaacagggcttgtgctgcaaatgggtcttgatccaaacgatgtgacattcacttactctcacttcgcagtgccgcaagccaaaggcaacaatgtggttatcacaagctacatgacaaacagaggcttcttcgaggataaaaaggcaacatttgcgccaagcttcttaatgaacatcaaaggcaataaaacatccgttgtcaaaaacagcatcctggagcaaggacagctgacatggctccaagtagcgaagcgagcaggactgggcggcggccaaagcggtcggacagtgctccgagaacgggtgcgcatagaaattgcatcaacgcatatagcgctagcagcacgccatagtgactggcgatgctgtcggaatggacgatatcccgcaagaggcccggcaggtgcagaagctgccaatgtgactggcccggatggagttcctgtggaagggagtcgttacgctgcagatcggcgccgttacagacgtggctactatggaaggcgccgtggccctccccggaattacgctggggaggaggaggaggaagggagcggcagcagtgaaggatttgacccccctgccactgataggcagttctctggggcccggaatcagctgcgccgcccccagtatcgccctcagtaccggcagcggcggttcccgccttaccacgtgggacagacctttgaccgtcgctcacgggtcttaccccatcccaacagaatacagagttacccctggtctctcccttacccgttacctcaccaacaacttctaaagccattaaatgggcagatcaaggctggtgagattggagagatgaaggatggagtcccagagggagcacaacttcagggaccggttcatcgaaatccaacttaccgcccaaggtaccgtagcaggggacctcctcgcccacgacctgccccagcagttggagaggctgaagataaagaaaatcagcaagccaccagtggtccaaaccagccgtctgttcgccgtggataccggcgtccctacaattaccggcgtcgcccgcgtcctcctaacgctccttcacaagatggcaaagaggccaaggcaggtgaagcaccaactgagaaccctgctccacccacccagcagagcagtgctgagtaa

SEQ ID NO: 119682 - DNA, 681 bp, Homo sapiens
atgcccaggcagaagtttgctgcaggttcgggtccctcatggagaacttctgctagggcagtgtggaaaggaaatgtggggttggagcccccacacagagttcctactggtgcactacctagtggagctgtgagaatagggccaccatcctccagaccccagaatggtagatctaccgacagcttgctccatgtgcctggaaaagtcacagacactcaacaccagcccatgaaagcagccaggaatgggactataccctgcaaagccacaggggcggagctgcccaaggccatgggagcccactttttgcatcagcatgacctggattacgctggggaggaggaggaggaagggagcggcagcagtgaaggatttgacccccctgccactgataggcagttctctggggcccggaatcagctgcgccgcccccagtatcgccctcagtaccggcagcggcggttcccgccttaccacgtgggacagacctttgaccgtcgctcacgggtcttaccccatcccaacagaatacagcaatcctcacccttccgtccttctctgcctcctcttcctcctcctcctccaacatcagctgccagaaaccttgcttatggcttcctgatgctacaaaagctgaggcaaggccttcagtctgttttttcaaagcagtcattccggtaa

SEQ ID NO: 119683 - DNA, 1590 bp, Homo sapiens
gaattcgggcgggggagcccaaggagcgagcgcgccagacgaagctcgagccgcctccgccagcgcgaccccacctcggccgccgccgcctgcgccgcgagatccgccccggcctccccgagagcgagccccggccgccgcgaccaccagccgcgctaaccgccgaccaaccgccaccgaggcgcctgagcgagagcagaggaggaggaggcatgagtgaggcgggcgaggccaccaccaccaccaccaccaccctcccgcaggctccgacggaggcggccgccgcggctccccaggaccccgcgcccaagagcccggtgggcagcggtgcgccccaggccgcggccccggcgcccgccgcccacgtcgcaggaaaccccggtggggacgcggcccccgcagccacgggcaccgcggccgccgcctctttagccaccgccgccggcagcgaagacgcggagaaaaaagttctcgccaccaaagtccttggcactgtcaaatggttcaacgtcagaaatggatatggatttataaatcgaaatgacaccaaagaagatgtatttgtacatcagactgccatcaagaagaataacccacggaaatatctcgcgcagtgtaggagatggagaaactgtagagtttgatgtggttgaaggagagaagggtgcagaagctggccaatgtgactggcccggatggagttcctgtggaagggagtcgttacgctgcagatcggcgccgttacagacgtggctactatgggaaggcgccgtggccctccccggaatttcctttgggaagaagaagaagaaagggagcggcaccagttgaaggatttgaccccccctgccactgataggcagttctctggggccccggaatcatctggcgccgcccgcagtatcgccctcagtagcggcgagcggcggtgtccgcgtttaccacgtgggacagacctttgaccgtcgctcacgggtcttaccccatcccaacagaatacaggctggtgagattggagagatgaaggatggagtcccagagggagcacaacttcagggaccggttcatcgaaatccaacttaccgcccaaggtaccgtagcaggggacctcctcgcccacgacctgccccagcagtttggagaggctgaagataaaagaaaatcagcaagccaccagtggtccaaaccagccgtcttgttcgccgttgataaccggggtccctaacaattaccgggcgtcgcccgcgttccttcctaacgctcctttacaagattggcaaaaaaggccaaggcaggtgaagcaccaactgagaaccctgctccacccacccagcagagcagtgctgagtaacaccaggctcctcaggcaccttcaccatcggcaggtggacctaaagaattagatgaccattcagaaataaagcaaaaagcaggccacataccttaaccaacaccaaagaaacatccaagcaataaagtggaagactaaccaagatttggacattggaatgtttactgttattctttaagaaacaactacaaaaagaaaatgtcaacaaatttttccagcaagctgagaacctggaattc

SEQ ID NO: 119684 - DNA, 431 bp, Homo sapiens
attcggtctgcacaagtggggcctagggctggaagcttcttctccgtgcggaccgctgactccctcttaccttgggttccctcggccccaccctggaacgctgggccttggcagattctggcccttcctggcccttcagtcgctgtcagaaaccccatctcatgctcggatgccccgagtgactgtggctcgcacctctccggaaacattggaaatctctcctctacgcgcggccacctgaaaccacaggagctcgggacacacgtgctttcgggagagaatgctgagagtctcttgccgactctctcttgacttgagttcttcgtgggtgcgtggttaagacgtagtgagaccagatgtattaactcaggccgggtgctggtcgtcacgcctgtaaccccaacactttgggaggccgaggccgtaggatc

SEQ ID NO: 119685 - DNA, 786 bp, Homo sapiens
atggcggccgtgtgtcccgagctcctgtggtttcaggtgaccacgcgtagaggagagatttccaatgtttccagagaggcgcgagccgcagtcattcggggcatccgagcacgagatggggtttctgacagcgacttaagggccaggaagggccagaatctgccaaggcccatgtcccagggtggggtcgatggaacccaaggaacttccatattatctaaacaggttcaaaataaaccaaaaactggtcgaagtttattaggaggaccaggagatcttagtccattaaccccaagttttgggattttgccattagaaaccccaagtcctggagatggatcctatttacaaaactacactaatataccttctgaaattgaggtgccatccaccggagccccttcaaaaaagtctgttgccagaattggccaaactggagcaaagtctgtcttctcacagagtggaaatagacgagagtggggacccttgtgtgtggaagtctccatcccttttctacttaagccgatgaaggccgggttctcaagagtctccccggagtcagggccttggcgcagggctcacaagatgctgacggctggtgacggtgatattctacaaaaaagtgtttcaaaattgttcaacaatagaaaggttcaactctgtgtgaatgaatgcatacatcgcaaagatgtttctcagaatgcttctgtgtaccttttatctgaagatattcgcttttccacagcaggcctcaaagggctccaaatatccacttgcagattctaa

SEQ ID NO: 119686 - DNA, 2747 bp, Homo sapiens
cggaattcgcggccgcgtttaaatgagctggggctggccgggccggagccgctacagggggggcctgaggcactgcagaaagtgggcctgagcctcgaggatgacggtgctgcaggaacccgtccaggctgctatatggcaagcactaaaccactatgcttaccgagatgcggttttcctcgcagaacgcctttatgcagaagtacactcagaagaagccttgtttttactggcaacctgttattaccgctcaggaaaggcatataaagcatatagactcttgaaaggacacagttgtactacaccgcaatgcaaatacctgcttgcaaaatgttgtgttgatctcagcaagcttgcagaaggggaacaaatcttatctggtggagtgtttaataagcagaaaagccatgatgatattgttactgagtttggtgattcagcttgctttactctttcattgttgggacatggacatgtgcagacagagcgcgctgccaaagggaccgcattctcaccaaagcgcctgtgtttacacacctttccctcggactcccctggaaccattagtggaaataggggaaaggccactcccgcaccaaacattcaattctcacttcttgacggaactttgcaaactgtctgcacacctctggcacaaaacaagtcactaatcgatgttttctctcacagacagcctgagacagttcttacggaaacaccccagggacacaattgaattaaacagattgaatttagaatcttccaattcaaagtactccttgaatacagattcctcagtgtcttatattgattcagctgtaatttcaccctgatactgtcccactgggaacagggaacttccatattatctaaaccggttcaaaaataaaccaaaaactggtcgaagtttattaggaggaccagcagctcttagtccattaacccccaagttttggggatttttgcccattaggaaacccccaaagtcctggacgatggatcctaatttacaaaactacactaatacacctcctgtaattgatgtgccatccaccggagccccttccaaaaagacttttcgtgttttacagtctgttgccagaatcggccaaactggaacaaagtctgtcttctcacagagtggaaatagccgagaggtaactccaattcttgcacaaacacaaagttctggtccacaaacaagtacaacacctcaggtattgagccccactattacatctcccccaaacgcactgcctcgaagaagttcacgactctttactagtgacagctccacaaccaaggagaatagcaaaaaattaaaaatgaagtttccacctaaaatcccaaacagaaaaacaaaaagtaaaactaataaaggaggaataactcaacctaacataaatgatagcctggaaattacaaaattggactcttccatcatttcagaagggaaaatatccacaatcacacctcagattcaggcctttaatctacaaaaagcagcagcagaaggtttgatgagccttcttcgtgaaatggggaaaggttatttagctttgtgttcatacaactgcaaagaagctataaatattttgagccatctaccttctcaccactacaatactggttgggtactgtgccaaattggaagggcctattttgaactttcagagtacatgcaagctgaaagaatattctcagaggttagaaggattgagaattatagagttgaaggcatggagatctactctacaacactttggcatcttcaaaaagatgttgctctttcagttctgtcaaaagacttaacagacatggataaaaattcgccagagtcagggactcagagaggaagagaaagtcctagaatgtgtggtgcagattcacaaatagaaaaatcacaaagcagctatttcattcaggatttatcgagatttgactacgttaaatttgctgttgtcaccaagattagggcctggtgtgctgcagggaactgtttcagtctgcaacgggaacatgatattgcaattaaattcttccagagagctatccaagttgatccaaattacgcttatgcctatactctattagggcatgagtttgtcttaactgaagaattggacaaagcattagcttgttttcgaaatgctatcagagtcaatcctagacattataatgcatggtatggtttaggaatgatttattacaagcaagaaaaattcagccttgcagaaatgcatttccaaaaagcgcttgatatcaaccctcaaagttcagttttactttgccacattggagtagttcaacatgcactgaaaaaatcagagaaggctttggataccctaaacaaagccattgtcattgatcccaagaaccctctatgcaaatttcacagagcctcagttttatttgcaaatgaaaaatataagtctgctttacaagaacttgaagaattgaaacaaattgttcccaaagaatccctcgtttacttcttaataggaaaggtttacaagaagttaggtcaaacgcacctcgccctgatgaatttctcttgggctatggatttagatcctaaaggagccaataaccagattaaagaggcaattgataagcgttatcttccagatgatgaggagccaataacccaagaagaacagatcatgggaacagatgaatcccaggagagcagcatgacagatgcggatgacacacaacttcatgcagctgaaagtgatgaattttaa

SEQ ID NO: 119687 - DNA, 752 bp, Homo sapiens
ccttttttttttttttttttttttgcatagccaaacatctttatttttcacaacctgaatactaaagatacaactcaactagtcccagaacatttctagatatttctgtgtattaaccaaaccaaacaaagtttttaaaaagaacctctgcaacaacaacaataataatttaacaatcaaagttggcttcaccatttcttggcttctccatacatttatccaagttctccgtctttatttcttcttcctttttatatagggtgaattcagtatctttttctgggtttggaactgattgctcctttggcatcaagaaacattcagcatttaaaacttgttcagcagtcattgaacttctataacatatcaagctacagaggagggatttgactttatcatccagatgaaactgatccactttggggattccatctttatttatctcaaactcctgattttgaacagaaagccataataagaggcagccataagcatataagtctgaacctggagaagcaggttttcccattttcaactcaggtgacatcaaactcaagtcaccaaccattcatggttcaccgaggctcgctgactcacagatttggtgaagtcaaaatctccaacaattccttgttcacggtttaaagcaaatacattgttctgatgaagtgatccatgaattatgtcagccttatgcaatgtatgcagaccctgggcaacacctttcatgacctttaaagtttcttctgaat

SEQ ID NO: 119688 - DNA, 1455 bp, Homo sapiens
aaatggttccctgagctgcctctgcttcatcctgaaataggattactcaaatacatgaactctgggggtctccttacaatgagcttggaacgagatcttcttgatgctgagcccatgaaggaacttatcagcaagcgtcctttggtacgttctgaggttaatgggcagataattctgttaaagggctattctgtggatgttgacacagaagccaaggtgattgagagagcagccacctaccatagagcttggagagaagctgaaggagactcagggttactgccattgatattcctgtttttatgtaagtctgatcctatggcttatctgatggtcccatactaccctagggcaaacctgaatgctgttcaagccaacatgcctttaaattcagaagaaactttaaaggtcatgaaaggtgttgcccagggtctgcatacattgcataaggctgacataattcatggatcacttcatcagaacaatgtatttgctttaaaccgtgaacaaggaattgttggagattttgacttcaccaaatctgtgagtcagcgagcctcggtgaacatgatggttggtgacttgagtttgatgtcacctgagttgaaaatgggaaaacctgcttctccaggttcagacttatatgcttatggctgcctcttattatggatacccgaaaatgtggaagcagctttggaactgcgtcatgggcagaggttggagggctcagaagaggacaggaagatgtgggaaagtttggaacttcctagagacttgttgaatggctttgagcaaaatgctgatagtgatatggccagtgaagtccaggttgaggacaatggggaaagtatctccagggcatgtcagaaagcttcgcagcagcccttcccatcacaggcacagaggcctaggaggaaaaaatggtttcatgggctgggccagcggtccccctgctgtgtgcagccttcagacatggtgccctgtgtcccacctgctccagtcatggctaaaaggggccaagaaatccaagctaccgtcacagaatgcaataaacacctctatgcaaatcaactagaaaatctagaagaaatggaaaaattcctggacacatacaccctcccaagactaaatcagcaagaagtcgaatccctgaatagaccaacaataagttctgaaattgaggcagttattaatagcctaccaaccaaaaaaagtccaggaccagacagatacacagtcgaattccaccagaggtacaaagaggagctagtaccattctttctgaaactgttccaaacagtagaaaaagagggaatcctccctaactcattttatgaggccggcatcatcctggtaccaaaacgtgccagagacacaacaaaaaaagaaaatttcaggccaatatccctgatgaacattgatgcaaaaatcctcaataaaatactggcaaactga

SEQ ID NO: 119689 - DNA, 1637 bp, Homo sapiens
gaattccttgtttcagttcattcatccttctctcctttccgctcagactgtagagctcggtctctccaagtttgtgcctaagaagatgataatcacacaaacaagtcactgttacatgaccagccttgggattcttttcctgattaatattctccctggaaccactggtcaaggggaatcaagacgacaagaacccggggactttgtgaagcaggacattggcgggctgtctcctaagcatgccccagatattcctgatgacagcactgacaacatcactatcttcaccagaatcttggatcgtcttctggacggctatgacaaccggctgcgacctgggcttggagatgcagtgactgaagtgaagactgacatctacgtgaccagttttggccctgtgtcagacactgacatggagtacactattgatgtattttttcggcagacatggcatgatgaaagactgaaatttgatggccccatgaagatccttccactgaacaatctcctggctagtaagatctggacaccggacaccttcttccacaatggcaagaaatcagtggctcataacatgaccacgcccaacaagctgctcagattggtggacaacggaaccctcctctatacaatgaggttaacaattcatgctgagtgtcccatgcatttggaagattttcccatggatgtgcatgcctgcccactgaagtttggaagctatgcctatacaacagctgaagtggtttattcttggactctcggaaagaacaaatccgtggaagtggcacaggatggttctcgcttgaaccagtatgaccttttgggccatgttgttgggacagagataatccggtctagtacaggagaatatgtcgtcatgacaacccacttccatctcaagcgaaaaattggctactttgtgatccagacctacttgccatgtatcatgactgtcattctgtcacaagtgtcgttctggctcaacagagagtctgttcctgcccgtacagtctttggtgtcaccactgtgcttaccatgaccaccttgagtatcagtgccagaaattccttacctaaagtggcatatgcgacggccatggactggttcatagccgtctgttatgcctttgtattttctgcactgattgaatttgccactgtcaactatttcaccaagcggagttgggcttgggaaggcaagaaggtgccagaggccctggagatgaagaagaaaacaccagcagccccagcaaagaaaaccagcactaccttcaacatcgtggggaccacctatcccatcaacctggccaaggacactgaattttccaccatctccaagggcgctgctcccagtgcctcctcaaccccaacaatcattgcttcacccaaggccacctacgtgcaggacagcccgactgagaccaagacctacaacagtgtcagcaaggttgacaaaatttcccgcatcatctttcctgtgctctttgccatattcaatctggtctattgggccacatatgtcaaccgggagtcagctatcaagggcatgatccgcaaacagtagatagtggcagtgcagcaaccagagcactgtataccccgtgaagcatccaggcacccaaaccccggggctcccc

SEQ ID NO: 119690 - DNA, 447 bp, Homo sapiens
atgagtgaaggaatccgtcatacagctctagaagctgaaaaaggtgtcaccactgtgcttaccatgaccaccttgagtatcagtgccagaaattccttacctaaagtggcatatgcgacggccatggactggttcatagccgtctgttatgcctttgtattttctgcactgattgaatttgccactgtcaactatttcaccaagcggagttgggcttgggaaggcaagaaggtgccagaggccctggagatgaaggataaaagtgaaacttctgctagccgtgaagcattagaagcattagatccacagaggcaagggacagggaaatcacaaatcggcatcaacagaggaccggaggttcccgatatggtgggagaaaagtgcctgggccagggtgtggaatgtggagtgtatggaaggaagaatttgactttcatctgccagtag

SEQ ID NO: 119691 - DNA, 345 bp, Homo sapiens
tttgaatgataacatcaatcttttgggaaaggttgagctgttggattatcttgacagtattgactgcagtttagaggacttccaggccatgctatcaggaagacaatttagcatagacccagatctcctggttgattctgagaataaaggattagaaactaccaagaacaatgtagttcagccagtttcggaagagggaagaaaatctaaatccaaaccagataagcagcttatccagtataccgcctttccacttcttgcattcctcgatgggaaccctgcttcttctgttgaacaggcgagtacaacagcatcatcagaagttttgtcctctgtagataaacc

SEQ ID NO: 119692 - DNA, 2468 bp, Homo sapiens
gcgttctcgggaagctgctgccgtagctgccgccgccgctaccaccgcgttcgggtgtagaatttggaatccctgcgccgcgttaacaatgaagcagagttcgaacgtgccggctttcctcagcaagctgtggacgcttgtggaggaaacccacactaacgagttcatcacctggagccagaatggccaaagttttctggtcttggatgagcaacgatttgcaaaagaaattcttcccaaatatttcaagcacaataatatggcaagctttgtgaggcaactgaatatgtatggtttccgtaaagtagtacatatcgactctggaattgtaaagcaagaaagagatggtcctgtagaatttcagcatccttacttcaaacaaggacaggatgacttgttggagaacattaaaaggaaggtttcatcttcaaaaccagaagaaaataaaattcgtcaggaagatttaacaaaaattataagtagtgctcagaaggttcagataaaacaggaaactattgagtccaggctttctgaattaaaaagtgagaatgagtccctttggaaggaggtgtcagaattacgagcaaagcatgcacaacagcaacaagttattcgaaagattgtccagtttattgttacattggttcaaaataaccaacttgtgagtttaaaacgtaaaaggcctctacttctaaacactaatggagcccaaaagaagaacctgtttcagcacatagtcaaagaaccaactgataatcatcatcataaagttccacacagtaggactgaaggtttaaagccaagggagaggatttcagatgacatcattatttatgatgttactgatgataatgcagatgaagaaaatatcccagttattccagaaactaatgaggatgttatatctgatccctccaactgtagccagtaccctgatattgtcatcgttgaagatgacaatgaagatgagtatgcacctgtcattcagagtggagagcagaatgaaccagccagagaatccctaagttcaggcagtgatggcagcagccctctcatgtctagtgctgtccagctaaatggctcatccagtctgacctcaggaagatccagttgaccatggatgggttcccttttggaatggataacattcaatctttttggggaagggttgagctgtttggattatccttgacagtattgactgcagtttagaggacttccaggccatgctatcaggaagacaatttagcatagacccagatctcctggttgatcttttcactagttctgtgcagatgaatcccacagattacatcaataatacaaaatctgagaataaaggattagaaactaccaaggaacaatgtagttcagccagtttcggaagaggggaaggaaaatcttaaatccaaaccaggataaggcagcttatccagtataccgcctttccacttcttgcattcctcgatggggaaccctgcttcttctgtttgaacagggcgaggtacaacagcatcattcaggaagttttgtcctctgtaggataaacccatagaagttgatgagcttctggatagcagcctagacccagaaccaacccaaagtaagcttgttcgcctggagccattgactgaagctgaagctagtgaagctacactgttttatttatgtgaacttgctcctgcacctctggatagtgatatgccacttttagatagctaaatccccaggaagtggactttacatgtatatattcatcaaaatgatgaactatttattttaaagtatcatttggtactttttttgtaaattgctttgttttgtttaatcagatactgtggaataaaagcaccttttgcttttctcactaaccacacactcttgcagagctttcaggtgttactcagctgcatagttacgcagatgtaatgcacattattggcgtatctttaagttggattcaaatggccatttttctccaattttggtaaattggatatcttttttttacaaatacgaccattaacctcagttaaatttttgtttgttttcctgtttgatgctgtctatttgcattgagtgtaagtcatttgaactaatggtataactcctaaagctttctctgctccagttatttttattaaatatttttcacttggcttatttttaaaactgggaacataaagtgcctgtatcttgtaaaacttcatttgtttcttttggttcagagaagttcatttatgttcaaagacgtttattcatgttcaacaggaaagacaaagtgtacgtgaatgctcgctgtctgatagggttccagctccatatatatagaaagatcgggggtgggatgggatggagtgagccccatccagttagttggactagttttaaataaaggttttccggtttgtgtttttttgaaccatactgtttagtaaaataaatacaatgaatgttgagtactagtg

SEQ ID NO: 119693 - DNA, 253 bp, Homo sapiens
tgctcttatattcaaaaagcaacaggcaatggcgatggcagagaggaggaaaaatgatgtaggaaatgaagtgacctatccaagccccaaagctaaggaagcggaggaagagctcagtgatgcccttggaatcagtattgctggaggaagaggaagtcccttaggagatatccccgtatttattgccatgattcaggctagcggagtggccgcacggacacagaagcttaaagtaaacgagagaactggttga

SEQ ID NO: 119694 - DNA, 413 bp, Homo sapiens
acggtactgcagggacaccagcaatatcaacgacgacaactgtggaaatccgcaaaagcagtgttatgacaactgagatcacctctaaagtggaaaaaagcccaacgacagccactggcaatagctcatgtccttctactgagaccgaggaagaaaaggcaaaacggcttctttactgttcgctatgcaaggttgctgtcaactctgcctcgcagctggaggcgcacaacagtggtactaagcacaaaaccatgttagaagcccggaatggaagtggcactatcaaagcctttcctagggcaggagtgaaaggcaaaggacctgttaataaaggaaacacaggcctccaaaataaaacatttcactgtgaaatctgtgatgtgcacgtcaactcggaaacgcaacttaaacag

SEQ ID NO: 119695 - DNA, 986 bp, Homo sapiens
ggcttggaccttttagtgggttcctggctcctgaactgcagaagtaccaaaaacaaattaaagagccaaatgaggagcagagtctgagatctaataacattgcagagctgagtccaggagcaatcaattcctgtcgaagtgaataccatgcagcttttaacagtatgatgatggaacgcatgaccacagatatcaatgcactgaagcggcagtactctcgaattaaaaagaagcaacagcagcaggttcatcaggtgtacatcagggcaggaaagaagatgaaaatgactaacagagctgccaagaatgctgtcatccacatccctggtcacacaggagggaaaatatctcctgtcccctacgaagaccttaagacgaagctcaactccccgtggcgaactcacatccgagtccacaaaaagaacatgccaaggaccaagagtcatccgggctgtggggacaccatagggctgatagatgagcagaacgaggccagcaagaccaatgggctgggggcagcagaggcattcccctctggttgtacagcgacagctgggagagaaggcagcagccctgaaggcagtaccaggaggacgatcgaggggcagtctccggagccggtgttcggagatgctgatgtggatgtgtctgcagttcaggcgaagttgggagccctggaactgaaccagagggatgctgcagctgaaactgagctcagggtgcacccaccctgccagcggcactgcccagagccgccgagtgcacccgaagaaaacaaagccaccagcaaagctccccaaggcagcaactcaaaaacccccatctttagcccttttcccagcgtcaagcccctgcggaaatctgctactgccaggaacttgggattatatggccctacagaaagaaccccaactgtgcactttcctcaaatgagtaggagcttcagcaaacccggcggtggaaacagtggcactaaaaaacgatga

SEQ ID NO: 119696 - DNA, 3504 bp, Homo sapiens
atggttggatactttcgcctttggatacctggttttgccatcctaacaaaaccattatataaactcacaaaaggaaacttagctgaccccatagatcctaaatcctttccccactcctctttctgttccttgaagacagctttagaaactgcccccactctagctctccctgactcatcccaacctgcttcattacacacagccgaagtgcagggctgtgcagtcggaattcttacacaaggaccaggatcgcgtcctgtagcctttttgtccaaacaacttgatcttactgttttaggctggccatcatgtctccgtgcagccgctgctgctgccctaatacttttagaggccctcaaaatcacaaactatgctcaactcactctctacagctctcataatttccaaaatctattttcttcctcacacctgacacatatactttctgctcccggactccttcagctatacttacactttgttgagtctcccacaattaccattgttcctggcccggacttcaatccggcctcccacattattccggataccacacctgaccctcatgactgcatctctctgatccacctgacattcaccccatttccccacatttccttcttccctgtttctcaccctgatcacacttggtttattgatggcagttccaccaggcctaatcgccactcaccagcgaaggcaggctatgctatagtatcttccacatctatcattgaggctactgctctgcctccctccactacctctcagcaagctgaactagttgccttaactcaagccctcactcttgcaaaaggactatgcgtcaatatctatactgattctaaatatgccttccatatcctgcaccaccatgcagtcatatgggctgaaagaggtttcctcactacacaagggtcctccatcattaatgcctctttaataaaaactctgctcaaagccgctttacttccaaaagaagctggggtcattcactgcaaggggcatcaaaaggcatcagatcccattgctctaggcaatgcttatgttgataaagtggctagacaagcagctagctctccaacttctgtccctcacggccagtttttctccttcacttcagtcactcccacctactcccccactgaaacttccacctatcaatctcttcccacacaaggcaaatggttcttagaccaaggaaaatatcttcttccagcctcacaggcccattctattctgtcatcatttcataacctcttctatgtagacataattcctcggtttggccttcccacctctatacagtctgataacggaccagcctttactagccaaatcacccaagtagtttctcaggctcttggtattcagtggaaccttcataccccttaccgtcctcaatcttcaggaaaggtggaacggactaatggtcttttaaaggcacacctcaccaagtttagcctccaacttacaaaggattggacagcacttttacctcttgctcttctcaaaatcagagcctgtcctcgagatgctacaggatacagtccatttgaacttttatatggacgcactttcttgcttggccccaacctcatcccagacaccagccctctaggcgactatcttccagtactccagcaggctagacaggaaattcgccaggctgctaatcttctcttgcctactccagatccccagccatatgaagacaacctagctggacgatcagttcttgttaagaatctgacccctcaaactctacaacctcgatggaccggaccctacttagtcatctatagtaccccgactgccgtctgcctgcagaatcctccccactgggttcaccattccagaataaagctgtgtccatcggacagccagcctaatccctcctcttcctcctggaagtcgcaagtactctcccccacttcccttaaactcactcatatttctgaagaacatgcctacacagctgtccccgccttacagacagactgggcaacatctcccatctccctacacctccgaacttcctttaacagccctcacctttaccctcctgaagaactcatttactttctagacaggtccagcaagacttccccagacatttcacatcagcaagctgccgccctccttcgcacttatttaaaaaacctttctccttatatcaactctactccccccatatttggacctctcacaacacaaactactattcctgtggccgctcctttgtgtatctcttggcaaagacccactggaattcccctaggtaatctttcaccttctcgatgttcctttactcttcatctccgaagtccaactacaaacatcaatgaaacaattggagccttccagctccatattacagacaagccctctatcaatactgacaaacttaaaaacattagcagtaattattgcttaggaagacacttgccctgtatttcactccatccttggctatcttccccttgctcatcagactctcctcccaggccctcttcttgtttacttatacccagccccgaaaataacagtgaaagattgctcgtagatactcgacgttttctcatacaccatgaaaatcgaaccttcccctctacgcagttaccccatcagtccccattacaacctctgacagctgccgccctagctggatccctaggagtctgggtacaagacacccctttcagcactccttctcacctttttactttacatctccagttttgcctcgcacaaggtctcttcttcctctgtggatcctctacctacatgtgcctacctgccaattggacaggcacatgtacactagtcttccttacccccaaaattcaatttgcaaatgggaccgaagagctccctgttcccctcatgacaccgacacaacaaaaaagagttattccactaattcccttgatggtcggtttaggactttctgcctccactgttgctctcggtactggaatagcaggcatttcaacgtctgtcatgaccttccgtagcctgtctaatgacttctctgctagcatcacagacatatcacaaactttatcagtcctccaggcccaagttgactctttagctgcagttgtcctccaaaaccgccgaggccttgacttactcactgctgaaaaaggaggactctgcatattcttaaatgaggagtgttgtttttacctaaatcaatctggcctggtgtatgacaacattaaaaaactcaaggatagagcccaaaaacttgccaaccaagcaagtaattacgctgaacccccttgggcactctctaattggatgtcctgggtcctcccaattgttagtcctttaatacccatttttctccttcttttatttggaccttgtatcttccgtttagtttctcaattcatccaaaaccgtatccaggccatcaccaatcattctatacgacaaatgtttcttctaacatccccacaatatcaccccttaccacaagacctcccttcagcttaa

SEQ ID NO: 119697 - DNA, 1755 bp, Homo sapiens
atgatctttgctggcaaggcaccctccaatacttccaccctgatgaagttctattctttacttttatactcactcttattctcattcccattcttatgtcatcctctacctctccccagctatctccaccacactatcaaccttacccattctctcctagccgcttctaatccctccttagtgaacaactgctggctttgcatttccctttcttccagtgcctacacagctgtccccgccgtacagacagactgggcaacatctcccatctccctacacctccgaacttcctttaacagccctcacctttaccctcctgaagaactcatttactttctagacaggtccagcaagacttccccagacatttcacatcagcaagctgccgccctccttcgcacttatttaaaaaacctttctccttatatcaactctactccccccatatttggacctctcacaacacaaactactattcctgtggccgctcctttgtgtatctcttggcaaagacccactggaattcccctaggtaatctttcaccttctcgatgttcctttactcttcatctccgaagtccaactacaaacatcaatgaaacaattggagccttccagctccatattacagacaagccctctatcaatactgacaaacttaaaaacattagcagtaattattgcttaggaagacacttgccctgtatttcactccatccttggctatcttccccttgctcatcagactctcctcccaggccctcttcttgtttacttatacccagccccgaaaataacagtgaaagattgctcgtagatactcgacgttttctcatacaccatgaaaatcgaaccttcccctctacgcagttaccccatcagtccccattacaacctctgacagctgccgccctagctggatccctaggagtctgggtacaagacacccctttcggcactccttctcacctttttactttacatctccagttttgcctcgcacaaggtctcttcttcctctgtggatcctctacctacatgtgcctacctgccaattggacaggcacatgtacactagtcttccttacccccaaaattcaatttgcaaatgggaccgaagagctccctgttcccctcatgacaccgacacaacaaaaaagagttattccactaattcccttgatggtcggtttaggactttctgcctccactgttgctctcggtactggaatagcaggcatttcaacgtctgtcatgaccttccgtagcctgtctaatgacttctctgctagcatcacagacatatcacaaactttatcagtcctccaggcccaagttgactctttagctgcagttgtcctccaaaaccgccgaggccttgacttactcactgctgaaaaaggaggactctgcatattcttaaatgaggagtgttgtttttacctaaatcaatctggcctggtgtatgacaacattaaaaaactcaaggatagagcccaaaaacttgccaaccaagcaagtaattacgctgaacccccttgggcactctctaattggatgtcctgggtcctcccaattgttagtcctttaatacccatttttctccttcttttatttggaccttgtatcttccgtttagtttctcaattcatccaaaaccgtatccaggccatcaccaatcattctatacgacaaatgtttcttctaacatccccacaatatcaccccttaccacaagacctcccttcagcttaa

SEQ ID NO: 119698 - DNA, 1064 bp, Homo sapiens
atggatgaggagaaaagggaacacttaaatgctcttggtcgaagggcactgggtgaaggtccaatgtatcagtgcacacgggggagtggggcggggaattatctcaccacctacgtacgggagcccgaacaaaaggctctggccattttatggacccaggggtggggatggggccctgtaaataacagtgaaaggttgctcgtagatactcaacgttttctcatacaccatgaaaatcgaacctcctcctctgtgcagttacctcatcagtccccattacaacctctgatggctgtggccctagctggatccctaggagtctgggtacaagacacccctttcagcactccttctcatctttttactttgcatctccagttttgcctcgcacaaggtgtcttcttcctctgtgtatcctctacctacatgtgtctacctgctaattggacaggcacatgcacactagttttccttactcccaaaattcaatttgcaaataggaccgaagagctccctgttcccctcatgacaccaacacgacaaaaaagagttattccactaattcccttgcttgttggtttaggactttctgcctccactattgctctcggtactggaataggaggcatttcaacctctgtcacgaccttccatagcctctctagtgtcttctctgctagcatcacagacatatcacaaactttatcagtcctccaggcccaagttgactctttagctgcagttatcctccaaaaccaccgaggccttgacttactcactgctgtctggtctgcagatctcgaagcacaaaggtccttattacttatatttcttcttgtgccattattcacttttagatctccagtgtcctcatactgagtggcatttgaacaacttcctttttggcattttagcaatactccctgagaaaccaacaggatcaaggagatcaaagtcaaagtgagaataccattcacggttccagatattcccagtaagattttataccagtgcaacgtcactgaataatcctccaccttcaagtaggctccggtgtctgtcat

SEQ ID NO: 119699 - DNA, 1751 bp, Homo sapiens
atggaagcgtttgatgctaattacacattccagtcaggaccctcagctgcaggtttgttggtgtttgctggaggtccactccaggccctgtgtgcctgggtatcagcagtggaggctgcagaacagtggatattgcagccctccagctttggctccgtggactggctctgcctgagcagctgctcagggtcgacccacacccccaggcctgccgacgtctcccccgggagcctccctggcccgggccagacgttcggcacccgggagccccctcaggctgtcagtaccaaggaggctagctcgtcaaatctgcatgcgccggagaggactgtggctgggttgaccttcaccacggagcaggtccgtgccttggagggcgtcttccggcaccaccagtacctgggccctctggagcggaattggctggccagggagatgcagctctcagaggtccagataaaaacctggtttcaaaatcgccggatgaaacacaaacggcaaatgcaggactcccagctaaacggcccccttatgggttcttttccaggggccccctggctttccactcaccattttttggcccttgccaaaggcctgcaagttgctgtgcccttgggcaacccctgcctgggtcccctggctgcccccttggctccttctggggtaccccgacaaatggatcaagaggccctggcctcttcttgggctggctgctgcgggccagcctctggcataccaccccccacgcccaggaagtgggatagatcttccaaaaggaactcagttgtcattaaggctcttccaagacatctcatcaaccaggggagatcacaggagtggagactaactacagtacaagaaacaacaatggaaaaacaaggtgtgcctctagtggaaaatattgcaggaaagccgtggaagagaagattggaaagcagtaagtcaaggtctcggcggttttggaggacaactgcagctaaagagtcaaaatgggcctggaggactgataaagtttgtgatatgtctgtgatgctagcagagaggtcattaaaaaggctacggaaggtcgtgacagaagtcgaaatgcctgctattccagtactgagagcaatagtggaggcagaaagtcctaaaccgacaagcaagggaattagtggaataactcttttttgtcgtgtcggtgtcatgaggggatctgggagctcttcggtcctatttgcaatttgaattttgggagtaaggaaaactagtgtgcatgtgcctgtccaattagcaggtagacacatgtaggtagaggatctttcagggtctagggctgtaaatcgtgtcagggttgctgccaaacaaaccatgaactgggctgggtttttatattcgatgaaaaagagcctaaatgctaactgattttgggagaggtcagataaagaaagaggagcattaaccttgactatgactttagcttcagccactgcccagggctggtggagctggccggctgctctgagggtggggtccaccaagcccacgcccacccagaactcatgctggcccacaagcgccatatgcagccccgttcctgtctgcgcctctccctccacacctccccgcaagctgagggagccagcttcggccttggccagcccagaaaggggctcccacagtgcagtggcaggctgaagggctcggccagagtgggcgccaaggccgaagaggcgctgagagcaagcaagggctgcaagggctgccagcat

SEQ ID NO: 119700 - DNA, 2402 bp, Homo sapiens
tttcgtgccggtcagccgcagacactcacccagctccgcgagctcagccgctcagcgagtggggtagcggggaccgagacggacggtagccgtgccagagcccggggcgctctcggatgcggcaggacaagctgaccgggtctctgaggcgcggggggagatgcctgaagcggcagggcggcggcgtgggcaccatcctgagcaatgtgctcaagaagcgcagctgcatttcccggaccgcgccccggctgctgtgcaccctggagccgggagttgataccaagttgaaattcactcttgagccatctttaggtcaaaatggttttcagcagtggtacgatgctctcaaggcagttgccaggctatccacaggaataccaaaggaatggaggagaaaggtttggttgaccttggcagatcattatttgcacagtatagccattgactgggacaaaaccatgcgcttcactttcaatgaaaggagtaatcctgatgatgactccatgggaattcagatagtcaaggaccttcaccgcacaggctgtagttcttactgtggccaggaggctgagcaggacagggttgtgttgaagcgggtgctgctggcctatgcccgatggaacaaaactgttgggtactgccaaggctttaacatcctggctgcactaattctggaagtgatggaaggcaatgaaggggatgccctgaaaattatgatttaccttattgataaggtacttcccgaaagctatttcgtcaataatctccgggcattgtctgtggatatggctgtcttcagagaccttttaagaatgaagctgccggaattatctcagcacctggatactcttcagagaactgcaaacaaagaaagtggaggtggatatgagcccccacttacaaatgtcttcacgatgcagtggtttctgactctctttgccacatgcctccctaatcagaccgttttaaagatctgggattcagtcttctttgaaggttcagaaatcatcctaagggtgtcgctggctatctgggcaaaattaggagagcagatagaatgttgtgaaacagcagatgaattctacagcaccatggggcgccttacccaggagatgctagagaatgatcttctgcaaagccatgaactcatgcagactgtttattccatggctccgttccctttcccacaattggcagagttgagggaaaaatacacctacaacattacaccgttcccagccacagttaaacccacctcagtttctggacgacatagtaaggccagagacagtgatgaagagaatgacccagacgatgaggatgctgtcgttaatgcagtggggtgtcttggaccttttagtgggttcctggctcctgaactgcagaagtaccaaaaacaaattaaagagccaaatgaggagcagagtctgagatctaataacattgcagagctgagtccaggagcaatcaattcctgtcgaagtgaataccatgcagcttttaacagtatgatgatggaacgcatgaccacagatatcaatgcactgaagcggcagtactctcgaattaaaaagaagcaacagcagcaggttcatcaggtgtacatcagggcagacaaagggccagtgaccagcattctcccgtctcaggtaaacagttctccagttataaaccaccttcttttaggaaagaagatgaaaatgactaacagagctgccaagaatgctgtcatccacatccctggtcacacaggagggaaaatatctcctgtcccctacgaagaccttaagacgaagctcaactccccgtggcgaactcacatccgagtccacaaaaagaacatgccaaggaccaagagtcatccgggctgtggggacaccgtagggctgatagatgagcagaacgaggccagcaagaccaatgggctgggggcagcagaggcattcccctctggttgtacagcgacagctgggagagaaggcagcagccctgaaggcagtaccaggaggacgatcgaggggcagtctccggagccggtgttcggagatgctgatgtggatgtgtctgcagttcaggcgaagttgggagccctggaactgaaccagagggatgctgcagctgaaactgagctcagggtgcacccaccctgccagcggcactgcccagagccgccgagtgcacccgaagaaaacaaagccaccagcaaagctccccaaggcagcaactcaaaaacccccatctttagcccttttcccagcgtcaagcccctgcggaaatctgctactgccaggaacttgggattatatggccctacagaaagaaccccaactgtgcactttcctcaaatgagtaggagcttcagcaaacccggcggtggaaacagtggcactaaaaaacgatga

SEQ ID NO: 119701 - DNA, 1449 bp, Homo sapiens
atggagaaaaaaatcactggatataccaccgttgatatatcccaatggcatcgtaaagaacattttgaggcatttcagtcagttgctcaatgtacctataaccagaccgttcagctggatattacggcctttttaaagaccgtaaagaaaaataagcacaagttttatccggcctttattcacattcttgcccgcctgatgaatgctcatccggagttccgtatggcaatgaaagacggtgagctggtgatatgggatagtgttcacccttgttacaccgttttccatgagcaaactgaaacgttttcatcgctctggagtgaataccacgacgatttccggcagtttctacacatatattcgcaagatgtggcgtgttacggtgaaaacctggcctatttccctaaagggtttattgagaatatgtttttcgtctcagccaatccctgggtgagtttcaccagttttgatttaaacgtggccaatatggacaacttcttcgcccccgttttcaccatgggcaaatattatacgcaaggcgacaaggtgctgatgccgctggcgattcaggttcatcatgccgtttgtgatggcttccatgtcggcagaatgcttaatgaattacaacagtactgcgatgagtggcagggcggggcaggttgggatgacattactgggctcaaagccccagtccttgaattacatgacggtactgcagggacaccagcaatatcaacgacgacaactgtggaaatccgcaaaagcagtgttatgacaactgagatcacctctaaagtggaaaaaagcccaacgacagccactggcaatagctcatgtccttctactgagaccgaggaagaaaaggcaaaacggcttctttactgttcgctatgcaaggttgctgtcaactctgcctcgcagctggaggcgcacaacagtgaacattttgaggcatttcagtcagttgctcaatgtacctataaccagaccgttcagctggatattacggcctttttaaagaccgtaaagaaaaataagcacaagttttatccggcctttattcacattcttgcccgcctgatgaatgctcatccggagttccgtatggcaatgaaagacggtactaagcacaaaaccatgttagaagcccggaatggaagtggcactatcaaagcctttcctagggcaggagtgaaaggcaaaggacctgttaataaaggaaacacaggcctccaaaataaaacatttcactgtgaaatctgtgatgtgcacgtcaactcggaaacgcaacttaaacaggagaaacaggcatttaacccttcttatggcagtgacataagtgctacgatgcagacatacctaagactacatggagaaggtggcatcccaacatctaccaggcaagtacaggtgctccaggcagagggaactctttatacaagggcttaa

SEQ ID NO: 119702 - DNA, 1296 bp, Homo sapiens
atggaagagcccttgggctttaagcaaacattggtagtggcccagcagaaccccctatggactagtggtggtggtggccacagtcccagtggtagtggccacaggggtgtttgcatcaccacactcccagttccagagggctcatcacagaaagagactccacatgtttcagagaaattaaaggaaaagaatgagtctctgcctggtaatccagagaattcttccagatcttctgaaagaccaccaagacgacatagtaaggccagagacagtgatgaagagaatgacccagacgatgaggatgctgtcgttaatgcagtggggtgtcttggaaaaaatagtgggttcctggctcctgaactgcagaagtaccaaaaacaaattaaagacggtactgcagggacaccagcaatatcaacgacgacaactgtggaaatccgcaaaagcagtgttatgacaactggagatcaccttttaagtgggaaaaaagcccaacgaccagcccctggccatagctcatgtccttctactgagaccgaggaagaaaagggcaaacggcttctttactgggtcgtttggcaggttgctgtcaactcagcctcgcagctggaggcgcacaacagtgagaacccggtcagcttgtcctgccgcatccgagagcgccccgggctctggcacggctaccgtccgtctcggtccccgctaccccactcgctgagcggtagttactcactctgggccttgaggactgatacagtttgtgatatgtctgtgatgctagcagagatgtcattagaaaggctacggaaggtcgtgacagaagtcgaaatgcctgctattccagtactgagagcaatagtggaggcagaaagtcctaaaccgacaagcaagggaattagtggaataactcttttttgtcgtgtcggtgtcatgaggggaacagagccaaatgaggagcagagtctgagatctaataacattgcagagctgagtccaggagcaatcaattcctgtcaaagtgaataccatgcagcttttaacagtatgatgatggaacgcatgaccacagatatcaatgcactgaagcggcagtactctcgaattaaaaagaagcaacagcagcaggttcatcaggtgtacatcagggcaggacaaggaatgtctctcattctgcatcctgagcaccaagcactgtgtctgatgcaggggtcagtggggctgccgccagccgtctgcagtgttagccagggaaatcaactcacagtcctcctggcatctactgctggacttgggtaa

SEQ ID NO: 119703 - DNA, 1260 bp, Homo sapiens
atggacttaaactataccttagaacaaatgaacttaacagatatttgcagaacattctacctaacaactgcagaatatacattctattcatcagtacatggaacattcttcaagacagaccatatgacaggccacaaaacaagtctcaataaatttaagaaaatcaaaattgtatcaagtactctctcagaccacagtggaataaaactggaaatcaactccaaaaggaaccctcaaaaccatgcgaatacatggaaattaagtaacctgctcctgaatgcacactgggtcaacaatgaaatcaagaggaaagttaaaaatttctttgaattgaacgataatagtgacacaatctatcaaaatttctcggatacagcaaaagcggtgctagaagaaaagttcctaggactaaatgcctacaccaaaaaacctgaaagagcacagatagagaaagagagaatcctccctaaatcattctatgaagccagtatcaccctaatacccaaaccacgcaaggacataacaaaaaaagaaaactacaaaccaatatccctgatgaacatagaggcaaaaatcctcaacaaaataatagttaaccaaatccaacagcatatcaaaaagataatccaccatgataaactgagtttcataccagggatgcaggggtggtttaatatatgtaagccagtaaatgtgattctccacataaacataattaaaaacaaaaatcatatgatcatctcaatagacacagaaaaagcatttggcaaaatgcagcatccctttatgattaaaaccttcagcaaaattggcacagaagggacataccttaaggtaatagaagccatctatgatagacccacagccaacattatactgaatggggaaaacttgaaagcactccccctgagaactagaccaagacaaggatgcccactttcaccacttttattcaacttagtactggcagtcctagccagagcaatcagacaagagaaagaaataaagggcatccaagtcagtaaagaggaagttaaactgtctctgtttgctgatgatatgattgtatacctagaaaaccctaaagcctcacccaaaaagcttccagaactagtaactgaattcagcaaagtttcaggacacaaaattaatgcacatgattcagtaactctgctatatactatcagtgaccaaactgagaatcaaatcaagagctcaacccctttgaccatagctgcaaacacaaaagcggactcataa

SEQ ID NO: 119704 - DNA, 4841 bp, Homo sapiens
ccgcgtccgcgcttacccaatacaagccgggctacgtccgagggtaacaacatgatcaaaaccacagcaggaaccacaataaggaacaagactcaggttaaagcaaacacagcgacagctcctgcgccgcatctcctggttccagtggcggcactgaactcgcggcaatttgtcccgcctctttcgcttcacggcagccaatcgcttccgccagagaaagaaaggcgccgaaatgaaacccgcctccgttcgccttcggaactgtcgtcacttccgtcctcagacttggaggggcggggatgaggagggcggggaggacgacgagggcgaagagggtggttgagagccccggagcccgagccgaagggcgacccgcaaacgctaagtcgctggccattggtggacatggcgcaggcgcgtttgctccgacgggccgaatgttttggggcagtgttttgagcgcggagaccgcgtgatactggatgcgcatgggcataccgtgctctgcggctgcttggcgttgcttcttcctccagaagtgggcgctgggcagtcacgcagggtttgaaccggaagcgggagtaggtagctgcgtggctaacggagaaaagaagccgtggccacgggaggaggcgagaggagtcgggatctgcgctgcaaccaccgccgcggttgatactactttgaccttccgagtgcagtgacagtgatgtgtgttctgaaattgtgaaccatgagtctagtacttaatgatctgcttatctgctgccgtcaactagaacatgatagagctacagaacgaaagaaagaagttgagaaatttaagcgcctgattcgagatcctgaaacaattaaacatctagatcggaattcagattccaaacaaggaaaatatttgatttgggatgctgtttttagatttttacagaaatatattcagaaagaaacagaatgtctgagaatagcaaaaccaaatgtatcagcctcaacacaagcctccaggcagaaaaagatgcaggaaatcagtagtttggtcaaatacttcatcaaatgtgcaaacagaagagcacctaggctaaaatgtcaagaactcttaaattatatcatggatacagtgaaagattcatctaatggtgctatttacggagctgattgtagcaacatactactcaaagacattctttctgtgagaaaatactggtgtgaaatatctcagcaacagtggttagaattgttctctgtgtacttcaggctctatctgaaaccttcacaagatgttcatagagttttagtggctagaataattcatgctgttaccaaaggatgctgttctcagactgacggattaaattccaaatttttggactttttttccaaggctattcagtgtgcgagacaagaaaagagctcttcaggtctaaatcatatcttagcagctcttactatcttcctcaagactttggctgtcaactttcgaattcgagtgtgtgaattaggagatgaaattcttcccactttgctttatatttggactcaacataggcttaatgattctttaaaagaagtcattattgaattatttcaactgcaaatttatatccatcatccgaaaggagccaaaacccaagaaaaaggtgcttatgaatcaacaaaatggagaagtattttaaacaacttatatgatctgctagtgaatgagataagtcatataggaagtagaggaaagtattcttcaggatttcgtaatattgccgtcaaagaaaatttgattgaattgatggcagatatctgtcaccaggtttttaatgaagataccagatccttggagatttctcaatcttacactactacacaaagagaatctagtgattacagtgtcccttgcaaaaggaagaaaatagaactaggctgggaagtaataaaagatcaccttcagaagtcacagaatgattttgatcttgtgccttggctacagattgcaacccaattaatatcaaagtatcctgcaagtttacctaactgtgagctgtctccattactgatgatactatctcagcttctaccccaacagcgacatggggaacgtacaccatatgtgttacgatgccttacggaagttgcattgtgtcaagacaagaggtccaacctagaaagctcacaaaagtcagatttattaaaactctggaataaaattgggtgtattacctttcgtggtataagttctgagcaaatacaagctgaaaactttggcttacttggagccataattcagggtagtttagttgaggttgacagagaattctggaagttatttactgggtcagcctgcagaccttcatgtcctgcagtatgctgtttgactttggcactgaccaccagtatagttccaggaacggtaaaaatgggaatagagcaaaatatgtgtgaagtaaatagaagcttttctttaaaggaatcaataatgaaatggctcttattctatcagttagagggtgacttagaaaatagcacagaagtgcctccaattcttcacagtaattttcctcatcttgtactggagaaaattcttgtgagtctcactatgaaaaactgtaaagctgcaatgaattttttccaaagcgtgccagaatgtgaacaccaccaaaaagataaagaagaactttcattctcagaagtagaagaactatttcttcagacaacttttgacaagatggactttttaaccattgtgagagaatgtggtatagaaaagcaccagtccagtattggcttctctgtccaccagaatctcaaggaatcactggatcgctgtcttctgggattatcagaacagcttctgaataattactcatctgagattacaaattcagaaactcttgtccggtgttcacgtcttttggtgggtgtccttggctgctactgttacatgggtgtaatagctgaagaggaagcatataagtcagaattattccagaaagccaagtctctaatgaaatgtgcaggagaaagtatcactctgtttaaaaataagacaaatgaggaattcagaattggttccttgagaaatatgatgcagctatgtacacgttgcttgagcaactgtaccaagaagagtccaaataagattgcatctggctttttcctgcgattgttaacatcaaagctaatgaatgacattgcagatatttgtaaaagtttagcatccttcatcaaaaagccatttgaccgtggagaagtagaatcaatggaagatgatactaatggaaatctaatggaggtggaggatcagtcatccatgaatctatttaacgattaccctgatagtagtgttagtgatgcaaacgaacctggagagagccaaagtaccataggtgccattaatcctttagctggagaatatctgtcaaagcaagatctacttttcttagacatgctcaagttcttgtgtttgtgtgtaactactgctcagaccaatactgtgtcctttagggcagctgatattcggaggaaattgttaatgttaattgattctagcacgctagaacctaccaaatccctccacctgcatatgtatctaatgcttttaaaggagcttcctggagaagagtaccccttgccaatggaagatgttcttgaacttctgaaaccactatccaatgtgtgttctttgtatcgtcgtgaccaagatgtttgtaaaactattttaaaccatgtccttcatgtagtgaaaaacctaggtctaagcaatatggactctgagaacacaagggatgctcaaggacagtttcttacagtaattggagcattttggcatctaacaaaggagaggaaatatatattctctgtaagaatggccctagtaaattgccttaaaacttggcttgaggctgatccttattcaaaatgggccattcttaatgtaatgggaaaagacttccctgtaaatgaagtatttacacaatttcttgctgacaatcatcaccaagttcgcatgttggttgcagagtcaatcaatagattgttccaggacacgaagggagattcttccaggttactgaaagcacttcctttgaagcttcagcaaacagcttttgaaaatgcatacttgaaagctcaggaaggaatgagagaaatgtcccatagtgctgagaaccctgaaactttggatgaaatttataatagaaaatctgttttactgacgttgatagctgtggttttatcctgtagccctatctgcgaaaaacaggctttgtttgccctgtgtaaatctgtgaaagagaatggattagaacctcaccttgtgaaaaaggttttagagaaagtttctgaaacttttggatatagacgtttagaagactttatggcatctcatttagattatctggttttggaatggctaaatctccaagatactgaatacaacttatcttcttttccttttattttattaaactacacaaatattgaggatttctatagatcttgttataaggttttgattccacatctggtgattagaagtcattttgatgaggtgaagtccattgctaatcagattcaagaggactggaaaagtcttctaacagactgctttccaaagattcttgtaaatattcttccttattttgcctatgagggtaccagagacagtgggatggcacagcaaagagagactgctaccaaggtctatgatatgcttaaaagtgaaaacttattgggaaaacagattgatcacttattcattagtaatttaccagagattgtggtggagttattgatgacgttacatgagccagcaaattctagtgccagtcagagcactgacctctgtgacttttcag

SEQ ID NO: 119705 - DNA, 13088 bp, Homo sapiens
agtgggcgctgggcagtcacgcagggtttgaaccggaagcgggagtaggtagctgcgtggctaacggagaaaagaagccgtggccacgggaggaggcgagaggagtcgggatctgcgctgcagccaccgccgcggttgatactactttgaccttccgagtgcagtggcactgtaagcatgtatatgggtccttaaagggactcatagagaggcatacatcacaatttggaattatgcattggtttatcaatttacttgtttattgtcaccctgctgcccagatatgacttcatgaggacagtgatgtgtgttctgaaattgtgaaccatgagtctagtacttaatgatctgcttatctgctgccgtcaactagaacatgatagagctacagaacgaaagaaagaagttgagaaatttaagcgcctgattcgagatcctgaaacaattaaacatctagatcggcattcagattccaaacaaggaaaatatttgaattgggatgctgtttttagatttttacagaaatatattcagaaagaaacagaatgtctgagaatagcaaaaccaaatgtatcagcctcaacacaagcctccaggcagaaaaagatgcaggaaatcagtagtttggtcaaatacttcatcaaatgtgcaaacagaagagcacctaggctaaaatgtcaagaactcttaaattatatcatggatacagtgaaagattcatctaatggtgctatttacggagctgattgtagcaacatactactcaaagacattctttctgtgagaaaatactggtgtgaaatatctcagcaacagtggttagaattgttctctgtgtacttcaggctctatctgaaaccttcacaagatgttcatagagttttagtggctagaataattcatgctgttaccaaaggatgctgttctcagactgacggattaaattccaaatttttggactttttttccaaggctattcagtgtgcgagacaagaaaagagctcttcaggtctaaatcatatcttagcagctcttactatcttcctcaagactttggctgtcaactttcgaattcgagtgtgtgaattaggagatgaaattcttcccactttgctttatatttggactcaacataggcttaatgattctttaaaagaagtcattattgaattatttcaactgcaaatttatatccatcatccgaaaggagccaaaacccaagaaaaaggtgcttatgaatcaacaaaatggagaagtattttatacaacttatatgatctgctagtgaatgagataagtcatataggaagtagaggaaagtattcttcaggatttcgtaatattgccgtcaaagaaaatttgattgaattgatggcagatatctgtcaccaggtttttaatgaagataccagatccttggagatttctcaatcttacactactacacaaagagaatctagtgattacagtgtcccttgcaaaaggaagaaaatagaactaggctgggaagtaataaaagatcaccttcagaagtcacagaatgattttgatcttgtgccttggctacagattgcaacccaattaatatcaaagtatcctgcaagtttacctaactgtgagctgtctccattactgatgatactatctcagcttctaccccaacagcgacatggggaacgtacaccatatgtgttacgatgccttacggaagttgcattgtgtcaagacaagaggtcaaacctagaaagctcacaaaagtcagatttattaaaactctggaataaaatttggtgtattacctttcgtggtataagttctgagcaaatacaagctgaaaactttggcttacttggagccataattcagggtagtttagttgaggttgacagagaattctggaagttatttactgggtcagcctgcagaccttcatgtcctgcagtatgctgtttgactttggcactgaccaccagtatagttccaggaacggtaaaaatgggaatagagcaaaatatgtgtgaagtaaatagaagcttttctttaaaggaatcaataatgaaatggctcttattctatcagttagagggtgacttagaaaatagcacagaagtgcctccaattcttcacagtaattttcctcatcttgtactggagaaaattcttgtgagtctcactatgaaaaactgtaaagctgcaatgaattttttccaaagcgtgccagaatgtgaacaccaccaaaaagataaagaagaactttcattctcagaagtagaagaactatttcttcagacaacttttgacaagatggactttttaaccattgtgagagaatgtggtatagaaaagcaccagtccagtattggcttctctgtccaccagaatctcaaggaatcactggatcgctgtcttctgggattatcagaacagcttctgaataattactcatctgagattacaaattcagaaactcttgtccggtgttcacgtcttttggtgggtgtccttggctgctactgttacatgggtgtaatagctgaagaggaagcatataagtcagaattattccagaaagccaagtctctaatgcaatgtgcaggagaaagtatcactctgtttaaaaataagacaaatgaggaattcagaattggttccttgagaaatatgatgcagctatgtacacgttgcttgagcaactgtaccaagaagagtccaaataagattgcatctggctttttcctgcgattgttaacatcaaagctaatgaatgacattgcagatatttgtaaaagtttagcatccttcatcaaaaagccatttgaccgtggagaagtagaatcaatggaagatgatactaatggaaatctaatggaggtggaggatcagtcatccatgaatctatttaacgattaccctgatagtagtgttagtgatgcaaacgaacctggagagagccaaagtaccataggtgccattaatcctttagctgaagaatatctgtcaaagcaagatctacttttcttagacatgctcaagttcttgtgtttgtgtgtaactactgctcagaccaatactgtgtcctttagggcagctgatattcggaggaaattgttaatgttaattgattctagcacgctagaacctaccaaatccctccacctgcatatgtatctaatgcttttaaaggagcttcctggagaagagtaccccttgccaatggaagatgttcttgaacttctgaaaccactatccaatgtgtgttctttgtatcgtcgtgaccaagatgtttgtaaaactattttaaaccatgtccttcatgtagtgaaaaacctaggtcaaagcaatatggactctgagaacacaagggatgctcaaggacagtttcttacagtaattggagcattttggcatctaacaaaggagaggaaatatatattctctgtaagaatggccctagtaaattgccttaaaactttgcttgaggctgatccttattcaaaatgggccattcttaatgtaatgggaaaagactttcctgtaaatgaagtatttacacaatttcttgctgacaatcatcaccaagttcgcatgttggctgcagagtcaatcaatagattgttccaggacacgaagggagattcttccaggttactgaaagcacttcctttgaagcttcagcaaacagcttttgaaaatgcatacttgaaagctcaggaaggaatgagagaaatgtcccatagtgctgagaaccctgaaactttggatgaaatttataatagaaaatctgttttactgacgttgatagctgtggttttatcctgtagccctatctgcgaaaaacaggctttgtttgccctgtgtaaatctgtgaaagagaatggattagaacctcaccttgtgaaaaaggttttagagaaagtttctgaaacttttggatatagacgtttagaagactttatggcatctcatttagattatctggttttggaatggctaaatcttcaagatactgaatacaacttatcttcttttccttttattttattaaactacacaaatattgaggatttctatagatcttgttataaggttttgattccacatctggtgattagaagtcattttgatgaggtgaagtccattgctaatcagattcaagaggactggaaaagtcttctaacagactgctttccaaagattcttgtaaatattcttccttattttgcctatgagggtaccagagacagtgggatggcacagcaaagagagactgctaccaaggtctatgatatgcttaaaagtgaaaacttattgggaaaacagattgatcacttattcattagtaatttaccagagattgtggtggagttattgatgacgttacatgagccagcaaattctagtgccagtcagagcactgacctctgtgacttttcaggggatttggatcctgctcctaatccacctcattttccatcgcatgtgattaaagcaacatttgcctatatcagcaattgtcataaaaccaagttaaaaagcattttagaaattctttccaaaagccctgattcctatcagaaaattcttcttgccatatgtgagcaagcagctgaaacaaataatgtttataagaagcacagaattcttaaaatatatcacctgtttgttagtttattactgaaagatataaaaagtggcttaggaggagcttgggcctttgttcttcgagacgttatttatactttgattcactatatcaaccaaaggccttcttgtatcatggatgtgtcattacgtagcttctccctttgttgtgacttattaagtcaggtttgccagacagccgtgacttactgtaaggatgctctagaaaaccatcttcatgttattgttggtacacttataccccttgtgtatgagcaggtggaggttcagaaacaggtattggacttgttgaaatacttagtgatagataacaaggataatgaaaacctctatatcacgattaagcttttagatccttttcctgaccatgttgtttttaaggatttgcgtattactcagcaaaaaatcaaatacagtagaggacccttttcactcttggaggaaattaaccattttctctcagtaagtgtttatgatgcacttccattgacaagacttgaaggactaaaggatcttcgaagacaactggaactacataaagatcagatggtggacattatgagagcttctcaggataatccgcaagatgggattatggtgaaactagttgtcaatttgttgcagttatccaagatggcaataaaccacactggtgaaaaagaagttctagaggctgttggaagctgcttgggagaagtgggtcctatagatttctctaccatagctatacaacatagtaaagatgcatcttataccaaggcccttaagttatttgaagataaagaacttcagtggaccttcataatgctgacctacctgaataacacactggtagaagattgtgtcaaagttcgatcagcagctgttacctgtttgaaaaacattttagccacaaagactggacatagtttctgggagatttataagatgacaacagatccaatgctggcctatctacagccttttagaacatcaagaaaaaagtttttagaagtacccagatttgacaaagaaaacccttttgaaggcctggatgatataaatctgtggattcctctaagtgaaaatcatgacatttggataaagacactgacttgtgcttttttggacagtggaggcacaaaatgtgaaattcttcaattattaaagccaatgtgtgaagtgaaaactgacttttgtcagactgtacttccatacttgattcatgatattttactccaagatacaaatgaatcatggagaaatctgctttctacacatgttcagggatttttcaccagctgtcttcgacacttctcgcaaacgagccgatccacaacccctgcaaacttggattcagagtcagagcactttttccgatgctgtttggataaaaaatcacaaagaacaatgcttgctgttgtggactacatgagaagacaaaagagaccttcttcaggaacaatttttaatgatgctttctggctggatttaaattatctagaagttgccaaggtagctcagtcttgtgctgctcactttacagctttactctatgcagaaatctatgcagataagaaaagtatggatgatcaagagaaaagaagtcttgcatttgaagaaggaagccagagtacaactatttctagcttgagtgaaaaaagtaaagaagaaactggaataagtttacaggatcttctcttagaaatctacagaagtataggggagccagatagtttgtatggctgtggtggagggaagatgttacaacccattactagactacgaacatatgaacacgaagcaatgtggggcaaagccctagtaacatatgacctcgaaacagcaatcccctcatcaacacgccaggcaggaatcattcaggccttgcagaatttgggactctgccatattctttccgtctatttaaaaggattggattatgaaaataaagactggtgtcctgaactagaagaacttcattaccaagcagcatggaggaatatgcagtgggaccattgcacttccgtcagcaaagaagtagaaggaaccagttaccatgaatcattgtacaatgctctacaatctctaagagacagagaattctctacattttatgaaagtctcaaatatgccagagtaaaagaagtggaagagatgtgtaagcgcagccttgagtctgtgtattcgctctatcccacacttagcaggttgcaggccattggagagctggaaagcattggggagcttttctcaagatcagtcacacatagacaactctctgaagtatatattaagtggcagaaacactcccagcttctcaaggacagtgattttagttttcaggagcctatcatggctctacgcacagtcattttggagatcctgatggaaaaggaaatggacaactcacaaagagaatgtattaaggacattctcaccaaacaccttgtagaactctctatactggccagaactttcaagaacactcagctccctgaaagggcaatatttcaaattaaacagtacaattcagttagctgtggagtctctgagtggcagctggaagaagcacaagtattctgggcaaaaaaggagcagagtcttgccctgagtattctcaagcaaatgatcaagaagttggatgccagctgtgcagcgaacaatcccagcctaaaacttacatacacagaatgtctgagggtttgtggcaactggttagcagaaacgtgcttagaaaatcctgcggtcatcatgcagacctatctagaaaaggcagtagaagttgctggaaattatgatggagaaagtagtgatgagctaagaaatggaaaaatgaaggcatttctctcattagcccggttttcagatactcaataccaaagaattgaaaactacatgaaatcatcggaatttgaaaacaagcaagctctcctgaaaagagccaaagaggaagtaggtctccttagggaacataaaattcagacaaacagatacacagtaaaggttcagcgagagctggagttggatgaattagccctgcgtgcactgaaagaggatcgtaaacgcttcttatgtaaagcagttgaaaattatatcaactgcttattaagtggagaagaacatgatatgtgggtattccgactttgttccctctggcttgaaaattctggagtttctgaagtcaatggcatgatgaagagagacggaatgaagattccaacatataaatttttgcctcttatgtaccaattggctgctagaatggggaccaagatgatgggaggcctaggatttcatgaagtcctcaataatctaatctctagaatttcaatggatcacccccatcacactttgtttattatactggccttagcaaatgcaaacagagatgaatttctgactaaaccagaggtagccagaagaagcagaataactaaaaatgtgcctaaacaaagctctcagcttgatgaggatcgaacagaggctgcaaatagaataatatgtactatcagaagtaggagacctcagatggtcagaagtgttgaggcactttgtgatgcttatattatattagcaaacttagatgccactcagtggaagactcagagaaaaggcataaatattccagcagaccagccaattactaaacttaagaatttagaagatgttgttgtccctactatggaaattaaggtggaccacacaggagaatatggaaatctggtgactatacagtcatttaaagcagaatttcgcttagcaggaggtgtaaatttaccaaaaataatagattgtgtaggttccgatggcaaggagaggagacagcttgttaagggccgtgatgacctgagacaagatgctgtcatgcaacaggtcttccagatgtgtaatacattactgcagagaaacacggaaactaggaagaggaaattaactatctgtacttataaggtggttcccctctctcagcgaagtggtgttcttgaatggtgcacaggaactgtccccattggtgaatttcttgttaacaatgaagatggtgctcataaaagatacaggccaaatgatttcagtgcctttcagtgccaaaagaaaatgatggaggtgcaaaaaaagtcttttgaagagaaatatgaagtcttcatggatgtttgccaaaattttcaaccagttttccgttacttctgcatggaaaaattcttggatccagctatttggtttgagaagcgattggcttatacgcgcagtgtagctacttcttctattgttggttacatacttggacttggtgatagacatgtacagaatatcttgataaatgagcagtcagcagaacttgtacatatagatctaggtgttgcttttgaacagggcaaaatccttcctactcctgagacagttccttttagactcaccagagatattgtggatggcatgggcattacgggtgttgaaggtgtcttcagaagatgctgtgagaaaaccatggaagtgatgagaaactctcaggaaactctgttaaccattgtagaggtccttctatatgatccactctttgactggaccatgaatcctttgaaagctttgtatttacagcagaggccggaagatgaaactgagcttcaccctactctgaatgcagatgaccaagaatgcaaacgaaatctcagtgatattgaccagagtttcaacaaagtagctgaacgtgtcttaatgagactacaagagaaactgaaaggagtggaagaaggcactgtgctcagtgttggtggacaagtgaatttgctcatacagcaggccatagaccccaaaaatctcagccgacttttcccaggatggaaagcttgggtgtgatcttcagtatatgaattaccctttcattcagcctttagaaattatattttagcctttatttttaacctgccaacatactttaagtagggattaatatttaagtgaactattgtgggtttttttgaatgttggttttaatacttgatttaatcaccactcaaaaatgttttgatggtcttaaggaacatctctgctttcactctttagaaataatggtcattcgggctgggcgcagcggctcacgcctgtaatcccagcactttgggaggccgaggtgagcggatcacaaggtcaggagttcgagaccagcctggccaagagaccagcctggccagtatggtgaaaccctgtctctactaaaaatacaaaaattagccgagcatggtggcgggcacctgtaatcccagctactcgagaggctgaggcaggagaatctcttgaacctgggaggtgaaggttgctgtgggccaaaatcatgccattgcactccagcctgggtgacaagagcgaaactccatctcaaaaaaaaaaaaaaaaaacagaaacttatttggatttttcctagtaagatcactcagtgttactaaataatgaagttgttatggagaacaaatttcaaagacacagttagtgtagttactatttttttaagtgtgtattaaaacttctcattctattctctttatcttttaagcccttctgtactgtccatgtatgttatctttctgtgataacttcatagattgccttctagttcatgaattctcttgtcagatgtatataatctcttttaccctatccattgggcttcttctttcagaaattgtttttcatttctaattatgcatcatttttcagatctctgtttcttgatgtcatttttaatgtttttttaatgttttttatgtcactaattattttaaatgtctgtacttgatagacactgtaatagttctattaaatttagttcctgctgtttatatctgttgatttttgtatttgataggctgttcatccagttttgtctttttgaaaagtgagtttattttcagcaaggctttatctatgggaatcttgagtgtctgtttatgtcatattcccagggctgttgctgcacacaagcccattcttattttaatttcttggctttagggtttccatacctgaagtgtagcataaatactgataggagatttcccaggccaaggcaaacacacttcctcctcatctccttgtgctagtgggcagaatatttgattgatgcctttttcactgagagtataagcttccatgtgtcccacctttatggcaggggtggaaggaggtacatttaattcccactgcctgcctttggcaagccctgggttctttgctccccatatagatgtctaagctaaaagccgtgggttaatgagactggcaaattgttccaggacagctacagcatcagctcacatattcacctctctggtttttcattcccctcatttttttctgagacagagtcttgctctgtcacccaggctggagtgcagtggcatgatctcagctcactgaaacctctgcctcctgggttcaagcaattctcctgcctcagcctcctgagtagctgggactacaggcgtgtgccaacacgcccggctaattttttgtatttttattagagacggagtttcaccgtgttagccaggatggtctcgatcgcttgacctcgtgatccaccctcctcggcctcccaaagtgctgggattacaggtgtgagccaccgcgcccggcctcattcccctcatttttgaccgtaaggatttcccctttcttgtaagttctgctatgtatttaaaagaatgttttctacattttatccagcatttctctgtgttctgttggaagggaagggcttaggtatctagtttgatacataggtagaagtggaacatttctctgtcccccagctgtcatcatataagataaacatcagataaaaagccacctgaaagtaaaactactgactcgtgtattagtgagtataatctcttctccatccttaggaaaatgttcatcccagctgcggagattaacaaatgggtgattgagctttctcctcgtatttggaccttgaaggttatataaatttttttcttatgaagagttggcatttctttttattgccaatggcaggcactcattcatatttgatctcctcaccttcccctcccctaaaaccaatctccagaactttttggactataaatttcttggtttgacttctggagaactgttcagaatattactttgcatttcaaattacaaacttaccttggtgtatctttttcttacaagctgcctaaatgaatatttggtatatattggtagttttattactatagtaaatcaaggaaatgcagtaaacttaaaatgtctttaagaaagccctgaaatcttcatgggtgaaattagaaattatcaactagataatagtatagataaatgaatttgtagctaattcttgctagttgttgcatccagagagctttgaataacatcattaatctactctttagccttgcatggtatgctatgaggctcctgttctgttcaagtattctaatcaatggctttgaaaagtttatcaaatttacatacagatcacaagcctaggagaaataactaattcacagatgacagaattaagattataaaagattttttttttgtaattttagtagagacagggttgccattgtattccagccttggcgacagagcaagactctgcctcaaaaaaaaaaaaaaaaaggttttggcaagctggaactctttctgcaaatgactaagatagaaaactgccaaggacaaatgaggagtagttagattttgaaaatattaatcatagaatagttgttgtatgctaagtcactgacccatattatgtacagcatttctgatctttactttgcaagattagtgatactatcccaatacactgctggagaaatcagaatttggagaaataagttgtccaaggcaagaagatagtaaattataagtacaagtgtaatatggacagtatctaacttgaaaagatttcaggcgaaaagaatctggggtttgccagtcagttgctcaaaaggtcaatgaaaaccaaatagtgaagctatcagagaagctaataaattatagactgcttgaacagttgtgtccagattaagggagataatagctttcccaccctactttgtgcaggtcatacctccccaaagtgtttacctaatcagtaggttcacaaactcttggtcattatagtatatgcctaaaatgtatgcacttaggaatgctaaaaatttaaatatggtctaaagcaaataaaagcaaagaggaaaaactttggacatcgtaaagactagaatagtcttttaaaaagaaagccagtatattggtttgaaatatagagatgtgtcccaatttcaagtattttaattgcaccttaatgaaattatctattttctatagattttagtactattgaatgtattactttactgttacctgaatttattataaagtgtttttgaataaataattctaaaagc

SEQ ID NO: 119706 - DNA, 322 bp, Homo sapiens
atggactttttaaccattgtgagagaatgtggtatagaaaagcaccagtccagtattggcttctctgtccaccagaatctcaaggaatcactggatcgctgtcttctgggattatcagaacagcttctgaataattactcatctgagtgtttaacagagtaccctgattatggtcaaccagatgtagtggtgaaagaagatgaagaatataaacgtgttgattttagcaaagttccaaagctgaagacagttttccagaaagggcatccctccccatgctttgcttccgccttgcagtccgatctcagacctgctgtgctag

SEQ ID NO: 119707 - DNA, 822 bp, Homo sapiens
atggcctcaggtgtactgcaagcagctgccactgtgggcaccagggaatgcagtggctcccagaaacttggagatgtcaggaactgcagagccccaaagaggatgtcacagccctggctcagagagaccctaggtctgggctccctgaagggcagtagctcttctctcttcttgtttgcaacgtgctctttcagtcctgccattcagtgggtcctgagttcttgtcctgcatccaagaagcatgaggtatgtggacaactgaaggcccaccccggggcacgccttccccgctgcgacctgtgtcttcgcagcagctgctacacatgggccactgctgccattgtttgtcaaagatcagatagttgtagatatgtggcattatttctgagggctctgttctgttccattgatctatatctctgttttggtaccagtattgcttcaaagagaataaaatacctaggaatccaacttacaagggatgtgaaggacctcttcaaggagaactacaaaccaatgctcattgaaataaaagaggatacaaagaaatggaagaacattccatgctcatgggtaggaagaatcaatatcgtgaaaatggccatattgtccaaggtaatttatagattcaatgccatccccatcaagctaccaatgactttcttcacagaattggaaaaaactactttaaagttcatgtggaaccaaaaaggagcctgcatcaccaagtcaatcctaagccaaaagaacaaagctggaggcatcatgctacctgacttcaaactatactacaaggttacagtaaccaaaacagcatggtag

SEQ ID NO: 119708 - DNA, 517 bp, Homo sapiens
atgataagacccattgtccagaagaagactgtcacaaggtcgattgatcagttaagaattggaaaaaactactttgaattttatatggaaccaaaaaagagccaatataatgaagacaatcctaagcaaaaagaacaaagctggacgcatgatgctacctcacttcaaactatacggcaaggctacagtaaccaaaacagcatgccgcacacacagatggagagccctgggaagggttcccacagtgcgttagctccaaacagtgcaagaggacaagcagtgtggcgcttccagcctctgtcaataattcatgaggctcagactgaggagcaccagtcagagtcagccttccctggacatggggaaaattatactgaagctctcctgtctcatcgggatctgctgagtagcaaagcagagtattgcagctgtaacttcttggctgaggaaaacactagaattccagtgcaggcctgttctattacttgctcgccatacacccccttttgaatgttga

SEQ ID NO: 119709 - DNA, 703 bp, Homo sapiens
atggtggaaggtggaaagcacgtcttacgtggcagcagacacaagagaagagagagccaagtgaaaggttttccctatataaaactatcagatctcatgagacttattcactaccatgagaccagtatggaggaaactgccgccatgattcaaattatctcccaccaggtccctcccacaacatgtgggaattatgggagctacaattcaagatgcaatttggtattcaaaggtggaaaggcatcctgtgactgcattggagaaaatgatggagtcaagttttgtcggcccccagtcattccctgaggtcccttctcctgacagaggaagccagtctgtcaaacaccacagtgttccttgggatcaattcctaaatccttctctcagagtccaactaaaacgtggaggcaaatatgtaccaaatagagctcatgttctcccttcaagaccacccttcaggtgtcaggagcctcacctggaggctccctacccagatggtcttaaggtgctcacagggccagctcagatcaccctttccatgggttctgactacacaaaagtagatgagtggctgaacaagctcacagaactatcattccctagctcaggttatggtcttagtaaatctcctgagtgtaacgtcttgaccaaaacagacaccagtggctatgaaaaagccttcacaatgaagtcacagggataa

SEQ ID NO: 119710 - DNA, 415 bp, Homo sapiens
  misc_feature (1)...(415): n = a,t,c or g
ccacgcgtccgcaagcgccttacgaaaggcggcaaaaagggagccaagaagaaagtacaatgattgaagctcacgttgatgtcaagactaccgatggttacttgcttcgtctgttctgtgttggttttactaaaaaacgcaacaatcagatacggaagacctcttatgctcagcaccaacaggtccgccaaatccggaagaagatgatggaaatcatgacccgagaggtgcagacaaatgacttgaaagaagtggtcaataaattgattccagacagcattggaaaagacatagaaaaggcttgccaatctatttatcctctccatgatgtcttcgttagaaaagtaaaaatgctgaagaagcccaagtttgaattgggaaagctcatggagcttcatggtgaaggcagtagttn

SEQ ID NO: 119711 - DNA, 467 bp, Homo sapiens; identical to SEQ ID NO: 86514
  misc_feature (1)...(467): n = a,t,c or g

SEQ ID NO: 119712 - DNA, 418 bp, Homo sapiens
cccacgcgtacgggcggatggcaagaactttcgccttactaaaggcggcgaactgggagccaggaacaaagtggttgatccattttctaagaaagattggtatgatgtgaaagcccctgctatgttcaatataagaaatattggaaagacgctcgtctccaggacccaaggaaccaaaattgcatctgatggtctcaagggtcgtgtgtttgaagcgagacttgctgatttgcagaatgatgaagttgcttttataaaatgcaagctgatcactgacgatgttcacggtaaaaactgcctgactatcttccatggcatggatcttacccgtgacaaaatgtggttcattgggcaaaaaatggcagacaatgattgaagctcacgttgatgtcaagactaccgatggttacttgcttcg

SEQ ID NO: 119713 - DNA, 341 bp, Homo sapiens
  misc_feature (1)...(341): n = a,t,c or g
tgggaaagctcatggagcttcatggtgaaggcagtagttctggaaaagccactggggacgagacaggtgctaaagttgaacgagctgatggatatgaaccaccagtccaagaatctgtttaaagttcagacttcaaatagtggcaaataaaaagtgctatttgtgnnnnnnnnnnnnnnnnnnnnnnnnnnnngggggggcctttttaaggaatccttgggggggccaaattttaccgggggtgggaaggaaaaatttttttctttttggggggggaattaaaaacctacttgggatttttgggaaggaaccttttttttgggggggggaaaaaatggaan

SEQ ID NO: 119714 - DNA, 237 bp, Homo sapiens
atgctgaagaagcccaagtttgaattgggaaaactcatggagcttcatggtgaaggtagtagtactggaaaagccactggggatgagacagtcccagccactgggggtgatgccagcagcagttcatctggagcggctgccacaaaaaacgccggctgcagcagggaaggcgtggcagggtctgtgcgctccaaagagtcagcaacaggtgggagccctgaccactttccaaagttg

SEQ ID NO: 119715 - DNA, 1190 bp, Homo sapiens
cgcccgccccattgcccccgctgatttagccccgctgcaggaattcggcacgagggctctctgaccagcaccatggcggttggcaagaacaagcgccttacgaaaggcgcgcaaaaagggatctcaagaagaaagtggttgatccatttcctaggcaaagattggtattgacgtcgaaagcaccctcttatgttccattataagaattattggaaagacggctcgtcacccaggaccccaagggacccaaaattgcaatctgatggtctccaagggttcgtgtgtttgaaagtgagtcttgctgatttgcagaaatgatgaagttgcatctaggaaattccaggctgattactgaggtttgtttcaggggtaaaaacttgccctgactaacttcccatggggcatgggatctttacccggtgacaaaaatgtgttcccatggtcaaaaaaattggcagaccaatgattgacagctcacgttgaatgttcaagactaacccgatgggttaccttgccctccgcctgttcctgtgttgggttttacctaaaaaaaccgcaaccaattcagattacggaaagcccctccttatgcttcagccacccaacaggtcccgcccaaatcccggaagaagatggatggaaaatcatgaccccgagaggtgccagacaaaatgaccttgaaaagaagtgggtcaataaattgattcccagacaagcattgggaaaagacattagaaaaggccctgcccaatcttattttatccctctcccatgatgtccttcgtttggaaaagttaaaattgctggaaggaagccccaagttttgaattggggaaagctcattgggagcttccatgggtggaagggcagtagttcctgggaaaagccacttggggacgcagacaggtgctaaagttggaacgagcctgatgggatatgaaccaccagtcccaagaatcctggtttaaagttcagacttcaaattagtggcaaataaaaagtgctatttgtgatggaaaaaaaaaaaaaaaaaaaaggggggggccctttttaaaaaatccttggggggcccaaatttaaccgggggtgggaaggcaaaatttttttctttttgggggggggtttaataccctccttgggaattttggaaaggaaccttttttttggggggggaaaaaaatggaacaacc

SEQ ID NO: 119716 - DNA, 2142 bp, Homo sapiens; identical to SEQ ID NO: 118316

SEQ ID NO: 119717 - DNA, 2745 bp, Homo sapiens
atggaaggtgaaatgaatgaaatgaagcgagaagggaagtttagagaaaaaagaataaaaagaaatgagcaaagcctccaagaaatatgggactatgtgaaaagaccaaatctacgtctgattggtgtacctgaaagtgatggggagaatggaaccaagttggaaaacactctgcaggatattatccaggagaacttccccaatctagcaaggcaggccaacgttcagattcaggaaatacagagaacgccacaaagatactcctcgagaagagcaactccaagacacataattgtcagattcaccaaagttgaaatgaaggaaaaaatgttaagggcagccagagagaaagacagatcaacgagacagaaagtcaacaaggatacccaggaattgaactcagctctgcaccaagcggacctaatagacatctacagaactctccacctcaaatcaacagaatatacatttttttcagcaccacaccacacttattccaaaattgaccacatacttggaagtaaagctctcctcagcaaatgtaaaagaacagaaattataacaaactatctctcagaccacagtgcaatcaaactggaactcaggattaagaatctcactcaaaaccgctcaactacatggaaactgaacaacctgctcctgaatgactactgggtacataacaaaatgaaggcagaaataaaaatgttctttgaaaccaacgagaacaaagacacaacataccagaatctctgggacacattcaaagcagtgtgtagagggaaatttatagcactaaatgcccacaagagaaagcaggaaagatccaaaattgacaccctaacatcacaattaaaagaactagaaaagcaagagcaaacacattcaaaagctagcagaaggcaagaaataactaaaatcagagcagaactgaaggaaatagagacacaaaaaacccttcaaaaaattaatgaatccaggagctggttttttgaaaggatcaacaaaattgatagaccgctagcaagactaataaagaaaaaaagagagaagaatctaatagacgcaataaaaaatgataaaggggatatcaccaccgatcccacagaaatacaaactaccatcagagaatactacaaacacctctacacaaataaactagaaaatctagaagaaatggataaattcctcgacacatacactctcccaagactaaacgaggaagaagttgaatctctgaatagaccaataacaggagctgaaattgtggcaataatcaatagcttaccaaccaaaaagagtccaggaccagatggattcacagctgaattctaccagaggtacaaggaggaactggtaccattccttctgaaactattccaatcaatagaaaaagagggaatcctccctaactcatgttatgaggccagcatcattctgataccaaagccaggcagagacacaacaaaaaaagagaattttagaccaatatccttgatgaacattgatgcaaaaatcctcaataaaatactggcaaaacgaatccagcagcacatcaaaaagcttatccaccatgatcaagtgggcttcatccctgggatgcaaggctggttcaatatacgcaaatcaataaatgtaatccagcatataaacagagccaaagacaaaaaccacatgattatctcaatagatgcagaaaaagcctttgacaaaattcaacaacccttcatgctaaaaactctcaataaattagaattggaagaaactactgtaaagttcatatggaaccaaaaaagagcccacatcgccaagtcaatcctaagccaaaagaacaaagctggaggcatcacactacgtgacttcaaactatactacaaggctacagtaaccaaaacagcatggtactggtaccaaaacagagatatagatcaatggaacagaacagagccctcagaaataacgctgcatatctacaactatctgatctttgacaaacctgagaaaaacaagcaatggggaacggattccctatttaataaatggtgctgggaaaactggctagccatatgtagaaagctgaaactggatcccttccttacaccttatacaaaaatcaattcaagatggattaaagacttaaacgttagacctaaaaccataaaaaccctagaagaaaacctaggcattaccattcaggacataggcatgggcaaggacttcatgtctaaaacaccaaaagcaatggcaacaaaagccaaaattgacaaatgggatctaattaaactaaagagcttctgcacagcaaaagaaactaccatcagagtgaacaggcaacctacaaaatgggagaaaattttcacaacctactcatctgacaaagggctaatatccagaatctacaatgaactcaaacaaatttacaagaaaaaaacaaacaaccccatcaaaaagtgggcaaaggacatgaacagacacttctcagaagaagacatttatgcagccaaaaaacacatgaaaaaatgctcatcatcactggccatcagagaaatgcaaatcaaaaccacaatgagataccatctcacaccagttagaatggcaatcattaaaaagtcaggaaacaacaggcatgcacccttttccatacacacccacattatgttcggctctctatatctacagatacagaaggacttgagcatccttggattttggtatccacggggcatcctggaaccaatctactga

SEQ ID NO: 119718 - DNA, 2802 bp, Homo sapiens
atgactatcatcatcaacattataatcatcatcatcaccatcatcactatcatcatcatagtccacatcatcaccatcaacatcgtcatcaccaccaccatcctcaccaccgttatcattagcagcaccataatcatcattatcaccatttttgtttttgagacaggtgcaatcaaactagaaatcaggattaagaaactcactcaaaaccgctcagctacatggaaactgaacaacctgctcctgaatgactactgggtacataacgaaatgaaggcagaaataaagatgttctttgaaaccaacgagaacaaagacacaacatgccagaatctctgggacacatttaaagcaatcaacaaaattgatagaccgctagcaagactaataaagaagaaaagagagaagaatcaaatagatgcaataaaaaatgataaaggggatatcaccactgataccacaggaatacaaactaccatcagagaatactataaacacctctatgcaaataaactagaaaatcgagaagaaatggataaattcttcgacacatacaccctcccaaggctaaaccaggaagaagttgaatctctgaatagaccaataacaggctccaaaattgaagaaataattaatagcttatcaatcaaaaaaagtccaggaccagacggattcacagccgaattctaccagaggtacaaggaggagctggtaccattccttctgaaactattccaatcaatagaaaaagagggaatcatccttaactcatgctgtgaggccagcatcatcctgataccaaagcctggcagagacacaaccaaaaaagagaattttagaccaatatccctgatgaacatcgatgcaaaaatcctcaataaaacactggcaaacagaatccagcagcacatcacaaagcttatccaccatgttcaagtgggcttcatccctgggatgcaaggctggttcaacatacgcaaatcaataaacaattggaaaaaaactactttaaagctcatatggaaccaaaaaagagcctgcattaccaagtcaatcctaagccaaaagaacaaagctggaggcatcacgctacctgacttcaaactatactacaaggctacggtaaccaaaacagcatggtactggtaccaaaacagagatatagaccaatggaacagaacagaggcctcagaaataataccacacacctacaactatctgagctttgacaaacctgacaaaaacaagaaatggggaaacaattctctatttaacaaatggtgctgggaaaactggctagccatatgtagaaagctgaaactggatcccttccttacactttatacaaaaattaattcaagatggattaaagacttaaattttggaactgaaaccataaaaaccctagaagaaaacctaggcaataccattcacgacataggcatgggcaaggacttcatgtctaaaacaccaaaagcaaaggcaacaaaagccaaaattgacaaatgggatctaattaaactaaagagcttctgcacagcaaaagaaactaccatcagagtgaacaggcaacctacagaatgggagaaaatttttgcaatctacccatctgacaaaggtctaatatccagaatctacaaagaactcaaacaagtttacaagaaaaaaacaaacaaccccatcaaaaagtgggcaaaggatacgaacagacacttctcaaatgaagacatttatgcagccaacagacacatgaaaaaatgctcatcatcactggccatcagagaaatgcaaatcaaaaccacaatgagatatcatctcgcaccagttagaatgacaatcattaaaaagtcaggaagtaacagacaaggtgagccagtggccatgtacggtgctggcagtcaacatcgtgatgacccagaggcccgagggagtgaggagcagctggtgggtgaaggtggccggactaatcagcaggcagaccaacaagctaaaatttctactattactgccgactcagacctggaagaagtagattgggctgcaatcacacaatgggtgcatcaccagtgcggacacctaggcgtgaagctgtacaaacctttgcagcccaagatggcattgaatggattttcccatattccttaccacctgcaagcagctggtttaactgaaagaatgaatgagttattgaacaaacagttgaaagtgttagggcaagaggccctccaaaaatacaccagtgttgaccccacctcccaggaaggaactattgttcttaatacccatttcatctctcagtctgctcctgacatacagcgcaagctcaaaaagattcaattactccatggcctctttatcaaaaatcccaaattctgccttgccaaaagtgctcccctcaacccagcatccttacttcttgtatcctcttcccttcctacttattcttgcactgacatccaagaccacctgcagccacacttcccaaacatttcctccaagactctcaccaaccccagtgaccagctgttcatagatggctcctcttccaggcccactggctcccccaaaattgctggatatgcagttgtttctcttgaccaagtaattaaagccaggcccttacctccaggaacctcctcccaaaaagcagaacttatagctctcaccagagccctaacccttcccaaaggtaaacaagtcaacatttatacaaattccaaatatgcctatcacatccttcattcccatgctgccatcggcaaaagagaagattctgtctcagctaacctctctggctgctag

SEQ ID NO: 119719 - DNA, 2463 bp, Homo sapiens; identical to SEQ ID NO: 118329

SEQ ID NO: 119720 - DNA, 1909 bp, Homo sapiens
atgagggaaagtttggaacttcctagagacttgttgactggttgtgaccaacatgatgataatgacatggacaatgaagtccaagctgaggaggtctcagatagaaatgaggaacttattgggaactggagtaaagctgctccagctcaaaccttggatcaacggggcctaggtacatctcagtcaactgcttcagagggtgcaacccgtaagccttggcagcttccatgtgatgttaagcccgagggtgcaaggagtgcaagagtcgaggcttgggtgcctccacctagatttcagaggatgtatggaaaaacctggatgtccagggagaagcctaatgcaggggcagagccccatggagaacctgtactaaggcagtgcagaagggaaatgaggagtacagggaggactcaccctgctggcctggaagggcactgttgcaaaggtgctaatcctttgcttcagtcagaaatgattctagaattagcagatggtagcggcagaggaaatgaagcaagagaaatacaaactaccatcagagaatactataaacacctctatgcaaataaactagaaaatctagaagaaatggataaattcctcgacacatgcaccctcccaagactaaaccaggaggaagctgaatctctgaatagaccaataacaggctctgaaattgaggcaataattaatagcttatcaaccaaaaaagtccaggaccagatggattcacaaccaaattctaccagagagaataaaatacctaggaatccaacttacaagagatgtgaaggacttcctcaaggagaaatacaaaccactgctcaacgaaataaaagaggatataaacaaatggaagaacattccatgctcatggataggaagaatcaatcttgtgaaaatggccatactgcccaagccatatgtagaaagctgaaactggatcctttccttacaacttatacaaaaattaattccagatggattaaagacttacatgttagacctaaaaccacaaaaaccctagaagaaaacctaggcaataccattcaggacataggcatgggcaaggacttcatgtctaaaacaccaaaagcaatggcaacagaagccaaaattgacaaatgggatctaattaaacgaaagagcttctgcgcagcaaaagaaactaccaccagagtgaacaggcaacctacagattgggagaaaatgtttgcaatctactcatctgacaaagggctaatatccagaatctacgaagaactcaaacaaatttacaagaaaaaaacaaacaaccccatcaacaagtgggcgaaggatatgaacagacacttctcaaaagaagacatttatgcagccaacagacacatgaaaaagtgctcatcatcactggccatcagagaaatgcaaatcaaaaccacagtgagcccattcgctgctcaatgggtcagtcagcggtatggaaagtggcaagaagcacacccaagcaacaatgatggtaagggataccggggcaaaccccgatttcaatccctctcagatgtccatggccctcaggaccaaaagaaaatcattaaagaatcagctctgcccccaacccctacctttatcaacatcctcatgaatgccaaaacaattgaaaatggtcaattcccatatttgctaaatgcactgaagcagcagcagccacatgatgcagagaatctgttcacttgggggaaggagaatgcagcaattgtgagcccctgtattgaagtcagcgctgccctgtcacagtggaaagtgccagcttggccacagaggagtggaataccaaataggattttgaggtccccaattccaggactaggctcttgggtagcatttcttgacctggtgtgggtgagaggggatcctactgccctgaaag

SEQ ID NO: 119721 - DNA, 1962 bp, Homo sapiens
atgaccaatgcagagaagtccttaaaggacctgatggagctgaaaaccaaggcacgagagctacatgacaaatgcagaagcctcagtagccgatgcgatcaactggaagaaagggtatcagtgatggaagacaaaatgaatgaaatgaagcaagaagagaagtttagagaaaaaagaataaaaagaaacgaacaaagccgccaagaaatatgggactatgtgaaaagaccaaatctacgtctgattggtgtacctgaaagtgacggggagaatggaaccaagttggaaaataccctgcaggatattatccaggagaacttccccaatctagcaaggcagaccaacattcagattcaggaaatacagagaacgccacaaagatactcctcgagaagagcaactccaagacacataattgtcagattcaccaaagttgaaatgaaggaaaaaatgttaagggaagccagggagaaagaccacagtgcaatcaaactagaactcaggattaagaaactcactcaaaaccgctcaactacaaggaaactgaacaacctgcttctgaatgactactgggtaaataatgaaatgaaggcagaaataaagatgttctttgaaaccaacgagaacaaagacacaacataccagaatctctgggaaacattcaaagcaatcaacaaaattgatagaccgctagcaagactaataaagaagaaaacagagaagaatcaaatagacgcaataaaaaatgataaaggggatatcaccaccgatcccacagaaatacaaactaccatcagagaatattataaacacctctacacaaataaactagaaaatctagaagaaatggataaattcttcaacacatacaccctcccaagactaaaccaggaagaaattgagtctctgaatagaccaataacaggatctgaaattgaggcaataatcaatagcttaccaaccaaaataagtccgggaccagatggattcacagccgaattctaccacaggtacaaagaggagctgagaataaaatacctaggaatccaacttagaagggatgtgaaggacctcttcaaggagaactacaaaccactgctcaatgaaataaaagaggatacaaacaaatggaagaacattccatgctcatgggtaggaagaatcaatatcgtgaaaatggctatagtgcccaaggtaatttatagattcaatgccatccccatcaagctaccaatgactttcttcacagaattggaaaaaactactttaaagttcatatggaaccaaaaaagagcccgcattgccaagtcgatcctaagccaaaagaacaaagctggaagcatcatgctacctgacttcaaactatactacaaggctacagtaaccaaaacagcatggtactggtaccaaaacagagatatagaccaatggaacagaacagagccctcagaaataatgtcacatatctacaactatctgatatttgacaaacctgagaaaaacaagcaatggggaaaggattccctatttaataaatggtgctgggaaaactggctagccatatgtagaaagctgaaactggatcgcttccttacaccttatacaaaaattaattcaagatggattaaagacttaaatgttaaaactaaaaccataaaaaccctagaagaaaacctaggcaataccattcaggacacaggcatgggcaaggacttcatgtctaaaacaccaaaagcaatggcaacaaaagccaaaattgacaaatgggatctaattaaactaaagaacttctgcacagcaaaagaaactaccatcagagtgaataggcaacctacagaatgggagaaaatttttgcaacctactcatctgacaaagggctaatatccagaatctacaatgaactcaaacaaatttacaagaaaaaaaaaacaaccccatcaaaaagtgggcaaaggatatga

SEQ ID NO: 119722 - DNA, 1851 bp, Homo sapiens; identical to SEQ ID NO: 116091

SEQ ID NO: 119723 - DNA, 1947 bp, Homo sapiens
atgaacattgatgcaaaaatcctcaataaaatactggcaaaccgaatccagcagcacatcaaaaagcttatccaccatgatcaagtgggcttcatccctgggaggcaaggctggttcaatatatgcaaatcaataaatgtaatccagcatataaacagagccaaagacaaaaaccacatgattatctcaatagatgcggaaaaggcctttgacaaaattcaacaactcttcatgctaaaaactctcaataaattaggtattgatgggacgtatttcaaaataataagagctatctatgacaaacccacagccaatatcatactgaatgggaaaaaactggaagcattccctttaaaaactggcacaagacagggatgccctctctcaccactcctattcaacatagtgttggaagttctggccagggcaatcaggcaggagaaggaaataaagggtattcaattaggaaaagaggaagtcaaattgtccctgtttgcagatgacatgattgtatatctagaaaaccccattgtctcagcccaaaatctccttaagctgataagcaacttcagcaaagtctcaggatacaaaatcaatgtacaaaaatcacaagcattcttatacaccaacaacagacaaacagagagccaaatcatgagtgaactcccattcacaattgcttcaaagagaataaaatacctaggaatccaacttacaagggatgtgaaggacctcttcaaggagaactacaaaccactgctcaaggaaataaaagaggatgcaaacaaatggaagaacattccatgctcatgggtaggaagaatcaatatcgtgaaaatggccatactgcccaaggtaatttacagattcaatgccatccccatcaagctaccaatgactttcttcacagaattggaaaaaaccactttaaagttcatatggaaccaaaaaagagcccacatcaccaaagcaatcctaagccaaaagaacaaagctagaggcatcacactacctgacttcaaactatactacaaggctacagtaaccaaaacagcatggtactggtaccaaaacagagatatagatcaatggaacagaacacagccctcagaaataacgccgcatatctacaactatctgatctttgacaaacctgacaaaaacaagcaatggggaaagggttccctatttaataaatggtgctgggaaaactggctagccatatgtagaaagctgaaactggatcccttccttacaccttatacaaaaatcaattcaagatggattaaagacttaaacgttagacctaaaaccacaaaaaccctagaagaaaacttaggcattaccattcaggacataggcatgggcatggacttcatgtctaaaacaccaaaagcaatggcaacaaaagacaaaattgacaaatgggatctaattaaactaaagagcttctgcacagcaaaagaaactaccatcagagtgaacaggcaacctacaaaatgggagaaaattttcacaacctactcatctgacaaagggctaatatccagaatctacaatgaactcaaacaaatttacaagaaaaaaacaaacaaccccatcaaaaagtgggcgaaggacatgaacagacacttctcaaaagaggacatttatgcagccaaaaaacacatgaaaaaatgctcaccatcactggccatcagagaaatgcaaatcaaaaccacaatgagataccatctcacacctgttagaatggcaatcattaaaaagtcaggaaacaacaggtgttggagaggatgtggagaaataggaacacttttacactgttggtgtgataaactggatgaagaaaacatggcacatatacacaatggaatactatgcatccataaaaaagaatgagttcatgtcctttgcaggggcatagatgaagctggaaaccatcattct

SEQ ID NO: 119724 - DNA, 1969 bp, Homo sapiens
aaaagagggaatcctccctaactcattttatgaggccagcatcatcctgataccaaagctgggcagagacacaaccaaaaaagagaattttagaccaatatccttagtgaacattgatgcaaaaatcctcaataaaatactggcaaaccgaatccagcagcacatcaaaaagcttatccaccatgatcaagtgggcttcatccctgggatgcaaggctggttcaatatacgcaaatcaataaatgtaatccagcttataaacagaaccaaagacaaaaaccacatgattatctcaatagatgcagaaaaggcctttgataaaattcaacaacccttcatgctaaaaactctcaataaattaggtattgatgggacgtatctcaaaataataagagctatctatgacaaacccacagccaatatcatactgaatgggcaaaaactggaagcattccctttgaaaactggcacaagacagggatgccctctctcaccactcctattcaacatagtgttggaagttctggccaggcccattaggcaggagaaggaaataaagggtattcaattaggaaaagaggaagtcaaaatgtccctgtttgcagacgacatgattgtatatctagaaaaccccattgtctcagcccaaaatctccttaagctgatcagcaacttcagcaaagtctcaggatacaaaatcaatgtacaaaaatcacaagcattcttatacaacaataacagacaaacagagagccaaatcatgagtgaattcccattcacaattgcttcaaagagaataaaatacctaggaatccaacttacaagggacgtgaaggacctcttcaaggagaactacaaatcactgctcaaggaaataaaagaggatacaaacaaatggaagaacattccatgctcatgggtaggaagaatcagtatcgttaaaatggccatactgcccgaggtaatttatagaatcagtgccatccccatcaagctcccaatgactttcttcactgaattggaaaaaactactttaaagttcatatggaaccaaaaaagagcccgcatcaccacatcaatcctaagccaaaagaacaaagctggaggcatcacactacctgacttcaaactatactacaaggctacagtaaccaaaacagcatggtactggtaccaaaacagagatatagaccaatggaacagaacagagccatcagaaataatgccacatatctacaactatctgatctttgacaaccctgagaaaaacaagcaacggggaaaggattccctatttaataaatggtgctgggaaaactggctagccatatgtagaacgctgcaactggatcccttccttacaccttatacaaaaattaattcaagatggattaaaggcttaaacgttagacctaaaaccataaaaaccctagaagaaaacctaggcattaccattcaggacataggcatgggcaaggacttcatgtctaaaacaccaaaagcaatggcaacaaaagccaaaattgacagatgggatctaattaagctaaagagcttctgcacagcaaaagaaactaccatcagagtgaacaggcaacctacaaaatgggagaaaattttcacaacctactcatctgacaaagggctaatatccagaatctacaaagaactcaaacaaatttacaagaaaaaaacaaacaaccccatcaaaaagtgggcaaaggatatcaacagacacttctcaaaagaagacatttatgcagccaaaaaacacatgaaaaaatgctcatcatcactggccatcagagaaatgcaaatcaaaaccacaatgagataccatcccacaccagttaggatggcaatcattaaaaagtcaggaaacaacagatgctggagaggatgtggagaaatagcaacacttttacactgttgggacatggatgaaattggaaatcatcattctcagtaa

SEQ ID NO: 119725 - DNA, 2272 bp, Homo sapiens
acagatcaacgagacagaaagtcaacaaggatacccaggaattgaactcagctctgcaccaagcggacctaatagacatctacagaactctccacctcaaatcaacagaatatacatttttttcagcaccacaccacacttattccaaaattgaccacatacttggaagtaaagctctcctcagcaaatgtaaaagaacagaaattataacaaactatctctcagaccacagtgcaatcaaactggaactcaggattaagaatctcactcaaaaccgctcaactacatggaaactgaacaacctgctcctgaatgactactgggtacataacaaaatgaaggcagaaataaaaatgttctttgaaaccaacgagaacaaagacacaacataccagaatctctgggacacattcaaagcagtgtgtagagggaaatttatagcactaaatgcccacaagagaaagcaggaaagatccaaaattgacaccctaacatcacaattaaaagaactagaaaagcaagagcaaacacattcaaaagctagcagaaggcaagaaataactaaaatcagagcagaactgaaggaaatagagacacaaaaaacccttcaaaaaattaatgaatccaggagctggttttttgaaaggatcaacaaaattgatagaccgctagcaagactaataaagaaaaaaagagagaagaatctaatagacgcaataaaaaatgataaaggggatatcaccaccgatcccacagaaatacaaactaccatcagagaatactacaaacacctctacacaaataaactagaaaatctagaagaaatggataaattcctcgacacatacactctcccaagactaaacgaggaagaagttgaatctctgaatagaccaataacaggagctgaaattgtggcaataatcaatagcttaccaaccaaaaagagtccaggaccagatggattcacagctgaattctaccagaggtacaaggaggaactggtaccattccttctgaaactattccaatcaatagaaaaagagggaatcctccctaactcatgttatgaggccagcatcattctgataccaaagccaggcagagacacaacaaaaaaagagaattttagaccaatatccttgatgaacattgatgcaaaaatcctcaataaaatactggcaaaacgaatccagcagcacatcaaaaagcttatccaccatgatcaagtgggcttcatccctgggatgcaaggctggttcaatatacgcaaatcaataaatgtaatccagcatataaacagagccaaagacaaaaaccacatgattatctcaatagatgcagaaaaagcctttgacaaaattcaacaacccttcatgctaaaaactctcaataaattagaattggaagaaactactgtaaagttcatatggaaccaaaaaagagcccacatcgccaagtcaatcctaagccaaaagaacaaagctggaggcatcacactacgtgacttcaaactatactacaaggctacagtaaccaaaacagcatggtactggtaccaaaacagagatatagatcaatggaacagaacagagccctcagaaataacgctgcatatctacaactatctgatctttgacaaacctgagaaaaacaagcaatggggaacggattccctatttaataaatggtgctgggaaaactggctagccatatgtagaaagctgaaactggatcccttccttacaccttatacaaaaatcaattcaagatggattaaagacttaaacgttagacctaaaaccataaaaaccctagaagaaaacctaggcattaccattcaggacataggcatgggcaaggacttcatgtctaaaacaccaaaagcaatggcaacaaaagccaaaattgacaaatgggatctaattaaactaaagagcttctgcacagcaaaagaaactaccatcagagtgaacaggcaacctacaaaatgggagaaaattttcacaacctactcatctgacaaagggctaatatccagaatctacaatgaactcaaacaaatttacaagaaaaaaacaaacaaccccatcaaaaagtgggcaaaggacatgaacagacacttctcagaagaagacatttatgcagccaaaaaacacatgaaaaaatgctcatcatcactggccatcagagaaatgcaaatcaaaaccacaatgagataccatctcacaccagttagaatggcaatcattaaaaagtcaggaaacaacag

SEQ ID NO: 119726 - DNA, 3480 bp, Homo sapiens; identical to SEQ ID NO: 118327

SEQ ID NO: 119727 - DNA, 2817 bp, Homo sapiens
atgggagactttaacaccccacagtcaacattagacagatcaatgagacagaaagttaataaggatacccaggaattgaactcagctttgcaccacgcggacctaatacacatctacagaattctccaccccaaatcaacagaatatacatttttttcagcaccacaccacacctattccaaaattgaccacatagttggaagtaaagctctcctcagcaaatgtaaaagatcagaaattataacaaactgtctctcagaccacagtgcaatcaaactacaactcaggattaggaaactcactcaaaaccgctcaactacatggaaactgaacaacctgctcctgaatgactactgggtacataacgaaatgaaggcagaaataaagatgttctttgaaaccaacaagaacaaagacacaacataccggaatctctgggacacagtcaaatcagtgtgtagagggaaatttatagcactaaatgcccacaagagaaagcaggaaagatccaaaatggacaccctaacatcacaattagaagaactaaaaaagcaagagcaaacacattcaaaagctagcagaaggcaagaaataactaaaatcagagcagaactgaaggaaatagagacacaaaaaacccttcaaaaaattaatgaatccaggagctggttttttgaaaggatcaacaaaattgatagaccgctagcaaggctaataaagaagaaaagagagaagaatcacatagacgcaataaaaaatgataaaggggatatcaccaccgatcccacagaaatacaaactaacatcagagaatactataaacacctctacgcaaataaactagaaaatctagaagaaatggataaattcctcgacacatacaacctcccaagactaaaccaggaagaagttgactctctgaatagaccaataacaggctctgaaattgtggcaataatcaatagcttaccaaccaaaaagagtccaggaccagatggattcacagccgaattctaccagagggcaattaggcaggagaaggaaataaagggtattcaattaggaaaagaggaagtcaacttgtccctgtttgcagatgacatgattgtatatctagaaaaccccgttgtctcagcccaaaatctccttaagctgataagaaacttcagcaaagtctcaggatacaaaatcaatgtgcaaaaatcacaagcattcttatacaccaataacagacaaacagagagccaaatcatgagtgaactcccattcacaattgcttcaaagagaataaaatacctaggaatccaacttacaagggatgtgaaggacctcttcaaggagaactacaaaccactgctcaacgaaataaaagaggatacaaacaaatggaagaacattccatgctcatgggtaggaagaatcaatatcatgaaaatggccatactgcccaaggtaatttatagattcaatgccatccccatcaagctaccgatgactttcttcacagaattggaaaaaactactttcaagctcatatggaaccaaaaaagagcccacatcgccaagtcaatcctgagccaaaagaacaaagctggaggcatcacgctacctgacttcaaactatactacaaggctacagtaaccaaaacagcatggtactggtaccaaaacagagatatagatcaatggaacagaacagagccctcagaaataacgccgcatagctacaactatctgatctttgacaaacctgacaaaaacaagcaatggggaaaggattccctatttaataaatggtgttgggaaaactggctagccatatgtagaaagctgaaactggatcccttccttacaccttatacaaaaatcaattcaagatggattaaagacttaaatgttagacctaaaaccataaaaaccctagaagaaaacctaggcattaccattcaggacataggcatggaaaaggacttcatgtctaaaacaccaaaagcaatggcaacaaaagccaaaattgacaaatgggatctaattaaactaaagagcttctgcacagcaaaagaaactaccatcagagtgaacaggcaacctacagaatgggagaaaattttcacaacctactcatctgacaaagggctaatatccagaatctacaatgaactcaaacaaatttacaagaaaaaatcaaacaaccccatcaaaaagtgggcaaaggacatgaacagacacttctcaaaggaagacatttatgcagccaaaaaacacatgaaaaaatgctcaccatcactggccatcagagaaatgctaatcaaaaccacaatgagataccatctcacacgagttagaatggcaatcattaaaaagtcaggaaacaacaggtacctaagtattggacaagactatgccagagaaaacccagtgccattgagaagcaacaaggtttattggctattagagcagaaatcagaagacctgggagattggacagctacaggtttgtttggttttgttgttgttgttgttttgtccatcaagcacccatctttccaacgggactctctcccctaccccacagatggaagaagacgaggagccgccattgtatcagaaaagctttccggatcagaggcagcagcagcgtggcgtattaaaaggagcacaggaccaggagtaagaggacttgcactgctgcccctcctagcacacctgggagtagcctttgacacagtcagcgcggaggaaaggctttctggcagaggaagaactcggcaccatttcaaaggctccttgcagccgccttctaccgaccactcatga

SEQ ID NO: 119728 - DNA, 2093 bp, Homo sapiens
atggaaatcacaacaaactgtctctcagaacacagtgcaatcacattacaactcaggattaagaaactcactcaaaactgcacaactacatggaaattgaactacctgctcctgaatgactactgggtgaataacgaaatgaaggaagaaataaagatgttctttgaaaccaatgagaacaaagacacaacataccagaatctctgggacgtatttaaagcagtgtgtagagggaaatttatagcactaagtgcccacaagagaaagcaggaaagatctaaaactgacaccctaacatcacaattgaaagaactagagaagcaagagcaaacacattcaaaagctagcagaaggcaagaaataactaagatcagagcagaactgaaggagatagagacacaaaaaacccttcaagaaatcaatgattccaggagctcattttctgaaaagctcaacaaaattgatagaccgctagcaagactaataaagaagaaaagagagaagacacaaatagatgcaataaaaaacgataaaggggagatcaacaccaatcccacagaaatacaaactaccatcagagaatactataaatacctctatgcaaataaagtagaaaatctagaagaaatggatacattcctggacacatacaccctcccaagactaaaccaggaagaagttgaatctctgaatagaccaataacaggctctgaaattgaggcaataattaatagcctaccaaccaaagaaagtccaggaccagatggattcacagccgaattctaccagagggcaatcaggaaagggaaagaaataaagggtattcaattaggaaaagaggaagtcacattgtccctgtttgcagatgacatgattgtctatttaggaaaccccatcatctcagctcaaaatctcatgaagctgttaagcaacttcagcaaagtctcaggatacaaaatcaatgggcaaaaatcacaagcatgcccgtacaccaataacagacaaacagagagccaaatcatgagtgaactcccattcacaattgctacaaagagaataaaatacctaggaatccaacttacgagggatgtgaaggacctcttcaaggagaactacaaaccactgctcaacaaaataaaagaggacaaaaagaaatggaaaaacattcaatgctcatggataggaagaatcattatcatgaaaatggccatactgcccatggtaatttgtagattcaatgccatccccatcaagctaccaatgactttcttcacagaattggaaaaaactacgttaactttcatatggaaccaaaaaagagcctgcattgccaagaaaatcctaagcaaagagaacaaagctggaggcatcatgctacctgacttcaaactatactacaaggctacagtaaccaaaacagcatggtactggtaccaaaacagatacatagaacaatggaacagaacagaggcctcagaaataacaccacacatctacaaccatctgatctttgacaaatctgacaaaaacaagaaatggggaaacaattccctatttaataaatggtgctgggaaaactggctagctatatgtagaaagctgaaactgggtcccttccttacactttatacaaaaattaattcaagatggattaaagacttaaatgttagacctaaaaccataaaaaccctagaagaaaaccgaggcaataccattcaggacataggcatgggcaaggacttcatgactaaaacaccagaagcaatggcaacaaaaaccaaaatagacaaatgggatctaattaaactaaagagcttctgcatggcaaaagaaactaccatcagagtgcacagacaacctacagaatgggagaaaatttttgcaatctacccatctgacaaagggctaatatccagaatctacaaagaacttaaacaaatttacaagaaaaaaacaaacaaccccatcaaaaagtgggcaaaggacatgaacagacacttctcaaaagaagacatttatgcagccaacagacacatgaaaaaatgctcatcatcactggccatcagagaaatgcaaatcaaaaccacaatgag

SEQ ID NO: 119729 - DNA, 2727 bp, Homo sapiens
atggctgacatgctaacatgggaatcctgtcttgaggagtcactccaagaggagtcaccattggtcactcactgtggccccagctgctgcatctctggacagtcgcctccaagctcagctcgtccatcctcagtgtccagtgcaatctctgtgttgatgctgcctcagaacaggaagctgcctcctgcctggacgtctcctggaatcttccccacagatctggtggtttactccatgtcacttcctcatgcccttgccagatataactgtgatgtatgtaaaagcatgctgcctccaagattgtatgctcctgaggaaaaagctcgtacctctccactttgtggaacctggtactcaccttcactaccactttgtggagcctggtgcaagaagaatgagaagaagagggaaagagagagagagagaaagagacagagagaggatatactttctggtgcctcttcgtataaggacactattcatattcaattaagacccccaccttatgacgtccttcaacaaatacaaactaccatcagagaatacttcaaacacctctatgcaaataaactagaaaatctagaagaaatggataaactcctcgacacatacaccctcccaagactaaaccaggaagaagttgaatctctgaatagactaataacaggctctgaaattgtggcaataatcaacagcttaccaaccaaaaagagtccaagaccagatggattcacagctgaattctaccagaggtacaaggaggaactggtaccattccttctgaaactattccaatcaatagaaaaagggggactcctccctaactcattttatgaggccagcatcatcctgatgccaaagctgggcagagacacaaccaaaaaagagaattttagaccgatatccctgatgaacattgatgcaaaaatcctcaataaaatactggcaaaccaaatccagcagcacatcaaaaagcttatccagcatgatcaagtgggcttcatccctgggatgcaaggctggttcaatatttgcaaatcaataaatgtaatccagcatataaacagaaccaaagacaaaaaccacatgactatctcaatagatgcaggaaaagcctttgacaaaattcaacaactcttcatgctaaaaactctcaataaattaggtattgatgggacgtatctcaaaataataagagctatctatgacaaacccacagccaatatcattctgaatggggaaaaactggaagcattccctttgaaaactggcacaagacagggatgccctctctcaccactcctattcaacatagtgttggaagttctggccagggcaattaggcaggagaaggaaataaagggtattcgattacgaaaagaggaagtcaaattgtccctgtttgcagatgacatgattgtatatctagaaaaccccatcatctcagcccaaaatctccttaagctgataagcaacttcagcaaaatctcaggatacaaaatcaatgtacaaaaatcacaagcattcttatacaccaacaacagacaaacagagagccaaatcatgagtgaactcctattcacaattgcttcaaagagaataaaatacctaagaatccaacttactaaggacgtgaaggacctcttcaagaagaactacaaaccactgctcaatgaaataaaagaggatacaaagaaatggaagaacattccatgctcatgggtaggaagaatcaatatcgtgaaaatggccatacggcccaaggtaatttatagattcaatgccatccccatcaagctaccaatgactttcttcacagaattggaaaaaactactttcaagttcatatggaaccaaaaaagagcccgcatcgccaagtcaatcctaagccaaaagaacaaagctggaggcatcacactacctgacttcaaactatactacaaggctacagtaaccaaaacagcatggtactggtaccaaaacaaagatatagatcaatggaacagaacagagccctcagaaataatgccgcatatctacaactatctgatctttgacaaacctgacaaaaacaagcaatggggaaaggattccctatttaataaatggggctgggaaaactggctagccatatgtagaaagctgaaactggatcccttccttacaccttatacaaaaattaattcaagatggattaaagatttaaacgttagacctaaaaccataaaaaccctagaaaaaaacctaggcattaccattcaggacataggcatgggcaaggacttcatgtctaaaacaccaaaagcaatggcaacaaaagccaaaattgacaaatgggatctaattaaactaaagagcttctgcacagcaaaagaaactaccatcagagtgaacaggcaacctacaaaatgggagaaaatttttgcaacctactcatctgacaaagggctaatatccagaatctacaatgaactcaaacaaatttacaagaaaaaaacaaacaaccccatcaaaaagtgggtgaaggacatgaacagacacttctcaaaagaagacatttgtgcagccaaaaaacacatgaaaaaatgctcatcatcactggccatcagagaaatgcaaatcaaaaccacaatgagatatcatctcacaccagttagaatggcaatcattaaaaagtcaggaaacaacagggacatggatgaaattggaaatcttcattctcagtaa

SEQ ID NO: 119730 - DNA, 4683 bp, Homo sapiens
atggataaattcctcgacacatacaccctcccaagactaaaccaggaagaagttgaatctctgaatagaccaataacaggctctgaaattgtggcaataatcaatagcttaccaaccaaaaaagatccaggaccagatggattcacagccgaattctaccagagaataaaatacctgggaatccaacttacaagggatgtgaaggacctcttcaaggagaactacaaaccactgctcaaggaaataaaagaggatacaaacaaatggaagaacattccatgctcatgggtaggaagaatcaatatcatgaaaatggccatactgcccaaggtaatttatagattcaatgccatccccatcaagctaccaatgactttcttcacagaattggaaaaaactactttaaagttcatatggaaccaaaaaagagcccgcatcaccaagtcaatcctaagccaaaagaacaaagccggaggcatcacactacctgacttcaaactatactacaaggctacagtaaccaaaacagcatggtactgttaccaaaacagagatatagatcaatggaacagagcagagccctcagaaataatgctgcctatctacaactatctgatctttgacaaacctgacaaaaacaagcaatggggaaaggattccctatttaataaatggtgctgggaaaactggctagccatatgtagaaagctgaaactggatcccttccttacaccttatacaaaaattaattcaagatggattaaagacttacatgttagacctaaaaccataaaaaccctagaagaaaacctgggcaataccattcaggacataggcatgggcaaggactttatgtctaaaacaccaaaagcaatggcaacaaaagccaaaattgacaaatgggatctaattaaactaaagagcttctgcacagcaaaagaaactaccatcagagtgaacaggcaacctacaaaatgggagaaaattttcacaacctactcatctgacaaagggctaatatccagaatctacaatgaactcaaacaaatttacaagaaaaaaacaaccccatcaaaaaatttggagtcaaaatatggacctgagaaaatatctccagaaaatgatatttttgaaataaatttacccaaacatgttataaagcaaataagtaaaacacttggcctcgaggccttttattttagaaatgactcagaatatagaagtagatttgagggacgacagggacatcaagaaggatatatcaaccagaagatcatcagctatgaagaaatgcctgcttatactcatgcttctcctattcataatacacataaaccatatgaatgtaaggaatgtgggaaatactttagttgtggttcaaatcttattcagcatcagagtattcatactggagagaaaccctataaatgcaaagaatgtgggaaagcctttcaacttcacatacaacttactcgacatcagaaatttcatactggtgagaaaacttttgaatgtaaggaatgtggaaaagcctttaatcttcccacccagcttaatcgccataagaacattcacacagttaagaaactgtttgaatgtaaggaatgtgggaagtcttttaatcgtagctcaaaccttactcagcatcaaagtattcatgctggtgtaaaaccatatcaatgtaaggagtgtgggaaagcctttaatcgtggttcaaatcttattcagcatcaaaaaattcattccaatgagaaaccctttgtatgtagggaatgtgagatggcctttcgatatcattaccaactcattgaacattgccgaattcatactggcgagaaaccctttgaatgtaaagaatgcagaaaggcctttactcttctgacaaagcttgttcgacatcagaagattcatatgggtgagaagccctttgaatgcagggaatgcgggaaggcctttagtctcctcaatcagcttaatcgccataagaatattcacacaggtgaaaaaccatttgaatgtaaagaatgtgggaagtcctttaatcgtagttcaaaccttattcaacaccagagtattcatgctgatgtaaaaccatatgaatgtaaggagtgtgggaaaggctttaatcgtggtgcaaatcttattcagcatcaaaaaattcattccaatgagaaaccctttgtatgtagggaatgtgagatggcctttcgatatcattaccaacttattcaacattgccaaattcatactggtgggaaaccctttgaatgtaaagaatgtggaaaggcctttagtcttctgacacagcttgctcgacataagaacattcatactggtgagaaaccatttgaatgtaaagactgtgggaaggccttcaatcgtggctcgaaccttgttcaacatcagagtattcacactggtgagaagccctatgaatgtaaggagtgtgggaaggcttttagacttcacctacaactttctcaacatgagaaaactcatacaggtgagaaaccctttgaatgtaaggaatgtgggaaattctttcgtcgtggttcaaatcttaatcaacatcgaagtattcataccggaaagaaaccctttgaatgtaaggaatgtgggaaagcctttcgacttcatatgcaccttattcgacatcagaaatttcatactggtgagaagccctttgaatgtaaggaatgtggcaaggccttcagtcttcacacccagcttaatcaccataagaacattcacacaggtgagaagccatttaaatgtaaagaatgtgggaagtcctttaatcgtgtctcaaaccttgttcaacatcagagtattcatgctggtgtaaaaccatatgaatgtaaggagtgtgggaaaggctttagtcgtgtttcaaaccttattcagcatcagaaaactcattccagtgcgaaaccctttgtatgtaaggagtgtaggaagacctttagatatcattaccagcttactgaacattaccgaattcatactggtgagaaaccctttgaatgtaaagaatgcggaaaggcctttggtcttctgacacagcttgctcaacatcagatcattcatactggtgagaagccatttaaatgtaaggagtgtgggaaggcctttaatcgtggctcaaaccttgttcaacctcagagtattcatactggtgagaaaccctatgaatgtaaggagtgtgggaaggcttttagacttcacctacaactttctctgcatcaaaaacttgtacagaaaattcatacttgggtgaaaacctttgaatgtaaggaatgtgggaaggcctttcaatatcattaccaatttcatggacattatagatttcatattcgtgagaacccttatgaatgtcaaggatgtgggaaatgctttaccagtggtagaaaccttagagtacatcagagaattcatactggtgagaaaccatatcaatgtgaagaatgtaggaaggtctttactcagctctcacaacttattctgcataagagaattcataccggtgagaaaccctatgaatgtaaggaatgtggaaaagcttttatttgtggctcacagctttctcaacatcagaaaattcataatggggaaaaaccatatgaatgtaaggaatgtggaagggcctttattcggggctcactactgatgcaacatcagaggattcatactggtgaaaaaccctataaatgtgaagaatgtgggaaggcctttatccgtggctcacaacttactcaacaccagagaattcacaccaatgaaaagccctatgaatgtaaggaatgtggaaagatgtttagtcatggctcacaacttactcaacatcagagaatacacactggtgagaaaccctatcaatgtaaggaatgtggaaaagcgtttaatcgtggctcactccttacacgacaccagaggattcatactggtgagaaaccctatgaatgtaaagaatgtggaaaaacctttagtcgtggctcagaacttactcaacatgagcgaattcacacaggtgagaaaccctatgaatgtaaggaatgtgggaaatcttttattcgtggttcccagcttactcaacatcagagaatccatactggtgagaaaccttatgaatgtaaagaatgtagaatggcctttactcagagttcacatctttcccaacatcaaagacttcacactggtgagaaaccctatgtgtgtaatgaatgtggaaaggcctttgcgcgtggcttactacttatacaacatcagagaattcatactggtgagaaaccatatcaatgtaaggaatgtgggaaagcctttattcgtggttcacagttgactcaacatcagcgaattcacactggagaaaaaccctatgaatgcaaggagtgtggcaaggcctttagtcatggctctcagcttactctacatcagagaatccatactggtgagaagccctatgaatgcagagaatgtagaaaggcctttactcagagttcacatctttctcggcatcagagaattcatactggtgagaaaccatatcaatgtaaggaatgtgggaaggcctttactcgtggttcacagctaactcaacatcagagaattcatatcagtgagaaatcttttgaatataaggaatgtgggattgactttagtcatggctcacaagtttacatgtga

SEQ ID NO: 119731 - DNA, 1989 bp, Homo sapiens
atggataaattcctcaacacatacactctcccaagactaaaccaggaagaagttgaatctctgaatagaccaataacaggatctgaaattgtggcaataatcaatagcttaccaaccaaaaagagtccaggaccagatggattcacagccgaattctatcagaggtgcaaggaggaactagtaccattccttctgaaactattccaatcaatagaaaaagagggaatcctccctaactcattttatgaggccagcatcattctgataccaaagctgggcagagacacaaccaaaaaagagaattttagaccaatatccttgatgaacattgatgcaaaaatcctcaataaaatactggcaaaacgaatccagcagcacatccaaaagcttatccaccatgatcaagtgggcttcatccctgggatgcaaggctggttcaatatacgcaaatcaataaatgtaatccagcatataaacagagccaaagacaaaaaccacatgattatctcaatagatgcagaaaaagcctttgacaaaattcaacaacccttcatgctaaaaactctcaataaattagtgttggaagtgctggccagggcaattaggcaggagaaggaaataaagggtattcaattaggaaaagaggaagtcaaattgtccctgtttgcagatgacatgattgtatatctagaaaaccccattgtctcagcccaaaatctccttaagctgatgagcaacttcagcaaagtctcaggatacaaaatcaatgtacaaaaatcacaagcattcttgtacaccaacaacagacaaacagagagccaaatcatgagtgaactcccattcacaattgcttcaaagagaataaaatacctaggaatccaacttacaagggacatgaaggacctcttcaaggagaactacaaaccactgctcaaggaaataaaagaggatacaaacaaatggaagaacattccatgctcatgggtaggaagaatcaatatcgtgaaaatggccatactgcccatggtaatttacagattcaatgccatccccatcaagctaccaatgcctttcttcacagaattggaaaaaactactttaaagttcatatggaaccaaaaaagagcccgcatcgccaaggcaatcctaagccaaaagaacaaagctggaggcatcacactacctgacttcaaactatactacaaggctacagtaaccaaaacagcatggtaccagtaccaaaacagagatatagatcaatggaacagaacagagccctcagaaataatgccgcatatctacaactatctgatctttgacaaacctgagaaaaacaagcaatggggaaaggattccctatttaataaatggtgctgggaaaactgtctagccatatgtagaaagctgaaactggatcccttccttacaccttatacaaaaatcaattcaagatggattaaagacttaaacgttagacctgaaaccataaaaaccctagaagaaaacctaggcattaccattcaggacataggcatgggcaaggacttcatgtctaaaacaccaaaagcaatggcaacaaaagccaaaattgacaaatgggatctaattaaactaaagagcttctgcacagcaaaagaaactaccatcagagtgaaccggcaacctacaaaatgggagaaaattttttcaacctactcatctgacaaagggctaatatccagaatctacaatgaactcaaacaaatttacaagaaaaaaacaaacaaccccatgaaaaagtgggcaaaggacatgaacagacacttctcaaaagaagacatttatgcagccaaaaaacacatgaaaaaatgctcatcatcactggccatcacagaaatgcaaatcaaaaccacaatgagataccatctcacaccagttagaatggcaatcattaaaaagtcaggaaacaacagggacatggatgaaattggaaatcatcattctcagtaa

SEQ ID NO: 119732 - DNA, 2787 bp, Homo sapiens; identical to SEQ ID NO: 117917

SEQ ID NO: 119733 - DNA, 3573 bp, Homo sapiens
atgggaaaaaaacagaacagaaaaactggaaactctaaaaagcagagggcctctcctcctccaaaggaacacagctcctcaccagcaacggaacaaagctggatggagaatgactttgatgagctgagagaagaaggcttcagacgatcaaattactctgagctacgggaggacattcaaaccaaaggcaaagaagttgaaaactttgaaaaaaatttagaagaatgtataactagaataactgatatagagaagtgcttaaaggagctgatggagctgaaaaccaaggctcgagaactacatgaagaatgcagaagcctcaggagccgatgtgatcaactggaagaaagggtatcagcaatggaagatgaaatgaatgaaatgaaaaacacacataggctcaaaataaaaggagcaccaagattcataaagcaagtcctgagtgacctacaaagagacttagactcccacacattaataatgggagactttaacaccccactgtcaacattagacagatcaacaagacaaaaaatcaacaaggatacccaggaattgaactcagctctgcaccaagcagacctaatagacatctacagaactctccactccaaatcaacagaatatacatttttttcagcaccacaccacacctattccaaaattgaccacatacttggaagtaaagctctcctcagcaaatgtaaaagaacagaaattataacaaactatctctcagaccacagtgcaatcaaactagaactcaggattaagaatctcactcaaaaccgctcaactacatggaaactgaacaacctgctcctgaatgactactgggtacataacgaaatgaaggcagaaataaagatgttctttgaaaccaacgagaacaaagacacaacataccagaatatctgggacgcattcaaagcagtgtgtagagggaaatttatagcactaaatgcccacaagagaaaacaggaaagatccaaaattgacaccctaacatcacaattaaaagaactagaaaagcaagagcaaacacattcaaaagctagcagaaggcaagaaataactaaaatcagagcagaactgaaggaaatagagacacaaaaaacccttcaaaaaattaatgaatccaggagctggttttttgaagggatcaacaaaattgatagaccgctagcaagaataataaagaaaaaaagagagaagaatcaaatagacgcaataaaaaatgataaaggggatatcaccaccgatcccacagaaatacaaactaccatcagggaatactacaaacacctctacgcaaataaactagaaaatctagaagaaatggataaattcctcgacacatacaccctcccaagactaaaccaggaagaagttgaatctctgaatacaccaataacaggctctgaaattgtggcaataatcaatagcttaccaaccaaaagagtccaggaccagatggattcacagccgaattctaccagagaaaaagagggaatcctctctaactcattttatgaggccagcatcattctgataccaaagccaggcagagacacaacaaaaaaagagaattttagaccaatatccttgatgaacattgatgcaaaaatcctcagtaaaatactggcaaaacgaatccagcagcacatcaaaaagcttatccaccatgatcaagtgggcttcatccctgggatgcaaggctgggtcaatatacacaaatcaataaatgtaatccagcatataaacagagccaaagacaaaaaccacatgattatctcaacagatgcagaaaaagcctttgacataattcaacaacccttcatgctaaaaactctcaataagttaggtattgatgggatgtatttcaaaataataagagctatctatgacaaacccacagctaatatcatactgaatgggcaaaaactggaagcattccctttgaaaactggcacaagacagggatgccctctctcaccactcctattcaacatagtgttggaagttctggccagggcaattaggcaggagaaggaaataaagggtattcaattaggaaaagaggaagtcaaattgtccctgtttgcagatgacatgactgtatatctagaaaaccccattgtctcagcccaaaatctccttaagctgataagcaacttcagcaaagtctcaggatacaaaatcaatgtgcaaaaatcacaaggattcttatacaccaacaacagacaaacagagagccaaatcatgagtgaactcccattcacaattgcttcaaagagaataaaatacctaggaatccaacttacaagggatgtgaaggacctcttcaaggagaactacaaaccactgctcaaggaaataaaagaggatacaaagaaatggaagaacattccatgctcatgggtaggaagaatcaatatcgtgaaaatggccatactgcccaaggtaatttacagtttcaatgccatccccatcaagctaccaatgcctttcttcacagaattggaaaaaactactttaaagttcatatggaaccaaaaaagagcccgcatcaccaagtcaatcctaagccaaaagaacaaagctggaggcatcacactacctgacttcaaactatactacaaggctacagtaaccaaaacagcatggtactggtaccaaaacagagatatagatcaatggaacagaacagagccctcagaaataacgccgcatatctacaactatctgatctttgacaaacctgagaaaaacaagcaatggggaaaggattccctatttaataaatggtgctgggaaaactggctagctatatgtagaaagctgaaactggatcccttccttacaccttatacaaaaatcaattcaagatggattaaagacttaaacgttagacctaaaaccataaaaaccctagaagaaaacctaggcaataccattcaggacataggcatgggcaaggacttcatgtctaaaacaccaaaagcaatggcaacaaaagccaaaattgacaaatgggatctaattaaactaaagagcttctgcacagcaaaagaaactaccatcagagtgaacaggcaacctacaaaatgggagaaaatttttgcaacctactcatctgacaaagggctaatatccagaatctacaatgaactcaaacaaatttacaagaaaaaaacaaacaaccccatcaaaaagtgggtgaaggacatgaacagacacttctcaaaagaagacatttatgcagccaaaaaacacatgaaaaaatgctcatcatcactggccatcagagaaatgcaaatcaaaaccacaatgagataccatctcacaccagttagagtggcaatcattaaaaagtcaggaaacaacaggattgatttggctattcaggctcttttgaagttccatatgaattttagaatagctttttcttattctgtgaaaaatgacattggtagttcgatgcaggatgccactgccctggcttcaggccgcaaaatgaatgatgctacttacattgagctttccactctaattggaggagaaagacaataa

SEQ ID NO: 119734 - DNA, 2630 bp, Homo sapiens
atgttctttgaaaccaacgagaacaaagacacaacataccagaatctctgggacacattcaaagcagtgtgtagaggaaaatttatagcactaaatgcccacaagagaaagcaggaaagatctaaaattgacaccctaacatcacaattaaaagaactagagaagcaagagcaaacgcattcaaaagctagcagaaggcaagaaataactaagatcagagcagaactgaaggaaatagagaaacaaaaaacccttcaaaaaatcaatgaatccaggagctggttttttgaaaagatcaacaaaattgatagaccgctagcaagactaataaagaagaaaagagagaagaatcaaatagacacaataaaaaatgataaagatatcaccactgatcccacagaaatacaaactaccatcagagaatactataaacacctctatgcaaataaactagaaaatctagaagaaatggataaattcctcgacacatacaccctcccaagactaaaccaggaagaagttgaatctctgaatagaccaataacaggctctgaaattgaggcaataattaatagcttaccaaccaaaaaaagtgcaggaccagatggattcacagccgaattctaccagaggtacaaggaggagctgcatataaacagaaccaaagacaaaaaccatatgattatctcaacagatgcagaaaaggcctttgacaaaattcaacaactcttcatgctaaaaactctcaataaattaggtattgatgggacatatctcaaaataaaaagagctatctatgacaaacccacagccaatatcatactgaatgggcaaaaactggaagcataccctttgaatactggcacaagacagggatgccctctctcaccactcctattcaacatagtgtgggaagttctggccagggcaatcaggcaggagaaggaaataaagggtattcaattaggaaaagaggaagtcaaattgtccctgtttgcagatgacgtgattgtatatctagaaaaccccatcatctcagcccaaaatctccttaagctgataagcaacttcagcaaagtctcaggatacaaaatatacaaaatcgatgtgcaaaaatcacaagcattcctatacaccaataatagacaaacagagagccaaatcatgagtgaactcccattcacaattgcttcaaagagaataaaatacccaggaatccaacttacaaggaatgtgaaggacctcttcaaggagaactacaaaccactgctcaatgaaataaaagaggacacaaacaaatggaagaacattccatgctcatggataggaagaatcaatattgtgaaaatggccatactgcccaaggtaatttatagattcaatgccatccccatcaagctaccaatgacttccttcacagaattggaaaaaactactttaaagttcatatggaaccaaaaaggagcccgcattgccaagacaatcctaagcaaaaagaacaaagttggaggcatcacgctacctgactttaaactatactacaaggctacggtaaccaaaacagcatggtactggtaccaaaacagagatatagatcaatggaacagaacagaggcctcagaaataacaccacccatctacaaccatctgatctttgacaaacctgacaaaaacaagaaatggggaaaggattccctatttaataaatggtgctgggaaaactggctagccatatgtagaaagctgaaactggatcccttccttacatcttatacaaaaattaattcaagatggattaaagacttaaatgttagacctaaaaccataaaaaccctagaagaaaacctaggcaataccattcaggacataggcatgggcaaggacttcatgactaaaacaccaaaagcaatggcaacaaaagccaaaattgacaaatgggatctaattaaactaaagagcttctgcacagcaaaagaaactaccatcagagtgaacaggcaacctacaaaatgggagaaaaattttgcaatctacccatctgacaaagggctaatatccagaatctacaaagaacttaaacaaaatttacaagaaaaaaatcaaaaaatcccatcaaaaagtgggcaaaggatatgaacagacacttctcaaaagaagacatttatgcagccaacagacacatgaaaaaatgctcatcatcactaatcatcaaagaaatgcaaatcaaaaccacaatgagataccatctcacaccagttagaatggcgatcattaaaaagtcaggaaacaacagtcaggcaccgtgtatgaaatctaacaatgcgctcatcgtcatcctcggcaccgtcaccctggatgctgtaggcataggcttggttatgccggtactgccgggcctcttgcgggatatcgtccattccgacagcatcgccagtcactatggcgtgctgctagcgctatatgcgttgatgcaatttctatgcgcacccgttctcggagcactgtccgaccgctttggccgccgcccagtcctgctcgcttcgctacttggagccactatcgactacgcgatcatggcgaccacacccgtcctgtggatctacccactagtcaattcaccatcttgttga

SEQ ID NO: 119735 - DNA, 10579 bp, Homo sapiens
cctccggtctacagctcccagcgtgagcgacgcagaagacgggtgatttctgcatttccatctgaggtaccgggttcatctcactagggagtgccagacagtgggcgcaggccagtgggtgcgcgcaccgtgcggagccgaagcagggcgaggcattgcctcacctgggaagcgcaaggggtcagggagttccctttccgagtcaaagaaaggggtgacggacgcacctggaaaatcgggtcactcccacccgaatattgcgcttttcagaccggcttaaaaaacggcgcaccacgagactatatcccacacctggccttcggagggtcctacgcccacggaatctcgctgattgctagcacagcggtctgagatcaaactgcaaggccgcagcaaggctgggggaggggcgcccgccattgcccaggcttgcttaggtaaacaaagcagccggggaagctcgaactgggtgcagcccaccacagctcaaggaggcctgcctgcctctgtaggctccacctctgggggcagggcacagacaaacaaaaagacagcagtaacctctgcagacttaaatgtccctgtctgacagctttgaagagagcagtggttctcccagcacgcagctggagatctgagaacgggcagactgcctcctcaagtgggtccctgacccctgacccccgagcagcctaactgggaggcaccccccagcaggggcacactgacacctcacacggcagggtattccaacagacctgcagctgagggtcctgtctgttagaaggaaaactaacaaacagaaaggacatccacaccgaaaacgcatctgtacatcaccatcatcaaagaccaaaagtagataaaaccacaaagatggggaaaaaacagaacagaaaaactggaaactctaaaacgcagagcacctctcctcctccaaaggaacgcagttcctcaccagcaacggaccaaagctggatggagaatgattttgacgagctgagagaagaaggcttcagacgctcaaattactctgagctacgggaggacattcaaaccaaaggcaaagaagttgaaaactttgaaaaaaatttagaagaatgtataactagaataaccaatacagagaagtgcttaaaggagctgatggagctgaaaaccaaggctcgagaactacgtgaagaatgcagaagcctcaggagccaatgcgatcaactggaagaaagggtatcagcaatggaagatgaaatgaatgaaatgaagcaagaagggaagtttagagaaaaaagaataaaaagaaacgagcaaagcctccaagaaatatgggactatgtgaaaagaccaaatctacgtctgattggtgtacctgaaagtgatgcggagaatggaaccaagttggaaaacactctgcaggatattatccaggagactttccccaatctagcaaggcaggccaacgttcagattcaggaaatacagagaacgccacaaagatactcctcgagaagagcaactccaagacacataattgtcagattcaccaaagttgaaatgaaggaaaaaatgttaagggcagccagagagaaaggtcgagttaccctcaaagggaagcccatcagactaacagcggatctctcggcagaaaccctacaagccagaagagagtgggggccaatattgaacattcttaaagaaaagaattttcaacccagaatttcatatccagccaaactaagcttcataagtgaaggagaaataaaatactttacagacaagcaaatgctgaccgattttgtcaccagcaggcctgccctaaaagagctcctgaaggaagcgctaaacatggaaaggaacaaccggtaccagccactgcaaaatcatgccaaaatgtaaagaccatcgagactaggaagaaactgcatcaactaacgagcaaaatcaccagctaacatcataatgacaggatcaaattcacacataacaatattaactttaaatgtaaatggactaaattctccaattaaaagacacagactggcaagttggataaagagtcaagacccatcagtgtgctgtattcaggaaacccatctcatgtgcagagacacacataggctcaaaataaaaggatggaggaagatctaccaagcaaatggaaaacaaaaaaaggcaggggttgcaatcctagtctctgataaaacagactttaaaccaacaaagatcaaaagagacaaagaaggccattacatgatggtaaagggatcaattcaacaagaggagctaactatcctaaatatgtatgcacccaatacaggagcacccagattcataaagcaagtcctgagtgacctacaaagagacttagactcccacacattaataatgggagactttaacaccccactgtcaacattagacagatcaacgagacagaaagtcaacaaggatacccaggaattgaactcagctctgcaccaagcagacctaatagacatctacagaactctccaccccaaatcaacagaatatacatttttttcagcaccacaccacagctattccaaaattgaccacatacttggaagtgaagctctcctcagcaaatgtaaaagaacagaaattataacaaactatctctcagaccacagtgcaatcaaactagaactcaggattaagaatctcactcaaagccgctcaactacatggaaactgaacaacctgctcctgaatgactactgggtacataacgaaatgaaggcagaaataaagatgttctttgaaaccaacgagaacaaagacacaacataccagaatctctaggacgcattcaaagcagtgtgtagagggaaatttatagcactaaatgcccacaagagaaagcaggaaagatccaaaattgacaccctaacatcacaattaaaagaactagaaaagcaagagcaaacacattcaaaagctagcagaaggcaagaaataactaaaatcagagcagaactgaaggaaatagagacacaaaaaacccttcaaaaaatcaatgaatccaggagctggttttttgaaaggatcaacaaaattgatagaccgctagcaagactaataaagaaaaaaagagagaagaatcaaatagacacaataaaaaatgataaaggggatatcaccaccgatcccacagaaatacaaactaccatcagagaatactacaaacacctctacgcaaataaactagaaaatctagaagaaatggatacattccttgacacatacactctcccaagactaaaccaggaagaagttgaatctctgaatagaccaataacaggagctgaaattgtggcaataatcaatagtttatcaaccaaaaagagtccaggaccagatggattcacagccgaattctaccagaggtacaaggaggaactggtaccattctttctgaaactattccaatcaatagaaaaagagggaatcctccctaactcattttatgaggccagcatcattctgataccaaagccgggcagagacacaacaaaaaaaagagaattttagaccaatatccttgatgaacattgatgcaaaaatcctcaataaaatactggcaaaccgaatccagcagcacatcaagaagcttatccaccatgatcaagtgggcttcatccctggcatgcaaggctggttcaatatacgcaaatcaataaatgtaatccagcatagaaacagaaccaaagacaaaaaccacatgattatctcaacagatgcagaaaagttttttgacaaaattcaacaacccttcatgctaaaaaaactctcaataaattaggtattgatgggacgtatctcaaaataataagagatatctatgacaaacccacagccaatatcctactgaatggacaaaaactggaagcattccctttgaaaactggcacaagacagggatgtcctctctcaccactcctattcaacatagtgttggaagttctagccagggcaatcaggcaggagaagggaataaagggtattcaattaggaacagaggaagtcaaattgtccctgtttgcagatgacatgattgtatatgtagaaaaccccatcgtctcagcccaaaatctccttaagctgataagcaacttcagcaaagtctcaggatacaaaatcagtgtgcaaaaatcacaagcattcctatacaccaataacagaaaaacagagagccaaatcatgagtgaactcccattcacaattgcttcaaagagaataaaatacctaggaatccaacttacaagggacgtgaagggcctcttcaaggagaactacaaaacactgctcaacgaaataaaagaggatacaaacaaatggaagaacattttcattccatgcttatgggtaggaagaatcaatatcgtgaaaatggccatactgcccaagggaatttatagattcaatgccatccccatcaagctaccaatgactttcttcacagtactggaaaaaactactttaaagttcatatggaaccaaaaaagagcccgcattgccaagtcaatcctaagccaaaagaacaaagctggaggcatcacgctacctgacttcaaactattctacaaggctacagtaaccaaaacagcacggtactggtaccaaaatggagatatagatcaatggaatggaagagaccccttagaaataacgccacatatctacaactatctgatcttcgacaaacctgagaaaaacaagcaatggggaaaggattccctatttaataaatggtgctgggaaaactggctagccatatatggaaagctgaaaatggatcccttccctacaccttatacaaaaattaattcaagatggattaaagacttaaactttagacctaaaaccataaaaaccctagaagaaaacctaggcattaccattcaggacataggcatgggcaaggactttatgtctaaaacaccaaaagcaatggcaacaaaagccaaaattgacaaatgggatctaattaaactaaatagcttctgcacagcaaaagaaactaccatcagagtgaacaggcaacctacagaatgggagaaaatttttgcaatctactcatctgacaaagggctaatatccagaatctacaatgaactcaaacaaatttacaagaaaaaaatcaaacaaccccatcaaaaagtggacgaaggcacatgaacagacacttctcaaaagaagacatttatgcagccaaaaaacacatgaaaaaatgctcaccatcactggccatcagagaaataaatgcaaatcaaaaccacaatgagataccatctcacaccagttagaatggcaatcatgaaaaaagtcaggaaacaacaggattcaaggctggttcaacataagcaaatcaataaacgtaacccatcacacaaacagaaccaaaaacaaaaaccacatgattatctcaatagatgcagaaaaggccttcaataaaattcaataccccttcatgctaaaaactctcaataaattaggtgttgatggaacatatctcaaaacagtaacagctatttatgacaaacccacagtcaatatcatactgaatgggcaaaagctggaagcattccctttgcaaaccagcacaagacaaggatgctctctctcaccactcctattcaacactgtattggaagttctagccagggcaatcaggcaagagaaagaaataaaaggtattcaaataggaggagaggaagtcaaattgtctctgtttgcagatgacatgactgtatatttacaaaaccctatcatctcagcccaaaatctccttaagctgataagcaacatcagcaaggtctcaggatacaaaatcaatgtacaaaaatcacaagcattcttatacaccaataacagacaaacagagagacaaattatgagtgaactcccattcacaattgcttcaaagcgaagaaaatacctaggaatccaacttacaagggatgtgaaggacctcttgaaggagaactacaaaccactgctcaaggaaataagagaggacacaaacaaatggaaaaacattccatattcatggataggaagaatcaatatcgtgaaaatggccatactccccaagaggactccattattatcgctgcctagtacattatatgaggagctgtggagacttaggtcctacttcccattgtgccctcaactttacaacatggagcagaataccacagactgggtaatttataaagaacagtgcatttggctcacagctctggagactggggagtccaagagcactgcaccagcatttggcaagggttatcccatggcagaatacatcatatggggcagattgacacctcacatggctggctactcctctgagacaaaacttccagaggaacgatcaggcagcaacatctgctgttcaccaatatccgctgttctgcagcctctgctgctgatacccaggcaaacagggtctggagtggacctccagcaaactccaacagacctgcagctgagggtcctgactgttagaaggaaaactaacaaacagaaaggacatccacaccaaaaccccatctgtacgtcaccatcatcaaagaccaaaggatcaaattcacacataacaatattaaccttaaatgtaaatgggctaaatgctccaattaaaagacacagactggcaaattggataaagagtcaagacccatcagtgtgctgtattcaggagacccatctcacgtgcagagacacacacaggatcaaaataaagggatggagggagatctaccaagcaaatggaaaacaaaaaaaggcaggggttgcaatcctagtctctgataaaacggactttaaaccaacaaagatcaaaagagacaaagaaggccattacatgatggtaaagggatcaattcaacaagaagagctaactaccctaaatatatatgcacccaatacaggagcacccagattcataaagcaagtccttagagacctacaaagagacttagactcccacacattaataatgggagactttaacaccccactgtcaacattagacagatcaacgagacagaaagttaacaaggatatccaggatttgaactcagctctgcaccaagtggacctaatagacatctacagaactctccaccccaaatcaacagaatatacattcttctcagcactacaccacatttattccaaaattgaccacatagttggaagtaaagcactcctcagcaaatataaaacaacagaaattataacaaactgtctctcagaccacagtgcaatcaaactcgaactcaggattaagaaactcactcaaaaccgctcaactacatggaaactgaacaacctgctcctgaatgactactgggtacataacaaaatgaaggcagaaataaatacattatttgaaaccaacgagaacaaagacacaacataccagaatctctgggacacattcaaagcagtgtgtagagggaaattcatagcactaaatgcccacaagagaaagcaggaaagatctaaaattgacaccctaacatcacaattaaaagaactagagaagcaagaacaaacacattcaaaagctagcagaaggcaagaaataactaagatcagagcaaaactgaaggaaatagagacacaaaaaatccttcaaaaaatcaatgaatccaggagctggttttttgaaaagatcaacaaaattgatagaccactagcaagaccaataaagaagaaaagagagaagaatcaaatagatgcaataaaaaatgataaaggggatatcaccactgatcccacagaaatacaaactaccatcagagaatactataaacacctctatgcaaataaactagaaaatctagaagaaatggataaattcctcaacacatacaccctcccaagactaaaccaggaagaagttgaatctctgaataaaccaataacaggctctgaaattgaggcaataattaatagcttaccaatcaaaaaaagtccaggaccagatggattcatagccaaattccaccagaggtacaaggaggagctggaggccagcatcatcctgataccaaagcctggcagagacacaaccaaaaaagagaattttagaccaatacccctgatgaatattgatgcaaaaatcctcaataaaatactggcaaaccgaatccagcagcacatcaagaagcttatccaccatgatcaagtgggcttcatccctgggatgcaaggctcgttcaacatatgcaaatcaataaacgtaatccaggatataaacagaacgaatgacaaaaaccatatgattatctcaatagatgcagaaaaggcctttgacaaaattcaacaacccttcattctaaaaactctcaataaattaggtattgatgggacgtatctcaaaataataagagctatctatgacaaacccacagccaatatcatactgaatgggcaaaaactggaagcattccctttgaaaactggcacaagacaggggtgccctctctcaccactcctattcaacatagtgttggaagttctggccagggcaatcaggcaggagaaggaaataaagggcattcaattaggacaagaggaagtcaaattgtccctgtttgcagatgacatgattgtatatcgagaaaaccccatcgtctcaacccaaaatctccataagctgataagcaacttcagcaaagtctcaggatacaaaatcaatgtgcaaaaatcacaagcatttttatacaccaataacagacaaacagagagccaaatcatgagtgaactcccattcacaattgcttcaaagagaataaaatacctaggaatccaacttacaagggatgtgaaggatctcttcaaggagaactacaaaccactgctcaaggaaataaaagaggatacaaacaaatggaagaacattccatgctcatgggtaggaagaatcaatatcgtgaaaatggccatactgcccaaggtaatttatagatttaatgccatccccatcaagctaccaatgactttcttcacagaattggaaaaaactactttaaagttcatatggaaccaaaaaagagcccgcattgccaagtcaatcctaagccaaaggaacaaagctggaggcatcacactacctgacttcaaactatactacaaggctacagtaaccaaaacagcatggtactggtaccaaaacagagatatagaccaatggaacagaacggagccctcagaaataatgccacatatctacaaccatctgatctttgacaaacctgacaaaaacaagaaatggggaaatgattccctatttaataaatggtgctgggaaaactggctagccatatgtaggagaaagctgaaactggatcccttccttacaccttatacaaaaattaattcaagatggattaaagacttaaatgttagacctaaaaccataaaaaccctagaagaaaacctaggcaataccattcaggacataggcatgggcaaggacttcatgtctacaacaccaaaagcaatggcaacaaaagccaaaattgacaaatgggatctaattaaactaaagagcttctgcacagcaaaagaaactaccatcacagtgaacaggcaacctacagaatgggagaaaatttttacaatctacccatctgacaaagggctaatatccagaatctacaaagaactcaaacaaatttacaagaaaagaacaaacaaccccatcaacaagtgggtgaaggatatgaacagacacttctcaaaagaagacatttatacagccaaaaggcacatgaaaaaatgctcatcatcactggccatcagagaaatgcaaatcaaaaccacattgagataccatctcataccagttagaatggcgatcattaaaaagtcaggaaacaacagaccaagctccaatgtcttctctgtgaaactttctgagatccaatccttggctctcatagagactaggtgcttaatgaatgctgatgaacagggtgtgccactgattcaagaaatgctggaatcttgggcaagtatttgcaaagttcccaagtatccaaatgccgaagcagtgcggccagaagagcaaacaccccacctgcacccaggtgaaataaacagccatgttgctcacacaaagcttgtttggtggtctcttcacacggacacgcatgaaatttggtgccgtgactcggatcgggggacctcccttgggagatcaatcccctgtcctcctgctctttgctccgtgagaaagatccacctacgacctcaggtcctcagaccgaccagcccaagaaacatctcaccaatttcaaatccgcacacaagaacttccaaacgcctgaaccgcagcggccaggcgttcctccagaacctccttccccaggagcttgctacaagtgccagaaatctgaccaccaggccaaggaatgcctgcagcccaggattcctcctaagccgtgtcccatctgtgcgggaccccactggaaattggactgttcagctcacctggcagccactctcagagcccctggaactctggcccaaggctctctga

SEQ ID NO: 119736 - DNA, 876 bp, Homo sapiens
atgtggacacacgcttcagtatgcatgagctttcaaaacattgaaagctcatacatagctttggagaaaagtgacagccatcaggaaaaatcaggctcatcgtgccatttgggactattccctgatgctgtaactgcttcaaacaataagttacatggccgatactcaattaagaagcaaataaatacccatgattcctttccactccactgctttgccagtgattttcccagggtgcatgactactaccaaatctggcaactatattacttaactaagagagcaaccataaatacagctgccaactgcttcactctatatacaccccacaaaatgtacttagatgtcccttgccctcaaaaagctaagcctattagagaagacaaccccagtactaagacagagatttcaaaaacagaggttcaagataacagtctggcttttcccatttgtacggcattcctggatcttcagaaagcactggagatctcaagaccagaaaaacacagggaaggaaatcaagcaggctttccaaactcacagaattccaaagaaggcagaattactagggcaaattccagctccaaaggaaaaatccccagctcacccagaacactttccagtggaactacattactggatcgcagctcctcgccagcaatggaacaaagctggacggagaatgactttgatgagctgacagaagcaggcttcagaaggtcagtaataacaaacttctccaagctaaaggaggatgttcgaacccatcgcaaggaagctaaaaaccatgaaaaaagattagacaaatggctcactagaataaacagtgtagagaagaccttaaatgacctgatggagctgaaaaccatggaatga

SEQ ID NO: 119737 - DNA, 675 bp, Homo sapiens
atgaacaacctccgtgacaaactccatcccatcatcatctccatgaactactctttacctatacggatgccggatcgcctgcagccggggctctggtccctggacgcccaccaggcacgggctttggagaaccatactgaggtccagttccagaaggagtgcgggcctgacaataagtgcgagagcaacttgcagatacgggcagccttcatgtcggagcagcagcagaagccgggcaggctccagtacagcagagacgtctggaaactgctcctgagcatcaacgtgacgaacacccggaccaacacattagtccagaccattgctgtccgactccacatctgtgggcagggcacagctgaacaaaaggcagcagaaacttctgcagacttaaacgtcctggattgcagctcctcgccagcaacagaacaaagctggatggagaatgactttgacgagttgacagaagtaggcttcagaaggtcggtaataacaaacttctccaagctaaaggagcatgttctaacccatcgcaaggaagctgaaaaccttgaaaaaaggttacaagaatggctaactagaataaacagtgtagagaagaccttaaatgacctgatggagatgaaaaccatggcacaagaacttcgtgacatatgcacaagcttcaatagctga

SEQ ID NO: 119738 - DNA, 438 bp, Homo sapiens
atgggcaagaatggagtggctatgaagggtcaaggaaatgacatgggcaaaggcagagaggtgaaaaagtattcctgggcatttggagggaaggcaacttgctgtggtgttcctacagcagtgccccaggaaccacaagacaactccttttctcagactcaagaagtcttctgtgagtatcccaagagattttcttaccctctccccagaaacaggaatgcagagccttgggacttgggcctgggccatgccatgcctcagatcgcagatcacacctcctcaccagcaatggaacaaagcaggacagagaatgactttgatgagctgacagaagtaggcttcagaaagttggtaataacaaacttctccgagctaaagcaggatgttcaaacccatcgcaaggaagctaaaaaccttgaaaaaatactagatgaatag

SEQ ID NO: 119739 - DNA, 1011 bp, Homo sapiens
atggtccgcttcggggacgagctgggcggccgctatgggggccccggcggcggagagcgggcccggggcggcggggccggcggggcggggggcccgggtcccggggggctgcagcccggccagcgggtcctctacaagcaatcgatcgcgcagcgcgcgcggaccatggcgctgtacaaccccatcccggtcaagcagaactgcttcaccgtcaaccgctcgctcttcgtcttcagcgaggacaacgtcgtccgcaaatacgcgaagcgcatcaccgagtggcctccattcgagtatatgatcctggccaccatcatcgccaactgcatcgtgctggccctggagcagcacctccctgatggggacaaaacgcccatgtccgagcggctggacgacacggagccctatttcatcgggatcttttgcttcgaggcagggatcaaaatcatcgctctgggctttgtcttccacaagggctcttacctgcggaacggctggaacgtcatggacttcgtggtcgtcctcacagggcggaaggctgggctgggctgctgtggctctggtgtggagagtggtggctggggagatcgcagctcctcgccagcaatggaacaaagcaggatggagaatgactttgatgagctgacagaagtaggcttcagaaagtcggtaataacaaacttctctgagctaaaggaggcatgtgcgaactcatcgcaaggaagctaaaaaccttgaaaaaagattagacaaaatggctaaatagaataaacagtgtagagaagaccttaaatgacccgatggagctgaaaaccatggcacgagaactatgtgatgcatgcacaagcttcagtagctgattcaatcaagtggaagaaaaggtatcagtaattgaagatcaaatggatgaaatgaagtgagaagagaagtttagagaaaaaagagtaaaaagaaatgaacaaagcctccaagaaatatgggactatgtgaaaagaccaaatctacgtttga

SEQ ID NO: 119740 - DNA, 1542 bp, Homo sapiens
atgctggtgagctttgtctctctgggttccctgtgccttcaaccaggtagccagactctgctggagaaaaatcgcacagtcaagccgcatgtctccttcacactgctgccagctttatctcatgtttctgagaaaaatgaagccgaaagcatgaactcccttatccctcccccgccaaatctacacacccctgcacaggcgcctttccctctgcccacaaaggagcaagatcgcagctcctcaccagcaacggaacaaagctggacagagaatgactttgatgagttgacagaagtaggcttcagaaggtcggtaataacaaactcctccaagctaaaggaggatgttcgaacccattgcaaggaagctaaaaatcttgaaaaaagattacatgaatggctaactagaatcaacagtgtagagaagaccttaaatgacctgaagctgaaatccatggcacgagaacttcatgacacatgcacaagcttcaatagccgatttgatcaagtggaagaaagggtgtcagcgattgaggatcaaaccaatgaaataaataatggggagaatggaaccaagttggaaaacactctgcaggatattatccaggagaacttccccaacctagcaaggcaggccaacattcaaattcaggaaatacggagaacaccacaaagatactcctcgagaaaagcaaccccaagacacataattgtcagattcaccaaggttgaaatgaaggaaaaagtgttaagggcagccagagagaaaggactagagaggcaagagcaaacaaattcaaaagctagcagaaggcaagatataactaagatcagtgcagaactgaaagagatagaaacacagaaaacccttcaaaaaattaatgaattcaggagccggttttttaaaaagatcaacaaaattgataaaacgctagcaagactaataaagaagaaaagagagaagaatcaaacagacgcaataaaaaatgataaaagggatatcaccaccgatcccacagaaatacaaactaccatcagagaatactataaacacctctatgcaaataaactagaaaatctggaagaaatggataaattcctggacacatacaccctcccaagactaaaccaggaagaagctgaatctctgaatagaacaataacaggctctgaaattgaggcaataattaatagcctaccaaccaaaaaaagtccaggaccagatggattcacagctgaattctaccagaggtacaaagaggagctgataccattccttctgaaactattacaatcaatagaaaaagagagaatcctccttaactcactttatgaggccaacatcatcctgataccaaagactggcagagacacaacaaaaaaagagaattttacaccaatatccctgatgaacatcaatgcgaaaatcctcaataaactactggcaaacagaatccagcagcacatcaaaaagcttatccaccatgatcaagttgcttcatccctgggatgcaaggctggttcaacatatgcaaatcaataa

SEQ ID NO: 119741 - DNA, 756 bp, Homo sapiens
atggatgaccccagattaaatgtcaagccactcacagaaagtttagagacttacagtggaaagtcaaaaggacttgaaggagatgtaattacagattcaaagctcaatgactgcaggtgcccctctgggacgaagcttccagaggaaggattgggcagcaatatttgctgttctgcaatatttgctgttctgcagcctctgctggtaatacctaggcaaacagggtctggagtggaccaccagcaaactccaactgacctgcggatgactgttagaaggaaaatgaacaagcagaaaggaatagcatcaacatcaacaaaaaggacaaaaaaggacatccacaccaaaaccccatctgtatgtcaccaacatcaaagaccaaaggattgcagcccctcgccagcaacagaacaaagctggatggagaatgacttagaagagctgacagaaataggcttcagaaggtcggtaataacaaacttctctgagctaaaggaggatgttcgaatccatcacaagaaagctaaaaaccttggaaaaagattagatgaatggctaactcgaataaacagtgtagagaagaccttaaatgacctgatggagctgaaaaccatggcacgagaactacatgactcatgcacaagcttcaatagccgatccaatcaagcagaagaaaaggtatcagtgattgaagatcaatttaatgaaataaagcgagaagagaagtttagagaaaaaaagagtaaaaagaaatga

SEQ ID NO: 119742 - DNA, 1008 bp, Homo sapiens
atggtccgcttcggggacgagctgggcggccgctatgggggccccggcggcggagagcgggcccggggcggcggggccggcggggcggggggcccgggtcccggggggctgcagcccggccagcgggtcctctacaagcaatcgatcgcgcagcgcgcgcggaccatggcgctgtacaaccccatcccggtcaagcagaactgcttcaccgtcaaccgctcgctcttcgtcttcagcgaggacaacgtcgtccgcaaatacgcgaagcgcatcaccgagtggcctccattcgagtatatgatcctggccaccatcatcgccaactgcatcgtgctggccctggagcagcacctccctgatggggacaaaacgcccatgtccgagcggctggacgacacggagccctatttcatcgggatcttttgcttcgaggcagggatcaaaatcatcgctctgggctttgtcttccacaagggctcttacctgcggaacggctggaacgtcatggacttcgtggtcgtcctcacagggcggaaggctgggctgggctgctgtggctctggtgtggagagtggtggctggggagatcgcagctcctcgccagcaatggaacaaagcaggatggagaatgactttgatgagctgacagaagtaggcttcagaaagtcggtaataacaaacttctctgagctaaaggaggatgtgcgaactcatcgcaaggaagctaaaaaccttgaaaaaagattagacgaatggctaaccagaatgaacagtgtagagaagaccttaaatgacctgatggagctgaaaaccatggcacgagaactacgtgatgcatgcacaagcttcagtagccaattcgatcaagtgcaagaaatggtatcagtgattcaagatcaaattagtgaaatgaagcgagaagagaagtttagagaaaaaagagtaaaaagaaatgaacaagcctccaataaatatgggactatgtggaaagaccaaatctacgtttga

SEQ ID NO: 119743 - DNA, 675 bp, Homo sapiens; identical to SEQ ID NO: 119737

SEQ ID NO: 119744 - DNA, 810 bp, Homo sapiens
atggggagaaaccagagcagaaaagctgaaaattctaaaaaccagagtgccttttctcctccaagggattgcagctcctcgccagcaatggaacaaagccagatggagaatgactttgacaagttgacagaagtaggcttcagaaggttggtaataacagacttctccaagctaaaggaggatgttcgaacccatcgcaaggaagctaaaaaccttgaaaaaagattagacaaatggctaactagaataaacagtgtagagaagaccttaaatgacctgatggagctgaaaaccatggcgcgagaactacatgacacatgcacatgcttcagtagccgattcgatctagtggaagaaagggtatcagtgattgaagatcaaattaatgaaatgaattgcttcagagagaataaaatacctaggaatccaacctacaagggatgtgaaggacctcttcaaggagaactacaaactactgctcaacaaaataaaagaggacacaaacaaatggaagaacattccatgctcatgaataggaagaatcagtatcatgaaaatggctgtactgtgcaaggattggaaaaaactactctaaagttcatatggaaccaaaaaagagcccgcattgccaagccaatcctaagccaaaagaacaaagctggaggcatcacactacctgacttcaaactatactacaaggctgcagtaaccaaaacagcgtggtactggtaccaaaacagatatagaccagtggaacagaacacagccctcataaataataccacacatctacaaccatctgatctttga

SEQ ID NO: 119745 - DNA, 1620 bp, Homo sapiens
atgtggacacacgcttcagtatgcatgagctttcaaaacattgaaagctcatacatagctttggagaaaagtgacagccatcaggaaaaatcaggctcatcgtgccatttgggactattccctgatgctgtaactgcttcaaacaataagttacatggccgatactcaattaagaagcaaataaatacccatgattcctttccactccactgctttgccagtgattttcccagggtgcatgactactaccaaatctggcaactatattacttaactaagagagcaaccataaatacagctgccaactgcttcactctatatacaccccacaaaatgtacttagatgtcccttgccctcaaaaagctaagcctattagagaagacaaccccagtactaagacagagatttcaaaaacagaggttcaagataacagtctggcttttcccatttgtacggcattcctggatcttcagaaagcactggagatctcaagaccagaaaaacacagggaaggaaatcaagcaggctttccaaactcacagaattccaaagaaggcagaattactagggcaaattccagctccaaaggaaaaatccccagctcacccagaacactttccagtggaactacattactggatcgcagctcctcgccagcaatggaacaaagctggacggagaatgactttgatgagctgacagaagcaggcttcagaaggtcagtaataacaaacttctccaagctaaaggaggatgttcgaacccatcgcaaggaagctaaaaaccatgaaaaaagattagacaaatggctcactagaataaacagtgtagagaagaccttaaatgacctgatggagctgaaaaccacaccaattcgattaagtggaagaaaggctatcgtggttgaagatcaaattaatgaaataaaacgagaagacaagattagagaaaaaagagtaaaaagaaacgaaaaaagcctccaagaaatatgggactatgtaaaaaaaccaaatctacatttgattggtgtacctgaaagtgacggggagaatggaaccaagttagaaaacactcttcaggatattatccaggagaacttctccaacctagcaaggcaggccaatattcaaattcaggaaatatggagaccaccacaaagatattcctcaagaagagcaactccaagacacataattgtcagattaaccaaggttgaaatgaaggaaaaaatgttaaaggcagccagagagaaaggtcaggttacccacaaagggaagcccatcggactaacagcagatctctcgtcagaaaccctacaagccagaagagagtgggggccaatattcaacattcttaaaagaaagaattttcaatccagaatttcatatccagccaaactaagcttcgtaagtgaagggcaaatcaaatcctttacagacaagcaaatgctgagagattttgtcaccaccagacctgccttacaagagctcctaaaggaagcactaaacattgaaaagaacaaccagtaccagccaccgcaaaaacatgccaaattgcaaagaccattcattcatgctgtgaagaaactacatcaattaacgggcaaaataaccagctaa

SEQ ID NO: 119746 - DNA, 1896 bp, Homo sapiens
atggtgaggtccctgagccctggtgccagtgcaccgcctaaggcctatcaggatgctgttcttccgagtggggcactagctgagatgcaagaccccatcatagtgagtgaaactcctcgtgttacaagatcagcatttctcagagatgtgcacaagggcattgccagcagcgttgttagtggtatgaagaataagaaacgaccaaatagccctgagcatgagactggactcataaattccaatatagtcaggggcaacgtctgggagaccctgaccgaagttatagaaaagcctgcaaatgaaggctctgctctggagaatggtcttccagctcacattccggctgaagaaggtgacaagggtttaattttgcttgctaattttgctaaacaaatagacaaaccaacaaacaaaagccctgccaatgccggcatccaacccaccagtaggaaagtcccccaagggaaaatgtatgcagtgtcagagtggcactgcgatgtctcctcgcccttccacacagagccccaaatccagcaggctctctgggctgagtcctgccctagcaggctcgagcatgaggaagctgggcggaggcagagtaggtctccagcccgcctccggaccctcgggctgtacccatgcagatctgctccatggatgccggccacctccctgtctaatgccactgtatattctgcacatattctcgctgctgacaaggccatccatttgcgttcacaaagactgttcggcattctagcaactcataggaagtgggagcacgttcccatcacgtgcactggggcttcgcggaaatgcttctctcctggcaataaaaagaagaaagaggaggaaatgactattttctgcaaacacagagaaaaactggctggccagggtgctccagtgcgcaccgtttcccacagctgctcgccccacctgggaagctttgcccagcctaactgggagacacctcccagtaggggccgacagatacccaggcaaacagggtctggagtgtacctccagcaaactccaacagacctgcagctgagaaacttgactgttagaaggaagcatcaacatcaacaaaaaggacatctataccaaaacccaatctgtaggtcgccagcatcaaagaccaaaggtagataaaactacaaagatggggagaaaccagaacagaaaagctgagaattctaaaaaccagagtgcctcttctcctccaaaggattgcaggctcctcgccagcaatggaacaaagctggatggagaacaactttgatgagttgacagaaataggcttcagaaggtcggtaataacaaacttctccgagctaaaggaggatgttcaaacccattgcaaggaagctaaaaaccttaaaaaaagattagatgaatgcctaactagaataaacagtgtagagaagaagaccttaaatgacctgatggagctgaaaaccatggcacaagaacttcatgacacatgcacaagcttcaatacccaattcgatcaagtggaagaaagggtatcagtgattgaagatcaaattaatgaaataaagtgagaagagaagtttagagaaaaaaagagtaaaaataaatgaataaagctgccaagaaatatgggactaggtgaaaagaccaaatatacatctgattactgtacctgaaagtgatggggagaaaggaaccaagttggaaaacactctgcaggatattatccaggagaacttccacaacatagcaaggcaggctaacattcaaattcaggaaatacaaagaacagcacaaagatattcctcgagaacagcaaccccaagacacataattgtcagattcgccaaggttgaaatgaaggaaaaagtgttaagggcagccagaaagaagggttga

SEQ ID NO: 119747 - DNA, 1017 bp, Homo sapiens; identical to SEQ ID NO: 118967

SEQ ID NO: 119748 - DNA, 1101 bp, Homo sapiens
atgcagatttgtattacaatttcggaaccattaatgactggagttaagcgtaggggacaatgcatgctaaagaggattgacccaattttggatctcgaccagatattcacggaaagacaactgttttctgggcagcagcagctagtgttcaggaatcccctgcaccctctgtcaactccagaagccagatcaatacccgtatccattggatggaaatgtcatcttggcaatgagagggatcccagccaattctctatcagggccaccttcacctataggcaggatgagtgttcccttggactgaccatcacatgtgctctccaaccagcttgcagacagcctgttgtgggaccttgtgatcatgactatatgtggagaaccaaggaacacaatgaagttggttggttgctcctaagttcagtggacaaagtgaagaaagaaaatgatgaactcagggattctaactcccggcttcagaagcagatactgagtctcaaatctggatacctccagctttttaccagggtaactgtgcactggggaaagggaaatgatcagacatttcggggagtagtggacactggctctgagctgacactgattccagggaactcaaaacatcattgtggttccccagttaaaataggggcttgtggaggtcagatcagaagaaatctggctgttgaagagccagcaagaataatgacttgggttatgaaagagaccaccatgttcagggcagagaaagcagctgacactgctgaatctctagccctgactctggaggatggtcccttggagcttcattatggagaatttgcatgttatggagaggtgcctccaagaatctacggaatcctgacacgcttagttcagcattccccagacaagataatagcatgttctggtgaaaagtccacccgaaaggagattgtgttagggagccagcacacacttgaaattgcaaaacaaaagttagttgatccatattgtggctctgctccttatttacagagagaagaggggagtgggaacaagaattgggatctttcttcaccaggataccagttggctttgcctactggacagggaggaagttag

SEQ ID NO: 119749 - DNA, 589 bp, Homo sapiens
aataataaggagggcggtcttccgttggttttggggttaaaggagttggggccttaatatgattagaccccaaaatactaaggactctaattctaattgtttggagaagactgatagcccttggtgtgaactgtttaaagagttatacaaaataaatgcctttgacactcctgattcattgctcatgagaggcaacgagtttagtgaccctatacatcatacctttgaccatatgtggagaactaaggaacataatgaagctggttggttgctcctaagttcagtggataaagtgatgaaagaaaatgatgaactcggggattctatctcccagcttcagaagcagatactgagcctcaaatctgccaagattgccctgagtgagagtctaatctcctgtagagaaagagctgaaattgtggaaaaatagacataagctcttatcatgttagtggctgacctgcaatgaaaggtgcatgcacagcctcaccatgcacagcctcgccaagtatctactgttaaagtgagggcattgattgttttgcaggaagtcacggacccttgatggagggatcggccacagctgagg

SEQ ID NO: 119750 - DNA, 499 bp, Homo sapiens
tttgtgcttgtggatgttaacaacatgtggcatcggtacgccagtatgctgtacgaacgccggttactcatcatttgcagcaaactcagcactctgactgcctgcatccacgggtttgcggcgatgctctaccccatgtactggcagcacgtgtacatctcccgtgctgccgccgcatctgctggactactgctgtgctcccatgccctacctcataggaatccatttaagtttaatggagaaagtcagaaacatggccctggatgatgtcgtgatcctgaatgtggacaccaacaccctggaaacccccttcgatgacctccagagcctcccaaacgacgtgatctcttccctgaagaacaggctgaaaaaggtctccacaaccactggggatggtgtggccagagcgttcctcaaggcccaggctgctttcttcggtagctaccgaaacgctctgaaaatcgagccggaggagccgatcactttctgtgaggaagcc

SEQ ID NO: 119751 - DNA, 798 bp, Homo sapiens
atggggcgtgcttctgaactgaggcttgatgggaactgcgagtgctccctgcagctgctcctggggccccgctctgccccacagtggaggaaccaagatacactggttgactccttccgactgcctttggtgtttgctgttttgtttttcactgagtttgttaagaggcaagttggtgtggtggttaggagaaatctgacagaatattttgtggctgtggatgttaacaacatgttgcatctgtacgccagtatgctgtacgaacgccggatactcatcatttgcagcaaactcagcactttcgcagtgcttgagacattgtacaagtacacagacaccagacaccaacctccaaaatccaagaggtctgtctttctgcagtccatggatgtgcagcaaatggcagatacgtattttcataaacctctgggcattgtgcagctcccttgctcctgtgacattgccatcctctggcagagggcacaagaagcagctctggtgccattgaccagaattgagtcacatgccatgcctctgctccagcccatcactggcaaggaactgactgcctgcatccacgggtctgcggcgatgctctaccccatgtactggcagcacgtgtacatccccgtgctgccgccgcatctgctggactactgctgtgtaatgcagttaaagacattgtctccaaacagttcaagtcaacagaagtccgtaagggagcatggtacacagacagggaaaggcactaactgcgtgccggatattgagagcttcaggagaagggaagccatttga

SEQ ID NO: 119752 - DNA, 5190 bp, Homo sapiens
ccagaagttctccagggcttccgcagagcactttttcgctgcctgtgagctgcagcgcgggagagctcgggctcgcgcggaccccagcgcctggcaggctgacagcgctctctcgccccaggtgcccgcgcgcgtggtgagcagctgcaccaggtggcgtccggggtggggtcaatgaagtgcagcctgaggaagatgtggcgccctggagaaaagaaggagccccagggcgttgtctatgaggatgtgccggacgacacggaggatttcaaggaatcgcttaaggtggtttttgaaggaagtgcatatggattacaaaactttaataagcaaaagaaattaaaaacatgtgacgatatggacaccttcttcttgcattatgctgcagcagaaggccaaattgagctaatggagaagatcaccagagattcctctttggaagtgctgcatgaaatggatgattatggaaatacccctctgcattgtgctgtagaaaaaaaccaaattgaaagcgttaagtttcttctcagcagaggagcaaacccaaacctccgaaacttcaacatgatggctcctctccacatagctgtgcagggcatgaataatgaggtgatgaaggtcttgcttgagcatagaactattgatgttaatttggaaggagaaaatggaaacacagctgtgatcattgcgtgcaccacaaataatagcgaagcattgcagattttgcttaacaaaggagctaagccatgtaaatcaaataaatggggatgtttccctattcaccaagctgcattttcaggttccaaagaatgcatggaaataatactaaggtttggtgaagagcatgggtacagtagacagttgcacattaactttatgaataatgggaaagccacccctctccacctggctgtgcaaaatggtgacttggaaatgatcaaaatgtgcctggacaatggtgcacaaatagacccagtggagaagggaaggtgcacagccattcattttgctgccacccagggagccactgagattgttaaactgatgatatcgtcctattctggtagcgtggatattgttaacacaaccgatggatgtcatgagaccatgcttcacagagcttcattgtttgatcaccatgagctagcagactatttaatttcagtgggagcagatattaataagatcgattctgaaggacgctctccacttatattagcaactgcttctgcatcttggaatattgtaaatttgctactctctaaaggtgcccaagtagacataaaagataattttggacgtaattttctgcatttaactgtacagcaaccttatggattaaaaaatctgcgacctgaatttatgcagatgcaacagatcaaagagctggtaatggatgaagacaacgatgggtgtactcctctacattatgcatgtagacaggggggccctggttctgtaaataacctacttggctttaatgtgtccattcattccaaaagcaaagataagaaatcacctctgcattttgcagccagttatgggcgtatcaatacctgtcagaggctcctacaagacataagtgatacgaggcttctgaatgaaggtgaccttcatggaatgactcctctccatctggcagcaaagaatggacatgataaagtagttcagcttcttctgaaaaaaggtgcattgtttctcagtgaccacaatggctggacagctttgcatcatgcgtccatgggcgggtacactcagaccatgaaggtcattcttgatactaatttgaagtgcacagatcgcttggatgaagacgggaacactgcacttcactttgctgcaagggaaggccacgccaaagccgttgcgcttcttctgagccacaatgctgacatagtcctgaacaagcagcaggcctcctttttgcaccttgcacttcacaataagaggaaggaggttgttcttacgatcatcaggagcaaaagatgggatgaatgtcttaagattttcagtcataattctccaggcaataaatgtccaattacagaaatgatagaatacctccctgaatgcatgaaggtacttttagatttctgcatgttgcattccacagaagacaagtcctgccgagactattatatcgagtataatttcaaatatcttcaatgtccattagaattcaccaaaaaaacacctacacaggatgttatatatgaaccgcttacagccctcaacgcaatggtacaaaataaccgcatagagcttctcaatcatcctgtgtgtaaagaatatttactcatgaaatggttggcttatggatttagagctcatatgatgaatttaggatcttactgtcttggtctcatacctatgaccattctcgttgtcaatataaaaccaggaatggctttcaactcaactggcatcatcaatgaaactagtgatcattcagaaatactagataccacgaattcatatctaataaaaacttgtatgattttagtgtttttatcaagtatatttgggtattgcaaagaagcggggcaaattttccaacagaaaaggaattattttatggatataagcaatgttcttgaatggattatctacacgacgggcatcatttttgtgctgcccttgtttgttgaaataccagctcatctgcagtggcaatgtggagcaattgctgtttacttctattggatgaatttcttattgtatcttcaaagatttgaaaattgtggaatttttattgttatgttggaggtaattttgaaaactttgttgaggtctacagttgtatttatcttccttcttctggcttttggactcagcttttacatcctcctgaatttacaggatcccttcagctctccattgctttctataatccagaccttcagcatgatgctaggagatatcaattatcgagagtccttcctagaaccatatctgagaaatgaattggcacatccagttctgtcctttgcacaacttgtttccttcacaatatttgtcccaattgtcctcatgaatttacttattggtttggcagttggcgacattgctgaggtccagaaacatgcatcattgaagaggatagctatgcaggtggaacttcataccagcttagagaagaagctgccactttggtttctacgcaaagtggatcagaaatccaccatcgtgtatcccaacaaacccagatctggtgggatgttattccatatattctgttttttattttgcactggggaaataagacaagaaataccaaatgctgataaatctttagaaatggaaatattaaagcagaaataccggctgaaggatcttacttttctcctggaaaaacagcatgagctcattaaactgatcattcagaagatggagatcatctctgagacagaggatgatgatagccattgttcttttcaagacaggtttaagaaagagcagatggaacaaaggaatagcagatggaatactgtgttgagagcagtcaaggcaaaaacacaccatcttgagccttagctcctcagaccttcagtgaggcttctaatggggggtgcatgacttgctggttctaactttcaatttaaaaagagtgaggaagaagcagaatgattgattttactgcgtgtgaaatcatggttcctgcatgctatataaaagtaaaccatcttttatcctctattcatattttctaccaatcactatgtattggggatatctttgcagatatgttcaaattggactggactttgatgagatataatctcattatttgaatgggtagaaaatgaatttgctagaacacacatttttaatgaaaagaagtaataaatgtaactattaagctaaaatgcaaatgtcagtactgaattcctgcttgttaattacataatatgtgatgctctagaaaatagtcacaagtattaataatgccttagatgatagtcttaaatattaggttgaggtctacctaacctaagctgcttcctggaaagcttcatgttgaaagaacctatgggtggcaccatgtggacttttctgtccctactgtgatgaatagccccacccttcttgctgtccccaacacacctgatgtcactttgagccatatagttgaagtacaaattaataggccttatgatatgcacgaattttactatagataatatatgttgtttctggttttgtttgccaatgagcataataaatgtaaaacctatatagtatccctgtgattattgtatgagcctttgtttgagatttgaaaaaaacatggctccatcacatattcccttttttcttttgatgtctactcaaatcatgaattaatcacatacctcatcattaatcttttcaaggtccttctattgttttgtctgattttctccatcatcctgattagcatgtttattccctcactacccccaggagatattcactgtaatgaatatgtctttggctatgtatgtgtccttgtgttatgttgtacagtgttgttttgagtctgttattatttacacagatgttattatgctatagcttctatttctgtttttgcttcttatttctcttataattctcacttatttcctattttttctactcatttctatttgttactcctttttactggacatgatgtttacaagatacaactgtgttactgtattccatctagtacggggcctttggtgtggcttactatttcattgtgtgcacccacccacccaccacactggacttttctagagatggacagcttggttacctccaccttcctgcactcattctcaaacatactgatgttcatacaaaccagcagagtgctgagggacgatatgtactattacaaaaccagacacttttacattcatggtccaacagaacacatggcctagaggcaatgttgcatataccttaatctttgatatgaataatatctttgttctttatatttcttaaaacagaaagggtggaaaatcactatacagaagcaatatccaaagatctcctgatcataaagacaaggggtcttttcagtcttccctctcctcaaaccttgtgtagcattgcacaatatagatctcagtcaacattcactgagtgccaagaatgtgagaaacactgtaccatgcctgtcatgcgaaatatttaaataaacagattgtcttacag

SEQ ID NO: 119753 - DNA, 2076 bp, Homo sapiens
atggcccagtacttactaagcttgccactggcaagctgtgaggtaatcccaaagagcccaaagtcaccccacctgagagtggcacaggaacgggggctccccagttctccgcggagcaggaatccccggagtccggacctctctgactcctggagacgacctgcaagccttgagagttcgctcgacaagcgcgagggcagtgacttgaggttcgctcatactggggagttcggcgcgctgtggggagctggcacctgcaccagggacctgactgcgtcagcgctgctctgcttccccttccccagctcggccccggagcccctgttgttaaccctttacagactaccattggagataagggtctgtaacccgtggcacgttgctgccaaactggatgcatatctgatagcccagagaaaggcaaaaatctttgagtggcttattggacagacagaatgtattcaaaatctgtatgcagtggccttgctctgccttcttgtgcagaccgaggcggttacaggtgcccaagtagacataaaagataattttggacgtaattttctgcatttaactgtacagcaaccttatggattaaaaaatctgcgacctgaatttatgcagatgcaacagatcaaagagctggtaatggatgaagacaacgatgggtgtactcctctacattatgcatgtagacaggggggccctggttctgtaaataacctacttggctttaatgtgtccattcattccaaaagcaaagataagaaatcacctctgcattttgcagccagttatgggcgtatcaatacctgtcagaggctcctacaagacataagtgatacgaggcttctgaatgaaggtgaccttcatggaatgactcctctccatctggcagcaaagaatggacatgataaagtagttcagcttcttctgaaaaaaggtgcattgtttctcagtgaccacaatggctggacagctttgcatcatgcgtccatgggcgggtacactcagaccatgaaggtcattcttgatactaatttgaagtgcacagatcgcctggatgaagacgggaacactgcacttcactttgctgcaagggaaggccacgccaaagccgttgcgcttcttctgagccacaatgctgacatagtcctgaacaagcagcaggcctcctttttgcaccttgcacttcacaataagaggaaggaggttgttcttacgatcatcaggagcaaaagatgggatgaatgtcttaagattttcagtcataattctccaggcaataaatgtccaattacagaaatgatagaatacctccctgaatgcatgaagatcgagtataatttcaaatatcttcaatgtccattagaattcaccaaaaaaacacctacacaggatgttatatatgaaccgcttacagccctcaacgcaatggtacaaaataaccgcatagagcttctcaatcatcctgtgtgtaaagaatatttactcatgaaatggttggcttatggatttagagctcatatgatgaatttaggatcttactgtcttggtctcatacctatgaccattctcgttgtcaatataaaaccaggaatggctttcaactcaactggcatcatcaatgaaactagtgatcattcagaaatactagataccacgaaaaggaattattttatggatataagcaatgttcttgaatggattatctacacgacgggcatcatttttgtgctgcccttgtttgttgaaataccagctcatctgcagtggcaatgtggagcaattgctgtttacttctattggatgaatttcttattgtatcttcaaagacaccaagtggagatacggggctccagactggttctggggaatgtctgccaagagtcctgtgatgtgatccgtcttcacatcttccagttttggataccagcacctgatctggactatttggctcagagggatggttttagaatcagggatgaccagaaagaagcaattttggaacatggaggagtaagaagggtgtcaaatgaggtagtgaaggagaaacttgattatgctaccatcgtgtga

SEQ ID NO: 119754 - DNA, 1048 bp, Homo sapiens
atgtccttgagcagtggagcctccggagggaaaggagtggatgcaaacccggttgagacatacgacagtggggatgaatgggacattggagtagggaatctcatcattgacctggacgccgatctggaaaaggaccagcagaaactggaaatgtcaggctcaaaggaggtggggataccggctcccaatgctgtggccacactaccagacaacatcaagtttgtgaccccagtgccaggtcctcaagggaaggaaggcaaatcaaaatccaaaaggagtaagagtggcaaagacactagcaaacccactccagggacttccctgttcactccaagtgagggggcagctagcaagaaagaggtgcaggggcgctcaggagatggtgccaatgctggaggcctggttgctgctattgctcccaagggctcagagaaggcggctaaggcatcccgcagtgtagccggttccaaaaaggagaaggagaacagctcatctaagagcaagaaggagagaagcgaaggagtggggacttgttcagaaaaggatcctggggtcctccagccagttcccttgggaggacggggtggtcagtatgatggaagtgcaggggtggatacaggagctgtggagccacttgggagtatagctattgagcctggggcagcgctcaatcctttgggaactaaaccggagccagaggaaggggagaatgagtgtcgcctgctaaagaaagtcaagtctgaaaagatggagtcccctgtttccacaccagcagtgctgccaatacaccttttggtgccagtggtcaacaatgacatctcatctccttgtgagcagatcatggttcgtacccgatcagttggggtcaacacatgtgatgtgggctctggccacagagcctgagtgcttgggcccctgtgaacctggaactagcgtcaaccttgaaggcatcgtgtggcaggaaacagaagatggacacaaggaagcagttcccaatatgccatctaaggtagctaccttcttggtgttcctcagtgacccatactga

SEQ ID NO: 119755 - DNA, 642 bp, Homo sapiens
gtaagttcttcctgaacagtgatattaagtcccaaatataagagaacagagatgctcagagctgcagaggccctcccttatgcagaatgggtcaccagaagcagcaggccctggggtctgggtcgaggcctagggaatccacactgagaccacacactgcctctgctcctaaactatgtggccacattggcacaaaaaaacatccagtcttgcacagtgagcgtgaatgctgtggggccagcgtctcttccaaaccacaaagccatgacccacgaggagccctgtggggctgagaccaaagaacaaggattcactgagagtctgcaatatcccaccagctgccagtttgacttttgcaaactagcctctaaaaagtgtacctttgctactgcccaaggtcccagtggtcctgggatgaaaggagtgaaggaagaaacacacaaatggctgaacacaaacagtaacgtaaacagcttcaaaaacagacatatttccacgaaaagggaaatgctgaaatacagcaggaactgcgagggggctgaggacctgcaggaggttttgagctccatcctgggcatcctgaaggccgtgaacgactccatgcacctcatcgctatcaccggctatgacgatactgtttaa

SEQ ID NO: 119756 - DNA, 385 bp, Homo sapiens
agagaatatggaacaccacaggagcaactgaatctggcattattaactttaaattttttgagcctgcccaaaggccagatgttatcagcagctgaacagcatctacagaaaccagctgcaaagacagaagcagaagaatgatttggcagagagatccaataacaaaaatttgggaaataggtaaaataataacttggggtagaggttatgcttgtgtttctccaggccaaaatcatcagtcagtttggataccatcaagacacctgaaatcttgtcatgggccagatgccaaggaagagattccgggaggatcctgaggacccccccggttgcagccatgtcaaggctggtgccgaggaggaccccaactgtcacgagcaacacc

SEQ ID NO: 119757 - DNA, 1337 bp, Homo sapiens
cccacgcgtccgattaaacacattactgatatcccatataattctgaaggacaagccatagtggaaagaatgaatctctccctgaaacagcagttgcaaaagcataaaaaaggggggaaaacaaggactacgggacaccccatatgcaactgaatctagcattgttaactttaaattttttgagcctgcctaaaggccagatcctatcagtagctgaacagcatctacagaaaccagctgcaaagacagaagcagaacaactagtttggtggagagatccaataacaaaaagttaggaaataggtaaaataataacttggggtaaaggttatgcttgtgtttctccaggactgactcaacagccgatttggataccatcaagacacctgaaaccttatcatgagccagatgctgaggaagaaattccgggaggatcccgaggaccccccccacccccggttgcagccatgtcgagactgacgctgaggaagaaccccactgtcacgagcaacacctgtcgaacacagccacccacctggggacagatcaagaagctgtcacagctggtggaagaaaacctgaggaaagcaagacaaccagtcacaataagtaattggattctccctagaataactaaatttaaaccaattgaaggtgctgagaatgtttttacagatgggtctagcaacggtaaagcttcttattctggctcaaaaggacctttgactgaagggaatcaaatggctgatcgccttgttgctaaagtaatatctaatgctagacactttcacaatttaacccatgttaatgcctctggtctcaaacgcagatacagcattacctggaaagaagctaaagctattatccagcgatgcccaacttgccaagtgatgctatcagcagctgaacagcatctacagaaatcagctgcaaagacagaagcagaaaaactggtttggtggagagacccaataacaaaaagtcgggaaataggtaaaataataacttggggtagaggttatgcttgtgtttctccaggaccaaatcaacagccgatttggataccatcaaaacacctgaaaccttatcataagccagatgctggggaaaagattccaggagaatcccgaggacccccggttgcagccatgtcaagactgacgctgaggaggatgccaactgtcatgagcaacacccatcgaacacagccacccacctggggacagatcaagaagctgtcacagatggcggaagaaaacctgaggaaagcgggacaaccagtcacaatgaataatttaatgatagcggtgatcaccactgccttcaacaagggctga

SEQ ID NO: 119758 - DNA, 793 bp, Homo sapiens
gaaaaccttggccgaaagggttgtagacatggcggccatcaggatgggaaaactgacaaccatgcctgcaggtctgatatatgcatctgtaagtgtacatgcagccaaacaagaggaatccaaaaagcagctagtgaaaccagagcagctccccatatatactgcaccaccgctccagtctaaatatgttgaagagcagcctggtcatttacaaatgggctttgcttccatccgcactgcaactggttgttacattggctggtgcaagggtgtttatgtctttgtgaaaaatggggataatgggtacagtacaatttgggaaaagatgcttatgtcttatctgaaggatcctcctcgagattttcttccgaaaatgggagttattacggtttcaggattggtgcctcgagcaaaggccttatgcaactacagagggcagaatcccggtgacctaaggtttaataagggagatatcatccttctccggagacagcttgatgagaattggtaccagggggaaatcaatggcatcagcgggaacttcccagccagctccgtggaagtcatcaagcagctgccccagccgcccccgctctgcagggccctctacaacttcgacctacgaggcaaggacaagagtgagaaccaggattgcctgaccttcctcaaggacgatatcatcactgtgatcagccgagtggatgagaactgggcagaaggcaagttaggagataaagtaggcatcttccctatcttgtttgtagaggtacgtgagtatcaagtctacatctga

SEQ ID NO: 119759 - DNA, 2876 bp, Homo sapiens
tcagggcgatggcccactacgtgaaccatcacccaaatcaagttttttggggtccaagtgccgtaaagcactaaatcggaaccctaaagggagcccccgattaagagcttgacggggaaagcccgccaactgcccgctttccagtcgggaaacctgtcgtgccagctgcattaatgaatcggccaacgcgcggggagaggcggtttgcgtattgggcgccagggtggtttttcttttcaccagtgagacgggcaacagctgattgcccttcaccgcctggccctgagagagttgcagcaagcggtccacgctggtttgccccagcaggcgaaaatcctgtttgatggtggttccgaaatcggcaaaatcctgcccgctttccagtcgggaaacctgtcgtgccagctgcattaatgaatcggccaacgcgcggggagaggcggtttgcgtattgggcgccagggtggtttttcttttcaccagtgagacgggcaacagctgattgcccttcaccgcctggccctgagagagttgcagcaagcggtccacgctggtttgccccagcaggcgaaaatcctgtttgatggtggttccgaaatcggcaaaatccattaattgcgttgcgctcactgcccgctttccagtcggaaaacctgtcgtgccagctgcattaatgaatcggccaacgcgcggagagaggcggtttgcgtattgggcgccagggtggtttttcttttcaccagtgagacgggcaacagctgattgcccttcaccgcctggccctgagagagttgcagcaagcggtccacgctggtttgccccagcaggcgaaaatcctgtttgatgggggttccgaaatcggcaaaatcccttataaatcaaaagagtagcccgagatagggttgaatgttgtaccagcgacgcgaacccgagtgtcgaaagcttgcgactcggtttgcccgagtgacaccccgcgacaccccccgagctagaatacctagttagttgacgcagacgagaaaatgcacgaggataaaaccacataatgggtgtacataaagaccacgcctgcccgctttccagtcgggaaacctgtcgtgccagctgcattaatgaatcggccaacgcgcggggagaggcggtttgcgtattgggcgccagggtggtttttcttttcaccagtgagacgggcaacagctgattgcccttcaccgcctggccctgagagagttgcagcaagcggtccacgctggtttgccccagcaggcgaaaatcctgtttgatggtggttccgaaatcggcaaaatccctactcccgcttccaaaagctggagagggtaatttccctccccaaactgcaaggaattgacccacgggcgacctagtgcctgtgggggatcttgtgattactgtctcgccaatgatcattaagtcagatatttcccgaattcctgcccgctttccagtcgggaaacctgtcgtgccagctgcattaatgaatcggccaacgcgcggggagaggcggtttgcgtattgggcgccagggtggtttttcttttcaccagtgagacgggcaacagctgattgcccttcaccggctggccctgagagagttgcagcaagcggtccacgctggtttgccccagcaggcgaaaatcctggttgatggggggtccgaaatcggcaaaattcaacattttttagaaccatgcttccccaggcctgccgaatttgctcctccatccacggggactgagagccattactattgctgtatttggtaagcaaaatacgtacatcaggctcgaaccctttaagatcaacgttcttgagcagatcacgaagcatatcgaaaaactgcagtgcggaggtgtagtcaagcaactcagcaggcgtgggaacaatcagcacatctgcagcacatacgacattaatcgtgccgatacccaagttaggcgcgctgtcaataactatgacatcatagtcatgagcaacagtttcaatggccagtcggagcatcaagtgtggatgggtgggcagtctacctttatcaaatttgcccattaactcagtttcaatgcggtgcagagccagacaggaaggaataatgtcaagccccggccagcaagagagctttattgcataagtgacatcgtcctttaccattaattgcgttgcgctcactgcccgctttccagtcgggaaacctgtcgtgccagctgcattaatgaatcggccaacgcgcggggagaggcggtttgcgtattgggcgccagggtggtttttcttttcaccagtgagacgggcaacagctgattgcccttcaccgcctggccctgagagagttgcagcaagcgggtcacgctggtttgccccagcaggcgaaaatcctgtttgatggtggttccgaaatcggcaaaatccgtggactccaacgtccaagggcgaaaaaccgtctttcagggcgagggcccctacgtgaaccatcacccaaataattttttggggtccaggggcgtaaaacactaaatcggaccctaaagggagccccccattaaaacttggcggcgaaagccggcaaaccactgtctccttgtacctctggtagaattcggatgtgaatccatctggtcctggactttttttggttggtaagctattaattattgcctcaatttcagagcctgttattggtctattcagagattcaacttcttcctggtttagtcttgggagggtgtatgtgtcgaggaatttatccatttcttctagattttctagtttatttgcatagaggtgtttatagtattctctgatggtagtttgtatttctgtgggatcagtggtgatatcccctttatcattttttattgggt

SEQ ID NO: 119760 - DNA, 1393 bp, Homo sapiens
  misc_feature (1)...(1393): n = a,t,c or g
atggacgatatcccgcaagaggccggcaggtaccggcataaccaagcctatgcttacagcatccagggtgacggtgccgaggatgacgatgagcgcattgttagatttcatacacgggtcaccgtcgacagcgacacacttgcatcggatgcagcccggttaacgtgccggcacggcctgggtaaccagggttccgatttagtgctatacggcacctcgaccccaaaaaacttgatttgggtgagggttcacgtagtgggccatcgccctgatagacggtttttcgcctttgacgtttggagtccacgttctttaatagtggactcttgttccaaactggaacaacactcaaccctatctcgggctattcttttgatttataagggattttgccgatttcggaaccaccatcaaacaggattttcgcctgctggggcaaaccagcgtggaccgcttgctgcaactctctcagggccaggcggtgaagggcaatcagctgttgcccgtctcactggtgaaaagaaaaaccaccctggcgcccaatacgcaaaccgcctctccccgcgcgttggccgattcattaatgcagctggcacgacaggtttcccgactggaaagcgggcagtgagcgcaacgcaattaatggattttgccgatttcggaaccaccatcaaacaggattttcgcctgctggggcaaaccagcgtggaccgcttgctgcaactctctcagggccaggcgaacgttcagcagtttatcgatgaaggcaattatacatccggcgacaaccatacgctgagagaccctcactacgttgaagacaaaggccataaataccttgtattcgaagccaacacgggaacagaaaacggataccaaggcgaagaatctttatttaacaaagcgtactacggcggcggcacgaacttcttccgtaaagaaagccagaagcttcagcagagcgctaaaaaacgcgatgctgagttagcgaacggcgccctcggtatcatagagttaaataatgattacacattgaaaaaagtaatgaagccgctgatcacttcaaacacggtaactgatgaaatcgagcgcgcgaatgttttcaaaatgaacggcaaatggtacttgttcactgattcacgcggttcaaaaatgacgatcgatggtattaactcaaacgatatttacatgcttggttatgtatcaaactctttaaccggcccttacaagccgctgaacaaaacagggcttgtgctgcaaatgggtcttgatccaaacgatgtgacattcacttactctcacttcgcagtgccgcaagccaaaggcaacaatgtggttatcacaagctacatgacaaggggatcctctagagtcgacaaagcagggctgcnaa

SEQ ID NO: 119761 - DNA, 1169 bp, Homo sapiens
atgctccgactggccattgaaactgttgctcatgactatgatgtcatagttattgacagcgcgcctaacctgggtatcggcacgattaatgtcgtatgtgctgctgatgtgctgattgttcccacgcctgctgagttgtttgactacacctccgcactgcagtttttcgatatgcttcgtgatctgctcaagaacgttgatcttaaagggttcgagcctgatgtacgtattttgcttaccaaatacagcaatagtaatggctctcagtccccgtggatggaggagcaaattcgggatgcctggggaagcatggttctaaaaaatgttgtacgtgaaacggatgaagttggtaaaggtcagatccggatgagaactgtttttgaacaggccattgatcaacgctcttcaactgatacttcgttatcgacaccagctgccccgatggtggattcgttaattgcgcgcgtaggagtaatggctcgcggtaatgccattactttgcctgtatgtggtcgggatgtgaagtttactcttgaagtgctccggggtgatagtgttgagaagacctctcgggtatggtcagtggactcttgttccaaactggaacaacactcaaccctatctcgggctattcttttgatttataagggattttgccgatttcggaaccaccatcaaacaggattttcgcctgctggggcaaaccagcgtggaccgcttgctgcaactctctcagggccaggcggtgaagggcaatcagctgttgcccgtctcactggtgaaaagaaaaaccaccctggcgcccaatacgcaaaccgcctctccccgcgcgttggccgattcattaatgcagctggcacgacaggtttcccgactggaaagcgggcagtgagcgcaacgcaattaatggattttgccgattccggaaccaccatcaaacaggattttcgcctgctggggcaaacccagcgtggaccgcttgctgcaactctctcagggccaggcggtgaagggcaatcagctgttgcccgtctcactggtgaaaagaaaaaccaccctggcgcccaatacgcaaaccgcctctccccgcgcgttggccgattcattaatgcagctggcacgacaggtttcccgactggaaagcgggcagtgagcgcaacgcaattaat

SEQ ID NO: 119762 - DNA, 3947 bp, Homo sapiens
gattttcgcttgctggggcaaaccagcgtggaccgcttgctgcaactctctcagggccagccggtgaagggcaatcagctgttgcccgtctcactggtgaaaagaaaaaccaccctggcgcccaatacgcaaaccgcctctccccgcgcgttggccgattcattaatgcagctggcacgacaggtttcccgactggaaagcgggcatgggccatcgccctgatagacggtttttcgccctttgacgttggagtccacgttctttctatagtggactcttgttccaaactggaacaacactcaaccctatctcgggctattcttttgatttataagggattttgccgatttcggaaccaccatcaaacaggattttcgcctgctggggcaaaccagcgtggaccgcttgctgcaactctctcagggccaggcggtgaagggcaatcagctgttgcccgtctcactggtgaaaagaaaaaccaccctggcgcccaatacgcaaaccgcctctccccgcgcgttggccgattcattaatgcagctggcacgacaggtttcccgactggaaagcggccagtgagcgcaacgcaattaatggattttgccgatttcggaaccaccatcaaacaggattttcgcctgctggggcaaaccagcgtggaccgcttgctgcaactctctcagggccaggcggtgaagggcaatcagctgttgcccgtctcactggtgaaaagaaaaaccaccctggcgcccaatacgcaaaccgcctctccccgcgcgttggccgattcattaatgcagctggcacgacaggtttcccgactgcaaagcgggcaggattttgccgatttcggaaccaccatcaaacaggattttcgcctgctggggcaaaccagcgtggaccgcttgctgcaactctctcagggccaggcggtgaagggcaatcagctgttgcccgtctcactggtgaaaagaaaaaccaccctggcgcccaatacgcaaaccgcctctccccgcgcgttggccgattcattaatgcagctggcacgacaggtttcccgactggacagcgggcacaatacaaatggtttctccatggttttgaagccgggggagttcaagatcaaggcaccagccgaatttatgcttgggggactgagagccattactattgctgtatttggtaagcaaaatacgtacatcaggctcgaaccctttaagatcaacgttcttgagcagatcacgaagcatatcgaaaaactgcagtgcggaggtgtagtcaaacaactcagcaggcgtgggaacaatcagcacatcagcagcacatacgacattaatcgtgccgatacccaggttaggcgcgctgtcaataactatgacatcatagtcatgagcaacagtttcaatggccagtcggagcatcaggtgtggatcgatagaaaggcaggagagtgtcttctgcatgaatatgaagatctggtacccatccgtgatacattgaggctgttccctgggggtcgttaccttccacgagcaaaacacgtagccccttcagagccagatcctgagcaagatgaacagaaactgaggttttgtaaacgccacctttatgggcagcaaccccgatcaccggtggaaatacgtcttcagcacgtcgcaatcgcgtaccaaacagggggatcctctagaggattttgccgatttcggacccaccatcaaacaggattttcgcctgctggggcaaaccagcgtggaccgcttgctgcaactctctcagggccaggcggtgaagggcaatcagctgttgcccgtctcactggtgaaaagaaaaaccaccctggcgcccaatacgcaaaccgcctctccccgcgcgttggccgattcattaatgcagctggcacgacaggtttcccgactggaaagcgggcagtgagcgcaacgcaattaatggattttgccgatttcggaaccaccatcaaacaggattttcgcctgctggggcaaaccagcgtggaccgcttgctgcaactctctcagggccaggcggtgaagggcaatcagctgttgcccgtctcactggtgaaaagaaaaaccaccctggcgcccaatacgcaaaccgcctctccccgcgcgttggccgattcattaatgcagctggcacgacaggtttcccgactggaaagcgggcaacggtttttcgcccttgacgttgggagtccacgttctttaatagtggattcttgttccaaactggaacaacactcaaccctatctggggctattcttttgatttataagggattttgccgatttcggaaccaccatcaaacaggattttcgcctgctggggcaaaccagcgtggaccgcttgctgcaactctctcagggccaggcggtgaagggcaatcagctgttgcccgtctcactggtgaaaagaaaaaccaccctggcgcccaatacgcaaaccgcctctccccgcgcgttggccgattcattaatgcagctggcacgacaggtttcccgactggaaagcgggcagtgagcgcaacgcaattaatggattttgccgatttcggaaccaccatcaaacaggattttcgcctgctggggcaaaccagcgtggaccgcttgctgcaactctctcagggccaggcggatttgtcgcctgctgcggccaaacccagcgtggcccggcttttgccaactctctcaggggccagccgggattttgccgatttcggaaccaccatcaaacaggattttcgcctgctggggcaaaccagcgtggaccgcttgctgcaactctctcagggccaggcggtgaagggcaatcagctgttgcccgtctcactggtgaaaagaaaaaccaccctggcgcccaatacgcaaaccgcctctccccgcgcgttggccgattcattaatgcagctggcacgacaggtttcccgactggaaagcgggcaggattttgccgatttcggaaccaccatcaaacaggattttcgcctgctggggcaaaccagcgtggaccgcttgctgcaactctctcagggccaggcggtgaagggcaatcagctgttgcccgtctcactggtgaaaagaaaaaccaccctggcgcccaatacgcaaaccgcctctccccgcgcgttggccgattcattaatgcagctggcacgacaggtttcccgactggaaagcgggcaggattttgccgatttcggaaccaccatcaaacaggattttcgcctgctggggcaaaccagcgtggaccgcttgctgcaactctctcagggccaggcggtgaagggcaatcagctgttgcccgtctcactggtgaaaagaaaaaccaccctggcgcccaatacgcaaaccgcctctccccgcgcgttggccgattcattaatgcagctggcacgacaggtttcccgactggaaagcgggcatgcttctgtttacagctgtgcaggatgttcactgcacgaaggtatcttcaagaggattttcgccctgctggggcaaaccagcgtggaccgcacgctgcaactctctcagggccaggcggtgaagggcaatcagctgttgaccgtctcactggtgaaaagaaaaaccaccctggcgcccaatacgcaaaccgcctctcgccgcgcgttggccgattcattaatgcagctggcacgacaggtttcccgactggaaagcgggcaggattttgccgatttcggaaccaccatcaaacaggattttcgcctgctggggcaaaccagcgtggaccgcttgctgcaactctctcagggccaggcggtgaagggcaatcagctgttgcccgtctcactggtgaaaagaaaaaccaccctggcgcccaatacgcaaaccgcctctccccgcgcgttggccgattcattaatgcagctggcacgacaggtttcccgactggaaagcgggcagtga

SEQ ID NO: 119763 - DNA, 885 bp, Homo sapiens
atgatggatgaggggtccaccatcgcattgtctagatgcagtgatctgtgggccatcgccctgatagacggtttttcgccctttgacgttggagtccacgttcttttaatagtggactcttgttccaaactggaacaacactcaaccctatctcgggctattcttttgatttataagggattttgccgatttcggaaccaccatcaaacaggattttcgcctgctggggcaaaccagcgtggaccgcttgctgcaactctctcagggccaggcggtgaagggcaatcagctgttgcccgtctcactggtgaaaagaaaaaccaccctggcgcccaatacgcaaaccgcctctccccgcgcgttggccgattcattaatgcagctggcacgacaggtttcccgactggaaagcgggcagaggagcgactcaagccttcgcgaaaagaaaataaccaaaaagcatacaaagaaacgtacggcgtctctcatattacacgccatgatatgctgcagatccctaaacagcagcaaaacgaaaaataccaagtgcctcaattcgatcaatcaacgattaaaaatattgagtctgcaaaaggacttgatgtgtgggacagctggccgctgcaaaacgctgacggaacagtagctgaatacaacggctatcacgttgtgtttgctcttgcgggaagcccgaaaggggataaggcagaatgtaccactagcaaccctgccacattcatagccttcaaaggtcttccaaaagtttctctcctgtgtaaaccccctgatacctactggcgtactgtttctgaacaaggacttttccatgatcattatatttctaccaactataagctcactgaagatgtgatctatggtcactga

SEQ ID NO: 119764 - DNA, 1563 bp, Homo sapiens
atgagggacatcttttgggtaccggatatctgtaaagtaatgttatatttggttttctttcggtcgatgggtacaccattgagagctgtggccatggggcttgttattacaagttggaaaatagctcagaaaccaagggattttgccgatttcggaaccaccatcaaccaggattttcgcctgctggggcaaaccagcgtggaccgcttgctgcaactctctcagggccaggcggtgaagggcaatcagctgttgcccgtctcactgaaaacggataccaaggcgaagaatctttatttaaccaaagcgtactacggcggcggcacgaacttcttccgtaaagaaagccagaagcttcagcagagcgctaaaaaacgcgatgctgagttagcgaacggcgccctcggtatcatagagttaaataatgattacacattgaaaaaagtaatgaagccgctgatcacttcaaacacgggatttgccgatttcggaaccaccatcaaacaggattttcgcctgctggggcaaaccagcgtggaccgcttgctgcaactctctcagggccaggcggtgaagggcaatcagctgttgcccgtctcactggtgaaaagaaaaaccaccttggcgcccaatacgcaaaccgcctctccccgcgcgttggccgattcattaatgcagctggcacgacaggtttcccgactggaaagcgggcaggttcccgatttagtgcttttagggcaccctcgacccccaaaaaacttgatttgggtgatggttcacgtagtgggccatcgccccgatagacggtttttcgcctttgacggttggagtccacgttctttaatagtggactcttgttccaaactggaccaacactcaaccctatctcgggctattcttttgatttataagggattttgccgatttcggaaccaccatcaaacaggattttcgcctgctggggcaaaccagcgtggaccgcttgctgcaactctctcagggccaggcggtgaagggcaatcagctgttgcccgtctcactggtgaaaagaaaaaccaccctggcgcccaatacgcaaaccgcctctccccgcgcgttggccgattcattaatgcagctggcacgacaggtattcccgactggaaagcgggcagtgagcgcaacgcaattaatggggccatcgcccttatagagggttttcggcctttgacgttggagcccagttctttaatagtgaactcttgttccaaactggaacaacactcaaccctatctcgggctattcttttgatttataagggattttgccgatttcggaaccaccatcaaacaggattttcgcctgctgggccaaaccagcgtggaccgcttgctgcaactctctcagggccaggcggtgaagggcaatcagctgttgcccgtctcactggtgaaaagaaaaaccaccctggcgcccaatacgcaaaccgcctctccccgcgcgttggccgattcattaatgcagctggcacgacaggtttcccgactggaaagcgggcagtgagcgcaacgcaattaatgtga

SEQ ID NO: 119765 - DNA, 1458 bp, Homo sapiens
atgaatgctcatccgaagttccgtatggcaatgaaagacggtgagctggtgatatgggatagtgttcacccttgttacaccgttttccatgagcaaactgaaacgttttcatcgctctggagtgaataccacgacgatttccggcagtttctacacatatattcgcaagatgtggcgtgttacggtgaaaacctggcctatttccctaaagggtttattgagaatatgtttttcgtctcagccaatccctgggtgagtttcaccagttttgatttaaacgtggccaatatggacaacttcttcgcccccgttttcaccatgggcaaatattatacgcaaggcgacaaggtgctgatgccgctggcgattcaggttcatcatgccgtttgtgatggcttccatgtcggcagaatgcttaatgaattacaacagtactgcgatgagtggcagggcggggcggattttgccgatttcggaaccaccatcaaacaggattttcgcctgctggggcaaaccagcgtggaccgcttgctgcaactctctcagggccaggcggtgaagggcaatcagctgttgcccgtctcactggtgaaaagaaaaaccaccctggcgcccaatacgcaaaccgcctctccccgcgcgttggccgattcattaatgcagctggcacgacaggtttcccgactggaaagcgggcaaccaaaagtgtttgagtatgcttctttatttcagactgaaggtgggaagagtgcagtactcacagctctcatagtcggtcttggtggaagagcagttgctactaatagaggatcctctttaaaaggttttgtgaaagatggacagaaacgttttttcgcctttgaccgttggagtccacgttctttaatagtggactcttgttccaaactggaacaacactcaaccctatctcgggctattcttttgatttataagggattttgccgatttcggaaccaccatcaaacaggattttcgcctgctggggcaaaccagcgtggaccgcttgctgcaactctctcagggccaggcggtgaagggcaatcagctgttgcccgtctcactggtgaaaagaaaaaccaccctggcgcccaatacgcaaaccgcctctccccgcgcgttggccgattcattaatgcagctggcacgacaggtttcccgactggaaagcggccagtgagcgcaacgcaattaatggattttgccgatttcggaaccaccatcaaacaggattttcgcctgctggggcaaaccagcgtggaccgcttgctgcaactctctcagggtcaggcggtgaagggcaatcagctgttgcccgtctcactggtgaaaagaaaaaccaccctggcgcccaatacgcaaaccgcctctccccgcgcgttggccgattcattaatgcagctggcacgacaggtttcccgactggaaagcgggcagtga

SEQ ID NO: 119766 - DNA, 3573 bp, Homo sapiens
atgcctcctgatggggagatacctcccagcagggatcaacagacacctcatacaggagagctccagctgacatctggcaggtgctcctctgggatgaagcttccagaggaaggaacaggcagcaatgtttgctgttctgcagcccctgctgttgatacccaggtcgaatcaaggtccaagtacggcatcacatctggaattaagatccttgttccagtgacgtgtcaaaccttacgtcccaaccgaagagaaaaagatccttttcagcttgccaaggcactggaaaagctccagcatcttatggcagcccttaaatcaccaaaagaagaattaacacatataatgtgggtagagttaacaaacaacaggcgcgatacaatctgccatccaaaggctacaagaaaggtggtgcgtgaacggttcacaaggcccttgaacccttccagagtcgtcaattccaccccccggagcgaagtacccgcgggacagccccgaggcgcacgtaaacctttgtttgtccaaacggttcggcttctacggagccagcggctagcgcgggacactccaccctggcggtcgctgggattacaggccgccgccctgcatcgcagacggagccggcacagggaggaccagctacatctgtgggccgcggcggcggccaagcccggtaacatcctgactggacatcagcgaacaccgatggcttcgccgccacaagctgcctgggtgacccggaaacggcaacgtcatttagcgacgcctgccgtggagggtttactagcattgggcatcagtaagtctgttcaaacaccagatccttctcatccaaattcctctctctctgacgttccagaacaatttttcccaactgccatcctcattggctttccagcaggtcatggcatcagcaggtcagcagctgccgcagtcccaagtaagcggctttcccgttcaagctttaatcgggggctccctttagggttccgatttagtgctttacggcacctggaccccaaaaaacttgatttgggtaatggttcactggactcttgttccaaactgaaacaacactcaaccctatctcgggctattcttttgatttataagggattttgccgatttcggaaccaccatcaaacaggattttcgcctgctggggcaaaccagcgtggaccgcttgctgcaactctctcagggccaggcggtgaagggcaatcagctgttgcccgtctcactggtgaaaagaaaaaccaccctggcgcccaatacgcaaaccgcctctccccgcgcgttggccgattcattaatgcagctggcacgacaggtttcccgactggaaagcgggcagtgagcgcaacgcaattaatggattttgccgatttcggaaccaccatcaaacaggattttcgcctgctggggcaaaccagcgtggaccgcttgttgcaactctctcagggccaggcggtgaagggcaatcagctgttgcccgtctcattggtgaaaagaaaaaccaccctggcgcccaatacgcaaaccgcctctccccgcgcgttggccgattcattaatgcagctggcacgacaggtttcccgactggaaagcgggcacaattactcaaaaggtcaatccaaggtgtcatttaagacaaggcaagtcccttctgcctatgaacctgtaaaatcaaaagcaggggggtgctttagagtcgcacccaacagggctttcaagtcccgaagggattttgccgatttcggaaccaccatcaaacaggattttcgcctgctggggcaaaccagcgtggaccgcttgctgcaactctctcagggccaggcggtgaagggcaatcagctgttgcccgtctcactggtgaaaagaaaaaccaccctggcgcccaatacgcaaaccgcctctccccgcgcgttggccgattcattaatgcagctggcacgacaggtttcccgactggaaagcgggcaggattttgccgatttcggaaccaccatcaaacaggattttcgcctgctggggcaaaccagcgtggaccgcttgctgcaactctctcagggccaggcggtgaagggcaatcagctgttgcccgtctcactggtgaaaagaaaaaccaccctggcgcccaatacgcaaaccgcctctccccgcgcgttggccgattcattaatgcagctggcacgacaggtttcccgactggaaagcgggcagattgttcggtccgccacgggtcaactgattcataattggactcagcgaacccaaggcttctccccccaacctgctggtaacccgaaacggcaagtctttagcgacgcctccctggaggtagcgaaagtacgttacccgttgagcacaataggaggccctccttcccggggaccaggactcccaaagtgggaagggcgtggctgcaagggaagtttggtttctcccgtcttcttttgcacctgtacttttgcgcttggttggaaatcatcacgtcggcgacaactcaatcgacagctggaaaaacgcgggccgttctttaaagacagcgataagttcgacgccaacgatccgatcctgaaagatcagacgcaagaatggtccggttctgcaacctttacatctgacggaaaaatccgtttattctacactgactattccggtaaacattacggcaaacaaagcctgacaacagcgcaggtaaatgtgtcaaaatctgatgacacactcaaaatcaacggagtggaagatcacaaaacgatttttgacggagacggaaaaacatatcagaacgttcagcagtttatcgatgaaggcaattatacatccggcgacaaccatacgctgagagaccctcactacgttgaagacaaaggccataaataccttgtattcgaagccaacacgggaacagaaaacggataccaaggcgaagaatctttatttaacaaagcgtactacggcggcggcacgaacttcttccgtaaagaaagccagaagcttcagcagagcgctaaaaaacgcgatgctgagttagcgaacggcgccctcggtatcatagagttaaataatgattacacattgaaaaaagtaatgaagccgctgatcacttcaaacacggtaactgatgaaatcgagcgcgcgaatgttttcaaaatgaacggcaaatgggattttgccgatttcggaaccaccatcaaacaggattttcgcctgctggggcaaaccagcgtggaccgcttgctgcaactctctcagggccaggcggtgaagggcaatcagctgttgcccgtctcactggtgaaaagaaaaaccaccctggcgcccaatacgcaaaccgcctctccccgcgcgttggccgattcattaatgcagctggcacgacaggtttcccgactggaaagcgggcaggattttgccgatttcggaaccaccatcaaacaggattttcgcctgctggggcaaaccagcgtggaccgcttgctgcaactctctcagggccaggcgaatcacctaatgacacagttctcagaacctgtcctcatcattgagcaacgcacgactgatgaagagtag

SEQ ID NO: 119767 - DNA, 1008 bp, Homo sapiens
atgcgctcgctccttcgcattgtgccctatctaactcgcgacgttcgcggctgtcccgtcagcctctataacggagaatccttaggcttccgatttatgctttacggcacctcgaccctaaaaaacttgatctgggtgatggttcacacggtatatcgccctatgacgttggagtccacgttctttaatagtggactcttgttccaaactggaacaacactcacccctatctcgggctattcttctgagtttataagggattttgccgatttcggaaccaccatcaaacaggattttcgcctgctggggcaaaccagcgtggaccgcttgctgcaactctctcagggccaggcggtgatgcatgttagtcgtagcatcgtgagtgatgtgtatgcggagtcacagatgagatgtgtgtcgagagtggacgttgagtcgcgagttgatcagacggagatgtcacccacgacatcatccgactggactattgttatgaactgtaacaacactcatccatatcgcggcctactctcacgattaatacgggatcttggcgatttcggaaccaccatgaaacaggattttcgcctggtggggcaaactgaggtggaatgctttgtggcactctctcagggccagacggtgaagggcaatcagctgttgcacgtctcactggtgaaaagaaacatccccgtggcgatcaatagcaaaaagcgcctctgctcgcgcgatggccaatccattaatgcagctggcacaacagatttcccgactggcaagcgggcaatcgatacgcatcgcagcgtgtcacatgcacacatcatcatcactatccactcatctacactatcctcggacatcagccacacagatgcaccgaacacatccagcaacaactacgtcatcgctatcacatcaccatctgatacagctcctacatctcgtacaccactacatcgcatccaccacactacaccaatacccatcgccacactcgcacggccttaa

SEQ ID NO: 119768 - DNA, 1566 bp, Homo sapiens
  misc_feature (1)...(1566): n = a,t,c or g
atgacccccacgttcgagtctagaggataccccccgcgaatcgtccagtcaaacgacctcactgaggcggcatatagtctctcccgggatcaaaaacgtatgctgtatctgttcgttgaccagatcagaaaatctgatggcaccctacaggaacatgacggtatctgcgagatccatgttgctaaatatgctgaaatattcggattgacctctgcggaagccaaggatgccggcgatgaaaaaggctatgaatcttttccttggtttatcaaacgtgcgcacagtccatccagagggctttacagtgtacatatcaacccatatctcattcccttctttatcgggttacagaaccggtttacgcagtttcggcttagtgaaacaaaagaaatcaccaatccgtatgccatgcgtttatacgaatccctgtgtcagtatcgtaagccggatggctcaggcatcgtctctctgaaaatcgactggatcatagagcgttaccagctgcctcaaagttaccagcgtatgcctgacttccgccgccgcttcctgcaggtctgtgttaatgagatcaacagcagaactccaatgcgcctctcatacattgagaaaaagaaagccgccagacgactcatatcgcagctgcagcatgacaccattttgagagcccaacttccaccaagctacatcctgtcccagtgccccacagctcctgcatctccacctccctggagtcccagtgacatttccccacatccaccagaagggctacagagagagttgcagcaagcggtccacgctggtttgccccagcaggcgaaaatcctgtgtgatggtggttccgaaatcggcaaaatcccttataaatcaaaagaatatcccgagatagggttgagtgttgttccagtttggaacacgagtccactattaaagaacgtggactccaacgtcaaagggcgagaaaccgtctatcagggcgatggcccactacgtgaaccatcacccaaatcaagttttttgggggtcgagtgtgacaatctaaaaacttgtcacacttcacatggatctgtcatggcggaaacagcggttatcaatcacaagaaacgtaaaaatagcccgcgaatcgtccagtcaaacgacctcactgaagccgcatatagtctctcccgggatcaaaaacgtatggcacagtcacaagggtgggtgaaaagatacatcaaggccttttgtaaaggcttctttgtggcggtgcctggtgcaatgactttcttggatcgggggacagggtggcagacgctcactttggtctanaggataccctccatattgggtaacgattatcgcccaacaagtgcttatgaacgtggtcagcgttatgcaagccgattgcagaatgaatttgctggaaatatttctgcgctggctgatgcggaaaatatttcacgtaagattattacccgctgtatcaacaccgccaaattgcctaaatcagttgttgctcttttttctcaccccggtgaactatctgcccggtcaggtgatgcacttcaaaaagccttctacagataa

SEQ ID NO: 119769 - DNA, 2314 bp, Homo sapiens
  misc_feature (1)...(2314): n = a,t,c or g
gtcttcagcatcactccgacccagggctatggaatccagcaacttcggacggtttttcgcccttggacgttggagtccacgttctttaatagtggactcttgttccaaactggaacaacactcaaccctatctcgggctattcttttgatttataagggattttgccgatttcggaaccaccatcaaacaggattttcgcctgctggggcaaaccagcgtggaccgcttgctgcaactctctcagggccaggcggtgaagggcaatcagctgttgcccgtctcactggtgaaaagaaaaaccaccctggcgcccaatacgcaaaccgcctctccccgcgcgttggccgattcattaatgcagctggcacgacaggtttcccgactggaaagcgggcagtgagcgcaacgcaattaatccacagagaggcagcacagtgccatggacaactcaggggatctttagagcgcacaacgggctgcaagcttacgcttcatttaactctctctccagtcaacggtttttcgccctttgacgttggagtccacgttcttttaatagtggactcttgttccaaactggaacaacactcaaccctatctcgggctattcttttgatttataagggattttgccgatttcggaaccaccatcaaacaggattttcgcctgctggggcaaaccagcgtggaccgcttgctgcaactctctcagggccaggcggtgaagggcaatcagctgttgcccgtctcactggtgaaaagaaaaaccaccctggcgcccaatacgcaaaccgcctctccccgcgcgttggccgattcattaatgcagctggcacgacaggtttcccgactggaaagcgggcagtgagcgcaacgcaattaatggattttgccgatttcggaaccaccatcaaacaggattttcgcctgctggggcaaaccagcgtggaccgcttgctgcaactctctcagggccaggcggtgaagggcaatcagctgttgcccgtctcactggtgaaaagaaaaaccaccctggcgcccaatacgcaaaccgcctctccccgcgcgttggccgattcattaatgcagctggcacgacaggtttcccgactggaaagcgggcagggaggtgaagattccccaaaccgattttttgacggcggacgaaaaaaacaaatcagaacggtccgccagtttatcgatgaaggcaataatacaccggcggacacccaaacgctgagagaccctcactacgttgaagacaaaggccataaataccttgtattcgaagccaacacgggaacagaaaacggataccaaggcgaagaatctttatttaacaaagcgtactacggcggcggcacgaacttcttcngtaaagaaagccagaagcttcagcagagcgctaaaaaacgcgatgctgagttagcgaacggcgccctcggtatcatagagttaaataatgattacacattgaaaaaagtaatgaagccgctgatcacttcaaacacggtaactgatgaaatcgagcgcgcgaatgttttcaaaatgaacggcaaatggtacttgttcactgattcacgcggttcaaaaatgacgatcgatggtattaactcaaacgatatttacatgcttggttatgtatcaaactctttaaccggcccttacaagccgctgaacaaaacagggcttgtgctgcaaatgggtcttgatccaaacgatgtgacattcacttactctcacttcgcagtgccgcaagccaaaggcaacaatgtgaatgcagggagcgactggggtgaatggatgtgcgctgaagatgcaaatacgccggattttccggatttcggaaccaccatcacacaggattttcgcctgctggggcaaaccagcgtggaccgcttgctgcaactctctcagggccaggcggtgaagggcaatcagctgttgcccgtctcactggtgaaaagaaaaaccaccctggcgcccaatacgcaaaccgcctctccccgcgcgttggccgattcattaatgcagctggcacgacaggtttcccgactggaaagcgggcaggattttgccgatttcggaaccaccatcaaacaggattttcgcctgctggggcaaaccagcgtggaccgcttgctgcaactctctcagggccaggcggtgaagggcaatcagctgttgcccgtctcactggtgaaaagaaaaaccaccctggcgcccaatacgcaaaccgcctctccccgcgcgttggccgattcattaatgcagctggcacgacaggtttcccgactggaaagcgggcagtga

SEQ ID NO: 119770 - DNA, 2016 bp, Homo sapiens
ctattcttttgatttataagggattttgccgatttcggaaccaccatcaaacaggattttcgccgtaaactccacaagggcaaatacccacttcttgcttatctttgtaccttctttagatcctagtaatttaacagcgagctcagctgccagggtttgtggctggcgccagtcgtattgtggacatgggcttatgctgagcacagaccaggtgctcctctgggaggagtgagactcacgggaacaccatcctccgctttctcgtgaggagggtgccccctccttgaacttacatatgtcctcgctggcaaacctgacaagcctccgtgccacgtagagtgggtcctctcctccctcgagcatgcgagccagccagtagagggaggcgttctggtctgagccccgcatggacttgtgcagggcggagatgcagttgtaatgctcctcaccaagatggtgattgactagtgggtagatccacaggccgggtgtggtcgccatgatcgcgtagtcgataggggctcccagtagcgcagcgagcaggactggagcatccagggtgacggtgcgaaggatgacgatgagcgcattgttagatttcatacacggtgcctgaggccttgtctgcccgaagtaatcctgcagcgtgtcagcacgcatcgtgtcggccagcggcttgccctgtagcatctgtcggatctcctcggcagccagcgcccgggggtgcgggcggccaccgccactggccccgaaggcggtggcggcttcggcagcgtccgcgtcccagtgccccgggtcgtcctcgccgtccgcgtccgcgtccccgtcgccatcgccgtcgcccacggcctcatcctcatcatgcgcctccgcctcgtcccagctgcgcggagacgcgctccccgccgcggcggcggccgccggcctcttccccgaccccttcctcccggggctgctggagcgggccaccgggaagtcggggataaggcgggcgccgctgggtgtgggcggcgcgtcgtagctctcgcggctctcggtctcgccgccgtcgtcgccctcctcaccctcgccctcgctgctctcggctgccgtcggggtggctggctgcttcagcgccgagctctccgacagccgccgcctcttggcgccgggcggcgagggccccttggcccgctccccggcgcggtgcgacccggccgcgggctccgcgtgccccgccgggtggagcagcagacagcggtccaggtgcgagttgatgtgcgcggcgggcatctcctgctggcacacggggcactgcacctggtgcagcttgtccttcatgcctctggtcttgatgattttggctgccagcttcagacctgtggccgtctcctcacacttgtgaacctggccgaaacgccctctgccaaaaagaggaagcggcgtagcatgaggccctgtggtcagctgccgagtggacagcgcacagtggccccagtatttctcctgctgagtctggatgagcagccctctgaggagttctttcagtaaacttctagagcagtatttgtcaacatgtggtgtgtggatcacttgcatcagaatcacctgggagctctgcactgtagcaggggtcccaaccccctgggccacagactggtactgacctgtggcgagaaggtaatggtaaatataatgggcttgaatcgtcttgaaagcatccactcccctgtcttggaaaaactgtcttccacaaaaccagtccctggtgccaaaatggttgaggacctctgcattataggcatcgacacttgggctgctgcgagggctgatgtccttttgcttttgacgggcatcctttccgtcaggtcggcgtttgaccacacctccttcgccatcttggtcctggtaaggcagcttcctggaatcacaggaccacagggacaaaggcatctgaggggtcgttgacacaaccttctgtccccgatggcaggacacagtgatcgcttctcctggcacatgtctcagggagaccat

SEQ ID NO: 119771 - DNA, 3873 bp, Homo sapiens
atggaaaggcgcacacccctgaccttgagggtgctgggagatgggggccaaggtcctgctgccctgcaggaatggttggttgacatgattgaatcacacaatttcacaaggagatggaccgtaaaaggctacacagtacaatcattgtcaaactccagaactactaaaaaaggggatcctctagagtcacaccgcgggtctgccaccaaggtgttaaagacacatgcacacgctttgcagaactttcagcggtataccggcatacagcatgtgcatcgcataggaatggcggaacgtatgtggtgtgaccggaacagagaacgtcacaccgtcagcagcagcggcggcaaccgcctccccaatccaggtcctgaccgttctggttcccgatttagtgctttacgggcacctcgacccccaaaaaacttgatttgggtgatggttcacgaagtgggccatcgccctgatagacggtttttcgcccttgtacgttggagtccacgtcttttaatagtggactcttgttccaaattggaccaacactcaaccctatctcgggctattcttttgattattaagggattttgccgatttcggaaccaccatcaaacaggattttcgcctgctgggccaaaccagcgtggaccgcttgctgcaactctctcagggccaggcggtgaagggcaatcagctgttgcccgtctcactggtgaaaagaaaaaccaccctggcgcccaatacgcaaaccgcctctccccgcgcgttggccgattcattaatgcagctggcacgacaggtttcccgactggaaagcgggcagtgagcgcaacgcaattaatggattttgccgatttcgacaccaccatcaaacaggattttcgcctgctggggcaaaccagcgtggaccgcttgctgcaactctctcagggccaggcggtgaagggcaatcagctgttgcccgtctcactggtgaaaagaaaaaccaccctggcgcccaatacgcaaaccgcctctccccgcgcgttggccgattcattaatgcagctggcacgacaggtttcccgactggaaagcgggcaggatgttgccgatttcggacccaccatcatacagatatttcgcctgctggggcaaaccagcgtggaccgcttgctgcaactctttcagggccaggcggtgaagggcaatcagctgttgcccgtctcactggtgaaaagaaaaaccaccttggcgctcaatacgcaaaccgcctctctccgcgcgttggccgattcattaatgcagctggcacgacaggtttcccgactggaaagcgggcagaatttagcagatttcgagacccaccatcaaacaggattttcgcttgctggggcaaaccagcgtggaccgcttgctgcaactctctcagggccaggcggtgaagggcaatcagctgttgcccgtctcactggtgaaaagaaaaaccaccctggcgcccaatacgcaaaccgcctctccccgcgcgttggccgattcattaatgcagctggcacgacaggtttcccgactggaaagcgggcagtgagcgcaacgcaattaatgcccattccagatggacgggattttgccgatttcggaaccaccatcaaacaggattttcgcctgctggggcaaaccagcgtggaccgcttgctgcaactctctcagggccaggcggtaaagggcaatcagctgttgcccgtctcactggtgaaaagaaaaaccaccctggcgcccaatacgcaaaccgcctctccccgcgcgttggccgattcattaatgcagctggcacgacaggtttcccgactggaaagcgggcaggattttgccgatttcggaacccccatcaaacaggattttcgcctgctggggcaaaccagcgtggaccgcttgatgcaactttctcagggccaggcggtgaagggcaatcagctgttgcccgtctcactggtgaaaagaaaaaccaccctggcgcccaatacgcaaaccgcctctccccgcgcgttggccgattcattaatgcagctggcacgacaggtttcccgactggaaagcgggcatgaatcagaagtaactcacctaacccttcacttaaatagctcatgggtaactccagacgagacaattggaaaggggccaggcggtgaagggcaatcagctgttgcccgtctcactggtgaaaagaaaaaccaccctggcgcccaatacgcaaaccgcctctccccgcgcgttggcgatttcattaatgcagctggcacgacaggtttcccgactggaaagcgggcagtgagcgcaacgcaattaatggattttgccgatttcggaaccaccatcaaacaggattttcgcctgctggggcaaaccagcgtggaccgcttgctgcaactctctcagggccaggcgcctgacaccagcgcaggtaaatgttcaaaatctgatgacacactcaaaatcaacggagtgaaagatcacaaaacgatttttgccggagacggaaaaacatatcagaacgttcagcagtttatcgatgaaggcaattatacatcggccgacaaccatacgctgagagaccctcactacgttgaagacaaaggccataaatactttgtattcgaagccaacacgggaacagaaaacggataccaaggcgaagaatctttatttaacaaagcgtactacggcggcggcacgaacatcttccgtaaagaaagccagaagcttcagcagagcgctaaaaaacgcgatgctgagttagcgaacggcgccctcggtatcatagagttaaataatgattacacattgaaaaaagtaatgaagccgctgatcacttcaaacacggtaactgatgaaatcgagcgcgcgaatgttttcaaaatgaacggcaaatggtacttgttcactgattcacgcggttcaaaaatgacgatcgatggtattaactcaaacgatatttacatgcttggttatgtatcaaactctttaaccggcccttacaagccgctgaacaaaacagggcttgtgctgcaaatgggtcttgatccaaacgatgtgacattcacttactctcacttcgcagtgccgcaagccaaaggcaacaatgtggttatcacaagctacatgacaaacagaggggattttgccgatttcggaaccaccatcaaacaggattttcgcctgctggggcaaaccagcgtggaccgcttgctgcaactctctcagggccaggcggtgaagggcaatcagctgttgcccgtctcactggtgaaaagaaaaaccaccctggcgcccaatacgcaaaccgcctctccccgcgcgttggccgattcattaatgcagctggcacgacaggtttcccgactggaaagcgggcaggattttgccgattacggaaccaccatcaaacaggattttcgcctgctggggcaaaccagcgtggaccgcttgctgcaactctctcagggccaggcggtgaagggcaatcagctgttgcccgtctcactggtgaaaagaaaaaccaccctggcgcccaatacgcaaaccgcctctccccgcgcgttggccgattcattaatgcagctggcacgacaggtttcccgactggaaagcgggcaggaatttgccgatttcggaaccaccatcaaacaggattttcgcctgctggggcaaaccagcgtggaccgcttgctgcaactctctcagggccaggcggtgaagggcaatcagctgttgccggtctcactggtgaaaagaaaaaccaccctggcgcccaatacgcaaaccgcctctccccgcgcgttggccgattcattaatgcagctggcacgacaggtttcccgactggaaagcgggcagtga

SEQ ID NO: 119772 - DNA, 784 bp, Homo sapiens
  misc_feature (1)...(784): n = a,t,c or g
nagaatccccgatcacaaaacgatttttgacggagacggaaaaacatatcagaacgttcagcagtttatcgatgaaggcaattatacatccggcgacaaccatacgctgagagaccctcactacgttgaagacaaaggccataaataccttgtattcgaagccaacacgggaacagaaaacggataccaaggcgaagaatctttatttaacaaagcgtactacggcggcggcacgaacttcttccgtaaagaaagccagaagcttcagcagagcgctaaaaaacgcgatgctgagttagcgaacggcgccctcggtatcatagagttaaataatgattacacattgaaaaaagtaatgaagccgctgatcacttcaaacacggtaactgatgaaatcgagcgcgcgaatgttttcaaaatgaacggcaaatggtacttgttcactgattcacgcggttcaaaaatgacgatcgatggtattaactcaaacgatatttacatgcttggttatgtatcaaactctttaaccggcccttacaagccgctgaacaaaacagggcttgtgctgcaaatgggtcttgatccaaacgatgtgacattcacttactctcacttcgcagtgccgcaagccaaaggcaacaatgtggttatcacaagctacatgacaaacagaggcttcttcgaggataaaaagggcacatttgcgccaagctggacttgcgcgaaaatcctgtttgatggtggttccgaaatcggcaaaatcccttataaatcaaaagaatag

SEQ ID NO: 119773 - DNA, 1812 bp, Homo sapiens
ctagtcagcacccaaagtctggagggggctgaggcagcagggggctggcatatcagtgctgccctgagtgtgcgcgcaaccggccaggtcgccaaagcgcctgagctcatcctcaactttgatctgcccaaaaaatattttgacaaacttgtgcacacattttttttccccccacaccgggaaatttcccacggtaaaaattcttatggcgccgttcgctaactcagcatcgcggggggtagcgctctgctgaagcttctggctttctttacggaagaagttcgtgccgccgccgtagtacgctttgttaaataaagattcttcgccttggtatccgttttctgttcccgtgttggcttcgaatacaaggtatttatggcctttgtcttcaacgtagtgagggtctctcagcgtatggttgtcgccggatgtataattgccttcatcgataaactgctgaacgttctgatatgtttttccgtctccgtcaaaaatcgttttgtgatcttccactccgttgattttgagtgtgtcatcagattttgacacatttacctgcgctgttgtcaggctttgtttgccgtaatgtttacccgaatagtcagtgtagaataaacggatttttccgtcagatggtaaagttgcagaacccgaccattcttgcgtctgatactcagttggaacacgagacctgtccaggttaagcaccattttatcgcccttatacaatactgtcgctccaggagcaaactgatgtcgtgagcttaaactagttcttgatgcagatgacgttttaagcacagaagttaaaagagtgataacttcttcagcttcaaatatcaccccagcttttttctgctcatgaaggttagatgcctgctgcttaagtaattcctctttatctgtaaaggctttttgaagtgcatcacctgaccgggcagatagttcaccggggtgagaaaaaagagcaacaactgatttaggcaatttggcggtgttgatacagcgggtaataatcttacgtgaaatattttccgcatcagccagcgcagaaatatttccagcaaattcattctgcaatcggcttgcataacgctgaccacgttcataagcacttgttgggcgataatcgttacccaatctggataatgcagccatctgctcatcatccagctcgccaaccagaagacgataatcactttcggtaagtgcagcagctttacgacggcgactcccatcggcaatttctatgacaccagatactcttcgaccgaacgccggtgtttgttgaccagtcagtagaaaagaagggatgagatcatcccatgcgttcttagtaagcagctcctggtcacgttcattacctgtcgtgccagctgcattaatgaatcggccaacgcgcggggagaggcggtttgcgtattgggcgccagggtggtttttcttttcaccagtgagacgggcaacagctgattgcccttcaccgcctggccctgagagagttgcagcaagcggtccacgctggtttgccccagcaggcgaaaatcctgtttgatggtggttccgaaatcggcaaaatcccttataaatcaaaagaatagcccgagaataggttgagtgttgttcccgtttgggaacaagagtccactcttgcatcagtgtgacctggatgtaagcgaggagatcattttgtagctttaatatttgactgccccactgggggggggacttgcattgggcctgcagcctctttgttttggccaatttctcccattttgaatgcctgtatttacccaatgcctgcaccctcat

SEQ ID NO: 119774 - DNA, 915 bp, Homo sapiens
atggttcacgtagtgggccatcgccctgatagacggtttttcgcccttggacgttggagtccacgttctttaatagtggactcttgttccaaactggaacaacactcaaccctatctcgggctattcttttgattaaaaagggattttgccgatttcggaaccaccatcaaacaggattttcgcctgctggggcaaaccagcgtggaccgcttgctgcaactctctcagggccaggcggtgaagggcaatcagctgttgcccgtctcactggtgaaaagaaaaaccaccctggcgcccaatacgcaaaccgcctctccccgcgcgttggccgattcattaatgcagctggcacgacaggttcacccattcaccccacgaaatccccacgccctcgggccaacgtggttctcccgtgtttggacaaaacggagtgtacgcaaataaggtttaaacagtttcgcggtgggccatgttggaacacattttattgttttctcgagagcccagcaacaaagaaccagaaacgtaggcacatagtatgtaagcagacgacaagaggttcgcggcgtataaaaagaagacgaagggagggacggagcgatgggacaagtatggacgccggcctgcgaacggtattcgaacgggcgaaaacaacgcgaagacagagcaccttcgggaccgggatcaaaagcgacgagagagagagagagagcgaggtaaacgacagaaatcaccgagcaggagggcagcggttgaggcgagcccgtggagcagatgcggaagaggagggctcaggcatggtcaaggcgaaaatcgactggatcacagacggaaaccagaagcgtaagagttaccagagtaggcttaaaaaccgcctccgagtcccgcaggatcagaacgatggagcaaaatga

SEQ ID NO: 119775 - DNA, 1469 bp, Homo sapiens
agcaatgttcaaagaaagctcatgaccaatttctagccgaccttgcgagcattctaccgagtaacaccacaccgctcattgtcagtgatgctggctttaaagtgccatggtataaatccgttgagaagctgggttggtactggttaagtcgagtaagaggaaaagtacaatatgcagacctaggagcggaaaactggaaacctatcagcaacttacatgatatgtcatctagtcactcaaagactttaggctataagaggctgactaaaagcaatccaatctcatgccaaattctattgtataaatctcgctctaaaggccgaaaaaatctgcgctcgacacggactcattgtcaccacccgtcacctaaaatctactcagcgtcggcaaaggagccatgggttctagcaactaacttacctgttgaaattcgaacacccaaacaacttgttaatatctattcgaagcgaatgcagattgaagaaaccttccgagacttgaaaagtcctgcctacggactatgcctacgccatagccgaacgagcagctcaaagcgttttgatatcatgctgctaatcgccctgatgcttcaactaacatgttggcttgcgggcgttcatgctcataaacagaggcaatcactcctgcagccatttcctgacatatgccagggaggaactgatgtttctctgtggctggtgacctactgcacatgtgacaatctaaaaacttgtcacacttcacatggatctgtcatggcggaaacagcggttatcaatcacacgaaacgtaaaaatagcccgcgaatcgtccagtcaaacgacctctctgaggcggcatatagtctctcccgggatcaaaaacgtatgctgtgtctgttcgttgaccagatcagaaaatctgatggcgccctacaggaacatgacggtgtctgcgagatccatgttgctaaatatgctgaaatattcggattgacctctgcggaagcccgtgtggatgtacggcaggcgttgaagagtttcgcggggaaggaggtggttttttatcgccctgaagaggatgccggcgatgaaaaaggctatgaatcttttccttggtttttcaaacgtgcgcacagtccctccggagggctggttcgtgtgcttatcatcccctatctcattcccttttgtgtcgtggttccagaaccgggttactcattttcggctgcgaaaatcctgtgtgatggtggttccgaaatcggcaaaatcccttataaatcaaaagaatatcccgagatagggttgagtgttgttccagtttggaacaagagtccactattaaagaacgtggactccaacgtcaaagggcgaaaaaccgtctatcatggcgatggcgcactacgtgaaccatcacacaaatcaagttttttgggggtcgagtgccgtaaagcactaaatcggaaccctaaaggagcccccgatttatag

SEQ ID NO: 119776 - DNA, 3763 bp, Homo sapiens
gaggatccgggtaccatggggcgggaggagtaaagatggcggcgcgagggtctccgccctctgctccgggctgaagcgctctgagagaggcggcagcggcaactcgagccccaacagtaatttagtgttggtagttttggcagcagctgccgaggccggagcaatggcggaactggagcacctaggagggaagcgggcagagtcggcgcgaatgcggcgggcagagcagcttcggcgctggcggggctcgctgacagagcaggagcctgcggagcgacgaggcgcggggcggcagccgctgaccaggcgcgggagccccagggtccgcttcgaggacggtgctgtctttctggccgcctgctctagcggggacaccgacgaggtgagaaagcttctggcaagaggtgctgatatcaacacggtcaacgtggacggcttgacagccctgcaccaggcatgtattgatgaaaatttggacatggtgaagtttctggtggagaacagagccaatgtaaaccagcaagacaacgagggctggacaccccttcatgcagcagcttcctgtggctatctcaacatagcagagtatttcattaatcacggagccagtgtaggtattgtcaatagtgaaggtgaagttccctctgaccttgcagaagagccagccatgaaggatcttcttctggagcaagtaaagaagcaaggaattgatctagagcagtcaagaaaagaagaagagcagcagatgttgcaggatgcccgccagtggctcaacagtgggaaaatagaggatgtgaggcaggctcgctcaggggctacagcccttcatgtggctgctgccaagggctactctgaagtcctcagacttttaattcaggctggctatgaactcaatgttcaggattatgatggctggactcccctccatgctgctgcacactggggagtgaaggaggcttgctccatcctggcagaagcactttgtgacatggatattcgaaataaactgggccagacaccatttgatgtggctgatgagggtctcgtggagcatttggagttgctccagaagaagcagaatgtgcttcgaagtgaaaaggagacacggaataaactcattgagtcagatctgaacagcaagattcagagtgggttctttaagaacaaagagaagatgctctatgaggaggagacacctaagtcccaagaaatggaggaagaaaataaagaatctagtagctccagctcagaggaggaggaaggtgaagatgaagcttctgagtcagaaactgagaaggaggcagataaaaagccagaagcctttgtcaatcattccaactctgaaagcaagagtagtatcacagagcagataccagcaccagctcaaaataccttctctgcctcttctgctaggaggttctcttctggcctttttaacaagccagaagagcccaaagatgaatctccttcttcatggagattgggactgagaaaaactggcagccacaacatgctgagtgaggtggccaattccagggaacctataagggaccgaggctcttccatctatcgctcctcttcaagccctcgaatttctgctctactggacaacaaagataaggagagagaaaacaaaagctatattagttcactagcaccccggaagctcaacagcacaagtgatattgaagaaaaggagaacagagaatcagctgttaatctagtgaggagtggctcctatacccggcagctatggagggatgaagcaaaaggaaatgaaatcccacagacaattgctccctccacctatgtatcaacttacttgaaaaggactcctcacaaatcccaggccgacacaacagcagagaaaacagcagacaatgtctcttctagcaccccgctctgtgtgatcaccaatcgccctcttcctagcactgccaatggggttacagctactcctgtgctctccattactggaacagattcctctgtggaagccagggagaagaggaggtcctatctgactcctgtacgggatgaggaagcagagtctttacggaaagcacgctccagacaagctcggcagacacgaaggtctactcaaggtgtcaccctaacagaccttcaagaagcagaaaggacattcagccggtcgagggcagagaggcaagctcaggagcagcctcgtgagaagcccacagacactgaagggcttgaggggagccctgagaagcatgagccctcagcagttccagcaacagaagctggggagggccagcagccctggggcaggagtctggatgaagagcctatctgtcatcgcctgaggtgcccagctcagccagacaaacccaccacgccagcatctccttctacgtcaagaccctcactctacaccagttcccacctgctatggacaaatagattttcagtccctgattctgagagttcagagactaccacaaacactacaactgcaaaggaaatggacaaaaatgagaatgaagaagcagatttggatgagcagtcctctaagaggctgtccatccgagagaggaggcggcccaaggaacgacgaagaggcacaggcatcaatttctggacaaaggatgaggatgaaactgatggctctgaagaggtcaaagaaacgtggcatgaaagactttctaggttggaatcgggaggtagtaatcctacaaccagtgattcttacggtgaccgggcttcagcaagagcccgtcgggaggcccgggaggcccgcctagccaccctgaccagccgtgtagaagaagacagcaacagagattataaaaaactctatgagagtgctctgactgaaaaccaaaaactgaaaacaaaacttcaggaagcccagctagagctagcagatataaagtccaagcttgagaaggtggcccagcagaaacaagaaaagacctctgaccgatcatcagtgctggagatggagaaacgggagaggcgagccttggagcgcaaaatgtcagaaatggaggaagaaatgaaggtgttaacagaactgaaatccgacaaccagaggctgaaagatgaaaatggtgccctcatcagagtcatcagcaaactgtccaagtaggctaggctccagatttatgaggaaagaaagggacagcatttgctgcccccacccctcttttccagtccttgccttccaaccaaaagaaatggatgttttggtggaaggacacttctttctatcaccctctttagtcacctctatacactctacattttctctgcactttcaatgccctgttcttccaaacccctatcccaagttttatgacagttttaattgaagcatgattgtggtaattcgagccatctggagaatgctctggggagtacaccaggctcagctgtggacccctcaacttcctgctgctcagctactttgtccacattggatttggtccaaacatgtaagacttctaccctaatcagtatccttcagctttttacattaacccagtgtcctctgatataggtgagtcttgtggtagccactccaggatcctgattggggtgccaagagaaacagcaggatgttgaattgatcatcagatgccctctggaatggttagcatccaaggtgacagtgactgcattgaggcgctctattcttcttcacctctcaggaactgacttttattttttctatcaacacccagtaatctccctaactagttttaacccttattcctccctcatacctagccatttcccg

SEQ ID NO: 119777 - DNA, 2757 bp, Homo sapiens
atgaggtggacaccagggcatgaaataacaaaggctttgcagacttttcagcggtataccggcatacagcatgtgcatcgcataggaatggcggaacgtatgtggtgtgaccggaacagagaacgtcacaccgtcagcagcagcggcggcaaccgcctccccaatccagaacattttgaggcatttcagtcagttgctcaatgtacctataaccagaccgttcagctggatattacggcctttttaaagaccgtaaagaaaaataagcacaagttttatccggcctttattcacattcttgcccgcctgatgaatgctcatccggagttccgtatggcaatgaaagacgtggactcttgttccaaactggaacaacactcaaccctatctcgggctattcttttgatttataagggattttgccgatttcggaaccaccatcaaacaggattttcgcctgctggggcaaaccagcgtggaccgcttgctgcaactctctcagggccaggcggtgaagggcaatcagctgttgcccgtctcactggtgaaaagaaaaaccaccctggcgcccaatacgcaaaccgcctctccccgcgcgttggccgattcattaatgcagctggcacgacaggtttcccgactggaaagcgggcagtgagcgcaacgcaattaatttaccgagaactcttcccgcagccattggttcagctggacccctgtagcgtcccatgcatgcagccgcccacttcgcccaaatccagggcctgggtttctgacatcgcgcttcttgagtttcagaagaagaaagagatggagaagaagaaagagaaggaaaggaagaaagagctacagggaggaagaggaagacgaagaggaggaggatgggggaaaggaagagaaagaggaggaagaggaaaaaagagaagaggaggaggagaggctatcagagatgccgagaaagcagggcgactaccgcacccggatatggaaattcgaggacgggttgagcaacgtgttggttatacaattgaacaaattaatcatatgcgtgatgtgtttggtacgcgattgcgacgtgctgaagacgtatttccaccggtgatcggggttgctgcccataaaggtggcgtttacaaaacctcagtttctgttcatcttgctcaggatctggctctgaaggggctacgtgttttgctcgtggaaggtaacgacccccagggaacagcctcaatgtatcacggatgggtaccagatcttcatattcatgcagaagacactctcctgcctttctatcttggggaaaaggacgatgtcacttatgcaataaagcccacttgctggccggggcttgacattattccttcctgtctggctctgcaccgtattgaaactgagttaatgggcaaatttgatgaaggtaaactgcccaccgatccacacctgatgctccgactggccattgaaactgttgctcatgactatgatgtcatagttattgacagcgcgcctaacctgggtatcggcacgattaatgtccatcctgcttggggctctgccatttcccttctggaatattcccctggccacctggctggcttcgtggcctccattccagccccactccagcttgtccccagatgggacaccaagcctgtcctggaggatgcatcagcatcctcacggttcagcatcccccaaagaaaccccacacatttacatcccaccaccagcttcccttcttgcaatccagacacagtggatgcctggatgagatttctcataacttggtgcctttacacttctccttactccactcttatgggagagcttttccctttttatcaggggatgctcctagagtcgaccaaacagggcagtcaagtccgaaaagttttcgtatggactcttgttccaaactggaacaacactcaaccctattctcgggctattcttttgatttataagggattttgccgatttcggaaccaccatcaaacaggattttcgcctgctggggcaaaccagcgtggaccgcttgctgcaactctctcagggccaggcggtgaagggcaatcagctgttgcccgtctcactggtgaaaagaaaaaccaccctggcgcccaatacgcaaaccgcctctccccgcgcgttggccgattcattaatgcagctggcacgacaggtttcccgactggaaagcgggcaatcctaaaacagcagcaaaacgaaaaataccaagtgcctcaattcgatcaatcaacgattaaaaatattgagtctgcaaaaggacttgatgtgtgggacagctggccgctgcaaaacgctgacggaacagtagctgaatacaacggctatcacgttgtgtttgctcttgcgggaagcccgaaagacgctgatgacacatcaatctacatgttttatcaaaaggtcggcgacaactcaatcgacagctggaaaaacgcgggccgtgtctttaaagacagcgataagttcgacgccaacgatccgatcctgaaagatcagacgcaagaatggtccggttctgcaacctttacatctgacggaaaaatccgtttattctacactgactattccggtacacattacggcaaacaaagcctgacaacagcgcaggtaaatgtgtcaaaatctgatgacacactcaaaatcaacggagtggaagatcacaaaacgatttttgacggagacggaaaaacatatcagaacgttcagcagtttatcgatgaaggcaattag

SEQ ID NO: 119778 - DNA, 7263 bp, Homo sapiens
  misc_feature (1)...(7263): n = a,t,c or g
ggatatgccacgcacgtaaaaaaccgtcctatagccactctattccaataattcaaggtcaaacaaccccttcccccaaaagtccaagaatggtcagcagacacctgcagttcggtcgaatagtatctggtgttatagaaattccctatggatgtcgccgtcgaaaagctgctgcacttactgaaagtaattatcgtgttctggttgcccagctgtatgatgagcagatggctgcattatccagattgggtaacgattatcgcccaacaagtgcttatgaacgtggtcagcgttatgcaagccgattgcagaatgaatttgctggaaatatttatgcgctggctgatgcggaaaccacttcacgtaagattattacccgctgtatcaacaccgccaaattgcctaaatcagttgttgctcttttttctcaccccggtgaactatctgcccggtcagtgggccatcgccctcatagccggtttttcgcccttgaccgttggagtccacgttctttaatagtggactcttgttccaaattggatcaacactcaaccctatctcgggttattcttttgatttataagggattttgccgatttcggaaccaccatcaaacaggattttcgcctgctggggcaaaccagcgtggaccgcttgctgcaactctctcagggccaggcggtgaagggcaatcagctgttgcccgtctcactggtgaaaagaaaaaccaccctggcgcccaatacgcaaaccgcctctccccgcgcgttggccgattcattaatgcagctggcacgacaggtttcccgactggaaagcgggcacgccttacatatctccctcatcacaccaagtttccctactgaggggaagagccagtttgtgctgcaactaagaccttcgttacgaggagcactcttgagtttgctggatcactacgaatggaactgttttgtcttcctgtatgacacagacagggnagtaatggctcgcggtaatgccatttctttgcctgtatgtggtcgggatgtgaagttactctttgaagtgctccggggtgatagtgttgagaagacctctcgggtatggtcaggtaatgaacgtgaccaggagctgcttactgaggacgcactggatgatctcatcctttcttttctactgactggtcaacagacaccggcgttcggtngaagagtatctggtgtcatagaaattgccgatgggagtcgccgtcgtaaagctgctgcacttaccgaaagtgattatcgtgttctggttggcgagctggatgatgagcagatggctgcattatccagattgggtaacgattatcgcccaacaagtgcttatgaacgtggtcagcgttatgcaagccgattgcagaatgaatttgctggaaatatttctgcgctggctgatgcggaaaatatttcacgtaagattattacccgctgtatcaacaccgccaaattgcctaaatcagttgttgctctcccctctcaccccggtgaactatctgcccggtcaggtgatgcacttcaaaaagcctttacagataaagaggaattacttaagcagcaggcatctaaccttcatgagcagaaaaaagctgggacggtttttcgccttttgacgttggagtccacgtctttaatagtggactcttgtcccaaactgaaacaacactcaaccttatctcgggttattcttttgatttataagggattttgccgatttcggaaccaccatcaaacaggattttcgcctgctggggcaaaccagcgtggaccgcttgctgcaactctctcagggccaggcggtgaagggcaatcagctgttgcccgtctcactggtgaaaagaaaaaccaccctggcgcccaatacgcaaaccgcctctccccgcgcgttggccgattcattaatgcagctggcacgacaggtttcccgactggaaagcgggcagtgagcgcaacgcaattaatggattttgccgatttcggaaccaccatcaaacaggattttcgcctgctggggcaaaccagcgtggaccgcttgctgcaactctctcagggccaggcgacggtttttcgccctttgacgtggagtccacgttctttaatagtggactcttgttccaaactggaacaacactcaaccctatctcgggctattcttttgattaataagggattttgccgatttcggaaccaccatcaaacaggattttcgcctgctggggcaaaccagcgtggaccgcttgctgcaactctctcagggccaggcggtgaagggcaatcagctgttgcccgtctcactggtgaaaagaaaaaccaccctggcgcccaatacgcaaaccgcctctccccgcgcgttggccgattcattaatgcagctggcacgacaggtttcccgactggaaagcgggcagtgagcgcaacgcaattaatggattttgccgatttcggaaccaccatcaaacaggattttcgcctgctggggcaaaccagcgtggaccgcttgctgcaactctctcagggccaggcggtgaagggcaatcagctgttgcccgtctcactggtgaaaagaaaaaccaccctggcgcccaatacgcaaaccgcctctccccgcgcgttggccgattcattaatgcagctggcacgacaggtttcccgactggaaagcgggcaggattttgccgatttcggaaccaccatcaaacaggattttcgcctgctggggcaaaccagcgtggaccgcttgctgcaactctctcagggccaggcggtgaagggcaatcagctgttgcccgtctcactggtgaaaagaaaaaccaccctggcgcccaatacgcaaaccgcctctccccgcgcgttggccgattcattaatgcagctggcacgacaggtttcccgactggaaagcgggcaggattttgccgatttcggaaccaccatcaaacaggattttcgcctgctggggcaaaccagcgtggaccgcttgctgcaactctctcagggccaggcggtgaagggcaatcagctgttgcccgtctcactggtgaaaagaaaaaccaccctggcgcccaatacgcaaaccgcctctccccgcgcgttggccgattcattaatgcagctggcacgacaggtttcccgactggaaagcgggcaggattttgccgatttcggaaccaccatcaaacaggattttcgcctgctggggcaaaccagcgtggaccgcttgctgcaactctctcagggccaggcggtgaagggcaatcagctgttgcccgtctcactggtgaaaagaaaaaccaccctggcgcccaatacgcaaaccgcctctccccgcgcgttggccgattcattaatgcagctggcacgacaggtttcccgactggaaagcgggcaggattttgccgatttcggaaccaccatcaaacaggattttcgcctgctggggcaaaccagcgtggaccgcttgctgcaactctctcagggccaggcggtgaagggcaatcagctgttgcccgtctcactggtgaaaagaaaaaccaccctggcgcccaatacgcaaaccgcctctccccgcgcgttggccgattcattaatgcagctggcacgacaggtttcccgactggaaagcgggcaggattttgccgatttcgggaccccccatcaaacaggattttcgcctgctggggcaaaccagcgtggaccgcttgctgcaactctctcagggccaggcggtgaagggcaatcagctgttgcccgtctcactggtgaaaagaaaaaccaccctggcgcccaatacgcaaaccgcctctccccgcgcgttggccgattcattaatgcagctggcacgacaggtttcccgactggaaagcgggcagtgagcgcaacgcaattaatggattttgccgatttcggaaccaccatcaaacaggattttcgcctgctggggcaaaccagcgtggaccgcttgctgcaactctctcagggccaggcggtgaagggcaatcagctgttgcccgtctcactggtgaaaagaaaaaccaccctggcgcccaatacgcaaaccgcctctccccgcgcgttggccgattcattaatgcagctggcacgacaggaaacagctatgaccatgattacgaattcgagctcggtacccctgcacgcttttccaatcccggtgaccggaaacctggggatcctctagaccccaaaagcagtctgaagcgagccggtgattggtgttggttgagcccgactttgagagagatccagtcaacggagggaaattccggggatcctctatattcgccagggcttttatcgggaaagccttttatcgggtttgtaaagccaaccatagtacgcccttgtagcggcgcattaagccggccggtggactcttgttccaaactggaacaacactcaaccctatctcgggctattcttttgatttataagggattttgccgatttcggaacccacccatcaaacaggattttcgcctgctggggcaaaccagcgtggaccgcttgctgcaactctcgctcggactgcgaatagttgcaccggcccagcaagttgagtttgcagagatgcaggttatcgcagggtctctggcagtacttgcgacggcagacccgggctcgagtggtggccaccaccgatcgggtgatcccggcctcgccgccggtctccaacaccacaaagcggtcgggcccggccacctgcagcacctcacagagctgcggctcagacagcgcgggggatcctaggtggattccggggttacagtagcctttctcgatcgtctccatgtgctcaaagtccgtccaggttttaccaataagcatctgccaccggtaaggcagatggaagtggactttgctgcagctaccttgagaagggtagtaaatcaccaagtttagcctagcttcagaaatgacatcaactaggggaggtaaaacctgcaaagccccttcacctcctcggaaaacaaccgggttggaatcttggaccctgtgcttaaagggttctttttggacatcaagtggtaaaagttcattttccaattcatggccgtaaacttcagttgtaactgtaaccagagtggacccttcctggcgcccaatacgcaaaccgccctctccccgcgcgttggccgattcattaatgcagctggcacgacaggtttcccgatttttttctaaacactccagttggaacaccaacacctttcccaggttaagcaccctttcattgcccttatcaaatactgtcgctccaggagcaaactgatgtcgtgagcttaaactagttcttgatgcagatgacgttttaagcacagaagttaaaagagtgataacttcttcagcttcaaatatcaccccagcttttttctgctcatgaaggttagatgcctgctgcttaagtaattcctctttatctgtaaaggctttttgaagtgcatcacctgaccgggcagatagttcaccggggtgagaaaaaagagcaacaactgatttaggccatctggcggtgttgatacagcgggtaataatcttacgtgaaatattttccgcatcagccagcgcagaaatatttccagcaaattcattctgcaatcggcttgcataacgctgaccacgttcataagcacttgttgggcgattatcgttacccaatctggataacgcagccatctgctcatcatccagctcgccaaccagaacacgataatcactttcggtaagtgcagcagctttacgacggcgactcccatcggcaatttctatgacaccagatactcttcgaccgaacgcgggtgttgcccgctttccagtcgggaaacctgtcgtgccagctgcattaatgaatcggccaacgcgcggggagaggcggtttgcgtattgggcgccagggtggtttttcttttcaccagtgagacgggcaacagctgattgcccttcaccgcctggccctgagagagttgcagcaagcggtccacgctggtttgccccagccggcgaaaatcctgtttgatggtggttccgaaatcggcaaaaatccttataaatcaaaagaatagcccgagatagggttgagtgttgttccaagtttgaacaagagttcacgcctggcctgagagagttgcaagcagcggtccacgctggttttgcccccaggtcgactctagaggatcccccacggcccgcgtttttccagctgtcgattgagttgtcgccgacctttttgataaaacatgtagattgatgtgtcatcagcgtcttcgggctttcccgcaagagcaaacacaacgtgatagccgttgtattcagctactgttccgtcagcgttttgcagcggccagctgtcccacacatcaagtccttttgcagactcaatatttttaatcgttgattgatcgaattgaggcacttggtatttttcgttttgctgctgtttagggatctgcagcatatcatggcgtgtaatatgagagacgccgtacgtttctttgtatgctttttggttattttctttcgcgaaggcttgagtcgctcctcctgccagaagtgcagtcgtaaaagtcagaactgtggcttgttttacaatttttttgatgttcatgttcatgtctccttctgtatgtactgttttttgcgatctgccgtttcgatcctcccgaattgatcttggcgcctcctcggtctcggtgtccactctggccacgcttgaggagtccttcagcccgctgctgcactgtgggagcccctctctgggctggccaaggccagagccagctccctctgcttgtggggaggtgtggagggcgctgctctgtggcgcctggtcccatcgaccttccaagggtgcccgctttccagtcgggaaacctgtcgtgccagctgcattaatgaatcggccaacgcgcggggagaggcggtttgcgtattgggcgccagggtggtttttcttttcaccagtgagacgggcaacagctgattgcccttcaccgcctggccctgagagagttgcagcaagcggtccacgctggtttgccccagcaggcgaaaatcctgtttgatggtggttccgaaatcggcaaaatcccttataaatcaaaagaatagcccgagatagggttgagtgttgttccagtttgggacaagagtccactattaaagaacgtggactccaaccgtcaagggcgaaaaaacgtctatcaaggcgatggcccactacctgaaccat

SEQ ID NO: 119779 - DNA, 15031 bp, Homo sapiens
  misc_feature (1)...(15031): n = a,t,c or g
atgtctaagcagcaaagcattgaagatgtgacctggattattctaaaagcattcagttttatgcattcacaaagagatggtttgaaattggaacttatgtttaaaagggaagcagagcataaatgttcagaaaatttgcagcctgacaatgtgatagaaaagaaaatctcattttctgaggggaaattcaagcaggctgcagaaatttgcataagtaacgagaaactgaatgctaatccccaagacaatggggaaaatgtctccagggcatgtcagagaccttggcagcagcccctgccatcacaggcccagaggactaggaggaaaaatggcttcctgggctgggcccagggcccctgctgctctgtactgcctcaggacatggcaccctgcttccaagctgcttcagctccagtcgtggctaaaaggggccaaggtacagctcaggtggttgcttcagagggtgcaagccccaagccttggcaggttccacgtgttgctgggcctacagtggactcttgttccaaactggaacaacactcaaccctatctcgggctattcttttgatttataagggattttgccgatttcggaaccacccatcaaacaggattttcgcctgttggggcaaaccagcgtggaccgcttgctgcaactctctcagggccaggcggtgaagggcaatcagctgttgcccgtctcactggtgaaaagaaaaaccaccctggcgcccaatacgcaaaccgcctctccccgcgcgttggccgattcattaatgcagctggcacgacaggtttcccgactggaaagcgggcagtgagcgcaacgcaattaatgggattttgccgatttcggaaccaccatcaaacaggattttcgcctgctggggcaaaccagcgtggaccgcttgctgcaactctctcagggccaggcggtgaagggcaatcagctgttgcccgtctcactggtgaaaagaaaaaccaccctggcgcccaatacgcaaaccgcctctccccgcgcgttggccgattcattaatgcagctggcacgacaggtttcccgactggaaagcgggcaagaatgccacttcctggccgctgactaccaagctcagctgtttggcagcctggagtggagcacattcactgccatgagggctttgcgtgtaacagtggactcttgttccaaactggaacaacactcaaccctatctcgggctattcttttgatttataagggattttgccgatttcggaaccaccatcaaacaggattttcgcctgctggggcaaaccagcgtggaccgcttgctgcaactctctcagggccaggcggtgaagggcaatcagctgttgcccgtctcactggtgaaaagaaaaaccaccctggcgcccaatacgcaaaccgcctctccccgcgcgttggccgattcattaaatgcagctggcacgacaggtattcccgactggaaagcgggcagtgagcgcaacgcaattaatcttttctttacgtttaaatcagtccattgttcctgctgattctgtcatcggacaatatgtcaaacccctgaagttttgtggcaaccacaatctgatcaacgggtcaccatcactaacgccgatgctcagcaggccaagggattttgccgatttcggaaccaccatcaaacaggattttcgcctgctggggcaaaccagcgtggaccgcttgctgcaactctctcagggccaggcggtgaagggcaatcagctgttgcccgtctcactggtgaaaagaaaaaccaccctggcgcccaatacgcaaaccgcctctccccgcgcgttggccgattcattaatgcagctggcacgacaggtttcccgactggaaagcgggcagtgagcgcaacgcaattaatggattttgccgatttcggaaccaccatcaaacaggattttcgcctgctggggcaaaccagcgtggaccgcttgctgcaactctctcagggccaggcggtgaagggcaatcagctgttgcccgtctcactggtgaaaagaaaaaccaccctggcgcccaatacgcaaaccgcctctccccgcgcgttggccgattcattaatgcagctggcacgacaggtttcccgactggaaagcgggcagctgtctgcaaagggccattcccaacttcaacagatccctaaacagcagcaaaacgaaaaataccaagtgcctcaattcgatcaatcaacgattaaaaatattgagtctgcaaaaggacttgatgtgtgggacagctggccgctgcaaaacgctgacggaacagtagctgaatacaacggctatcacgttgtgtttgctcttgcgggaagcccgaaagacgctgatgacacatcaatctacatgttttatcaaaaggtcggcgacaactcaatcgacagatgggaaaaacgcgggccgtgtctttaaagacagcgataagttcgacgccaacgatccgatcctgaaagatcagacgcaagaatggtccggttcttgcaccctttacatttgacggaaaaatccgtttattttacattgactattccggtaaacattccggcaaccaaagcctgacatcagcgcaggtaaatgtgtcaaaatctgatgacacactcaaaatcaacggagtggaagatcacaaaacgatttttgacggagacggaaaaacatatcagaacgttcagcagtttatcgatgaaggcaattatacatccggcgacaaccatacgctgagagaccctcactacgttgaagacaaaggccataaatgccttgtattcgaagccaacacgggaacagaaaacggataccaaggcgaagaatctttatttaacaaagcgtactacggcggcggcacgaacttcttccgtaaagaaagccagaagcttcagcagagcgctaaaaaacgcgatgctgagttagcgaacggcgccctcggtatcatagagttaaataatgattacacattgaaaaaagtaatgaagccgctgatcacttcaaacacgactttaagaaagaaaggccttaatggttgtgagagccctgatgctgacgattactttgagcacagtccactctcggaggacagattcagcaaactaaatgaagatagtgattttattttcaaacgagggccctgtaagttgcagcaagcggtccacgctggtttgccccagcaggcgaaaatcctgtttgatggtggtttcgaaatcggcaaaatcccttataaatcaaaagaaatagcccgagatagggttgagtgttgttccagtttggaacaagagtccactattaaagaacggggactccaacgtcaaagggcgaaaaaaccttctttcacggcgatggcccactactttaatgatgacagcccggaagcgaggaaaataacccggcgctggagaataggtgaagcagcggatttagttggggtttcttctcaggctatcagagatgccgagggggcagggcgactaccgcacccggatatggaaattccaggacgggttgagcaacgtgttggttatacaattgaacaaattaatcatatgcgtgatgtgtttggtacgcgattgcgacgtgctgaagacgtatttccaccggtgatcggggttgctgaccataaaggtggcgtttacaaaacctcagtttctgtttatcttgctcaggatctggttatgaacgggctacgtgttttgctcgcggaaggaaacgatttccaaggaacagtctccatgtatcacggatgggtaccatatcttcatattcatgccgtaagacactgtgctggctttctatcttggcgcaaaaggaccattttgcttatgcaataaagcccacttgctggccggggcttgacattattccttcctgtctggctctgcaccgtattgaaactgagttaatgggcaaatttgatgaagtggactcttgttccaaactggaacaacactcaaccctatctcgggctattcttttgatttataagggattttgccgatttcggaaccaccatcaaacaggattttcgcctgctggggcaaaccagcgtggaccgcttgctgcaactctctcagggccaggcggtgaagggcaatcagctgttgcccgtctcactggtgaaaagaaaaaccaccctggcgcccaatacgcaaaccgcctctccccgcgcgttggccgattcattaatgcagctggcacgacaggtttcccgactggaaagcgggcagtgagcgcaacgcaattaatagctctcctgtgccagaaatgcattattcctgccctgtcctccccctcgcagcctccaaaggctggcaaattgtcccccacggtccctgttttcaaaaatgcagctggctgtagacagtgtgacaatctaaaaacttgtcacacttcacatggatctgtcatggcggaaacagcggttatcaatcacaagaaacgtaaaaatagcccgcgaatcgtccagtcaaacgacctcactgaggcggcatatagtctctcccgggatcaaaaacgtatgctgtatctgttcgttgaccagatcagaaaatctgatggcaccctacaggaacatgacggtatctgcgagatccatgttgctaaatatgctgaaatattcggattgacctctgcggaagccagtaaggatatacggcaggcattgaagagtttcgcggggaaggaagtggttttttatcgccctgaagaggatgccggcgatgaaaaaggctatgaatcttttccttggtttatcaaacgtgcgcacagtccatccagagggctttacagtgtacatatcaacccatatctcattcccttctttatcgggttacagaaccggtttacgcagtttcggcttagtgaaacaaaagaaatcaccaatccgtatgccatgcgtttatacgaatccctgtgtcagtatctggactcttgttccaaactggaacaacactcaaccctatctcgggctattcttttgatttataagggattttgccgatttcggaaccaccatcaaacaggattttcgcctgctggggcaaaccagcgtggaccgcttgctgcaactctctcagggccaggcgcaagaagatccttataggaagaaaaagcttcaggagaaaagagaaggaaatttacaaaatttaaattggagtaaaagtcgaacatgtagaaagaacaagaaaaggggtgttgctccagtctcaaggtttggcactgatatgcagatgattaatttcacaactggccagatgctatcagcagctgaagagcatctacagaaaccagctgcaaaaacagaagcagaccaactggcttggtgcagagatctgacaacaaaaagttgggaaatagatgacagaatggctccagatgttctccttgcaggccaaggtgcagtctatgcaatcactaacacatcctgctgtacctggagtaatgcctctggccaagtggagagatcaacacagaaacttaaagagaaagccatctggctctctaagggattttgccgatttcggaaccaccatcaaacaggattttcgcctgctggggcaaaccagcgtggaccgcttgctgcaactctctcagggccaggcggtgaagggcaatcagctgttgcccgtctcactggtgaaaagaaaaaccaccctggcgcccaatacgcaaaccgcctctccccgcgcgttggccgattcattaatgcagctggcacgacaggtttcccgactggaaagcgggcagacaggacacttagagatatagagtctcagtccctgtcagtcacgtgcagtcacaaccatccctataagtcaggtctgacatctgaaacactcaacttgaaagcagtcactgggcaaaggagaagaaataacaatgtcatcaccttcatgaacacaactctgcattcctctcagatcttcgccttctctaaggacaaagtgattggcttttccattcccaatgttgactctgaaggcttgaagaaaaatcttgatgtggcacagctttgcctttgcctttataagagagagagactgagggattttgccgatttcggaaccaccatcaaacaggattttcgcctgctggggcaaaccagcgtggaccgcttgctgcaactctctcagggccaggcggtgaagggcaatcagctgttgcccgtctcactggtgaaaagaaaaaccaccctggcgcccaatacgcaaaccgcctctccccgcgcgttggccgattcattaatgcagctggcacgacaggtttcccgactggaaagcgggcaggattttgccgattcgggaaccaccatcaaacaggattttcgcctgctggggcaaaccagcgtggaccgcttgctgcaactctctcagggccaggcggtgaagggcaatcagctgttgcccgtctcactggtgaaaagaaaaaccaccctggcgcccaatacgcaaaccgcctctccccgcgcgttggccgattcattaatgcagctggcacgacaggtttcccgactggaaagcgggcagtggactcttgttccaaattggaacaccactcaacccttatctggggatattcttttgatttataagggattttgccgatttcggaaccaccatcaaacaggattttcgcttgctggggcaaaccagcgtggaccgcttgctgcaactctctcagggccaggcggtgaagggcaatcagctgttgcccgtctcactggtgaaaagaaaaaccaccctggcgcccaatacgcaaaccgcctctccccgcgcgttggccgattcattaatgcagctggcacgacaggtttcccgactggaaagcgggcatggggccatgcgcccctgataagaacggtttttggcccctttgccgttggagtcccacgttcctttaatagtggactgcttgttccaaagctggaacaacagctcaaccctgatctgcgggctgattcttttgatttataagggattttgccgatttcggaacccaccctcaaaacaggaattttcgcctggtggggcaaaaccagcgtggcccgctagctgcacttttctcagggccagacggtgaagggcaatgcagctgttgcgccgtctcactggtgaaaaaaaaaaccaccctggcgcccaatacgcaaaccgcctctccccgcgcgttggccgattcattaatgcagctggcacgacaggtttcccgactggaaagcgggcagtgagcgcaacgcaattaatggattttgccgatttcggaaccaccatcaaacaggattttcgcctgctggggcaaaccagcgtggaccgcttgctgcaactctctcagggccaggcgcccaacattcaaatggaagttctgggtctgacacccattggtctgaagatgcccatctctgaccttaatactgtggccaaggagtggaacatgctgaatgggattcaaaccaacaaggtagaagagggagcagaaatccttaaagctctcacctctcctgctggggtcgggggtgcagagaagaagggattttgccgatttcggaaccaccatcaaacaggattttcgcctgctggggcaaaccagcgtggaccgcttgctgcaactctctcagggccaggcggtgaagggcaatcagctgttgcccgtctcactggtgaaaagaaaaaccaccctggcgcccaatacgcaaaccgcctctccccgcgcgttggccgattcattaatgcagctggcacgacaggtttcccgactggaaagcgggcaatgtttagctgtgtccagagtttcttccttccggtgggttcgtggtctcgctgacttcaggagtgaagctgcagacctttgcatggactcttgttccaaactggaacaacactcaaccctatctcgggctattcttttgattaataagggattttgccgatttcggaaccaccatcaaacaggattttcgcctgctggggcaaaccagcgtggaccgcttgctgcaactctctcagggccaggcggtgaagggcaatcagctgttgcccgtctcactggtgaaaagaaaaaccaccctggcgcccaatacgcaaaccgcctctccccgcgcgttggccgattcattaatgcagctggcacgacaggtttcccgactggaaagcgggcagtgagcgcaacgcaattaatggttcggtttagtgcttattggctcctcgacctcaaacaacttaattgggtgatggttcatgtagtggcccatcgccctatcacacgatttatcgcctttgaccgttggagtccacgttctttaatagtggactcttgttccaagctggaacagcactcaaccctatctcgggctattcttttgatttataagggattaggccgatttcggaaccaccatcaaacaggattttcgcctgctggggcaaaccagcgtggaccgcttgctgcaactctctcagggccaggcggtgaagggcaatcagctgttgcccgtctcactggtgaaaagaaaaaccaccctggcgcccgatacgcaaaccgcctctccctggattttgccgatttcggaaccaccatcaaacaggattttcgcctgctggggcaaaccagcgtggaccgcttgctgcaactctctcagggccaggcggtgaagggcaatcagctgttgcccgtctcactggtgaaaagaaaaaccaccctggcgcccaatacgcaaaccgcctctccccgcgcgttggccgattcattaatgcagctggcacgacaggtttcccgactggaaagcgggcatgactcttgttccaaactggaacaacactcaaccctatctcgggctattcttttgatttataagggattttgccgatttcggaacccaccatcaaacaggattttcgctgctggggcaaaccagcgtggaccgcttgctgcaactctctcagggccaggcggtgaagggcaatcagctgttgcccgtctcactggtgaaaagaaaaaccaccctggcgcccaatacgcaaaccgcctctccccgcgcgttggccgattcattaatgcagctggcacgacaggaaacagctatgaccatgattacgaattcgagctcggtacccgcatgcgcagtgcccaggccgcactgaaggccacgcaggcccaggcggcggccgccaaggcggccatcgaggcggccaaggcccaggtcaccggctcggtctcggccgtgaccgcggccgcggccaccgtgcagcgcatcgatgccgagctcgacgacagcacgctgaccgccccgcgcgatgggcgcgtgcagttccgcctggcccagcccggcgagggattgtgccgatttcggaaccaccatcagtcaggatcttcgcctgctggggcaaaccagcgtggaccgcttgctgcaactctctcagggccaggcggtgaagggcaatcagctgttgcccgtctcattggtgaaaagaaaaaccaccctggcgcccaatacgcaaaccgcctctctccgcgcgttggccgattcattaatgcagctggcacgacaggtttcccgactggaaagcgggcagtgagcgcaacgcaattaatggattttgccgatttcggaaccaccatcaaacaggattttcgcctgctggggcaaaccagcgtggaccgcttgctgcaactctctcagggccaggcgggattttgccgatttcggaaccaccatcaaacaggattttcgcctgctggggcaaaccagcgtggaccgcttgctgcaactctctcagggccaggcggtgaagggcaatcagctgttgcccgtctcactggtgaaaagaaaaaccaccctggcgcccaatacgcaaaccgcctctccccgcgcgttggccgattcattaatgcagctggcacgacaggtttcccgactggaaagcgggcagaacctgtctgcctcctgctgcagttcatggagtctgggctctccccagctttgctccaagattgtagtgggcctggcagcagggagaagccaggcagtgggaatagacacttccaagcctgcaaggacagggagggccttcccaagctgcaagagtgcagggatgcctgggtctgcaacgacaattgggcagctgcagctgcacacaggataacagggctcctgcctgttccatggagcagcagcctgggtcttatagccacgatttggggattttgccgatttcggaaccaccatcaaacaggattttcgcctgctggggcaaaccagcgtggaccgcttgctgcaactctctcagggccaggcggtgaagggcaatcagctgttgcccgtctcactggtgaaaagaaaaaccaccctggcgcccaatacgcaaaccgcctctccccgcgcgttggccgattcattaatgcagctggcacgacaggtttcccgactggaaagcgggcagttctggacaatagatgtgagagagttgttgtgcgcaaccaccaggctatggccttaacagaattgcctgtgctttctgcgtcttatatctttcatctgcatgctgtgatgttatatagaaataagattttagcaacatcagccttagaaatcagaggggtcaaacccgaggcaattctacgggcaaaaggaggaaataagcccactcagaaacaaggaaaagggggttccacctcacaatacaaagaggctcgaaataatttgagggattttgccgatttcggaaccaccatcaaacaggattttcgcctgctggggcaaaccagcgtggaccgcttgctgcaactctctcagggccaggcggtgaagggcaatcagctgttgcccgtctcactggtgaaaagaaaaaccaccctggcgcccaatacgcaaaccgcctctccccgcgcgttggccgattcattaatgcagctggcacgacaggtttcccgactggaaagcgggcaccaatatagaaacaaaggaaaaaagatattcgaggctctccgggtagagcaccaacactatctgaaacgtcaacaaaagtggggattttgccgatttcggaaccaccatcaaacaggattttcgcctgctggggcaaaccagcgtggaccgcttgctgcaactctctcagggccaggcggtgaagggcaatcagctgttgcccgtctcactggtgaaaagaaaaaccaccctggcgcccaatacgcaaaccgcctctccccgcgcgttggccgattcattaatgcagctggcacgacaggtttcccgactggaaagcgggcagtgagcgcaacgcaattaatctggatcgcgggtccccggcgcagcactacatcgcgttatctaacccataaggctcgaaaacagccagcgacgctttcacagtgggctttaggtatttccacgcaagctcccaaaaaacaaaaatcatcccctcacccgccccacaaaactcagacaaattcaaaggagcccctgtgcccacatcattccatcccccccaggaatacccaagtccagacatctgagctacctcaaaagaattgtgccaggggattttcgcctgctggggcaaaccagcgtggaccgcttgctgcaactctctcagggccaggcggtgaagggcaatcagctgttgcccgtctcactggtgaaaagaaaaaccaccctggcgcccaatacgcaaaccgcctctccccgcgcgttggccgattcattaatgcagctggcacgacaggtttcccgactggaaagcgggcagtgagcgcaacgcaattaatatctcagaagagggcctggcagctgacacccgcaaagaggaagagcgagctggctgaggctggtgactccgagaggcttcaggaggacagacctggcatcctgcaaaacctgctgactgcagctgactgtggatgccatggagtaacccgactgcaggggcagatggcggggagcaaatcccaccctggccagcctgccagcctcctccagggagccactcagaaaagccctgtgggaatcccgtgggcaaaggaaacatgcacttggctagtctcagctcagcagaatgaagccaaggtagagaggtgggatgagctggaaaaggagaaacttgaaactcagtgcagctacaagagatgccgagaaagcaggcgtactaccgcacccggatatggaaattcgaggacgggttgagcaacgtgttggttatacaattgaacaaattaatcatatgcgtgatgtgtttggtactcttattgcgacgtgctgaagacgtatgtccaccggtgatcggggttgctgcccataaaggtggcgtttacaaaacctcagtttctgttcatcttgctcaggatctggctctgaaggggctacgtgttttgctcgtggaaggtaacgacccccagggaacagcctcaatgtatcacggatgggtggcggatcttcatattcatgcagaagacactctcctgcctttctatcttggggaaaaggacgatgtcacttatgcaataaagcccacttgctggccggggcttgacattattccttcctgtctggctctgcaccgtattgaaactgagttaatgggcaaatttgatgaaggtaaactgcccaccgatccacacctgatgctccgactggccattgaaactgttgctcatgactatgatgtcatagttattgacagcgcgcctaacctgggtatcggcacgattaatgtcgtatgtgctgctgatgtgctgattgttcccacgcctgctgagttgtttgactacacctccgcactgcagtttttcagatatgcttctgtgatctgctcaagaacgtgggggatctatagagccgcacggcaggtttcaacccagacgtggggtatagagcaaccaaaattgagaaaaggcatgtatgaagaagttcagaatactacagaaacacagtttggatatttggctcaggattttcatccttttaatcagagagaccggcagcattttacctctgccatagagatgtgtggctctttacacttgagagagatggaagaaatttctacgcagcaaagcattgaagagatgacttgggtgctgttaagagcattcagttttcaaagggacacagagcataagagtttgaaaaatttgcagcctgacaacaattctatagaaaagaaaatcccattttctgaggagaaattccagccagctcctgaaatttgtgtgagtaacaagaagccaaatgtgaatcgcatagacaatgaggaaaatttctatagggcatatcagaggtcttcccggcagcccctcccatcacaggcttggaggcataggaggaaaaagtggttttgtgggctgggcatagggttcccaagctgtgcgcagcatatggactcggtgccttgcatcccagttactctagccgtggctgaaaaaggccaatgtcagctcgggccctggcttcagagcgtgcaacccataaggcttggcagcttccatggggtgttgagcctgcaggagtttgagcagcagggcactgaaaaaacaccggcgttcggtcgaagagtatctggtgtcatagaaattgccgatgggagtcgccgtcgtaaagctgctgcactcaccgaaagtgattatcgtgttctggttggcgagctggatgatgagcagatggctgcattatccagattgggtagcgattatcgcccaacaagtgcatatgaacgtggtcagcgatacgcaagccgattgcagaatgaatttgctggaaatatttctgcgctggctgatgcggaaaatatttcacgtaagattattacccgctgtatcaacaccgccaaattgcctaaatcagttgttgctcttttttctcaccccggtgaactatctgcccggtcaggtgatgcacttcaaaaagcctttacagataaagaggaattacttaagcagcaggcatctaaccttcatgagcagaaaaaagctggggtgatatttgaagctgaagaagttatcactcttttaacttctgtgcttaaaggggatctactagagccgaacggcngatcagcggtcggggaccgcggtcccacttgtattgtcgatcagactatcagcgtgagactgcgattccatcaatgcctgtcaagggcaaaccgtgtatttttaccagagcttggtgcacacagagagttttattacaaaggatacatctttagtcaggaaagcaaagatcatatatactgccagagactcaagccccttctttacaagaacttgcaaatcctcagttttgtcgtgcacctccgaagcagagcagacaaaggccataaataccttgtattcgaagccaacacgggcacagaaaacgtataccaaggcgaagtatctttatttaacaaagcgtactacggcggcggcacgaacttcttctgtaaagaaagccagaagcttcagcagagcgctaaaaaacgcgatgctgagttagcgaacggcgccctcggtatcatagagttaaataatgattacacattgaaaaaagtaatgaagccgctgatcacttcaaacacggtaactgatgaaatcgagcggcgcgaatgttttcaaaatgaacggcaaatggtacttgttcactgattcacgcggttcaaaaatgacgatcgatggtattaactcaaacgatatttacatgcttggttatgtatcaaactctttaaccggcccttacaagccgctgaacaaaacagggcttgtgctgcaaatgggtcttgatccaaacgatgtgacattcacttactctcacttcgcagtgccgcaagccaaaggcaacaatgtggttatcacaagctacatgacaaacagaggcttcttcgaggataaaaaggcaacatttgcgccaagcttcttaatgaacatcaaaggcaataaaacattccgttgtcaaaaacagcatcctggacgactgacgggcagacatcccgcgaaaatcctgtttgatggtggttccgaaatcggcaaaatcccttataaatcaaaagaatag

SEQ ID NO: 119780 - DNA, 3107 bp, Homo sapiens
aagcggcaggagcagcgttggcaccggcgaaccatggctgggattttctatttcgccctattttcgtgtctcttcgggatttgcgacgctgtcacaggttccagggtataccccgcgaatgaagttaccttattggattccagatctgttcagggagaacttgggtggatagcaagccctctggaaggagggtgggaggaagtgagtatcatggatgaaaaaaatacaccaatccgaacctaccaagtgtgcaatgtgatggaacccagccagaataactggctacgaactgattggatcacccgagaaggggctcagagggtgtatattgagattaaattcaccttgagggactgcaatagtcttccgggcgtcatggggacttgcaaggagacgtttaacctgtactactatgaatcagacaacgacaaagagcgtttcatcagagagaaccagtttgtcaaaattgacaccattgctgctgatgagagcttcacccaagtggacattggtgacagaatcatgaagctgaacaccgagatccgggatgtagggccattaagcaaaaaggggttttacctggcttttcaggatgtgggggcctgcatcgccctggtatcagtccgtgtgttctataaaaagtgtccactcacagtccgcaatctggcccagtttcctgacaccatcacaggggctgatacgtcttccctggtggaagttcgaggctcctgtgtcaacaactcagaagagaaagatgtgccaaaaatgtactgtggggcagatggtgaatggctggtacccattggcaactgcctatgcaacgctgggcatgaggagcggagcggagaatgccaagcttgcaaaattggatattacaaggctctctccacggatgccacctgtgccaagtgcccaccccacagctactctgtctgggaaggagccacctcgtgcacctgtgaccgaggctttttcagagctgacaacgatgctgcctctatgccctgcacccgtccaccatctgctcccctgaacttgatttcaaatgtcaacgagacatctgtgaacttggaatggagtagccctcagaatacaggtggccgccaggacatttcctataatgtggtatgcaagaaatgtggagctggtgaccccagcaagtgccgaccctgtggaagtggggtccactacaccccacagcagaatggcttgaagaccaccaaagtctccatcactgacctcctagctcataccaattacacctttgaaatctgggctgtgaatggagtgtccaaatataaccctaacccagaccaatcagtttctgtcactgtgaccaccaaccaagcagcaccatcatccattgctttggtccaggctaaagaagtcacaagatacagtgtggcactggcttggctggaaccagatcggcccaatggggtaatcctggaatatgaagtcaagtattatgagaaggatcagaatgagcgaagctatcgtatagttcggacagctgccaggaacacagatatcaaaggcctgaaccctctcacttcctatgttttccacgtgcgagccaggacagcagctggctatggagacttcagtgagcccttggaggttacaaccaacacagtgccttcccggatcattggagatggggctaactccacagtccttctggtctctgtctcgggcagtgtggtgctggtggtaattctcattgcagcttttgtcatcagccggagacggagtaaatacagtaaagccaaacaagaagcggatgaagagaaacatttgaatcaaggtgtaagaacatatgtggacccctttacgtacgaagatcccaaccaagcagtgcgagagtttgccaaagaaattgacgcatcctgcattaagattgaaaaagttataggagttggtgaatttggtgaggtatgcagtgggcgtctcaaagtgcctggcaagagagagatctgtgtggctatcaagactctgaaagctggttatacagacaaacagaggagagacttcctgagtgaggccagcatcatgggacagtttgaccatccgaacatcattcacttggaaggcgtggtcactaaatgtaaaccagtaatgatcataacagagtacatggagaatggctccttggatgcattcctcaggaaaaatgatggcagatttacagtcattcagctggtgggcatgcttcgtggcattgggtctgggatgaagtatttatctgatatgagctatgtgcatcgtgatctggccgcacggaacatcctggtgaacagcaacttggtctgcaaagtgtctgattttggcatgtcccgagtgcttgaggatgatccggaagcagcttacaccaccaggggtggcaagattcctatccggtggactgcgccagaagcaattgcctatcgtaaattcacatcagcaagtgatgtatggagctatggaatcgttatgtgggaagtgatgtcgtacggggagaggccctattgggatatgtccaatcaagatgtgattaaagccattgaggaaggctatcggttaccccctccaatggactgccccattgcgctccaccagctgatgctagactgctggcagaaggagaggagcgacaggcctaaatttgggcagattgtcaacatgttggacaaactcatccgcaaccccaacagcttgaagaggacagggacggagagctccagacctaacactgccttgttggatccaagctcccctgaattctctgctgtggtatcagtgggcgattggctccaggccattaaaatggaccggtataaggataacttcacagctgctggttataccacactagaggctgtggtgcacgtgaaccaggaggacctggcaagaattggtatcacagccatcacgcaccagaataagattttgagcagtgtccaggcaatgcgaacccaaatgcagcagatgcacggcagaatggttcccgtctgagccagtactgaataaactcaaaactcttgaaattagtttacctcatccatgcactttaattgaagaactgcactttttttacttcgtcttcgccctctgaaattaaagaaatg

SEQ ID NO: 119781 - DNA, 879 bp, Homo sapiens
tcattcccagtgccttcccggatcattggagatggggctaactccacagtccttctggtctctgtctcgggcagtgtggtgctggtggtaattctcattgcagcttttgtcatcagccggaggtaagcactgaagccactcactgtgcagcccccgaccttcccagtgtttatgatggtttttttctcttccacacaaagctaaggcttttgattgcgtcataaacttggcatctgcatcccaagtttcctccttgttgctttgatcttcccacacccctaccaaagctgctagctgtaccctggtggcaggctgagaggtccggaaggacccagctaattgtaggaaacaaagctgaagagcaagccagtgggagatttctagatgctttaagctgccaggtgttacgtttatccctctcttaagcctggactcatcccatcgtctgcccagaggctccagaggagtagtcattgatatgtgccccacatctgggccttctttgtctttgatgtgtaagaatctgcctcttccctgatcggcatccccatataccatcaactgtttcacaagatggggaggcttggaaagtcgaagggactgggccaactggtgtccttcataccctctgtgccccagtgccccaacagctccaggagggagaggtgcaagtgccaggacaaagctttttacaatgacttctgcctcttggcccagatatctgtcactgggctcatccattttgacactggtcattaactctgagaaccgaaaggtatctgtttgtgttgtgaactgctgtgttttgaaaaacatctgtgtgtccttggaactctcgactcccggctcgccctcctccaccctggtccaggtggccat

SEQ ID NO: 119782 - DNA, 963 bp, Homo sapiens
atgggcaaagacttcatgactaaaacaccaacaccaatggcaacaaaagccaaaattgacaaatgggatctaaataaactaaagagcttctgtacagcaaaagatactatcgtcagagtgaacaggcaacctatagaatgggagaaaatttttgcaatctatccatctgacaaacggctaatagccacaatctacaaggaacttaaacaaacttacaagaaaaaaataaacaacctcatcaaaaagcaaacagggtgtggagcagacctccagcaaactccagcagacctgcagcagacgggactgagtgttagaaagaaaactgataaacagaaaggaatagcatcaacatcaacaaaaaggacgtccacacagaaaccccatccaaagatcaccaacatgaagaccaaagaaatacaaactaccataaaagaatactatgaacacctctatacaaataaactagaaaatctacaagaaatggataaattcctggacacatacaccttcccaggactaaaccaggaagaagtccaatccctgaatagaccaataacaagttctgaaattgaggcagtaattaatagcctaccaaccaaaaaaagtccaggaccagacagattcacagccgaattctaccagagggacatggatgaagctggaaaccatcattctcagcaaactaacacagggacagaaaaccaaacactgcatattctcactcataagtgggagttgaataatgagaacacatggacacagggaggggaatatcatactccagggcctgttagagtttgggggaatagaggagggatagcattaggagaaatacctaatgaatgcagctcctcaccagcaacagaccaaagctggatggagaatgactttgacgagttgaaagaagaaggcttcagacgattggtaataacaaacttctccgagctaaaggaggatgtttga

SEQ ID NO: 119783 - DNA, 1281 bp, Homo sapiens
atggataaattcctcgacacatacactctcccaagactaaaccaggaagaagttgaatctctgaatacaccaataacaggatctgaaattgaggcaataattaatagcttaccaaccaaaaaaagtccgggactagatggattcacagccaaattctaccagagggcaatcaggcaggagaaggaaataaagggcattcaattaggaaaagaggaagtcaagttgtccctgtttgcagatgacatgattgtatatctagaaaacgccatcatctcagcccaaaatctccttaagctgataagcaacttcagcaaagtctcaggatacaaaatcaatgtgcaaaaatcacaagcattcttacacaccaataacagacaaacagagagccaaatcatgagtgaactcccattcacaattgcttcaaagagaataaaatacctaggaatccaacttataagggacgtgaaggacctcttcaaggaaaactacaaaccactgctcaatgaaataaaagaggatacaaacaaatggaagaacattccatgctcatgggtaggaagaatcaatatcgtaaaaatggccatactgcccaaggtaatttatagattcaatgccatccccatcaagctaccaatgactttcttcacagaattggaaaaaacgactttcaagttcatatggaaccaaaaaagagcccgcatcgccaagtcaatcctaagccaaaagaacaaagctggaggcatcacgctacctgacttcaaactatactacaaggctacagtaaccaaaacagcatgggacatggatgaagctggaaaccatcattctcagcaaactatcacaaggacaaaaaaccaaacaccgcatgttctcactcataggtgggaattgaacaatgagaacacatggacacaggaaggggaacatcacacaccggggcttgttgtgcggaggagtccagaccctgagcagaacttcaaggctgtcaggtgtttggaccttcctgatcttcaagctcgtttttggctgtcctcacatttcatttcaaaccagccttccttcagtcccttagatgagataagccacgctctttcctgccttggggacttggcacaagccatgaaaaataactcccaagaaacagatcaggcaatcaccaaacctaacacagaatacaggacagcagtgaagccttcagttgtgggagcacttccagatatcaactcatttctaaagcttggaggcctgcatcgaatcactaatggctgcctccttgattga

SEQ ID NO: 119784 - DNA, 937 bp, Homo sapiens
ggttattaaaacggtgatgattaccggcgataaccgtctgactgccgccgcgattgctgcggaagcgggtgtcgatgattttctcgccgaagcgacaccggaggccaagctggcattgatccgtcagtatcaggcggaaggtcgtttggtagcgatgaccggcgacggcaccaacgatgctccggcgctggcgcaggcagatgtcgcggtggcgatgaactccggcacccaggcggcgaaagaggcgggcaatatggtcgatctcgactctaacccgaccaagttgatcgaggtggtgcacattggcaaacagatgctgatgacccgtggctcgctgaccaccttcagcattgccaacgatgtggcgaaatacttcgccattattccggcggcattcgcggcaacgtatccgcagttaaatgcgctgaacatcatgtgcctgcattcgcccgactccgcaatcctcagtgcggtgattttcaacgccttgattatcgtctttttgattcccctggcgttaaaaggcgtgagttataaaccgcttaccgcttctgccatgttgcgccgtaacttatggatttacggtctgggtgggctgctggtgccgtttatcggtatcaaagtcattgatttactgctgaccgtttgcggtctggtggacatggatgaagctggaaaccatcattctcagcaaactatcacaagatcagaaaatcaaacaacgcacgttctcactcataagtgggagttgaacaacgagaacacatggacacagggaggggaacatcacacaccggggcctgtcaaggccaaatacagcaaggatcctctgtgcttcaaaagcacacctcgggcttcccctcaggtcttccttgccttaggcaaaaagggccagagaagtgagaaccgtctttgcattttgcccatcagcaagtag

SEQ ID NO: 119785 - DNA, 909 bp, Homo sapiens
atgagtgaactcccattcacaattgctacaaagagaataaaatacctaggaatacaacttaaaagtgatgtgaaggacctcttcaaggagaactacaaaccactgctcaatgaaataagagaggacacatacaaatggaaaaacactccatgctcatggataggaagaatcaatatcatgaatatggccatactgcccaaagtaatttatggattcaatgctatcctcatcaagctaccattgactttcttcaccgaattagaaaaaactactttaaagttcacacagagcctaaaaagagcccatatagccaagacaatcctaagtaaaaagaacaaagctggaggcatcatgctacctgacttcaaactatactacaaggctacagtaaccaaaacagcatgcactattcacaatagcaaagacttggaaccaaccgaaatgcccagcaatgatacgctggataaagaaaatgtggcatatatacaccatggaatactatgtagccacagcaaaggacgagttcatatcctttgcagggacatggatgaagctggaaaccatcattctcggcaaactaacacaggaacagaaaaccaaacactgcatgttctcactcataagtgggagttgaacgatgagaacacatggacacagggaggggaacatcacatatcggggcctgtcagaaccaacaacaaaaaccacatgattatctcaataggtgcagaaaaggcctttgacaaaattcaacagcctttcatgctaaaaactctcaatcaactaggtattgatggaacatacctcaaaataataagagatatttttgacagacccatagccaatatcttactgaatgggcaaaaacgggaagcatcccctttgaaaactggcacaagacaaggatga

SEQ ID NO: 119786 - DNA, 1983 bp, Homo sapiens
atgggagatggcaccagtgacttcgaccctatcggagacattgggattcgtcaatctaattactcatgtggagggtgcccaaggataccttatgtttggagagtcactggaagggctcacgggacccagactatagttgtattcatggctaaggtttattacggcaatgtaatgaggagggagaaagactcaggtggagcctggggaaatccatgggcaggcatcctactgccccctccctccacgaggaattgcacagtgcactcttccttcagcaatgaaaatatatttccccagcatacaagttcctgtgtagttgtacataatcaatatattggagcagatttcccctggagtaatttctcatttgtggtggaatacaattatgtggaagactcttgttggactaaacactgcaaagagttgaatattccttacatggcctttaaagtgattcttccagacacagttttagaaagaagcaccttgctggatagatttggaggttttcttttggaaattcagattccatatgtgttttttgcatctgaaggacttcttaatactccagacatacttcagctgctagaatccaaggacatggatgaagctggaaaccatcattctgagcaaactgtcacaaggacagaaaaccaaacactgcatgttctcactcataggtgggaattgaacaatgagaacacttggacacaggatggggaacatcacacaccggggcctgtcgtggggtggcgggagcttataattgccccaggagtagaagcaactgccttgataattcgacaaattgctgaccacagtttaatgacctcaaagagagatcctcatgaatggttggataaatcctggcttaaagtttcaccatctgaggaaaataggaatcagattagtaccttgtcttctcaaagttcagcttctgatttagactctgtcattcaagaacataatgaatattatcagtatttaggattaggagagacagtgcaggaagacaaaaccaccattttgaatgacaactcttccattatggaactaaaagaaatctcaagttttttaccacctgtgacttcatacaatcagaccagctactggaaagactccagctgtaaatctaatatagggcagaatactccttttctaattaatatagaatcaaggagaccggcttataactcctttctaaaccacagtgattcagagtcagatgtcttttctttgggtctaacacaaatgaactgtgaaactataaaatcaccaactgacactcagaagagagtgtcagttgtcccccgttttataaattctcagaaaaggagaacacatgaagcaaaaggtttcataaataaagatgtatcggaccctatcttttcactagagggcactcaatctcctcttcattggaactttaagaaaaatatatgggaacaagagaatcacccgttcaacttacaatatggtgcacagcagactgcatgtaacaaattgtactctcagaaaggtaatttattcactgatcagcaaaaatgtctatcagatgagtctgaaggcctcacatgtgaaagttcaaaagatgagactttctggagagaattaccatctgtccccagtttggatttatttcgtgcttctgattctaatgcaaatcaaaaagaattcaacagcctttatttctaccaaagagctggaaaaagtttaggacagaaaaggcaccatgaatcttcatttaactcaggagacaaggaatcattaacagaagagaaaacagaggcacaagagaagatgaccacagaagacagaggcagaggctggggttatgctaccacaaaccggagaatgccaaggattgctggcaaccaccaggagcctggggagaggcgtggaacccctcctccctcagaggccccagaaggatccaaccctgctaataccttgattttagacttcccacccccagaactgtga

SEQ ID NO: 119787 - DNA, 588 bp, Homo sapiens
atggccagacactaccttggcattgtggaaattgataaggatgacgtcacgtccaaagtgacccaaatggagggaacaccctttatacttcaaaggtctctaactactactcttttttatcatgtgacaagaaagaagaggacaaaatctgaagaaattcagaagaagaaaggcattgaagaagttcagtgggacatggatgaagctggaaaccatcattctcagcaaactaacacaggaacagaaaaccaaacacctcatgttctcactcataagtgggagttgaacaatgagaacacatggacacagggaggggcctgtcggcgggatggatttgttgactttttggagtttattgctgctgtaaatctaatcatgcaagaaaaaatggagcaaaaattaaaatggtattttaagctgtatgatgctgatggaaatggttctattgacaaaaatgaactactggacatgttcatgattttaagaaattctaagcgggaaagggaccagctggaatcaagatgcatgattcatgcctacagaattgcaggagagagagtctacacctctcaggccagggaacactga

SEQ ID NO: 119788 - DNA, 600 bp, Homo sapiens
atggatgagaatctgccatctgagctgaaagccaatccaacacagacttcttatatgcccagcattaagagctatagaggggcaggtcaattaaaaatagctcaagaaagtggagtgtctgttcagggccattggtccatgaagagggaaggcttccagaaacttgaaagaacacataaaaattttcaaatgaagtttagcagatgggggatagctgtggggaagcttaatgagcagcatgattgtcataaggaggaggcagttactggaaccagttgtatgaaagagctgaaggacaagagctacagaaggatacagcaacacagggacatggatgaagctggaaaccatcattctcagcaaactatcagaagaacagaaaaccgaacactgcatgctctcactcataagtgggaattgaacaatgagaacacatggacacaggaagatccatctactcctgtcaactctactgccactaatcgaatccaagtcacatcatctggactttggcaaaaggcttcatcagtctccccacttctacccgtgcccacccttccctggtccagattccacataatagctcaagggatcttttaa

SEQ ID NO: 119789 - DNA, 858 bp, Homo sapiens
atgacctcttacaatgaacaaaacaagaaaccagtgactgaccctaatgagatggcaatacatgaggactctaaccaagaattcaaaatagcggttgtaaatgaaactcagagatctccaagaagctcccccactgagcaccttatgacccccccacccctgcccaccagagaacaacaaccccctttgactgtaattttccactacctacccaaatcctataaaacggccccacccctgtctcctttcccagactctcttttcggactcagccagcctgcacccagggacatggatgaagctggaaaccatcattctcagcaaactaacacaggaacagaaaaccaaacactgcatgttctcgctcacaagtgggagttgaacaatgagaacacatggacacagggaggggaccgtcatacaccggggccttcttggacaattttcccaacaacttataaacaagtcagaattcagcaatacggtgtgcagagagaaatcaggcagggtcttgcaagtgaatatggagagtccattatgaatgattcaggacgcacttcaggaccaaactaccccaaagggtccaatcactgttttcctctagctcttctatttggaccaccttctaaggtcttctcacaaagtggcttcttatctcagcacagaaagcagaagcagaggttctattactgtactttttataagatgttcagaaccatagctgtcactgtggtgctactcttactgttactgttaccggtggcagagacccgaatcaccctgagtaaccagcggcagattcgtaccagtcggcagcaacttaaattcttgccttctcggaagaaagaatttgactga

SEQ ID NO: 119790 - DNA, 696 bp, Homo sapiens
atgcaaagccttctggaaatccacaagctgaagatgcttgcacaatggagaacaattgaaggagtgagtctgggcagtgagcagattggaggctatttcattattagcaatgtgctggaagagaactctagaacagaagttgataaaaattcaggagcttttattgaattaaagccacatttgcctgaagaagtcagcaaagtcactgactggaacatggatgaagctggaaaccatcattctcagcaaactaacacaggaacagaaaaccaaacactgcatgttctcactgataagtgggagttgaacaatgagaacacatggacacagggaggggaacatcacacactgggcctgtcatgggatgggggaagggaaatggatgaagctggaagccatcatcctcagcaaactaagacaggaacagaaaagcaaacactgcatgttttcaacactcacaagtgggagttgaacaatgagaacacatggacacaggaaaggtgtgaagcatttaatatgggaattatgaacacacttcgacatgtgaaagaatggagatccagaaagccaccactgaacatctcaacttgtaaagctgaagtgggagtttcctcagattcacatggaagatgctacaattctcaaaaatctctagaagtttctatcaagtactcaaacatcaacagaaaatcatga

SEQ ID NO: 119791 - DNA, 2466 bp, Homo sapiens
  misc_feature (1)...(2466): n = a,t,c or g
atgacccttacaagctccgggagaaagtcccctctccgactccctcccggtgcattggtggaggccctattcggggtctgtgagatctccgcggcggtttcccactcagatcctagacttgtggggatcagaaagcgtgggtcgccggactcgttcagcgagcggaacagggacatggatgaagctggaaaccatcattctcagcaaactaacacaagaacagaaaaccaaacactgcatgttctcactcatatgtgggagttgaataatgagaacacatggacacaggggtggcggcatcacacaccgggacctataggaagnagatcccctactttacttatgcatgtgcactacatcaaagttatatcctggagagaactcttgttgatttggctccgagctgccaatgcatctatcaaccccggagttgagcagtcaccctccggggatccaaagacagtcacgggcttccctttcctgcggctggaggccgcagactgggtggaagaggcatctgtccccaagggcgtgcacattgccctctccagccaagagcagcgtgctggggaccctcgtgatttggaagcaccttctaacttagttatttctgagcgaacccatcgttcttttagagtgagctggacaccaccttctgacagtgtggatcgatataaggtggaatactatccagtttctggagggaaacgtcaagaagtcgtgcgaacacctggggtcccggatctccgcttgcctgccatcatcccccaggctgcttggctgctggctcatctgcccgcaccgtccgccccgccgactgagctccccacaaagcacacagaggcgcagagccagcgctgttggagtcttttattgtgttctgtcaccgaggtcgcagccccgagccaggtagtaaaagaagctccaccttctttccacacgggaacagaaaacggataccaaggcgaagaatctttatttaacaaagcgtactacggcggcggcacgaacttcttccgtaaagaaagccagaagcttcagcagagcgctaaaaaacgcgatgctgagttagcgaacggcgccctcggtatcatagagttaaataatgattacacattgaaaaaagtaatgaagccgctgatcacttcaaacacggtaactgatgaaatcgagcgcgcgaatgttttcaaaatgaacggcaaatggtacttgttcactgattcacgcggttcaaaaatgacgatcgatgagaataaaatacctaggaatccaacttacaagggacgtgaaggacctcttcaaggagaactacaaaccactgctcaaggaaataaaagaggatacaaacaaatggaagaacattccatgctcatggataggaagaatcaatatcgtgaaaatggccttactgcccaagcttccacaacctccaccctcaggcatataaggctataccgcaccctgcttcccttgggaaaacctgatataatcaggacaataacaatgctggtaaactcttcaaagccaacaggaacccagctttgggttgtcagcagccagtatgttcaaagacagatggcttcagattctaagggaatgaacacctgtagtatggtcaaagccaggaaatattcaaagcctctgctggtgacacccaggcaaacagcatctggagtggacctccagcaaactccaacagatcttcagctgagggtcccgactgttagaaggaaaactgacaaacagaaaggaaatccacaccaaaaccccatccatatgtcaccatcatcaaaaaccaaaggacacagttcctcaccagcaacggaacaaagctggatggataatgactttgacgagctgagagaagaaggcttcagacgatcaaattactctgagctatgggaggacattcaaaccaaaggcaaagttgaaaactttgaaaaaaatttagaagaatgtataactagaataaccaatacagagaagtgcttaaaggagctgatggagctgaaaaccaaggctcgagaactacgtgaagaatgcagaagcctcaggagccgatgcaatcaactggaagaaagggtatcagtgatggaagatgaaatgaataaaatgaaggacatggatgaagctggaaaccatcattctcagcaaactatcacaaggacaaaaaaccaaacactgcatgttctcacttataggtgggaattgaacaatgagaacacttggacacaggaaggggaacatcacacactggggcctgttgtgggacttggaaaattgccttttttcatggctccaattctggtggctccaagtcagaagtctgcgtgtgaggaccactgccatggctgtgcttatggatggaaaaatacacccatgaaggaacgcttgctgccaatgaagtttaaaaaatttattgttcctcctttaacctggactttcggacttgaaagccctgtttag

SEQ ID NO: 119792 - DNA, 873 bp, Homo sapiens
atggatgaagctggaaatcatcattctcagcaaactatcacaaggacagaaaaccaaacaatgcatgttctcactcataagtgggagttgaacaatgagaacgtatggacacaggtgtacaaggaaagctctccacataaggcagctgctgcccagggtgccggcaagaaaaaaggctttgtgaattactatggaccacagagatttgggaagggaaggaaagttcacacagaccaaattggactagctttgctgaagaatgaaatggatgctaaaggcacactttcattgatgcctgaattcaaagtgcgtgagagagcattgttggaggcattgcaccgctttggcatgaccgaggaaggttgtatccaggcatggttctctttaccccattccatgcgcatattctatgttcacgcatataccagcaaaatttggaatgaggcagtatcttacagacttgaaacctatggagcaagagtagtgcagggtgatttggtctgtttggatgaagacattgatgacgagaatttcccaaatagtaaagtggttcttccagtacttggatacaatattcagtacccgaagaacaaagtagggcagtggtaccatgacatacttagcagagatggactacagacatgtaggtttaaagtacctactctgaaactgaatataccaggttgctatagacagattttgaaacatccctgtaatctctcataccaactaatggaagatcatgacattgatgtcaaaacgaaaggttcccacattgatgaaacagctttgtctcttttgatctcttttgatcttgatgcttcatgctatgctaccgtttgtctgaaggaaataatgaagcatgacgtttaa

SEQ ID NO: 119793 - DNA, 716 bp, Homo sapiens
ttttgttgtaaaactgtaaaataagcaaggccaaatatttattgtttggcaacacatagagatatatagagttttacatgtaaaattacctataaatgtcaacagcacattgacatggtaaatacgaagttcaaaatgggatatccctggcatggaatagagagctgggatggcggagggccacacgggaagctgcaatagaatttttgatgtttgcttcattctctaggtgatgtgttcactggtgttcatcttatcatgtttttaaattgacaagcatgttacatatacaccacagaatactatgcagccataaaaaatgatgagttcatgtcctttgtagggacatggatgaagctggaaaccatcattctcagcaaactgtcacaaggacaaaaaaccaaacaccgcatgttctcactcataggtgggagttgaacaatgagaacacatggacacaggaaggggaacatcacacaccggggcctgttatgcttgattctgctcctcctacccttggacatcagactccaggttcttcagcctttggactctgggacttgcaccagaggcttaggcttcctaggccacagactaaaggctccactgtcggcttcccgggttctgaggctttcaaacttggactgggccactactggctttcctttttccccagcttgcagacggcctacagagggactttgccttttaatcat

SEQ ID NO: 119794 - DNA, 2283 bp, Homo sapiens
atataataataataaataaataaataaataattaaaaaaatttaaaaacaaccctctttaaaaaaaaaaaaaagaaataccatttgatccagcaataccattactgggtatatacccaaaggatttataaatcattctactataaagacacatgcacacgtatgtttactgcagtactattcacaataacaaagactgggaaccaaccccaaatgtcccatccaatggatagacctggattaagaaaatgtggccccttatacacccatggaatacctatgcagccataaaagaaggatcagttcatgtccctttgcagggacatggatgaagctggaagccatcatcctcagcaaactaacacaggaacagaaaaaccaaacactgcatgttctcactcataggtgggagttgaacaatgagaacacatggacacagggtggggaatatcacacactggggcctgttgacggcttccagaagaaagaagaggcagcaattggtgctattctgcagcctctgctggtgatacagacagtgttgggagtggacctccagcaaactctagcagacctgcagcagaggggcctgttagaagaaaaactaacaaacagaaaaaaaatagcacatacagtcagagaccacatccaaagggaacacaactcctctccagcaagggaacaaaactggatggagaatacgtttgatgaattgacacaagtaggcttcagaaggtgggtaataaactcctctgagctaaaggagcatgacctaacccaatgcaagaaaggaacatggatgatgctggaaaccatcattttcagcaaactaacacaagaacagaaaaaccaaacactgcatgttctcactcataagtgggagttgaacaatgagaacacatggacacagggaggggaacatcacacactgggtcctgtctggaggatgtttcaaatctatgtagtggccgaaagaatgttagacaagattccaagtttggcttttggactgttggacttacgccagtggtttgccaggggctgttggtcatttggccatagactgaaggctgcacggatcacagctcctcgcttagcaagggaacaaaactggatggagaatgagtttgacaaattgacagaagtggtcttcagaaggtgggtaataacaaagtccaagctaaaggagcatgctctaacccaatgcaaggaagataagaaccttgaaaaaaaggaactggccacacaacagaagatgagcagcaggacagccagtgaagcttcatctgtatttacagccactccccattgctaccattactacctaagctccgcctcttatcacatcagtggcagcattagattccctgtactggaaaaaatcagattacacatgggcttggagaataagtgcaaggttttattgagtggtggaagtagctctcagcagatgtatggggacttagaaggcggatggaatgggaaggtggtctttccctggagttgggctgttcaggagccagcctctcctccaaccacccttggccaaatttccctcactgtctgttgttccaccgtcaatggtctgccagcatctgttgatgtgttcttctgcagggaggcattgcctcgaaacctccaaaagtttcctgctaaagacctaggctgcatcttactccagtacatagacaaccttctgctaggatactccacagcagtcgggtgtgcaagaaggatggatgccttgcttcgacacctggaggactgtgggtataaggtgtccaagaagaaagctcagatctgcagacagcagacagagggagaacaaacaataagagaaagatggataaagttatcagatggaagaatagctgtgccacagctgctaggagctgcagttgtgcttgctgtacataaaactatccatttaggccaagaatcacttgaaaaactgttaggccagtatttctacatctcacacttgccagctcttgctaaaacagtagcacagcaatgtgttacctgtcaacaacgccatgcaaagcaaggcccctctgttcctcctggcatacaagcctatagagtggcttcttttgaaaatcttcaagtagacttcacagagatgcctaaatgtggagatcaaggactagaacgtggctccactgtggccttggtagaagggaccccagatcattatcctgaccactcccacagctataaaggtagaaggaatcccaaactagattcacacagctgcgtgaagcctgcaaccgctaagacctag

SEQ ID NO: 119795 - DNA, 872 bp, Homo sapiens
gaaagagatacagggatgctgtggaagagaaattggcaaagcttcagaagcataattcagaactggaaacacagaaagaacaaatacagctgaagcttcaagagaagactgaagagttaaaagaaaaaatggacaacctcaccaagcagctctttgatgatgtacaaaaggaagaacggcaaagaatgcttcttgaaaaaagttttgaactgaaaacacaagactatgagaagcagattcagtctttgaaagaagaaattaaagctctcaaggatgagaagatgcaactccaacacctggtggagggggagcacgtcacttctgatggcttgaaggcggaagtggcccgcctgagcaagcaggtcaagacaatctctgagttcgaaaaagagatagaactacttcaggcacagaagatagatgtggagaaacatgtgcagtcacaaaaacgggaaatgagagaaaagatgtcagagatcaccaaacaacttctcgaaagctatgacattgaagatgtaagaagcaggctctctgtggaagatctggaacatttaaatgaggatggagaactttggtttgcttatgaaggactaaagaaagcaacacgtgttttggagagccatttccagtctcagaaggattgctatgaaaaggagattgaagctttgaacttcaaagtggtgcatctcagtcaagaaatcaaccacctgcagaagttattcagagaagaaaatgacatcaatgaaagcatccgtcatgaagttaccaggctaacatcagagaacatgatgatcccagactttaaacagcaaattccagaattggagaaacagaagcaagatcttgaaatccgcctgaatgaacaagctgag

SEQ ID NO: 119796 - DNA, 1474 bp, Homo sapiens
tccaagctgaattccggggacggctgctggagcggcgcccgccgcggctcagcgcattcccgctctccgcttccctctccgctgcgtccccgcgcgaagatggcaaccgaggggctgcacgagaacgagacgctggcgtcgctgaagagcgaggccgagagcctcaagggcaagctggaggaggagcgagccaagctgcacgatgtggagctgcaccaggtggcggagcgggtggaggccctggggcagtttgtcatgaagaccagaaggaccctcaaaggccacgggaacaaagtcctgtgcatggactggtgcaaagataagaggaggatcgtgagctcgtcacaggatgggaaggtgatcgtgtgggattccttcaccacaaacaaggagcacgcggtcaccatgccctgcacgtgggtgatggcatgtgcttatgccccatcgggatgtgccattgcttgtggtggtttggataataagtgttctgtgtaccccttgacgtttgacaaaaatgaaaacatggctgccaaaaagaagtctgttgctatgcacaccaactacctgtcggcctgcagcttcaccaactctgacatgcagatcctgacagcgagcggcgatggcacatgtgccctgtgggacgtggagagcgggcagctgctgcagagcttccacggacatggggctgacgtcctctgcttggacctggccccctcagaaactggaaacaccttcgtgtctgggggatgtgacaagaaagccatggtgtgggacatgcgctccggccagtgcgtgcaggcctttgaaacacatgaatccgacatcaacagtgtccggtactaccccagtggagatgcctttgcttcagggtcagatgacgctacgtgtcgcctctatgacctgcgggcagatagggagggttgccatctttttcccaaagaaagcatcatatttggagcatccagcgtggacttctccctcagtggtcgcctgctgtttgctggatacaatgattacactatcaacgtctgggatgttctcaaagggtcccgggtctccatcctgtttggacatgaaaaccgcgttagcactctacgagtttcccccgatgggactgctttctgctctggatcatgggatcataccctcagagtctgggcctaatcatcttctgacagtgcactcatgtatacctgagaatttgaaatcttcacatgtaaatagatattacttctagaggagcttagagtttattgcagtgtagcttaggggagcaacccatggctcacaggtcactaagcgtctccaatatgactattaaaactgtcacctctggaaatacactagtgtgagccttcagcactgcgagaataccttcaagtacagtatttttcttttggaacactttttaaaatgtatctgtttttaaggttattctaaattatagtagcctcaactcattctgtcaccagta

SEQ ID NO: 119797 - DNA, 2711 bp, Homo sapiens
gcgcgaagatggcaaccgaggggctgcacgagaacgagacgctggcgtcgctgaagagcgaggccgagagcctcaagggcaagctggaggaggagcgagccaagctgcacgatgtggagctgcaccaggtggcggagcgggtggaggccctggggcagtttgtcatgaagaccagaaggaccctcaaaggccacgggaacaaagtcctgtgcatggactggtgcaaagataagaggaggatcgtgagctcgtcacaggatgggaaggtgatcgtgtgggattccttcaccacaaacaagatcctgacagcgagcggcgatggcacatgtgccctgtgggacgtggagagcgggcagctgctgcagagcttccacggacatggggctgacgtcctctgcttggacctggccccctcagaaactggaaacaccttcgtgtctgggggatgtgacaagaaagccatggtgtgggacatgcgctccggccagtgcgtgcaggcctttgaaacacatgaatctgacatcaacagtgtccggtactaccccagtggagatgcctttgcttcagggtcagatgacgctacgtgtccgcctctaatgacctgcgggcagataggggaggttgccatctattccaaagaaagcatcatatttggaagcatccagcgttggacttctccctcagtggtcgccctgctgtttgctggatacaatgattacactaatcaacgtctggggatgttctcaaagggtccccgggtcttccatccttgtttggacatgaaaaccgcgttagcactctacgagtttcccccgatgggactgctttctgctctggatcatgggatcataccctcagagtctgggcctaatcatcttctgacagtgcactcatgtatacctgagaatttgaaatcttcacatgtaaatagatattacttctagaggagcttagagtttattgcagtgtagcttaggggagcaacccatggctcacaggtcactaagcgtctccaatatgactattaaaactgtcacctctggaaatacactagtgtgagccttcagcactgcgagaataccttcaagtacagtatttttcttttggaacactttttaaaatgtatctgtttttaaggttattctaaattatagtagcctcaactcattctgtcaccagtagaattcagcagttaatatattccatattatttctttgaatcaattcattttcagagcactttaaagtctgatatttctcgatgtgcactgtgatgcctggaaccttcctctggaagtgctgattttatggactgaggactggtgactggtctgtgatagaagcaaattccaattccaaatgtaattagacaaaaatcatttttttagaatgtgtttttattgtaaaagtatctttttcagcttcctgttctattgtcttttttcagatacaacatttttgtctatggtgaactgctgtaaatgacgcagagaaatgcctaaaaaggacaggtggtttgactcatggatgatgatgatgtcactgtgccacttggacagggcgttttctctgaattgaagggaaagccaatggtgtttgtaaacaaatgcttctgagagcaaagaaaagtcttctgtgtgggaacacaagatagtaaacttatttaaaaacctattagtagaattagtggaaacacttaggttaaagtgaatcttgtccatataaattatattcatggccgggcgcggtggctcacgcttgtaatcccagcactttgggaggccgaggcgggcggatcacgaggtcaggagttcgagaccacggtgaaaccctgtctctactaaaaaatacaaaaaattagccgggcgtggtggcgggcgcctgtagtcccagctactcggagaggctgaggcaggagaatggcgtgaacccgggaggtggagcttgcagtgagccgaggtcgagccactgcagcctgggtgacaaagcgagactccgtctcaaaaaaaaaaaaaaaaattatattcatatgtattgcattgcaattataattacatatgcagattgattgatagtcatgaataataacgtctgctcctcttacatagaaagaaaaacgatattaaaagaagatcttctctttatttgagactcagaattccttctagaagaaggaagtgctttttgttataggatcccttcttttcctttttttgtttttttgtaagatgtagatgcttattctttgctttagaaaacttctcacttaaaaagatggcatgcacctaggggaataaaaggtcacctcagacaccaggtgtcattcctggtgaggcctgcctcgtcggtggcctggggtctgccggcaggttctggctgcacctgaaggctgcgtgcaccttgtcccctggacaggtctcctttcctggccctgctccagcccagcccttcttctagtggtagctctggctttgcaggcccagctccaggccctgctcctcagagagactcttccagagctggagctgggcacagccataagacaggactggaccagatgctcctgtaaacatccaggggtgtgccaggcccaccctcacaactgcttgttcaggtatcgtgatgggccactcggtccaaaatcagccaggccatcttttccatcatctcacttcaaataaacataataattataaaaaaaaaaaaaaaaa

SEQ ID NO: 119798 - DNA, 1578 bp, Homo sapiens
atgcagaaacagtacctgggtccagatatgctttcctgcggcgctttcctctgttacctcgtttcatcctcacagcagcatggacgatttgactccaaaagaattgttcagcagctgcgagcctgcggcgttttagaaacgattcgcattagtgcacagagctacccttccaggtggacatacatcgagttctacagtcgctacggcattctcatgaccaagcaagagctttccttcagcgataaaaaggaggtgtgcaaggtggttttacacagactcatccaggattctaatcagtaccagtttggtaaaaccaaaattttcttcagagcaggacaagtggcttatttagagaaacttcgattggataaactgaggcagagttgtgttatggtacaaaagcacatgcgtggctggctccagaggaaaaaattcctccgagagagacgagccgccctgataatccagcagtacttccggggtcagcaaactgtgaggtatgttggaatcaaggaacacatgtggaactgtggggctttctgtgctgatcatctccggcggggaggactcatcaaggacaagggacctttctcctgtgacccagggtgcagacgtgcatgggtcccctttgtggtcgtgagcattagggcaagaaagacaatctctgagttcgaaaaagagatagagctacttcaggcacagaagatagatgtggagaaacatgtgcagtcacaaaaacggcaaatgagagaaaagatgtcagagatcaccaaacaacttctcgaaagctatgacattgaagatgtaagaagcaggctctctgtggaagatctggaacatttaaatgaggatggagaactttggtttgcttatgaaggactaaagaaagcaacacgtgttttggagagccatttccagtctcagaaggattgctatgaaaaggagattgaagctttgaacttcaaagtggtgcatctcagtcaagaaatcaaccacctgcagaagttattcagagaagaaaatgacatcaatgaaagcatccgtcatgaagttaccaggctaacatcagagaacatggcccagcccccgagcctcgcacgttcggcagccccggcctggccccggcccctcctgcccatggcggtggccgagctgtacacgcagatgctggaggaacataaggctgtgatcctacagaaatacgcacgggcgtggctggccagacgcagattccagagtatccgacgattcgtgcttaatattcagcttacttacagggtccagcgtttgcagaaaaagttggaagatcagggtgcaagaaacagaggctttgaaagctcagaattggcagacagggccacagagactcagagaagcactagactaggagtcagggtgcctgggtcagggctttgctacctgactggatgtgacaagaaagccatggtgtgggacatgcgctccggccagtgcgtgcaggcctttgaaacacatgaatctgacatcaacagtgtccggtcagtgagtagaatgttcatgccacctctctgttctgccggcattgcctggcttgggtaa

SEQ ID NO: 119799 - DNA, 510 bp, Homo sapiens
gtacccatgcggccagtaggtgtcgctgttcccctgccggcgggagccaggagccccgcgcgggcccccagcgccactcagccttccgctcccggcaggttcgcagacccaccggagctcccgagagagggccgctctacccgcccccgccccgggactgtgcccgtgctcacctggctaccaccgtagagacactgccggcctaaggaagtaccttcggggagagaaaggagagacgggtctgttggggcgaaacatgggccccgacggaagcggctccgagccggcttctctcgtggctcccaactctccctcctttctcttcacgtgccatgggcggcggtggggcactgagggcctcctggtaaaatcccaagaggggagattcaaccggggttccatatgggctttacgaataaacaagaggttgaaaatcccagcttcgtgggagctagctacagaaagagtggattggtttcaatattcttgcctcaaaaaaaaaaaaaaaaa

SEQ ID NO: 119800 - DNA, 1395 bp, Homo sapiens
atgaattggagtgggctgctgactcatgggctagcagaggcagccatgaaacatgcaaatcagcaatcccttcttccaggtctgtcccaacagttgagagactctcctccccagaccagccctagtgttggtacaggagcaaccgacaccaaaaagaagaaaataaataatggcactaaccctgagacaaccacttctggtggttgccactcacctgaggatgtgagtcttggctggccaggctcctggagacagagggcccaaggggtggtggaggtttcctcagctgagaaatggggtgggggcaaatggtctaaggttctgggaacctctaagtcagatgagggagaggccttgagggtcagccgcacgcctgagaggcaggacagacccaaagtgtggtttggagtaatattcatacggcatggactttaccaagatggcgtatttaagtttacagtttacatccctgataactatccagatggtgactgtccaagaataaaatacctaggaatccaacttacaagggatatgaaggacctcttcaaggagaactacaaaccactgctcaatgaaataaaagaggatacaaacaaacggaagaacattccatgctcatgggtaggaagaatcaatattgtgaagatggccatactgcccatagtaatttatagattcaatgccatccccatcaagctaccaatgactttcttcacagaattggaaaaaattactttaaagttcatatggaaccaaaaaagagcgtgcattgccaagacaatcctaagccaaaagaacaaagctggaggcatcatgctacctgacttcaaactatactacaaagatacagtaaccaaaacagcatggtacttgtaccaaaacagagatatagaccaatggaacagaacagagcccacagaaataacaccacacatctacaactatctgatctttgacaaacctgacaaaaacaagaaatggggaaaggattccctatttaataaatggtgtcgggaaaactggctagccatatgtagaacactgaaactggatccgttccttacaacttttacaaaaattaattcaagatggattaaagacttacatgttagaccgaaaaccataaaaaccctagaagaaaacctaggcaataccattcaggacataggcatgggcaaggacttcgtgactacaacactcaaagcaatggcaacaaaagccaaaatagacaaatgggatctaattaaactaaagagctactgcatggcaaaagaaactaccatcagagtgaacaggcaacctacagaatgggagaaaatttttgcaatctactcatctgacaaagggctaatatccagaatctacaaagaactcaaacaaatttacaattaa

SEQ ID NO: 119801 - DNA, 1563 bp, Homo sapiens
atgaggctaaacatgaagaactctaagacggcagaaccacttgaagaaaatgtcaatgaaaacatatctgaaacaggtctcagtcgagaagtttattttgccaaggttaaggatgtgcctgtgacacagcctcaggagatcctgatgacatttacccacggtgtcccacaccacacctattccaaaattgaccacatagttggaagtaaagctctcctcagcaaatgtaaaagaacagaaattataacaaactatctctcagaccacagtgcaatcaaactagaactcaggattaagaaactcactgaaaaccgcccaactacatggaaactgaacaacctgctcctgaatgactactgggtacataacgaaatgaaggcagaaataaagacgttctttgaaaccaacgagaacaaagacacaacataccagaatctctgggacacattcaaagcgggccacaagccccccaacaccgcagggcctgtgctcatgaaggtgccccggtggctccagacccgccttgtcgtggccaagccggggcacctcctgcctcccctggctgaccacaccctctccagaagttacgccagaaaagatcaacttgcagcatgccagaaggtcttccctagcttttccaagcagcagtttgaatcttatatagaacattccataaccacggaacatttggttcgcgacgccaatttcttgaggatgaggagaaacacaactgcctctgccaagagcccaggtggccacagagctgatctgaccaaccctcctcctgaacaggagttggaagatggtctccagaacccaccccagcccacctggggccttccagaacccattcccttccatttgccatttaaactggagggcaagggctctcagaggagatgcttctggctacttgagaccaatacacatgcatcaaagagccagtacgtgccaggctccaccatgaggttgatcaaaactaaatcaggaaatcagtggtgcctacagaaaccagtgtttatgattcacatctttcaaggcaggaatgggaagcaaatgcttctgggggatcgcgatgacatggaggtgaattcctccagcaaatgtgattgtggagttaccgcgtgtgccacgccaggcccactggagctgcccaagactgtggtcagcctctctgctcccatggaagcaactggagagaagagtgagaaatatgagtcaaaaagttgtgtggcgacgtgggcatcccaggggctcctcttaggaggaaatgagaagcaaaggctgcagatgctcacatcgagtgttcttggaaaggctgttgacctgagcgccagggagataattccagatgcgggcaccattggggttggttttctcctccctcctggtggggatggagggcacaggatgcagacttttctctttgtctgtacttcaagtgcctcctgccaagtagaaaatgaagagtcagtccgtgtgctgggctcagagccctgccgttttagtggcttcatggatggcttggcacaactagggagcaatggtgtctcccacacctga

SEQ ID NO: 119802 - DNA, 325 bp, Homo sapiens
ctatctcttgcatagtgaaagctggttgcgattggagggattgccattcccattgtgcttgcagccctcctccatcttccagactgtcctctttccccccatgcggggtgagatggcccgggaatgagccttcccagcagaaaaacttacatctagaatgtcgatcatcacagggcgctgcggcctcactcccacgtccacgggcaggcccagcccctccctggccttcaggtgacctcagctgcccggctggccccaactccaccgcacaacgcagactgcgggtccccaggcctggacccctggccccgtcccgcccgcgcat

SEQ ID NO: 119803 - DNA, 431 bp, Homo sapiens
  misc_feature (1)...(431): n = a,t,c or g
atgggaaagggaaagcctttcgaccaattattgtggcgctaatggcccgagcatgcaatattcatcataacaactcccgatccgatgtccagttttcacaagctgattgctgagaaggttctaggcggcgtctgttaaaaagcattgctttctgttaattagacatgtgcaagccagccagcgcgccatagccttaattgcagaaatgatccacactgctagtctggttcacgatgacgttattgacggtgcaagtcctcggaagagggaaaacacacagtttaataaggatctgggggtggaaaagaaggctgttccttgctggaggtttaattctttctgcagcatctatagctctggcacgaattggaaatacaactgttatatctattttaacccaagttattgaggnttggtgcgtggtggatttt

SEQ ID NO: 119804 - DNA, 858 bp, Homo sapiens
atgcccgcgcaggctcataggcagaagggacttgacttgtctcagataccctattttaatcttgtgaagcatttaacacctgcctgtccaaatgtatatagtatatcacagtttcatcacacaaccccgtacagcaaaacacacagtggtgagaaatacaccgatcctttcaaactcggttggagagacttgaaaggtctgtatgagggtattagaaaggaacccctcatatcaacaacagaacttaaggaaatctctgagtactactttgatgtaaaaggaaaagcctttagaccgattattgtggtgctaatggcccgagcatgcaatattcatcataacaactcccgacatgtgcaagccagccagcgcgccatagccttaattgcagaaatgatccacactgctagtctggttcacgatgacgttattgacgatgcaagttctcgaagaggaaaacacacagttaataagatctggggtgaaaagaaggctgttcttgctggagatttaattctttctgcagcatctatagctctggcacgaattggaaatacaactgttatatctattttaacccaagttattgaagatttggtgcgtggtgaatttcttcagctcgggtcaaaagaaaatgagaatgaaagatttgcacactaccttgagaagacattcaagaagaccgccagcctgatagccaacagttgtaaagcagttcataggcggaagggacttgacttgtctcagctctgtccattgagtgggtctagaaacgatgacacccagtactcaaattctggtttcttaacaccattttccaccaaaaggaatgtgggctccttggagaacagtgaataa

SEQ ID NO: 119805 - DNA, 681 bp, Homo sapiens
  misc_feature (1)...(681): n = a,t,c or g
agtcttgctctgtcgcccaggctagagtgcagtgagctgagatcatgccactgcactccagcctgggtaacagagcgagaccctatctcaaaaaaaaattattgcttaggtactaataatgacattataaatttattttaatgatatttttgaaggataaaatatatgtgtgtatataaatggatttgtatgtaaaatatactttgaggatatattatatatattataaacaatgattagtttaaatgttcaacaagttcatggaatgttcgggtatcagtttacaatatatgattcttcgttcctgaccaacagtttcctgctctacgaaacgcactcttttgccttgaagcggcattggacagtggtgtcactaatggctacaatccatgcaattctagcttatgcttttgccttagctgggaaaagagaagccagtgggaatctttactccaaaccctggatcaatctgccaccaaacctaaataatggcatctactgggaaagagaaaggaaacccaagacagaagaatttccatcctttattccctgggcncttctgctcagctgagaagagttgcttgtgtgttggctgcattnccggaaatcctgacccacctatgctagtaagatgtccagtgctnccacagatgattccaggngcttctccaccagccctgg

SEQ ID NO: 119806 - DNA, 3603 bp, Homo sapiens
atgcctcgccctgcttcggctcgcacacggtgcgcgcacccactgacctgcgcccactgtcctgcactccctagtgagatgaacccggatcctcaaaacaatcggatttttcaaaggcaaaatgtgacttctttccgaaatattacccaactctcgttccaactgatttcagaaccaatgtttggagattactggattgttgtgaaaagaaactcaagggagacagtgacacaccaatttgctgttaaaagatatgtgctgcccaagtttgaagttacagtcaatgcaccacaaacagtaactatttcagatgatgaattccaagtggatgtatgtgctaagtacaactttggccaacctgtgcaaggggaaacccaaatccgggtgtgcagagagtatttttcttcaagcaattgtgagaaaaatgaaaatgaaatatgtgagcaatttattgcacagttggaaaatggttgtgtttctcaaattgtaaatacaaaagtcttccaactctaccgttcgggattgttcatgacatttcatgtcgctgtaattgttacagaatctgggacagttatgcagatcagcgagaagacctcagtttttatcactcaattgcttggaactgtaaactttgagaacatggatacattctatagaagagggatttcttattttggaactcttaaattttcggatcccaataatgtacctatggtgaacaagttgttgcaactggagctcaatgatgaatttataggaaattacactacggatgagaatggcgaagctcaattttccattgacacttcagacatatttgatccagagttcaacctaaaagccacatatgttcgacctgagagctgctatcttcccagctggttgacgcctcagtacttggatgctcacttcttagtctcacgcttttactcccgaaccaacagcttcctgaagattgttccagaaccaaagcagcttgaatgtaatcaacagaaggttgttactgtgcattactccctaaacagtgaagcatatgaggatgattccaatgtaaagttcttctatttgatgatggtaaaaggagctatcttactcagtggacaaaaggaaatcagaaacaaagcctggaatggaaacttctcgttcccaatcagcatcagtgctgatctggctcctgcagccgtcctgtttgtctatacccttcaccccagtggggaaattgtggctgacagtgtcagattccaggttgacaagtgctttaaacacaaggttaacataaagttctctaacgagcagggcttacctggttccaatgctagtctctgtcttcaagcggcgcctgtcttattctgtgccctcagggctgtggataggaatgtccttctactgaaatctgaacaacagctgtcagctgaaagtgtgtataacatggttccaagtatagagccgtatggttatttctaccatggcctcaatcttgatgatggcaaggaagacccttgcattcctcagagggatatgttctacaatggtttatattacacacctgtaagcaactatggggatggagatatctataatattgtcaggaacatgggtctaaaagtctttaccaatctccattaccgaaaaccagaagtatgtgtgatggagagaaggctgccactccctaagccgctttatctggaaacagaaaattatggtccaatgcgtagtgttccgtctagaattgcatctagtggaatcagaggggagaatgctgactatgtagaacaggctataattcaaacagtaagaacaaacttcccagagacatggatgtgggacctcgtcagtgtcgattcctcaggctctgccaatctttcgttcctcattcctgatacgataacccaatgggaggcaagtggcttttgtgtgaatggtgacgttggatttggcatttcctctacaaccactctagaagtctcccaacctttctttattgagattgcctcacccttttcggttgttcaaaatgaacaatttgatttgattgtcaatgtcttcagctaccggaatacatgtgtagagatttctgttcaagtggaggagtctcagaattatgaagcaaatattcataccttgaaaatcaatggcagtgaggttattcaagctggagggaggaaaacaaacgtctggactattatacctaagaaattgggtgccaaagcctccaagcagggagttttggacttgccaaacgatgtagtagaagggtcagccagaggctttttcactgttgtgggggatattctaggacttgccttgcagaatctggttgttctccaaatgccctatggaagtggagagcagaatgctgccctactagcatctgatacttatgttctggactatctgaaatctactgagcaactgacagaggaagttcaatctaaggctttctttctcttatctaatgcggcattggacagtggtgtcactaatggctataatcatgcaattctagcttatgcttttgccttagctggaaaagagaagcaagtggaatctttactccaaaccctggatcaatctgccccaaaactaaataatgtcatctactgggaaagagaaaggaaacccaagacagaagaatttccatcctttattccctgggcaccttctgctcagactgagaagagttgctacgtgctgttggctgtcatttcccggaaaattcctgacctcacctatgctagtaagattgtgcagtggcttgcccaacggatgaattcccatggaggcttttcttccaaccaggctccggtagattgcaaacgacctgctttctttgtgatcccggctgcattcggacccctgtcagacagtaaatcccaagatcaaaacactgtcacctttagcagtgaaggatccagtgagattttccaggttaacggtcataaccgcctactggtccaacgttcagaagtaacacaggcacctggagaatacacagtagatgtggaaggacacggttgtacatttatccaggccacccttaagtacaatgttctcctacctaagaaggcatctggattttctctttccttggaaatagtaaagaactactcttcgactgcttttgacctcacagtgaccctcaaatacactggaattcgcaataaatccagtatggtggttatagatgtaaaaatgctatcaggatttactccaaccatgtcatccattgaagagggttttggtcgagcagacagtttccctttttctgttgagcagagcaaccttgtgttcaacattcagccagccccagccatggtctacgattattacgaaaaaggcctaatccaacgttgcccatcccgttggagcaaaggcattgcttgtgcagaggatcggccaggacgtcctatgcttgcatccttactcaccagcatggctatggcacaagaggctttccgaagcagctgctcaggtggctcagcctggaaactggggcaggctgtgagggagcgtcttcctgagccctcagtatgtcatccacgagggacaggatgggctctggggacttgttctttgccccttccagagctgaaaccagaatga

SEQ ID NO: 119807 - DNA, 4140 bp, Homo sapiens
atggaccaacaagcaatatatgctgagttaaacttacccacagactcaggcccagaaagttcttcaccttcatctcttcctcgggggatggaaagaaggaagaaagaaagaaagaaagaaaagaaagaaagaaagaaagaaagaaagaaagaaagaaagaaagaaagaaaggaagaaagaaagaaagaaaggaaagaaagagaaagaaaagaagaaagaaagaaaggagagaaagaaaaagaaagagagagaaaggaaaggaaagaaagaaaaagagaaggaggaaggaaggaaggatggaaggaaggaaggaaaaatattttacataccgttcagctggatattacggcctttttaaagaccgtaaagaaaaataagcacaagttttatccggcctttattcacattcttgcccgcctgatgaatgctcatccggagttccgtatggcaatgaaagacggtgagctggtgatatgggatagtgttcacccttgttacaccgttttccatgagcaaactgaaacgttttcatcgctctggagtgaataccacgacgatttccggcagtttctacacatatattcgcaagatgtggcgtgttacggtgaaaacctggcctatttccctaaagggtttattgagaatatgtttttcgtctcagccaatccctgggtgagtttcaccagttttgatttaaacgtggccaatatggacaacttcttcgcccccgttttcaccatgggcaaatattatacgcaaggcgacaaggtgctgatgccgctggcgattcaggttcatcatgccgtttgtgatggcttccatgtcggcagaatgcttaatgaattacaacagtactgcgatgagtggcagggcggggcgtacaactttggccaacctgtgcaaggggaaacccaaatccgggtgtgcagagagtatttttcttcaagcaattgtgagaaaaatgaaaatgaaatatgtgagcaatttattgcacagttggaaaatggttgtgtttctcaaattgtaaatacaaaagtcttccaactctaccgttcgggattgttcatgacatttcatgtcgctgtaattgttacagaatctgggacagttatgcagatcagcgagaagacctcagtttttatcactcaattgcttggaactgtaaactttgagaacatggatacattctatagaagagggatttcttattttggaactcttaaattttcggatcccaataatgtacctatggtgaacaagttgttgcaactggagctcaatgatgaatttataggaaattacactacggatgagaatggcgaagctcaattttccattgacacttcagacatatttgatccagagttcaacctaaaagccacatatgttcgacctgagagctgctatcttcccagctggttgacgcctcagtacttggatgctcacttcttagtctcacgcttttactcccgaaccaacagcttcctgaagattgttccagaaccaaagcagcttgaatgtaatcaacagaaggttgttactgtgcattactccctaaacagtgaagcatatgaggatgattccaatgtaaagttcttctatttgatgatggtaaaaggagctatcttactcagtggacaaaaggaaatcagaaacaaagcctggaatggaaacttctcgttcccaatcagcatcagtgctgatctggctcctgcagccgtcctgtttgtctatacccttcaccccagtggggaaattgtggctgacagtgtcagattccaggttgacaagtgctttaaacacaaggttaacataaagttctctaacgagcagggcttacctggttccaatgctagtctctgtcttcaagcggcgcctgtcttattctgtgccctcagggctgtggataggaatgtccttctactgaaatctgaacaacagctgtcagctgaaagtgtgtataacatggttccaagtatagagccgtatggttatttctaccatggcctcaatcttgatgatggcaaggaagacccttgcattcctcagagggatatgttctacaatggtttatattacacacctgtaagcaactatggggatggagatatctataatattgtcaggaacatgggtctaaaagtctttaccaatctccattaccgaaaaccagaagtatgtgtgatggagagaaggctgccactccctaagccgctttatctggaaacagaaaattatggtccaatgcgtagtgttccgtctagaattgcatctagtggaatcagaggggagaatgctgactatgtagaacaggctataattcaaacagtaagaacaaacttcccagagacatggatgtgggacctcgtcagtgtcgattcctcaggctctgccaatctttcgttcctcattcctgatacgataacccaatgggaggcaagtggcttttgtgtgaatggtgacgttggatttggcatttcctctacaaccactctagaagtctcccaacctttctttatggagattgcctcaccctttccggttgttcaaaatgaacaatttgatttgattgtcaatgtcttcagctaccggaatacatgtgtagagatttctgttcaagtggaggagtctcagaattatgaagcaaatattcataccttgaaaatcaatggcagtgaggttattcaagctggagggaggaaaacaaacgtctggactattatacctaagaaattgggtgccaaagcctccaagcagggagttttggacttgccaaacgatgtagtagaagggtcagccagaggctttttcactgttgtgggggatattctaggacttgccttgcagaatctggttgttctccaaatgccctatggaagtggagagcagaatgctgccctactagcatctgatacttatgttctggactatctgaaatctactgagcaactgacagaggaagttcaatctaaggctttctttctcttatctaatgcggcattggacagtggtgtcactaatggctataatcatgcaattctagcttatgcttttgccttagctggaaaagagaagcaagtggaatctttactccaaaccctggatcaatctgccccaaaactaaataatgtcatctactgggaaagagaaaggaaacccaagacagaagaatttccatcctttattccctgggcaccttctgctcagactgagaagagttgctacgtgctgttggctgtcatttcccggaaaattcctgacctcacctatgctagtaagattgtgcagtggcttgcccaacggatgaattcccatggaggcttttcttccaaccaggctccggtagattgcaaacgacctgctttctttgtgatcccggctgcattcggacccctgtcagacagtaaatcccaacttaaattttcggatcccaataatgtacctatggtgaacaagttgttgcaactggagctcaatgatgaatttataggaaattacactacggatgagaatggcgaagctcaattttccattgacacttcagacatatttgatccagagttcaacctaaaaatatcacagccacagctctgtcttgagagagtcaagaatgagggctatttattttgtgatgttacaggtctgcccacatcagtgcccaccaggaaaactgctgcttgtgttatcaagaatttaaaggccatgctatccatcatgtgttacctcacattggtgttccccgcttctttcactcagaatgctaactcttcagagacacaggaaagtgccagtttcaacaaatgtcaggcaccgtgtatgaaatctaacaatgcgctcatcgtcatcctcggcaccgtcaccctggatgctgtaggcataggcttggttatgccggtactgccgggcctcttgcgggatatcgtccattccgacagcatcgccagtcactatggcgtgctgctagcgctatatgcgttgatgcaatttctatgcgcacccgttctcggagcactgtccgaccgctttggccgccgcccagtcctgctcgcttcgctacttggagccactatcgactacgcgatcatggcgaccacacccgtcctgtggatctacccactagtcaattcaccatcttgttga

SEQ ID NO: 119808 - DNA, 1357 bp, Homo sapiens
ctagtggaatcagaggggagaatgctgactatgtagaacaggctataattcaaacagtaagaacaaacttcccagagacatggatgtgggacctcgtcagtgtcgattcctcaggctctgccaatctttcgttcctcattcctgatacgataacccaatgggaggcaagtggcttttgtgtgaatggcgacgttggatttggcatttcctctacaaccactctagaagtctcccaacctttctttattgaaattgcctcacccttttcggttgttcaaaatgaacaatttgatttgattgtcaatgccttcagctacctgaatacatgtgtagagatttctgttcaagtggaggagtctcagaattatgaagcaaatattaatacctggaaaatcaatggcagtgaggttattcaagctggagggaggaaaacaaacatctggactattatacctaagaaattgggtgccaaagcctccaagcagggagttttggacttgccaaatgatgtagtagaagggtcagccagaggctttttcactgttgtgggggatattctaggacttgccatgcagaatctggttgttctccaaatgccctatggaggtggagagcagaatgctgccctactagcatctgatacttatgttctggactatctgaaatctactgagcaactgacagaggaagttcaatctaaggctttctttctcttatctaatggttatcaaaggcaattatctttcaaaaactctgatggttcctatagtgtgttttggcagcagaatcagaaaggaagcatatggctcagtgctcttacttttaagacattggagagaatgaaaaaatttgtattcattgatgaaaatgttcaaaaacagaccttaatctggctttcaagccaacagaaaacaagcggctgctttaagaatgatggccagcttttcaaccacgcctgggagtttcctgctctacgaaacgcactcttttgccttgaagcggcattggacagtggtgtcactaatggctacaatcatgcaattctagcttatgcttttgccttagctggaaaagagaagcaagtggaatctttactccaaaccctggatcaatctgccacaaaactaaataatgtcatctactgggaaagagaaaggaaacccaagacagaagaatttccatcctttattccctgggcaccttctgctcagactgagaagagttgctatgtgctgttggctgtcatttcccggaaaattcctgacctcacctatgctagctctggtagattgcaaacgacctgctttctttgtgatcccgggctgcattcggacccctgtcggacagtaaatcccaa

SEQ ID NO: 119809 - DNA, 267 bp, Homo sapiens
aaaagcggcgacttctgtgtgtggagtttgcctcggtcgcaagctgcgatgccgcagtggctcagtgcttcctggccgagaacgactgggagatggaagtacgctttcgctgtcctcgcttccggctccattacctaggtcggtggagcgcacaaacctcatcccttgtgcctttgtttttcagagggctctgaactcctacttctctctgagcccaagacctagtaagtgatgaggggagcgggagccagtccgcacggaggcagt

SEQ ID NO: 119810 - DNA, 360 bp, Homo sapiens
tttttctggattttaaggtagccttccgtggttgtgtatctttacttccactgctcttggggtcaactgagttacctgtcccacgggaagtactcggtaagggagtattaggagaaaaggaagatggatcgctactggcattacgagtccggaatgaatcatcagctagtgaaagcacagaagtctttcctaaccctgagacagaagttgtatatcctgttgtagaacttttactagcacatttctctaagttgccatattttgcatgaaaagcttgattattaaaaggctggcttcgaatcagtttggatttcttgatttctttactcgtcgatggggtgacagaagagggtccaggaa

SEQ ID NO: 119811 - DNA, 1773 bp, Homo sapiens
atgaggaagattacaggaggagtaggttttagggagagatcagtgaaggtgcgagcaactgagattccaactagatatccaaaggaagccctgcatgttgcaggagtggaaatgcagttaacggctgcgatgtcatttctgaccattctgcaggacgaatcagtgtcaattcatgcatatacccactcattcctccaagtcattctcctgcatctggagcacagggacacaggtgtcagcaatgcatggctggaaactcttctgtctgttatagaagtattgccaaaagaaaccctacggcatgagattttgaatccacttgtttccaaggcacaactttcccaaacagtccagtctcgtttagttagttgtaaaattttaggaaaattgaccaacaaatttgatgcccacaccattaagcgagaaatacttcctctggtaaaatcactctgtcaagatgtagaatatgaagttcgatcttgtatgtgtcggcaattagaaaatatagcccagggcattgggacagaacttacaaaaagtgtggtgctccctgaattaatagaactttctagggatgaaggcagcagtgtacgacttgcagcttttgaaactttggttaatctgcttgatatatttgatacaggaattttcactccagatcagcacttgagatttttggaattttataagaaactttgtacattgggtttgcaacaagaaaatggacacaatgaaaaccagattccaccccaaatcctagagcaggagaagaaatatatttcagtacggaagaactgtgcttataactttccggccatgattgtttttgttgatcctaaaaacttccacatggaactctattctacattcttctgcctttgccatgaccctgaagtaccagtcagatacactattgctatttgcttttatgaagtactagatgctcttatagatcatcttccagaaatcttggaacttatgtctactggtggagaaagcagtgttcaagaaaataagttatcttctctgcctgacttgattccagcactcacagctgctgaacagcgagctgcagcctctttaaaatggagaactcatgagaagctacttcagaaatatgcctgcctgccacatgtcatatcaagcgatcagatttattaccgtttcttacaaagaatgttcacaatcatgatgacaaataatgttttacctgtccaaaaggcggcttcacgaactctatgcatttttctgcgttataatcgtaaacaagaacagagacatgaggtcattcaaaaattaattgaactgaaatctactctgaagattcctgctgataagcatctacttcagcagttagaaatgtgtgtgaggaaactcctgtgtcaagaaaaagataaagatgttctggctattgtaaaaagagaacaattagagaaagaaaagcaacagaatgatggaaggcccatgagtgataaaatgtttgaaaagaaacgtaaagaaatcaagaaatccaaactgattcgaagccagtcttttaataatcaagcttttcatgcaaaatatggcaacttagagaaatgtgctagggagcagcagctgactagtttggctggagtgtggaatgattcattccggactcgtaatgccagtagcgttccatcttccttttctcctaatactcccttaccgagtacttcccgtgggacaggtaactcagttgaccccaagagcagtggaagtaaagatacacaaccacggaaggctaccttgtaa

SEQ ID NO: 119812 - DNA, 463 bp, Homo sapiens
gcaaagacttggaaccaacccaaatgcccatcaatgatagactggataaagaaaatgtggcacatatacaccatggaatactatgcagccataaaaaaggatgacttcatgtcctttgcagggacatggatgaagctggaaaccatcattctcagcaaactaacgcaagaacagaaaaccaaacactgcatttctcactcataagtgggagttgaacaatgagaacacatggacacagggagggaacatcacacaccagggctggttggggagtgcagggctagaggagggatagcattaggagaaatacctaatgtaaatgccgggttcctgggtgcagcaaaccaccatggcacgtgtatacctatgtaacaaacctgcacattctgcatatgtatcccagaacttaaactataattaaaaaaacttttaaaataaataaataaaagtgcattccaaaaaa

SEQ ID NO: 119813 - DNA, 3097 bp, Homo sapiens
atgaagatggcggacgcgaagcagaagcggaacgagcagctgaaacgctggatcggctccgagacggacctcgagcctccggtggtgaagcgccagaagaccaaggtgaagttcgacgatggcgccgtcttcctggctgcttgctccagcggcgacacggacgaggtcctcaagctgctgcaccgcggcgccgacatcaattacgccaatgtggacggactcactgccctgcaccaggcttgcattgatgacaatgttgatatggtgaagtttctggtagaaaatggagcaaatattaatcaacctgataatgaaggctggataccactacatgcagcagcttcctgtggatatcttgatattgcagagtttttgattggtcaaggagcacatgtaggggctgtcaacagtgaaggagatacacctttagatattgcggaggaggaggcaatggaagagctacttcaaaatgaagttaatcggcaaggggttgatatagaagcagctcgaaaggaagaagaacggatcatgcttagagatgccaggcagtggctaaatagtggtcatataaatgatgtccggcatgcaaaatctggaggtacagcacttcacgttgcagctgctaaaggctatacggaagttttaaaacttttaatacaggcaggctatgatgttaatattaaagactatgatggctggacacctcttcatgctgcagctcattggggtaaagaagaagcatgtcgaattttagtggacaatctgtgtgatatggagatggtcaacaaagtgggccaaacagcctttgatgtagcagatgaagacattttaggatatttagaagagttgcaaaagaaacaaaatctgctccatagtgaaaaacgggacaagaaatctccactaattgaatcaacagcaaatatggacaataatcagtcacagaagacctttaaaaacaaagagacgttgattattgaaccagagaaaaatgcatcccgtattgaatctctgggaacaagaaaaggttgatgaagaagaagaaggaaagaaggatgagtctagctgctctagtgaagaagatgaggaagatgactccggaatcagaagctgaaacagataagacaaaacccctgggcttctgtaactaatgccaacacttctagtacacaagcagctcctgtagctgttacaacacctactgtgtcatcaggtcaagcaacacctacatcacctattaaaaagtttccaaccacagctacaaaaatttctcccaaaggaagaagagagaaaagatgagtctcctgcaacttggaggttaggacttagaaagacgggcagctatggtgcacttgctgaaatcacagcatctaaagagggtcagaaagaaaaagatactgcaggtgttacacgttcagcttcaagtcccagactttcctcctctttggataataaagaaaaggagaaagatagtaaaggaactaggcttgcatatgttgcacctacaataccaagacgactagccagtacatctgacattgaagagaaagaaaacagagattcttcaagtttgcgaacaagtagttcatatacaaggagaaaatgggaagatgatcttaaaaaaaatagctcagttaatgaaggatcaacgtatcataaaagttgctcctttggtagaagacaagatgatttgattagttctagtgttccaagcaccacatcaacaccaacagttacctctgcagctgggcttcagaaaagcctgctttccagcacaagcactactacaaagattacaacgggttcttcctcagcaggcacacaaagcagtacctcaaatcgtttgtgggctgaggatagtactgagaaagaaaaggacagtgttcctacggcagtgaccattcctgttgctccaactgttgtaaatgctgcagcttctaccacaaccctgactacaactactgctggcactgtctcctccacaacagaggtcagggagagacgcagatcatacctcactcctgttagggatgaagagtctgaatcccaaagaaaagcaagatctagacaagcaagacaatctagaagatcaacacagggagtgacattaactgatcttcaagaagctgagaaaacaataggaagaagtcgttctacccgaaccagagaacaagaaaatgaagaaaaagaaaaagaggaaaaagagaaacaagataaagagaaacaagaagaaaagaaggagtcagaaacatctagagaagatgaatataaacaaaagtactccagaacgtatgatgagacttaccagcgttataggccagtatcaacttcaagttcaaccactccatcctcttcactttctactatgagcagttcactgtatgcttcaagtcaactaaacaggccaaatagtcttgtaggcataacttctgcttactccagaggaataacaaaagaaaatgaaagagagggagaaaaaagagaagaggagaaagaaggagaagataaatcacaacctaaatcaatcagagaacgacgacgaccaagagagaaaagaagatctacaggagtttcattttggacacaagatagtgatgaaaatgaacaagaacaacaatcagacacagaagagggatccaataagaaagaaactcagacggattccatttctagatatgaaaccagttctacatcagctggtgatcgatatgattccttgctgggtcgctctggatcatacagttacttagaagaaagaaaaccttacagcagcaggctagaaaaggatgactcaactgactttaaaaagctttatgaacaaattctagctgaaaatgaaaagctgaaggcacagctacatgatacaaatatggaactaacagatcttaaattacagttggaaaaggccacccagagacaagaaagatttgctgatagatcactgttggaaatggaaaaaagggaacgaagagctctagaaagaagaatatctgaaatggaagaagagctcaaaatgttaccagacctaaaagcagacaaccagaggctaaaggatgaaaatggggccttgatcagagttataagcaaactttccaaataa

SEQ ID NO: 119814 - DNA, 785 bp, Homo sapiens
ttcacggtgaccaggtgctacgcagtggcccaggaaggaacatactttgacggaagcggatatgcagctcttgtcaaagagggctacaaagtccagtcagatgtgaacatcacactggaagtttcgaacctctcgcagaaatggcgtcttcctggggatcagcactgccatagtgcatgccattggactagagcttgtggacggcaaggtcttgttccatgtcaacaatggtgctggcaggataacagctgcatatgagcccaaaaccgccactgtgctctgtgatggaaaatggcacactcttcaagctaacaaaagcaaacaccgtatcactctgattgttgacgggaacgcagttggcgctgaaagtccacacacccagtctacctcagtggacaccaacaatcccatttatgttggtggctatcctgctggtgtgaagcaaaaatgcctgcgcagccagacctcgttccgcgggtgtttgaggaagctagctctgattaagagcccgcaagtgcagtcctttgacttcagcagagcgttcgaactgcacggagttttccttcattcctgtcctgggaccgagtcctgaacttcaagcagaatcctcagttggaatcattgctaatattttgaggagaagtgtatgtgtgaattaagaatctcttcagttcatatttcatttccaactcaggttaagtgtttctggggagagatgttgtgtttacgttacactaaaaccacatgtgcaacaaatacctccattaaatggtctaaaatgtaaa

SEQ ID NO: 119815 - DNA, 817 bp, Homo sapiens
tttgttttttccctaccaaaatgtaggatctttttggcatataatacatgatagcagctctctcgaggatattttaagaacttggttggggtttaatcacccattctgcttgaggatttatacgatatacatccaatatataagcatctggatccaagcaatgctctcctatatttcctccaatttcatataacctttggttctgaatcttaatacattctgatgaaccatgactgttttcatattgaaattttgccaatatgtctttggctttggtttgattgttgagttgaatggccatggacaccttggagagaagtggagcatggacccgtatgactccttccggcacagacagatgccttttttccttctgccctaccagactccaggttcttcaggtttggactctgtgacttgcaccacaagactcccgaggggctctcagactttaggtctcagacttggggctgcttccagaatgagccgagctatgggtttctctggtcttcagcttgcagattcccctatgcgcagagggccccgtggtcttcgtcagcgctcagtcaagacaaacaggggactccatactcacctgcttcagaagagagcccagcagctgcccacctcccgctggccccgtgggtatgcagctcggtggaccatgcagacctatgtggattgtgccttccgagctgtgatagaagagttaaaaataaattatttaggcagacagaataaggaagtccttgtgaccctgcctcgcacctgccacgtgggtccagccacactgtcccggcagacgctctcaccttag

SEQ ID NO: 119816 - DNA, 1897 bp, Homo sapiens
ctagggatgattttgccttaaggaaatatttggcaatacctggaaaccgatgttgtttccaaatgttcttgtttttgaagagtaacttatcagtttttcagcaccggggcgtgagaggatgctgccagcctctgatgggtgagaagccagggatgctgctgatcccgctccagtgcacaggacagcccgtttccctaatgtgatcaaccacatgtgtttctcaccagggctttcactgttaagggaagtgacagaatcacaccgggtgttttccctctgctgaaagttgctctgctgcccttcttttaccattttacaacataaattccagtagggcaagttgtcggggccccctgaagtcttgggggtgacagtaagttggccccgggaatttagccctctgactataaaacttgctccaagccccagctcagtgagacagatttgagcatttcctcctgtctccttgccatttgagttgaaataaacctttcttgctgcaaaacttggtgcttcagtgttctttccattttgcatgggcaaaccgacccagtttggtttagtgacactaacgggtatgaagaaggtatcggagcctcctagccatccatccacaggtgtgacctcagctggcggtggctcttcttgccctcccatgctgctgtctttaatactttctatttcccgccagaaatcctccatggaggcgctgtctacggaggcttctgagttggaacggctgaaggcaggaggatggagggattcattggagagcatcctgttaattcttcggcagcgaggaatggattttctgttttcatattgaaattttgccaatatgtctttggctttggtttgattgttgagttgaatggccatggacaccttggagagaagtggagcatggacccgtatgactccttccggcacgtcagactgcttcagaagagagcccagcagctgcccacctcccgctggccccgtgggtatgcagctcggtggaccatgcagacctatgtggattgtgccttccgagcttccatacagtacaatttcaagaagaaaaagcaaatgggtatcacaaagtgatgggagatgtgtccagatccgttttgcagtctgaggcaggaaattgacccgatgcttcccgttgacttccttcagacattcagaaactgtgctagagactgactgtcccatgaggaacaaccaacacggtgggccaggatctagaatgtcagagccttcatatcccactgtagctggtttccgcagaaacatgaaaccaaagaccacccacagcccagcaaagaggttctcggtgcacgtgcactgccgctgagacgggcaggtgcctcttctgagcccagctgcccaggagctgcctttgaaaagtctgcattcctcccatggctggtgctacagaaacagcacgtccacaactggcggctgcctttctctaagaaacatcttcatgcagagcacagtggcggttttgggctcatatgcagctgttatcctgccagcaccattgttgacatggaacaagacctaaaagcaaatatcttggaaaatgtctttggtcctcagtgcaacgaatgtcgagagggcaccttcgctctccgcgcagacaaccccctgggctgcagcccgtgcttctgctccgggctgtcccacctctgctcagagctggaggactacgtgaggaccccagtaacgctgggctccgatcagcctcttctgcgtgtggtttctcagagtaacttgaggggcacgactgagggggtttactaccaggcccccgacttcctgctggatgccgccaccgtccggcagcacatccgtgcagagccgttttactggcggctgccgcagcagttccaaggagaccaggtga

SEQ ID NO: 119817 - DNA, 4633 bp, Homo sapiens
gtcacgccccgggcagcttggctggggctaggcttccggggctctgcggtcctcggcctgtgctggcagcctcggagcccaccgagccgggcggctgggatgatgaaccggacgacccccgaccaggagctggtgccggcgtcggagcccgtgtgggagcggccgtggtcggtggaggagatccgcaggagcagccagagctggtcgctggcggccgacgcgggcctactacagtttctacaggaattctcacagcaaactatctctaggacccatgaaatcaagaaacaagtggacggactaatccgggaaaccaaagccacagattgtcgcctgcataatgtcttcaatgacttccttatgctctctaatacccagttcatagagaatcgtgtatatgatgaagaagtggaggagccagtactcaaggctgaggcagaaaaaacagagcaggagaagacacgagagcagaaagaagtagatctcattcctaaagtccaggaggctgtgaactatggcttacaagtattggacagtgcctttgagcaacttgatatcaaagcaggaaactcagactccgaggaagatgatgctaatgggcgggtggaactgatccttgaaccaaaggatctatacattgatcgtcctttaccatatctcattgggtcaaagctgttcatggaacaagaagatgtaggtcttggagagctgtccagtgaagaaggctctgtaggcagtgatcgtggcagtattgtggacactgaggaagagaaagaagaggaggagtcagatgaagattttgcccatcacagtgacaatgaacaaaaccagcacaccacacaaatgagtgatgaggaagaggatgatgatggctgtgacctttttgctgactctgagaaggaggaggaagatattgaggacattgaagaaaatactagacctaaaagaagcagacctacatcgtttgcagatgagctggctgcccgcatcaagggggatgccatgggtcgagtggacgaggagccgacaaccttaccctcaggagaagcaaaacctcggaagacactcaaagagaagaaggaaaggagaactccttcagacgatgaagaggataacttattcgcaccccccaagctgaccgacgaggacttctcgccatttggctctggaggtggcctgttcagtggcggcaaggggctatttgatgatgaggacgaggagagtgacctcttcacggaagcctcccaggatcggcaagctggagcctctgttaaggaggagtcttcatcatccaaacctggaaagaaaatcccagcaggagctgtttctgtatttttaggagacacggatgtgtttggtgctgcctccgttccatcactgaaggagccacagaagcctgagcagcccactccaaggaaaagcccctatggtccccctcccactggcctctttgatgatgatgatggtgatgatgatgacgactttttctcggcaccccacagcaaaccttctaaaacacgcaaagtccaatccactgccgatatctttggtgacgaagaaggagatctgttcaaagaaaaagccgtagcatcgccagaagccactgtgagtcagacagatgaaaataaagcaagagcagaaaaaaaggttaccttatcttccagcaagaatctcaagccctcatcagaaacaaagactcaaaaaggcttattttcagatgaggaggactctgaggatttgttttcttctcaaagtgcgagtaacttaaaaggtgcatctctgctgcctggcaagctccccacgtcggtttccctgtttgatgatgaagatgaagaggataatctttttgggggtacagctgctaagaagcagacattgtctctacaagctcagagagaagagaaagcaaaagcctccgagctctccaaaaagaaagcatctgccctgttgttcagcagtgatgaggaggaccagtggaatattcctgcttcacagacccacttagcatctgacagcaggtctaaaggagaacccagggattctgggaccctccagagccaggaggccaaggctgtgaaaaagaccagtctctttgaggaagacaaagaagatgatctttttgccattgccaaggacagccaaaagaagacccagagagtgtcactcctctttgaagacgatgttgatagcggaggctctctgtttggctctcctcccacatctgttcctcctgcaacaaagaaaaaagagactgtctctgaggcaccacctttgctgttcagcgatgaagaagagaaggaggcacaacttggagtgaagtctgtggataagaaggttgagagtgccaaggagtcattaaaatttgggagaactgatgtggctgagtcagaaaaggaaggacttttgactagatctgctcaggaaacagtcaagcattctgatttattttcttcatcatccccatgggacaaaggaaccaagcctaagaaccaaaactgttcttagcttgtttgatgaggaagaggataaaattggaagattcaaaaccattatcccaggctccacagaaaagaagtaggaaagggctgcgattcctgatgcccaccccaagagcacaggtgtcttccaggatgaagagctgcttttcagccacaagctccaaaaggacaatgacccagatgttgacctttttgcgtggcaccaaaaaaaccaagctgttagagccaatagtcgggagcctgtttggggatgatgaagatgatgatcttttcagctctgccaagtcccagcctttggtacaagagaaaaagagagtagtgaaaaaagaccactctgttgactctttcaaaaaccagaaacatcctgaatccattcaaggtagtaaagaaaaagggcatatgggaagccagaaacacctcaggcaaatttagcgatcaacccagcggccttgctgcccacagcggcttcccagatctctgaagtaaagcctgttttgccagaattggcttttccttcatctgaacacagaaggagccacggtctggaaagtgtgcctgtccttcccgggagtggggaggccggtgtgagttttgatcttccagctcaggcagacaccttacacagtgcaaacaagagccgtgtcaagatgagagggaagcgtagaccgcagacccgtgcagctaggcggctggctgctcaggagtccagcgaggctgaggacatgagcatccccagaggacccattgcacagtgggctgatggcgccatttccccaaatggccatcggccacagctcagagcagccagtggagaagacagcactgaggaggccctggcagctgccgctgcaccttgggaaggtggtcctgtgcctggagtggacacaagcccctttgcaaagtctctgggtcattccagaggggaggctgacctttttgattctggggacattttttccacgggcactggatctcagtccgtggagagaacaaaacccaaggcaaagatagcagagaatcctgccaacccaccagtgggtggtaaagcaaagagccccatgtttcctgctctaggcgaggccagcagtgatgatgatctctttcagtctgctaaaccaaaaccagcaaagaaaacaaatccctttcctctcctggaagatgaggatgacctctttacagatcagaaagtcaagaagaatgagacaaaatccagtagtcagcaggatgtcatattaacaacacaagatatttttgaggatgatatatttgctacggaagcaattaaaccctctcagaaaaccagagagaaggagaaaacattggaatctaatttatttgatgataacattgatatctttgctgacttaactgtaaaaccaaaagaaaagtccaaaaagaaagtggaagccaagtctatatttgatgatgatatggatgacatcttctcctctggtatccaggctaagacaaccaaaccaaaaagccgatctgcacaggccgcacctgaaccaagatttgaacacaaggtgtccaacatctttgatgatcccctgaatgcctttggaggccagtagagcacacagggtatccacatgttaccctgcagctacattgttgagttagtgatgatgttgtatatgctgatggtcttaactggattacaaaaagcaaatactagaacagctagctcatcgttcacccaatgtacttggtatttttctgcactggtttaatcatgcttaatactacaaaacaaaaataaatatttcacagtggttggtttgttttgtttttaaaccacagtttgatttagttagccttgctggggccataatatgcttcagggtgtgtaaaagaagaaatctctttgtggctttcatgggcagggaatctcagagatagcaaatgccacctgaccagaagtctttgttatatggatgggaaccctaacttagggcttgggcaggggaaagagaaagaagatgagagattatacttcatgagtcttagcaatatgggagcaggttttcactgaattctgagggtgcctctgcatgtcctccaaggcaaagtttggcaaactgtggcccccccactgtcatattttgttaataaaattttattggaacacaatc

SEQ ID NO: 119818 - DNA, 1497 bp, Homo sapiens
atgaacatggaaccctttggaagtatagtgattgcccttgaccatgtagtcagggaagccggtcctcttacatactggctcagggctgtaggggagagtcctcagagagagcccgatggaggccatgtcgccttctgtgttccagccttggaagtcaacggtggtccttttccttcatttgttggtcaagatggtcacaatggcccatccaggtttatggggagaggccataggctccccttcttgatggaaggacttttgactagatctgctcaggaaacagtcaagcattctgatttattttcttcatcatccccatgggacaaaggaaccaagcctagaaccaaaactgttcttagcttgtttgatgaggaagaggataaaatggaagatcaaaacattatccaggctccacagaaagaagtaggaaagggctgcgatcctgatgcccaccccaagagcacaggtgtcttccaggatgaagagctgcttttcagccacaagctccaaaaggacaatgacccagatgttgacctttttgctggcaccaaaaaaaccaaggtacaagagaaaaagagagtagtgaaaaaagaccactctgttaactctttcaaaaaccagaaacatcctgaatccattcaaggtagtaaagaaaaaggcatatggaagccggaaacacctcagataatgctggatggctgtgctgtcatcaaggaatattgtcgaacacaagctgtattgttgactgaaacgcacagtagatacctgaaggggaagggaagtcctaggcaacagagtgagaccctctctcaaaaacagataaagtggacagaaaataggtcagtaaggactaatcatttaagggacaagcccccagaagagtggctactagagtgggaggaggaaaagcagaaggagaaagagttgaagataggcgaggctgtggtcccagtgctgaattctgccaagcagtgacttgattcatgaacactcactggatgctgactctgtttctcttctgagtgctggggtagaggagaggagaggtggagcacagttcttgcttttatgagcttatgttctaggaagttcaagtatttttttcaggtagtatgaaatagcaggaagaggaagcaggctaaagggacacagagtgattgagggctattttaagtagaatgataaggaagagcctgtctagagagctatttgaacagtgacctgactgaagggacaacagaaagcagtgcgtgttgtcttaagccttccttaatgcctccattacctctccattctatcagtcctctctattaagtatcttgtcttcagaggccagaccccacaatccaaattcgtgatcagttcattgcgaatatcctagcaccatccacgcgcttactcgataatagcctgattcctcccagttccaagcactcatctacgattgctattttatctaggtaacaaaattattttatatatcttattttttgagac

SEQ ID NO: 119819 - DNA, 2196 bp, Homo sapiens
atggtgccctacagcctactggttacttggctgcagaaagctctgggtgtgcggcagtaccatgtggcatcagtcctgtgccaacgggccaaggtggcgatgagaccctttgagcctaagtacatccactatgacctgctagagaagaacattaacattgtttgcaaatgattgaaccggcctctgaccctctcagagaagatcgtgtacagacacccggatgaccccaccagccaggaaattgagcggggcgggacgtacctgcagcagtggccggacagcgtgaccatgcaggatggacggcccagatggccatgctgcagttcatcagcagcaggctcccaaggtgaccatgccatccaccatccactgtgaccatctgattgaggcccagctcgggagtgagaaagacctgcaccaggccaaggacatcaaccacgaagtttataatttcctggcaactggaagtgtcaaatatggcttgagcttctggaagcctggatctggaatcattcaccagattattctggaaaactatgaatatcctggggttcttctgattggcactgactcccacacccccaatggtggcagcctggggggcatctgcattggagttgggggtgccgagctgtggatgtcatgactgggatcccctgggagctgaagtgccccaaggtgattggcgtgaagctgatgggctccctctctggttggacctcacccaaagatgtgatcctgaaggtggcaggcatcctcaccatgaaaggtggcacaggtgcaatcgtggaataccacgggcctgttgtagactccatctcctgcactggcatggtgacagtctgcaacatgggcttagaaattgggaccaccacttccgtgttccattacaacctcaggatgaagaagtacatgagcaagacctgccaggcagacattgccaatctagctgatgaattcaaagatcacttggtgcctgaccctgggtgccattatgaccaactaattgaagttaaccccagtgaactgaagctgcacatcaatgggcccttcacccctgacctggctcaccctgtggcagaagtgggcaaggtggcagagaaggaagaatggcctctggacatctgagtgggtctgtggggcagctgcaccaattcaagctatgaagatatggggtgctcagcaggtgtggccaagcaggcactggcccatggcctcaagtgcaagtcccagttcactattactccatgctccgagcagatccgtgcctccattgagcaggatggctatgcacagaccttgagggatgtgggtggcatcgtcctggccaatgcttgtggcccctgcattggtcagttgcacagaaaggacatcaacaagcaggagaagaacataattgtcacctcctacaacaggaacttcatgggccacaatgacacgaaccccgagacccatgccttcatcacatccccagagactgtcacagccctggccattgtgggaaccctcaagttcaacccagagaccaactacctgacaggcaaggatggcaagaagttcaagctggaggctccggatgcagatgagcttccccaagcagagtttggcccagggcaggacacctaccagcacccccgcatggggtaccactgaccacatctcagctgccggcccctgactcaagttccgtgggcacttggacaccatctccaacaacttgctcagtggtgccatcaacattgaaaatggcaaggccaactctgtgcacgatgctgtcacccacgagtttggccccttccctgacactgcccgctacaagaaatatggcatcagttgggtggtgattggggactagaactatggcaagggctcaagctgggagcacgccgcgctggagcctcgccacctcagggggccgggccatcatcaccaagagctttgccaggattcacgagaccaacctgaggaggcagggcctgctgcccctgaccttcgctgacccagctgacaacaagattcaccttgtggacaagctgaccattcagagcctgaaggacttgacgctggcaagcccctgaagtacatcgtcaagcaccccaggaaatcaacctcctgaaccacaccttcaacgagacggagatcgagtggttcagggccggcagtgccctctacagaacgaaggagcagcagcaatga

SEQ ID NO: 119820 - DNA, 1205 bp, Homo sapiens
caatggcccatggcctcaagtgcaagtgccagttctccatcactccaggttccgagcagatccgcgccaccattgagcgggacggctatgcacagatcttgagggatatgggtggcattgtcctggccaatgcttgtggcccctgcattggccagtgggacaggaaggacatcaagaagggggagaagaacacaatcgtcacctcctacaacaggaacttcacgggccgcaacgacgcaaaccccgagacccatgcctttgtcacgtccccagagattgtcacagccctggccattgcgggaaccctcaagttcaacccagagaccgactacctgacgggcacggatggcaagaagttcaggctggaggctccggatgcagatgagcttaacaaaggggagtttgacccagggcaggacacctaccagcacccacccaaggacagcagcgggcagcatgtggacgtgagccccaccagccagcgcctgcagctcctggagccttttgacaagtgggatggcaaggacctggaggacctgcagatcctcatcaaggtcagcagcatggggacggcaggacagccccaccctgccagggccccccgtcccctgagcatcgggaagggccatgaacctggaggaagtgagcacagtcaagacgcagagctagatctggccagcctccgtctggggccctcagccatccagcagcagctgatcagagccacctccagtgggtgtgggcagattgtcacagccctggccattgcgggaaccctcaagttcaacccagagaccgactacctgacgggcacggatggcaagaagttcaggctggaggctccggatgcagatgagcttcccaaaggggtatttattcgcgataagctcatggagcggcgtaaccgtcgcacaggaaggacagagaaagcgcggatctgggaagtgacggacagaacggtcaggacctggattggggaggcggttgccgccgctgctgctgacggtgtgacgttctctgttccggtcacaccacatacgttccgccattcctatgcgatgcacatgctgtatgccggtataccgctgaaagttctgcaaagcctgatgggacataagtccatcagttcaacggaagtctacacgaaggtttttgcgctggatgtggctgcccgcacccggtgcaagttgcgatgcccgatctga

SEQ ID NO: 119821 - DNA, 1428 bp, Homo sapiens
taatgtgtgtggagatataaggtgtgtaatgaaggagctgtttacaggataccatggaagctcagaggagggagccccttaagaacaagcctagttaacccccctccccaaaagggccagggttctcttcaggtactcctgctgtgagacaagaatggcagaatgactcccatgccctgacagttggacgagatcaagctcccaaggcgccgtctgctttcatgggtttgctcttccagatgctggaagcatcttcaccccattttcttactgcattttccagaccttgtagatacaatatattctcttttaaaacaaacacagacgtgacccgtctttgtcaatgtgacccgatctttgcacaaaatggtgccctacagcctactggttacttggctgcagaaaggaagaacattaacattgtttgcaaatgattgaaccggcctctgaccctctcagagaagatcgtgtacagacacccggatgaccccaccagccaggaaattgagcggggcgggacgtacctgcagcagtggccggacagcgtgaccatgcaggtgattggcgtgaagctgatgggctccctctctggttggacctcacccaaagatgtgatcctgaaggtggcaggcatcctcaccatgaaaggtggcacaggtgcaatcgtggaataccacgggcctgttgtagactccatctcctgcactggcatggtgacagtctgcaacatgggcttagaaattgggaccaccacttccgtgttccattacaacctcaggatgaagaagtacatgagcaagacctgccaggcagacattgccaatctagctgatgaattcaaagatcacttggtgcctgaccctgggtgccattatgaccaactaattgaagttaaccccagtgaactgaagctgcacacccatggcctcaagtgcaagtcccagttcactattactccatgctccgagcagatccgtgcctccattgagcaggatggctatgcacagaccttgagggatgtgggtggcatcgtcctggccaatgcttgtggcccctgcattggtcagttgcacagaaaggacatcaacaagcaggagaagaacataattgtcacctcctacaacaggaacttcatgggccacaatgacacgaaccccgagacccatgccttcatcacatccccagagactgtcacagccctggccattgtgggaaccctcaagttcaacccagagaccaactacctgacaggcaaggatggcaagaagttcaagctggaggctccggatgcagatgagcttgagtgcggcgcctccccagcaaccccccctccccctcttcccccctcccccagctggtgtcatgttcaagttcggctctacatgcatcataagcggatccgatccatccagccatggcttcttattc

SEQ ID NO: 119822 - DNA, 615 bp, Homo sapiens
attctggaaaactatgcgtaccctggtgttcttctgattggcactgactcccacacccccaatggtggcggccttgggggcatctgcattggagttgggggtgccgatgctgtggatgtcatggctgggatcccctgggagttgaagtgccccaaggtgattggcgtgaagctgacgggctctctctccggttggtcctcacccaaagatgtgatcctgaaggtggcaggcatcctcacggtgaaaggtggcacaggtgcaatcgtggaataccacgggcctggtgtagactccatctcctgcactggcatggcgacaatctgcaacatgggtgcagaaattgtggccaccacttccgtgttcccttacaaccacaggatgaagaagtacctgagcaagaccggccgggaagacattgccaatctagctgatgaattcaaggatcacttggtgcctgaccctggctgccattatgaccaactaattgaaattaacctcagtgagctgaagccacacatcaatgggcccttcacccctgacctggctcaccctgtggcagaagtggggcaggtggcagagaaggaaggatggcctctggacatcctagtggacgcc

SEQ ID NO: 119823 - DNA, 381 bp, Homo sapiens
tcaaggtgtacaataatagagtagagacagccaagtagcaatatatttctgagttgcaattccttgcctccactgtgagacaaaccccagccacatctccagcacacaagaacttccaaacgcctgaaccgcagcagccaggcattcctccagaacctcctcccccaggagcttgctacaagtgctggaaatctggccatcaggccaaggaatgcctgcagcctgggattcctcgtaagccgcgtcccatctctggcagccactcccagagccccctggaactctggcccaaggctctctgactgactccttcccagatcttctcggcttagcagctgaagactgacactgcccgatcgcctcggaagccctgtagaccat

SEQ ID NO: 119824 - DNA, 452 bp, Homo sapiens; identical to SEQ ID NO: 88658
  misc_feature (1)...(452): n = a,t,c or g

SEQ ID NO: 119825 - DNA, 648 bp, Homo sapiens
gcatgatctcacttatttgtgggatctaatatagtcaaacccgttgaaacagatagtagagtggtgataacatgtacctgcaaaccgttgccccttggccaatgcttgggttcaggtatatgcacaccaatgacaaggtccattttttggaagatatatcttaggaaaagcctgcacaggtctggagatgggcttagagccatttggaaagggtgttcttgggtacttgctacccatggtaatctagaagcggcagtgcagtctccaggtgagcatcctcttggttccataagcccacgtacctgactcttctttctgtccaagagctttgacttcttcactgacttcccatccctgccactcatcacatagccactttttctcgaccaggtccccaaagacctctcccttctacatgtacaggttacctgtaaagggaagcccatcagactaacagcagacatctcagacacttaccaaggaagagctccaccaggttcagagcctgcatggagggttcctagcaactcacctggcagccactcccagagcccctggaactctggcccaaggctctctgactccttcccagatcttctcggcttagcgactgaagactgatgctgcccgatcgcctcggaatcccca

SEQ ID NO: 119826 - DNA, 411 bp, Homo sapiens
atgatcgggtcagagaaaaagcacaaggcagctcagaggtattacttctcagtatggcatccccatttgaaacagctgcaaaacaagccacagcttgggaatgtggcaaggtttcagcagcgtggaggtgaaaggcaagagttgcatggacagattctctgcaaggtgctgagcaaggtagcagacatgccaggtcttgagtgcattgtgtctagaggtagagcacagaggaggaaaagggggattctgaggcgatcgggcagcttcagtcttcagctgctaagccaagaaggtctgggaaggagtcagagagccttgggccagagttccaggggctctgggagtggctgccaaggtgagtgggacagtccgatttccagtggggtcccgcacagatgggacgcggcttag

SEQ ID NO: 119827 - DNA, 357 bp, Homo sapiens
atgggggctgtctgtgaagccttgcggcagtacagcccaggggcttccgaggcgattgggcagcgtcagtcttcagctgctaagccaagaagatctgagaaggagtcagagaaccttgggccagagttccaggggctctgggagtggctgccagtaccacaagtcctagctagagaaatcagggatgaaaaagaaataaaaggcatccaaattggaaaagagcaagtcaagttgtccctttttgatgatgacataatcttaaatatagctaaacgtacagaccaccaaaaaactgttagaatggataaactaattgagtcaattgcaggatataaatcagcatataaaactcactag

SEQ ID NO: 119828 - DNA, 942 bp, Homo sapiens
atgaaagtctggaagaattacaccattgaagatgccactgttgctacagaaaaagctgtgaaagccatcaagcctaaaacaataaattcctactggaaaaactgtgtccagatgttgtgcatgaccttaaggacttacaacagagacaatcaaacaaatcatgaaagagatagcggatatggcaaaaatgatgtgttggaggggggttcaagatatgaatcttggagaatcttggagttaatagacagcacacaggaggaattaatggaaggagatttgatggagctgcgtcccatctctgcgggaccccactggaaattggactgtccaactatcccagcagccactcccagagcccctggaactctggcccaaggctctctgactccttcccagatcttcttggttcagcagctgaagactgatgctgcccgatcgcctcggaagcctcctggaccatcacagatgctttgggtaactcttacagtggagggatcttctccctttcctcatatttctaatcttcccattccaaacccggaccacacttggtttattgatggcggttcttctaaacccaatcaattttcaccagctaaagctggatatgctgtcatgtcccacacctctattattgaagctgctgcacttcctccctccaccacttcccaacaagccaaactgattgctttaactcgtgtgctctctctagctaaaggaatgcacattaacatttatactgactccatatatgctttccacatcctccataaccatgctgccatctgggtcaaaagaggcttccttaccacacaaagctcttccactaataatgcctccctaatagaggcccttaaggttgttctcctgccagccaaggctggaatcattcattgtaaaggacaccagaaacctactgatcttattgcaaaaaaaaaataa

SEQ ID NO: 119829 - DNA, 420 bp, Homo sapiens; identical to SEQ ID NO: 114509

SEQ ID NO: 119830 - DNA, 294 bp, Homo sapiens
ccctgtgagagttacctagagcatctgtgatggtcctgtaggcttctgaggcgattgggcagtgtcagtcttcagctgctaagctgagaagatctgggaaggagtcagtcagagagccttgggccagagttccaggggctctgggagtggctgccagagagacagatagtaaatattttgggctctgtgggccatatggtctctatggcaactactcatccctgccactgtcacaagaaagcagccatagatggaggttaccaacgacagttagaggtaactattgatctctga

SEQ ID NO: 119831 - DNA, 819 bp, Homo sapiens
atgagtgaactcccattcacaattgctacaaagaaaataaaatacctaggaatacaacttacaacggatgtgaaggacctcttcaaggagaactacaaaccactgctcaatgaaataaaagaggacacaaacaaatggaagaacattccatgctcatggataggaggaatcaatatcatgaaaatggccattctgcccaaggtaatttatagattcaatgctctccccatcaagataccaatgactttcttcacagaattggaaaaaactactttaaatttcatatggaaccaaaaacgagcccgcatagccaaaacaatcctaagcacaaagaacaaagctggaggcatcacactagctgacttcaaactgtactacaagcctacactagtcaaaacagcatggtactggtaccaaaacagagaagaaaacctaggcaataccattcaggacataggcatgggcaaaaacttcatgactaaaacaccaaaagcaatggcaacaaaagccaaaatagacaaaagggatctaattaaaccaaagagcttctgcatagcaaaagaaactaccatccgtatgaacaggcagcctacagaatgggagaaactttttgcaatctacccgtctgacaaagcgctaatatccggaatctacaaagatcttaagcaaatttacaagaaaaaaaacaaccccatcaaaaagtgggcaaaggagatgaacagacacttctcgaaagaagacatttatgcagccaacagacacgtgaagaatgctcatcatcactggtcatcagagaaatgcaaatcaaaaccacaatga

SEQ ID NO: 119832 - DNA, 600 bp, Homo sapiens
tcatatccttggcccactttttgatggagttgtctttttcttgtaaatttgtttaagttctttgtagatgctggatattagccctttgtcagatgggtagattgcaaagattttctcccattctttaggttgcctgttcactctggtgatagtttcttctgctgtgcagaagctctttagtttaattagatcccatttgtcaattttggcttttgttgccattgcttttggtgttttagtcatgaagtctttgcccatgcctatgtcctgaatggtactgcctaggttttcttctagggtttttatggttttaggtctaacatttaagtctttaatccatcttgaattaatttttgtataaggtgtgaggaagggatccagtttcagctttctacatatagcttgggcagtatggccattttcatgatattgattcttccaatccatgagcatggaatgttcttccgtttgtttgtgtcctcttatttcattgagcagtgatttgtagttctccttgaagaggtccttcacatcccttgtaagttgtattcccaggtattttattctctttgtagtaattgtgaatgggagttcactcat

SEQ ID NO: 119833 - DNA, 1047 bp, Homo sapiens
atgattgtatatctagaaaacaccattgtctcagcccaaaatctccttaagctgataagcaacttcagcaaagtctcaggatacaaaatcaatgtacaaaaatcacaagcattcttatacaccaacaacagacaaacagagagccaaatcatgagtgaactcccattcacaattgcttcaaagagaataaaatacctaggaatccaacttacaagggatgtgaaggacctcttcaaggagaactacaaaccactgctcaaggaaataaaaaaggatacaaacaaatggaagaacattccatgctcatgggtaggaagaatcaatatcgtgaaaatggccatactgcccaagaattggaaaaaactaaagttcatatggaaccaaaaaagagcccacatcgccaagtcaatcctaagccaaaagaacaaagctggaggcatcacactacctgacttcaaactatactacgaggctacagtaaccaaaacagcatggtactggtaccgaaacagagatatagatcaatggaacacaacagagccctcagaaataatgccgcatatctacaactatctgatctttgacaaacctgagaaaaacaagaaatggggaaaggattccctatttaataaatggtgctgggaaagctggctagccatatgcagaaagctgaaactggatcccttccttacgccttatacaaaaatcaattcaagatggattaaagacttaaacgttagacctaaaaccataaaaaccctagaagaaaacctaggcattaccattcaggacataggcatgggcaaggacttcatgtctaaaacaccaaaagcaatggcaacaaaagccaaaattgacaaatgggatctaattaaactaaagagcttctgcacagcaaaagaaactaccatcagagtgaacaggcaaactacaaaatgggagaaaattttcgcaacctactcatctgacaaagggctaatatccagaatctgcaatgaactcaaacaaatttacaagaaaaaaacaaacaaccccatcaaaaagtga

SEQ ID NO: 119834 - DNA, 528 bp, Homo sapiens
atgactgaactcccattcacaattgctacaaagagaataaaatacctaggaatccaacttacaagggatgtgaaggacctcttcaaggagaactacaaaccactgctcaaggaaataaaagaggacacaaacaaatggaagaacattccatgctcatgggtaggaagaaacaatatcgtgaaaatggccacactgcccaagaaccggtttacgttgtttcggcttagtgaaacatatgaaatcaccaatccgtatgccatgcgtttatacgaatccctgtgtcagtatcgtaagccggatggctcaggcatcgtctctctgaaaatcgactggatcatagagcgttaccagctgcctcaaagttaccagcgtatgcctgacttccgccgccgcttcctgcaggtctgtgttaatgagatcaacagcagaactccaatgcgcctctcatacattgagaaaaagaaaggccgccagacgactcatatcgtattttccttccgcgatatcacttccatgacgacaggatag

SEQ ID NO: 119835 - DNA, 480 bp, Homo sapiens
atgagtgaactcccattcacaattgctacaaagagaataaaatacctgggaatacaactcacaagggatgtggaggacctcttgaaggagaactacaaaccacagctcaaggaacattggttggatggtacaaaaagcatcaaaaagcaagtaaaaattggttcaccctattgtctgcatcttcgagttaagttttattcctcagaaccaaataaccttcgtgaggagctaacccggtatttatttgttcttcagttaaaacaagatattctcagtggaaaattagactgtccctttgatacagcagtgcaattggcagcttataatctgcaagaacattgccttctttttcttctctttcatgtaattgcgccctttccacctaaagtgttgaaacgtcatactctacctgataagtctgtaaatgctaagattgggccttcggctaactttttccttaaaagaaatgcagttatgtag

SEQ ID NO: 119836 - DNA, 1443 bp, Homo sapiens
atgtccctgtttgcagatgacatgattttatctgtagaaaaccccatcgtctcaccccaaaatctccttaagctgataagcaacttcagcaaagtcttaggatacaaaatcaatgtgcaaaaatcacaagcattcctatacaccaataacagacaaagagggagccaaatcatgagtgaactcccattcacaattgctacaaagagaataaaatacctgggaatccaacttacaagggatgtgaaggacctcttcaaggagaactacaaaccactgctcaatgaaataaaagaggacaaaaacaaatggaagaacattccatgctcatggataggaagaataaatatcatgaaaatggccatacagcccaaggtaatttatagattcaatgccatccccatcaaactaccagtgactttcttcacagaattggaaaaaactactttgaggtccatatggaaccaaaaaagagcccacatagccaagacaatcctaagtaaaaagaacaaagctggaggcatcacgctacctgacttcaaactatactacaaggctacagtaaccaaaacagcatggtgttttagcaaagcagtgctgctgccacctctcaacaccactgctatagtgtctatccacgatgaacaatggaatgctagaaggtcttctcttgctagccacaaagaagcagatgccaccatctgtgtgaccaccaaggcctggagacgtaggaggcaaaaacggttttgtggactgggccgagggtccctgtgctgtgtgcagcctagggacttggtgccctgtgtcctagccactccagttgtggctgaaagtggccaatgtaaaactcagaccatggcttcagagagtcacctgctgtttcctgactttttaatgattgccattctaactggtgtgagatggtatctcattgtggttttgatttgcatttctctgatggccagtgatgattttgtggcaccaaatgtagataagatactgtctgatagagaacaagaatttggaatattagcgacagaagaaggaaaaacagaaaaggcagccacgtatacaagggacatggatgaaattggaaatcgtcattctcagcaaactatcacaaggacaaaaaaccaaacaccgcatgttctcactcatagatgggaattaaacaatgagaacacatggacacaggaaggggaacatcacactctggggactgttgtggggtgggtggccttctacacagagtggaattgcatggaagttcacactgggcccacgctggcagtgtactggaatgaacacaaccagccaatccaaatttttgctaacaaggtaccagggaaatacaattatgttcacttcagcatcacagaaatggaaggaattcaatttctgcatggaatcccagaaattgaatcccagcatgggagaaagaaataa

SEQ ID NO: 119837 - DNA, 708 bp, Homo sapiens; identical to SEQ ID NO: 115382

SEQ ID NO: 119838 - DNA, 870 bp, Homo sapiens
atggagctgaaaaccaaggctcgagaactacatgaagaatgcagaagcctcaagagccaatgtgatcaactggaagaaagggtattagcgatggaagatgaaatgaatgaaatgaaactaaaccaggaagaagttgaatctctgaatagaccaataagaggctctgaaattgtggcaataatcaatagcttaccaaccaaaaagagtccaggaccagatgcattcacagccgaattctaccagaggtacaaggaggaactgctgataagcaacttcagcaaagtctcaggatacgaaaacaatgtacaaaaatcacaagcattcttatacaccaacaacagacaaacagagagccaaatcatgagtgaactcccattcacaattgcttcaaagagaataaaatacctaggaatccaacttacaagggatgtgaaggacctcttcaaggagaactacaaaccactgctcaaggaattaaaagaggatataaacaaatggaagaacattccatgctcatgggtaggaagagtcaatatcatgaaaatggccatactgcccaaggtatgggaggaactaaggcatctaaggtctggaatagaccccagcaaaccagcagcactacagaagaatgaccctacagttaaaagaaaatcaaacaaacagaaagcgacaacaaaaacaacatcaacagaaaagaccccacaaaaatcctattcaaaggtcagcgacctcaaaaatcaaaggagacggaagcatccaaccttaaatgctaccgtggggccagagcccccagaaagcactgactctggcaactgcaccggaacaacggaaggacacccctcctgtaaggggtttgagcttacaagatga

SEQ ID NO: 119839 - DNA, 1170 bp, Homo sapiens
atgaaggcgagctgccgcctaagagggaggagggtcctttcggctgccgctgctgctgttccgggacgccgcctggggagccagcccgctcagggcgagcggcgcggccacggaggcgccgaggaggagcgagccgccgccgggcagcggcgtgccctcgggggagagggcgccggagaggaggcggcggcgcggcggcgagggcgcggcgcgcgatggcagctgcttagcccggcgggcgcggagcagccccgagctgtggctggccaggcggatctggctctgaaggggctacgtgttttgctcgtggaagcccaaaatctccttaagctgataagcaacttcagcaaagtctcaggatacaaaatcaatgtacaaaaatcacaagcattcttatacaccaacaacagacaaacagagagccaaatcatgagtgaactcccattcacaattgcttcaaagagaataaaatacctaggaatccaacttacaagggatgtgaaggacctcttcaaggagaactacaaaccactgctcaaggaaataaaagaggacacaaacaaatggaagaacattccatgctcatgggtaggaagaatcaatatcgtgaaaatggccatactgcccaagatggctgcattatccagattgggtaacgattatcgcccaacaagtgcttatgaacgtggtcagcgttatgcaagccgattgcagaatgaatttgctggaaatatttctgcgctggctgatgcggaaaatatttcacgtaagattattacccgctgtatcaacaccgccaaattgcctaaatcagttgttgctcttttttctcaccccggtgaactatctgcccggtcaggtgatgcacttcaaaaagcctttacagataaagaggaattacttaagcagcaggcatctaaccttcatgagcagaaaaaagctggggtgatatttgaagctgaagaagttatcactcttttaacttctgtgcttaaaacgtcatctgcatcaagaactagtttaagctcacgacatcagtttgctcctggagcgacagtattgtataagggcgataaaatggtgcttaacctggacaggtctcgtgttccaactgagtgtatagagaaaattgaggccattcttaaggaacttgaaaagccagcaccctga

SEQ ID NO: 119840 - DNA, 963 bp, Homo sapiens
atgaccccagcttattacctggacagagtttcccggcagtggtacaaggacagggaactgaggcaaagcccagtagatgaggagatgcagctgggaatccagggagacctagacagacaaacagagagccaaatcatgagtgaactcccattcacaattgcttcaaagagaataaaatacctaggaatccaacttacaagggatgtgaaggacctcttcaaggagaactacaaaccactgctcaaggaaataaaagaggacacaaacaaatggaagaacattccatgctcatgggtaggaagaatcaacatcgtgaaaatggccatactgcccaaggcaatttatagattcaatgccatccccatcaagctaccaacgactttcttcacagaattggaaaaaactactttaaagttcatatggaaccaaaaaagagcccacatcgccaagtcaatcctaggccaaaagaacaaagctggaggcatcacgctacctgacttcaaactatactacaaggctacagtaaccaaaacagcatggcactggtaccaaaacagagatatagatcaatggaacacaacagagccctcagaaataacgccgcatgtctacaactatctgatctttaacaaacctgagaaaaagaagcaatggggaaaggattccctatttaataaatgggacatggatgaagttggaaaccatcattctcagcaaactatcacaaggacaggaaaccaaacaccacatgtttttactcatagatgggaattgaacaatgagatcacttggacacagggtgcgggacatcacacaccagggcctgttgtggggttgggggctggcagagggatagcattacgagaaatacctaatgcaaatgatgagttgatggtgcagcaaaccaacatggcacatatatacctatgtatcaaacctgcacgttgtgcagacgtaccctag

SEQ ID NO: 119841 - DNA, 1050 bp, Homo sapiens
atgaggaaaagccagcacaaaaaggctaaaaattccaaaaaccagaacacctcttctcttccaaaggatcacaactcctcaccagcaagggaacaaaactggatggagaatgagtttgatgaattgacagaagtaggctccagaagtattggaagttctggtcaggacaatcaggcaagagaaaaaataaaggatattcaaataggaagagaggaagtcaaattgtctctgtttgcagatgatatgattgtatatttggaaaaccccatcgtctcagccccaaatctccttaagctgataagcaacttcagccaagtctcaaaatataaaatcaatgtgcgaaaatcacaagcattcctatacaccaataatagacaaacagagagccaaatcatgagtgaactcccattcacaattgctacaaagagaataaaatacctaggaatacaacttacaagggatgtgagggacctcttcaaggagaactacgaaccactgctcaatgaaataaaaaaggacacaaacaaatggaagaaccattccatgctcatggataggaagaatcaatattgtgaaaatggccatactgcccaagaggatcccggcgatgaaaaaggctatgaatcttttccttggtttatcaaacgtgcgcacagtccatccagagggctttacagtgtacatatcaacccatatctcattcccttctttatcgggttacagaaccggtttacgcagtttcggcttagtgaaacaaaagaaatcaccaatccgtatgccatgcgtttatacgaatccctgtgtcagtatcgtaagccggatggctcaggcatcgtctctctgaaaatcgactggatcatagagcgttaccagctgcctcaaagttaccagcgtatgcctgacttccgccgccgcttcctgcaggtctgtgttaatgagatcaacagcagaactccaatgcgcctctcatacattgagaaaaagaaaggccgccagacgactcatatcgtattttccttccgcgatatcacttccatgacgacaggatag

SEQ ID NO: 119842 - DNA, 3835 bp, Homo sapiens
tcaattcccacctatgagtgagaatatgcggtgtttggttttttgttcttgcgatagtttactgagaatgatggtttccaatttcatccatgtccctacaaaggacatgaactcatcattttttatggctgcatagtattccatggtgtatatgtgccacattttcttaatccagtctatcattgttggacatttgggttggttccaagtctttgctattgtgaatagtgccgcaataaacatacgtgtgcatgtgtctttatagcagcatgatttatagtcatttgggtatatacccagtaatgggatggctgggtcaaatggtatttctagttctagatccctgaggaatcgccacactgacttccacaatggttgaactagtttacagtcccaccaacagtgtaaaagtgttcctatttctccacatcctctccagcacctgttgtttcctgactttttaatgattgccattctaactggtgtgagatgatatctcatagtggttttgatttgcatttctctgatggccagtgatgatgagcattttttcatgtgtctgttggctgcataaatgtcttcttttgagaagtgtctgttcatatccttcgcccacttttggatggggttgtttgatttttttcttgaaaatttgtttaagttctttgtagattctggatattagccctttgtcagatgggtggattgcaaaaaattttctcccattctgtaggttgcctgttcactctgatggtagtttcttttgctgtgcagaagctcttcagtttaattagatcccatttgtctattttggcttttgttgccattgcttttggtgttttagtcatgaagtccttgcgaatgcctatgtcctgtatggtattgcctaggttttcttctagggtttttatggttttaggtctaacatttaagtctttaatcctttttgaattaatttttgtgtaaggtgtaaagaagggatccagtttcagctttctacatatggctagccagttttcccagcaccatttattaaatagggaatcctttccccatttcttgtttttgtcaggtttgtcaaagatcagatggttgtagataggcagcattatttctgagggctctgttcttgttccattgatctatatctctgttttggtaccagtaccatgctgttttggttactgtagccttgtagtatagtttgaagtcaggtagtgtgatgcctccagctttgttcttttgtcttaggattgacttggcaatgcgggctcttttttggttccatatgaactttaaagtagtttttttccaattctgtgaagaaagtcattggtagcttgatggggatggcattgaatctgtaaattaccttgggcaagtatggccattttcacgatattgattcttcctacccatgagcatggaatgttcttccatttgtctgtatcctcttttatttccttgagcagtggtttgtagttctccttgaagaggtccttcacatcccttgtaagttggattcctaggtattttattctctttgaagcaattgtgaactgggagttcactcatgatttgggtctctgtttgtcttttatgggtatataagaatgcttgtgatttttgcagattgattttgtatcctgagactttgctgaagttgcttatcagcttaagaagattttgggctgagatgatggggttttctaaatatacaatcatgtcatttgcaaacagggacaatgtgacttcctcttttcctaattgaatacccttttatttctttctcctgcctgattgccctggccagaacttccaacactatgttgaataggagcggtgagagagggcatccctgtcttgtgccagttttcaaagggaatgcttccagtttttgcccattcagtatgatattggctgtgggtttgtcatagatagctcttattattttgaaatacgtcccatcaatacctaatttattgagagtttttagcatgaagggttgttgaattttgtcaaaggctttttctgcatctattgagataatcatgtggtttttgtctttggctctgtttatatgctggattacatttattgatttgcgtatattgaaccagccttgcatcccagggatgaagcccacttgatcatggtggataagctttttgatgtgctgctggattcggtttgccagtattttattgaggatttttgcatcaatgttcatcaaggatattggtctaaaattctcttttttggttgtgtctctgcccggctttggtatcagaatgatgctggcctcataaaatgagttagggaggattccctctttttctattgattggaatagtttcagaaggaatggtaccagttcctccttgtacctctggtagaattcggctgtgaatccatctggtcctggactctttttggttggtaaactattgattattgccacaatttcagagcctgttattggtccattcagagattcaacttcttcctgttttagtcttgggagagtgtatgtgtcgaggaatgtatccatttcttctagattttctagtttatttgcgtagaggtgtttgtagtattctctgatggtagtttgtatttctgtgggatcggtggtgatatcccctttatcattttttattgtgtctatttgattcttctctctttttttctttattagtcttgctagcggtctatcaattttgttgatcctttcaaaaaaccagctcctggattcattgattttttgaagggttttttgtgtctctatttccttcagttctgctctgattttagttatttcttgccttctgctagcttttgaatgtgtttgctcttgcttttctagttcttttaattgtgatgttagggtgtcaattttggatctttcctgctttctcttgtaggcatttagtgctataaatttccctctacacactgctttgaatgcgtcccagagattctggtatgtggtgtctttgttctcgttggtttcaaagaacatctttatttctgccttcatttcgttatgtacccagtagtcattcaggagcaggttgttcagtttccatgtagttgagcggctttgagtgagattcttaatcctgagttctagtttgattgcactgtggtctgagagatagtttgttataatttctgttcttttacatttgctgaggagagctttacttccaactatgtggtcgattttggaataggtgtggtgtggtgctgaaaaaaatgtatattctgttgatttggggtggagagttctgtagatgtctattaggtctgcttggtgcagagctgagttcaattcctgggtatccttgttgactttctgtctcgttgatctgtctaatattgacagtggggtgttaaagtctcccattattaatgtgtgggagtctaagtctctttgtaggtcactcaggacttgctttatgaatctgggtgctcctgtattgggtgcataaatatttaggatagttagctcctcttgttgaattgatccctttaccattatgtaatggccttctttgtctcttttgatctttgttggtttaaagtctgttttatcagagactaggattgcaacccctgcctttttttgttttccatttgcttggtagatcttcctccatccttttattttgagcctatgtgtgtctctgcacatgagatgggtttcctgaatacagcacactgatgggtcttgactctttatccaacttgccagtctgtgtcttttaattgcagaatttagtccatttatatttaaagttaatattgttatgtgtgaatttgatcctgtcat

SEQ ID NO: 119843 - DNA, 384 bp, Homo sapiens
atgagctcctctgaagccgtccttccagcacagaaactccaagttgccctgatttgtgttcacaaaggcaccagttttcagcagtttagaggactgagtggttctcaaagtggtccagagagctctggggccccgatacactttcaaggcatcttcaaggggtatggcagcaacttccagcaggtgcaggccgtgaggctgatcgctgagggcaaagcccccagactccctcagcctgaggaaggagccacctatgaggggattcagaagaaggagacagccaaggccaagaatgtggaaacagacaacaaatgtccgatcagccagattgaccaggttaatatggtcttatcttgtacagaggaaatagggattcagccataa

SEQ ID NO: 119844 - DNA, 3234 bp, Homo sapiens
ccccggttccgctgtcttttctgtctacagtttgcgatccccgcgtccaggatggagcagctgaacgaactggagctgctgatggagaagagtttttgggaggaggcggagctgccggcggagctatttcagaagaaagtggtagcttcctttccaagaacagttctgagcacaggaatggataaccggtacctggtgttggcagtcaatactgtacagaacaaagagggaaactgtgaaaagcgcctggtcatcactgcttcacagtcactagaaaataaagaactatgcatccttaggaatgactggtgttctgttccagtagagccaggagatatcattcatttggagggagactgcacatctgacacttggataatagataaagattttggatatttgattctgtatccagacatgctgatttctggcaccagcatagccagtagtattcgatgtatgagaagagctgtcctgagtgaaacttttaggagctctgatccagccacacgccaaatgctaattggtacggttctccatgaggtgtttcaaaaagccataaataatagctttgccccagaaaagctacaagaacttgcttttcaaacaattcaagaaataagacatttgaaggaaatgtaccgcttaaatctaagtcaagatgaaataaaacaagaagtagaggactatcttccttcgttttgtaaatgggcaggagatttcatgcataaaaacacttcgactgacttccctcagatgcagctctctctgccaagtgataatagtaaggataattcaacatgtaacattgaagtcgtgaaaccaatggatattgaagaaagcatttggtcccctaggtttggattgaaaggcaaaatagatgttacagttggtgtgaaaatacatcgagggtataaaacaaaatacaagataatgccgctggaacttaaaactggcaaagaatcaaattctattgaacaccgtagtcaggttgttctgtacactctactaagccaagagagaagagctgatccagaggctggcttgcttctctacctcaagactggtcagatgtaccctgtgcctgccaaccatctagataaaagagaattattaaagctaagaaaccagatggcattctcattgtttcaccgtattagcaaatctgctactagacagaagacacagcttgcttctttgccacaaataattgaggaagagaaaacttgtaaatattgttcacaaattggcaattgtgctctttatagcagagcagttgaacaacagatggattgtagttcagtcccaattgtgatgctgcccaaaatagaagaagaaacccagcatctgaagcaaacacacttagaatatttcagcctttggtgtctaatgttaaccctggagtcacaatcgaaggataataaaaagaatcaccaaaatatctggctaatgcctgcttcggaaatggagaagagtggcagttgcattggaaacctgattagaatggaacatgtaaagatagtttgtgatgggcaatatttacataatttccaatgtaaacatggtgccatacctgtcacaaatctaatggcaggtgacagagttattgtaagtggagaagaaaggtcactgtttgctttgtctagaggatatgtgaaggagattaacatgacaacagtaacttgtttattagacagaaacttgtcggtccttccagaatcaactttgttcagattagaccaagaagaaaaaaattgtgatatagataccccattaggaaatctttccaaattgatggaaaacacgtttgtcagcaaaaaacttcgagatttaattattgactttcgtgaacctcagtttatatcctaccttagttctgttcttccacatgatgcaaaggatacagttgcctgcattctaaagggtttgaataagcctcagaggcaagcgatgaaaaaggtacttctttcaaaagactacacactcatcgtgggtatgcctgggacaggaaaaacaactacgatatgtactctcgtaagaattctctacgcctgtggttttagcgttttgttgaccagctatacacactctgctgttgacaatattcttttgaagttagccaagtttaaaataggatttttgcgtttgggtcagattcagaaggttcatccagctatccagcaatttacagagcaagaaatttgcagatcaaagtccattaaatccttagctcttctagaagaactctacaatagtcaacttatagttgcaacaacatgtatgggaataaaccatccaatattttcccgtaaaatttttgatttttgtattgtggatgaagcctctcaaattagccaaccaatttgtctgggccccctttttttttcacggagatttgtgttagtgggggaccatcagcagcttcctcccctggtgctaaaccgtgaagcaagagctcttggcatgagtgaaagcttattcaagaggctggagcagaataagagtgctgttgtacagttaaccgtgcagtacagaatgaacagtaaaattatgtccttaagtaataagctgacctatgagggcaagctggagtgtggatcagacaaagtggccaatgcagtgataaacctacgtcactttaaagatgtgaagctggaactggaattttatgctgactattctgataatccttggttgatgggagtatttgaacccaacaatcctgtttgtttccttaatacagacaaggttccagcgccagaacaagttgaaaaaggtggtgtgagcaatgtaacagaagccaaactcatagttttcctaacctccatttttgttaaggctggatgcagtccctctgatattggtattattgcaccgtacaggcagcaattaaagatcatcaatgatttattggcacgttctattgggatggtcgaagttaatacagtagacaaataccaaggaagggacaaaagtattgtcctagtatcttttgttagaagtaataaggatggaactgttggtgaactcttgaaagattggcgacgtcttaatgttgctataaccagagccaaacataaactgattcttctggggtgtgtgccctcactaaattgctatcctcctttggagaagctgcttaatcatttaaactcagaaaaattaatcattgatcttccatcaagagaacatgaaagtctttgccacatattgggtgactttcaaagagaataa

SEQ ID NO: 119845 - DNA, 1691 bp, Homo sapiens
tcgatcgtaaagttaggtgtctatggacctgtgtgaatgacagtggtaatgggcctcgtggaaggtccctgacgaaagcgcaaacggtccgcgtagtcctccctcctggaagggtattcactcttagtcgggaaaatgtcccggcggtactaactctcccatccctcttcccgtctcccgacggtcctggtatgaacatttttaagtgtactaatgtcataggtcgtatagcgccgcccgaaccaatcgccagcctccccgttccatccctaacgctcgtgcaaagaacactggagacaaacgaccgacctacaccatcccccttgaaccgcgcggacagcccccacaagcggcgacaatcatttaaggagccttctagtccaagatggcaattgaagcttccggcaacacatccaagtgtaagggaggaagaaggagtatgggaaacagggcaagaggatgcctgcaagctctgtcaggatgctttaatgaatttttccctgaagccccctctcattcccttgacccactggccaccatgctcttcctcaagacagggaagcctggggaaatggcctatttgttttaagctgagtatgttgtcacttccaacaatacaacagtgtcaaaaggaaagaagacaagacgaggagggtagagaaacaccgaacccacccgtaaaagaagaagtacaatcaagacacacacacccaatcctcgaggagtcgcccgagaaaaacaaagccaaaccttccccaacaaaaggcgcctcgccgtccgctctagaaatagagcgagagaagaacttacgaaaaagagacccacccggaccttcaaccaacgtacgcaaacataacaggaaaactgctagtaaccatcgaaagtcgttacgcagacccaaaattaacgtcaaaggaccccataccgcagtcccgctaaacaaccgtcattacctgtggactgtgtccagactgctcaaagatactcagtgctacagagttactcagtcctgcctgaagccctgcagacatccacggatgagctttctaagtgatacacgagagagctctccatgtattgagtttctccagggcaatcgaataggacaagcccacatcccaacaaggtgccgttctgggaaagctcccggaccatgtgaagtggggcttgcacagaaccacttcagagatcccaagatggcctcagaggattccagaagcagcagaattccagagaagataagtcgcgattgctcttgggagtcgtacgcgctagaggcccctattgctactattgaaatgtgtgagatgaaagggttctgcgacatgttcacccccacaggccaacgctacgacaacaacggccctccagatgctaggcggtatcccctggggaaacgcgtgtggaattttcacccgcccaccccctcaaacatacctaaacacgcacttgtctacgagataacaatttcgacaaacgtcctaacaacaccgaaaaaggaagagcacgagcacctaatacccttgcgctgtttccacctttccccccgtggtaccccgttccttcgcccccgtctatttagaaatgtcggcgaaagcaaaagacgtcgaagattagcccgggcgtatgagcgggccatacctgaatcggactcctatagtggcaagacttccgagagcccctgtttttga

SEQ ID NO: 119846 - DNA, 1082 bp, Homo sapiens
  misc_feature (1)...(1082): n = a,t,c or g
ggaaggagctgctggacaggccgagggagcctacgtccgagaccgcgcagacgccgccgccatggtaagaaaatcatttttgagttacaacacaaccatctggggccctttggaactggtggagaagctgtaccccgaagcagaggaaataggagctagagtccgggatctacctggtctgaagacccctctgggtcgagcaagagcgtggcttcgattagccctcatgcaaaaaaaaatggccgattacttacgttgctcaattattcagagggatctcttgagtgagttttatgagtatcacgcactaatgatggaagaagaaggagcagcaattgttgggctgctggttggcctgaatgtgatcgatgctaatctgtgtgtgaagggagaggatttagactcacaagttggagtgattgattattctatgtatttaaagaatgaagaagatattggagatacagaaaggaatgttcaaattgctgccatattagaccaaaagaattatgttgaagaattaaatagacaactgaacagcacagtcagcagcctccattcaagagttgattcattagaaaagtcaaatactaagctgattgaagagttagcaatagcaaagaataacatcattaaactccaggaagaaaatcatcaattacgaagtgaaaataaattgattttaatgaaaacacagcagcacctagaggttaccaaagtagatgtggaaactgagcttcaaacatataagcattctcgtcaggggctagatgaaatgtacaatgaagccagaaggcagcttcgagatgaatctcagttacgacaggatgtagagaatgagctagcagtacaagttagtatgaagcatgagattgaacttgccatgaagttgctggagaaagatatccatgagaaacaagatactctgataggccttcgacaacaactagaggaagttaaagcaattaacatagagatgtatcaaaagttgcagggttctgaagatggcttgaaagaaaaaaaagaaataattgtccgcctgtattggtccgctctgtgtggcncgtaacgtagcggcggta

SEQ ID NO: 119847 - DNA, 1356 bp, Homo sapiens
atggccaggccaagtgataatagtaaggataattcaacatgtaacattgaagtcgtgaaaccaatggatattgaagaaagcatttggtcccctaggtttggattgaaaggcaaaatagatgttacagttggtgtgaaaatacatcgagggtataaaacaaaatacaagataatgccgctggaacttaaaactggcaaagaatcaaattctattgaacaccgtagtcagttagcaatagcaaagaataacatcattaaactccaggaagaaaatcatcaattacgaagtgaaaataaattgattttaatgaaaacacagcagcacctagaggttaccaaagtagatgtggaaactgagcttcaaacatataagcattctcgtcaggggctagatgaaatgtacaatgaagccagaaggcagcttcgagatgaatctcagttacgacagacaagcccacatcccaacaaggtgccgtctgggaaagctcccggaccatgtgaagtggggcttgcacagaaccacttcagagatccccagatggcctcagaggattccagaagcagcagaattccagagaaggtgggctccatcacaccacccccagacagggccgtgcctaagccacagggtggacaaaagcctgcagccccctacacgttcagagagccaccaggtaaactctgtaaagatttgctgataaatctcagggctgatacagccagcaggcagctggtctcagtccagcggctgaaccttactatatggctcattcacaccgcagaaaagccaggggcaagccaatgggggcctcgggaagtgggcgtgggccctgttgtttactctctcgtgctgctgtctgggtctggccttggtccaggcagggccaggatgtatggagcaaggaagatgggagaggccacatggaactccttgggtccgtgggataccacctgcaagatgggtgaagggaacggaatcacaggtgtccacggaggccaagagcccagctgccccagtgagttttatgagtatcacgcactaatgatggaagaagaaggagcagtaattgttgggctgctggttggcctgaatgtgatcgatgctaatctgtgtgtgaagggagaggatttagactcacaagttggagtgattgatttttctatgtatttaaagaatgaagaagatattggaaataaagaaaggaagctactgaaagatgtgttgccgaaaataagggagtatacaaagagagaagttagggaattcaggcaacaggagctcccacaaagggggaagcgtggtaacattttccaggtgctatacaaatgttcagaagcattacagttgtcattataa

SEQ ID NO: 119848 - DNA, 503 bp, Homo sapiens
atgggcaaggacttcatgtctaaaacaccaaaagcaatggcaacaaaagccaaaattgaaaaatgggatctaattaaactaaagagcttctgcacagcaaaagaaactaccatcagagtgaacaggcaacctacagaatgggagaaaatttttgcaacctactcatctgacaaagggctaatatccagaatctacaatgaactcaaacaaatttacaagaaaaaaacaaacaaccccatcaaaaagtgggtgaaggatatcaacagacacttctcaaaagaagacatttatgcagccaaaaaacacatgaaaaaatgctcatcatcactggccatcagggaaatacaaatcaaaaccacaatgagataccatctcacaccagttagaatggcgatcattaaaaagtcaggaaaaaacagggacatggatgaagctggaaaccatcattctcagcaaactatcgcaaggacaaaaaaccaaacacctcatgttctcactcacag

SEQ ID NO: 119849 - DNA, 348 bp, Homo sapiens
ctatggacttatgatcaggactatccctgtggacccaaccattaggacaacttcagtgagccttactgtcaggctggccaccatgaacccaagatctagacctgctccagtggacacaggctccaggtccaccccaccttcataagaaccaaaagtcaagtcagcactcacagtacctggatttaacttcatattgctgaaagaggcactaaagcggtaagcatctggaatgacaggtagtgcgggtgccgtgtggagagcatttttgtgccgagtgagaacatgcagtgtttgattttctgtccttgtgatagtttgctcagaatgatggtttccagcttcatccat

SEQ ID NO: 119850 - DNA, 438 bp, Homo sapiens
tcagagggagatgtctgtgaggaatctgggcggaggggtatacacttcaaaactgagcacttgactaggaggtgaccactggagtttggcttttggaaccaaagccttggagcagatgaactcacttttgtccgccgttctcggtatgtagagggtggtgtccaagccgctggacacgcgtcgccctccgtcggttaacacgtactccttcagttggccgttcaggaggaaggtgtcactccagttcacacacaccccacccaaagtgctgtccaccgaaaatggggctcggtactgaggcactgcaactatggttcggcagcccacctcattatgctcacaccatgcgtgaaccagattctgcatcaggaaggttgcagggttggcctttgacttgtacagaatcaggaccaggtggtcatggaagatccattccat

SEQ ID NO: 119851 - DNA, 2448 bp, Homo sapiens; identical to SEQ ID NO: 119244

SEQ ID NO: 119852 - DNA, 1922 bp, Homo sapiens
atgggcaaggacttcatgactaaaacaccaaaagcaatggcaacaaaagccaaaattgacaaatgggatctaattaaactaaaaagtttctgcatagcaaaagaaactgtcatcagagtgaacaggcaacctacagaatgggagaaaatttttgcaatctacccatctgacaaagggctaatatccagaatctacaaagaacttaaacaaatttacaagaaaaaaacaaacaaccccatcaaaaagtgggcaaaggatatgaacagacacttctcaaaagaaaacattcatgcagccaacagacatatgaaaaaatgctcatcatcactggtcaccagagaaatgcaaatcaaaaccacaatgacataccatctcattccagttagaacaatgatcattaaaaagacaggaaacaacagatgctggagaggatgtgaagaaacagaaacgcttttacactgttggtgggagtgtaaactagttcaaccattgtggaagacagtgtggcgattcctcaaggatctagaactagagataccatttgacccagccatcccattactgggtatatacccaaaggattataaatcatgctgctataaagacacatgcacacgtacgttcattgtggcactattcacaatagcaaaggcttggaaccaacccaaatgtccatcaatgatagactggattaagaaaatatggcacatatacaccatggaatactatgcagccataaaaaaggatgagttcatgtactttgtaggaacatggatgaagctggaaaccatcattctgagcaaactatcgcatggacagaaaaccaaacaccgcatgttctcactcatagtattggaagttctggccagggcaatcaggcaagagaaagaaataaagggtattcaattaggaaaagaggaagtcaaattgtccctgtttgcagatgacatgattgtatatttagaaaaccccatcatgtcagccccaaatctccttaagctgataagcaacttcagcaaagtctcaggatacaaaatcaacgtgcaaaaatcacaagcattcctatataccaatatcagacaaatagagagccaaatcatgagtgaactcccattcacaattgctacaaagagaataaaatacctaggaatccaactttcaaggaatgtgaaagagctcttcaaggagaactacaaaccactgctcaaggaaataaaagaggacacaaacgattggaagaacattccatgctcatggataggaagagtcaacattgtgaaaatggccatgctgcccaaagtaatttatagattcagtgctatccccatcaagttaccaatgactttcttcacagaattggaaaaaactactttaaagttcatatggaaccaaaaaagagcctgcattgccaagacaatcctaagcaaaaagaacaaagctggaggcatcacgctacctgacttcaaactatactgcaaggctacagtaaccaaaacagcatgggacatggatgaagctggaaaacatcattctcagcaaactattgcaaggacagaaaaccaaacactgcatgttctcactctacaagtcatcgtcacaccttccaggggaagtcgcctggactaccgcggcctcaaattcagcctcccggatcttaccgctagctttccaggggaccgacaagggtgcagtgctcccagggttgccctctcccctggctggtccgcctctggttctcttcagagtcggtggctccacctggccagtcgtggatctcggacgctgtggcactcagcagggaaatcaggccgaagggaccaccagctgtacctgccagtctcctgcgccctcttcgcattcagcggcaggcagctgcggcttggtgaattccgcgaattccgcgctggccccgggaccccctg

SEQ ID NO: 119853 - DNA, 768 bp, Homo sapiens
atggatgaagctggaaaccatcattctgagcaaactattgcaaggacagaaaatcaaacacgtcatgttctcattcttgtgcagtactctgctaaagagagacaagtgtataaggccaatatgccgcaccaaggagtgttcagcctgggtgttcctgtagatgctctcttctttattggtaaccagttggtggccacgagtcatacagggaaagtgggagtgtggaatgctgtcactcagcactggcaggttaggacaggcttgagcacacttgtagctagagaggagagttgccagaaggacctgaagactgaaagaatggagattatttccggtcccataaaagtcaagagtgtatatgggatctacagcacagctagaaagctatctactgtacttaatagtattaaggatactttacctgttaaaaagagggaaaatgcaacaaaatatgagctccagggttatgctgtgcctcagtaccgagccccattttcggtggacagcaatttgtctgtggtgtgtgtgaactggagtgacaccttcctcctgaacggccaactgaaggagtacgtgttaaccgacggagggcgacgcgtgtacagcggcttggacaccaccctctacataccgagaacggcggacaaaaccttctttttccaggtcatctgcacgacttgacgaaggaagtgtttaaggacgccgttgattccaatatgatacctctactggacttggcttggacctaacaactcctgggaaaaagag

SEQ ID NO: 119854 - DNA, 801 bp, Homo sapiens
atggccggatcgcgtggacgtgacgtcgtatataccaacaacgaggaagaagaggggcaacgcataaccgcacatattaggacgcggggttacgcgcatttacatggaatattgccggacaaaggacgaactcacgaaacacccttcaacttgggtaccgacaaagattattcaccgcggcgatcccgtcgatcgggttgtttcgaaaatcacgaattattgtacattgcgcgggcagcttcatggcgagagccttggattggttggaatgagacattctatggagaacaggacaccatgcggcctgggcaccctcagggaccaccagagcagtccgtacgccgcagcctaactgaaggggccttggctcattctgggaaccctgtatcaaaaggagtccatgaagaccatcagctggataccgaggctggggccccacactgtggaacaaacccacagcttgctcaggaacattggggttcggaaaagaacaccagcttctttccgggtcaccaaggagactcgggacttgaagccctgctggcgactctaaaggacccctctgtcgcctggaaggaggtctcccaggacttggctgcttatttcacaggtgaaggggaaacagtagtaggaagggcagaatcaggtgctggccaaactcctgccatgggccagtccctgggctacccatgggagcccaaagggaataacatggcctctctccccagtgagaaattccctactgggaggagatcccatttatttggcagagtttctcccaacagtggaagcagactgtaa

SEQ ID NO: 119855 - DNA, 469 bp, Homo sapiens
tgatcgactggaggagaagggcagcctaactgaaggggccttggctcattctgggaaccctgtatcaaaaggagtccatgaaggaccatcagctggataccgaggctggggcccccacactgtggaacaaacccacagcttgcttcagggatccatcccaggaatcagtcaggacatcaaatccaacggcacagttcagaagatgtgaagccaaaaacccttcccgctgggataaaaggcattaaccatcagatcgagtctcccagtgcaaaggcggaagtctataagtgtggaaagaagctgtgctcttcctgtggggcttcctttgggtaaagggagctttcaatgatcatcgaggaccctcaatcttcttatttttcacattccagtgttttcaggtgtgggaatttgttaaagggccagcttggagatgcagtgagtgtgacggaatgttaggattccgaatggt

SEQ ID NO: 119856 - DNA, 517 bp, Homo sapiens
agttggaggccctgagaaccctaccctgatagacccagagaaccaaaacgtgaccctgaatggtcctgggggctgtgggacaagggaggactgtgtgctcagcctgggcagaacaaggactgaagcccacacagccctgtcccgactcagggccagcatgtggattgaccgcagcaccagggctgtgtctgtgcacttcactctctataaccctccaacccaactcttcaccagcgtgtccctgagagtggagatcctccctacggggagtctcgtcccctcatccctggtggagtcattcagcatcttccgcagcgactcagccctgcagtaccacctcatgcttccccagctggtcttcctggcactcagcctgatccacctctgtgttcaactctaccgtatgatggacaagggcgtcctcagctactggcgaaagccaaggaactggctggaggtagcctctcttgtgtcattttcttttgaaaaataacaataaactgtttatatcttgaaa

SEQ ID NO: 119857 - DNA, 2792 bp, Homo sapiens
atgccagtgtaggctatttatccttattggatgctgactatgacagaaaacctccaaacagatatttagctaaggcagtgaactatacagtacatttccagtggatccgatgcctgttttgggacaagagagagtggaaatctgaacgtttctctccacaaccagggacttctcctgaaaaagtgaactgcagctaccatcgcctcgcggcattcgctctcctaaggagaaagctgaaggccagttttgaagtgagtgacatttccaagctacagagccacccagaaaacttgcttcccagtatttttattatgggttctgtgattctttatggatttttggtcgctaaaagtagacaagtagatcatcatgaaaaaaagaaagctggttacatctttctgcaagaagcttccctgccgggccatcagctatatgcggtcgtcattgacactggcttccgagctccggccagcgctcctgcccaactgggcctgctgaggaagatccgcctctggcacgacagccgtgggccttccccaggctggttcatcagccacgtgatggtgaaggagctgcacacgggacagggctggttcttccctgcccagtgctggctgtctgccggcaggcatgatggtcgcgtggagcgggagctcacctgtctgcaagggggactcggcttccggaagcttttctattgcaagttcacagagtacctggaggatttccatgtctggctgtcggtgtacagcaggccctcctccagccgctacctgcacacgccgcgcctcaccgtgtccttctccctgctgtgcgtctacgcgtgtctcactgccctggttgctgctggagggcaagagcaggtgagagccatcgcttttccttatagcagcttccagatccgactacactgtggcccctttttgcctaagaaatcaacaaagctcacagttctccgagaaaagtttaaaccaggggaagcaagcctggctgcctggggaccagagaaggaacaggagggctctgcccggctcagcaaggtacctgcgacttgtcctcatggccctgttctcctgagcagccccttcattgctggggaacacgcttggcgaaccacctctttccttctgcaggaagccccggggtctgcccgagtggagccacacagcccacttagaggaggagcacagaccgaggcaccccatggtgggtcagaaagaaggggtctcagcagaggcctgaaacaggaaggaagtgaagcccagaagaattcagaaagccctgtgtgtctactcagtaaataccggcaggaccgtgggagagacactgtggagcagcaaggctcgggcgtgattgctcacacccagcagtggtttggagggactaatgccccagtggtcaagggcccttcagccttggtggagctctgcagtgtgggccatttgtgggaccgcttctttggcctgcagtttggggacaggatttctagcctacagatgttgaatcactctgtgaggatgggcaggtcttggctgcccgacaacaagctcgccaccctgctgggcgcatccaccatccaaggcccagctgaggggcaccagacagaggatgaggagagagagtcgcacacgggctgccctgagaagcaactttttatttttgttcttgcattaagaaatgccagaaactgcttgggtggcctgagaaacatcgctgactggtgggactggagtctgaccacacttctggatggcctgtacccgggaggcaccccgtcagcccgtgtgccgggggctcagcctggagctcttggaggaaaatgctacctaataggcagttccgtaattaggcagctaaaagtttttcctaggcatttatgcaagcctcccaggccattttcagcactcatcgaagactctattcctacatgtagtcccgaagttggaggccctgagaacccctacctgatagacccagagaaccaaaacgtgaccctgaatggtcctgggggctgtgggacaagggaggactgtgtgctcagcctgggcagaacaaggtcacgtgtccctgagagtggagatcctccctacgggagtctcgtcccctcatccctggtggagtcattcagcatcttccgcagcgactcagccctgcagtaccacctcatgcttccccagaggacagagaagatgcataaagccctgctgatgtgcttcagttcctgcaaatccataactaactttgagtttgggttagtgattaaaggcatgaatcaacagctggtcttcctggcactcagcctgatccacctctgtgttcaactctaccgtatgatggacaagggcgtcctcagctactggcgaaagccaaggaactggctggagctctccgtggttggagtgagcctcacctactatgcagtttccggccaccttgttactcttgctggagatgtcactaaccagtttcacagaggactttgccgagcatttatggacctcacccttatggcatcatggaatcaggtacacggtgtgctcagggccatgcagatagaggccatgcactgtgatgccatccaaaaggcagaggtcacacaaactctagaaggtgcgagacaacagatttgtttgatatcgagagatgatgctctgagctggcagatgggagtggccaggacagtgaagggcctgaagagcttgagacatgctttgaacactggggtatgtggattctgcgtggagcagaactcaagagcctggaattcccccagtgcctcgaggggacgctaa

SEQ ID NO: 119858 - DNA, 444 bp, Homo sapiens
taagatgatgatccgaaatccagtccatgaagacagttaaaagttcataaacttgcccattaagtggtaccttgtaagtttttgaaactggtgctttttcttgttttaaacttttcatttcatgaacagcatgggaacttcctttcaatctctgtattgtcataaactcgtacttcctctgtaaattatctaaacgagcttgaactcttttagcctgaatgtctatcttcctgttttcttcacttgcttcatttaactgtttttttaaggtatcattcaattctttcaatgcatcaaaagaggacctcagtctcttggtttctttattcttttccttaagaacttcggttaagtgttcaacttctgcatcatgctgctcttttataatttgaaatcttgtaagaacctcttcttcaacacctttaattttactcaaggcatttt

SEQ ID NO: 119859 - DNA, 1047 bp, Homo sapiens
atgcccaaacgccccgatcggcccgtggcccgcttctctgcgttgttccacccgtcgccgcctatcccttatcccgcgtccatccggtcgagcccagcgaacccctatccatcgtactccgcgcccgggcaccgacggaacgcggaagccacccccaaacgattaaatgaagcaagtgaagaaaacaggaagatagacattcaggctaaaagagttcaagctcgtttagataatttacagaggaagtacgagtttatgacaatacagagattgaaaggaagttcccatgctgttcatgaaatgaaaagtttaaaacaagaaaaagcaccagtttcaaaaacttacaaggtaccacttaatgggcaagtttatgaacttttaactgtcttcatggactggatttcggatcatcatcttagcaaagtgaaacatgaagaatctggaatggatgaactctcaggccaaggacacctggccactgccctgatcattgcaatgtccaccatcttcatcatggccatcgccatcgtcctcatcatcatgttctacatcctgaagacaaagccctctgccccagcctgttgcaccagccacccggggaagagcgtggaggcccaagtgagcaaggacgaggagaagaaagaggccccagacaacgtggtgatgttctccgagaaggatgaatttgagaagctgacagcaactccagcaaagcccaccaagagcgagaacgatgcctcatccgagaatgagcagctgctgagccggagcgtcgacagtgatgaggagcccgcccctgacaagcagggctccccggagctgtgcctgctgtcgctggttcacctggccagggagaagtctgccaccagcaacaagtcagccgggattcaaagccggaggaaaaagatcctcgatgtgtatgccaacgtgtgtggagtcgtggaagagaccgtgtccacactggcatcatcatctgggaaacgtgatcagtcatttatcctagacttagctgccctctccctgccctcgagcatccccgatgtctga

SEQ ID NO: 119860 - DNA, 360 bp, Homo sapiens
atgaattttgataagaggcaacatgaagcaagaatccagcaaatggagaatgaaattcactatttgcaagaaaatctaaaaagtatggaggaaatccaaggccttacagatctccaacttcaggaagctgatgaagagaaggagagaattctggcccaactccgagagttagagaaaaagaagaaacttgaagatgccaaatctcaggagcaagtttttggtttagataaagaactgaagaaactaaagaaagccgtggccacctctgataagctagccacagctgagctcaccattgccaaagaccagctgaagtcccttcatggaactgttatgaaaattaaccaggagcgagcagag

SEQ ID NO: 119861 - DNA, 531 bp, Homo sapiens
atggtcagagacaggtttcactctagaagcctattgctcctaggccacaggcctgcacagcatattactgtgctaaataccgtaggtaatagtaacacaagtccctgtggacagcaaaatgcaatgccctttatctccagacctaaatcatttcctcaaccctatgtgataaagattgatgatggaggaagagataaatataggaaaaggtttcttcaggatactattgattctgtgtttccaagtcttccaacaaagaagaaacttgaagatgccaaatctcaggagcaagtttttggtttagataaagaactgaagaaactaaagaaagccgtggccacctctgataagctagccacagctgagctcaccattgccaaagaccagctgaagtcccttcatggaactgttatgaaaattaaccaggagcgagcagaggatgcaaatgctaatgagattaagatagcagatcataggagacaaaaatctaatgatgagagcccagagagacataatcatggaagacggtag

SEQ ID NO: 119862 - DNA, 516 bp, Homo sapiens
ttaagtttgtgtgtgttctaatacttctgcatctttaaagtcccaaagcgatacagtagaggcaaaggctggctgggtatgaatctgcattccatggaaatggtcctttttctcaatcatgtgtaggatataatgtgcaaagtaaaatcctgggttatagatcaaaagaaacctgttcgcttctatcatgattggaatgacaaagaggtaagttgtaaatatcatgccatctattactgcctttgctttcatttgcttgttggcaccagggactggtttcatggaagacaatttttccatgggtgggtgatgggggtgtggtttcaggatgaaactgttccacctcagatcatcaggcattagattcttgtaaggagcgcacaacctggatcccttgcacgtgcaattcacaatagggtttgggcttctgtgagaatctaatgctgccgctgatctcagagcctttgtacttgcagtttcctctccctgaactgagctttccatggattctctcat

SEQ ID NO: 119863 - DNA, 421 bp, Homo sapiens
ggtagacgtagcagattagcaatgcggccacttagcatgtcttacagttttgacttgtcagatgtgactacccctgaatctacaaagaatcttgtggagtcatctatggtgaatggaggtttgacatcacaaacaaaagaaaacgggttaagtacctcacagcaggtgcctgcacagcggaagaagctcctcagagccccaactctggccgaactggacagctctgagtctgaggaagaaacgctgcacaagtcgaccagcagcagcagcgtgtctccctctttccctggaagagccagtccttggaggccgtgttcacaaggaagaagcctccaaaattcctgcccatatcatcaacaccccagccagagagacggcagccaccccagagacgacattccattgaaaaggaaacgcctac

SEQ ID NO: 119864 - DNA, 1089 bp, Homo sapiens
  misc_feature (1)...(1089): n = a,t,c or g
atggcgtactacctgggtattgctgctgattatttagggcccaaggactcattagtcagcagcacacagattctctctgcggcccatggccactgccaggaggtggaggaggggtggcatcagcaattcaagactgtctttcctaccctctttggtgcctctttcggtggtctgaagttaaaacctggccttctgcagcctcatagcaaagatgagggcatcattgctaccatcagcattgctaccgccctttcgggaggtttgcttgtaaagggagcacagaaatgggattgcactggagggcttgagttaattgctacccgtnaagtcattgaatctttgggaattattatttataaagcactggactatggtttgaaggagaatgaagaaagggaattaagccctcccctagagcagcttatcgatcacatggccaacacggtggaagctgacggtagcaatgatgagggctatgaggctgcagaagaaggcctgggagatgaagatgaaaagagaaaaatctcagctattcggtcatatagagatgtcatgaagaatgaagccgcggacccttgcagtgttccagttcttaaagatggtgtgcccggagtttcttccttcaaatgtttagatgtgtccggagttagtttcttctggtgggttcctggtctcactggcttcaggagtgaagctgcagacctttgcgagcctccaaaattcctgcccatatcatcaacaccccagccagagagacggcagccaccccagagacgacattccattgaaaaggaaacgcctactaacgtgaggcagttcctgccgccttccaggcagagttcccgctctcttagatggtttccagatcccgcgtttgcttgtttccgtctagagcagaaccaccaggtgacaagttctggaccattcccattgggacattacagagctgctacgggagcaagatgggccactcaagggcgctgcgtgccgggaagggcggcgcagggacagcgcaccagcaccccggccagaggccccgctgccttcaggactggggaggcaggcgccgcacagctccactcaagatga

SEQ ID NO: 119865 - DNA, 2079 bp, Homo sapiens
atgaaggagttcttgtcaacagcgcaaggcaacagagaagtgttccatgcagggacattgcaaatacatgaaagtcatcacaatggagatttttgctaccaggatgttgataaagatattcatgactatgaatttcaatggcaagaagatgaaagaaatggccatgaagcacccatgacaaaaatcaaaaagttgacaggtattacagaacgatatgatcaaagtcatgctagaaacaagcctattaaagatcagcttggatcaagctttcattcgcatctgcctgaaatgcacatatttcagaccgaagagaaaattgataatcaagttgtgaagtctgtccacgatgcttccttggtttcaacagcccaaagaatttcttgtaggcccaaaacccatatatctaataaccatgggaataatttctggaattcttcattactcacacaaaaacaggaagtacacatgagagaaaaatctttccaatgtaatgagagtggcaaagcctttaattacagctcactcttaaggaaacatcagataatccatttagcagacaaatataaatgtgatgtatgtggcaagctctttaatcagaagcgaaacctagcatgccatcgtagatgtcacactggtgagaatccttacaagtgtaatgagtgtggcaagaccttcagtcagacgtcatcccttacatgccatcgtagacttcatactggagagaaaccttacaaatgtgaagaatgtgacaaagctttccatttcaaatcaatacttgaaagacataggataattcatactgaagagaaaccatataagtgtaatgagtgtggcaagacctttaggcagaagtcaatccttacacgccatcatcgacttcatactggagagaaaccttacaagtgtaatgagtgtggcaagacctttagtcacaagtcatcccttacatgccatcatagacttcatactggagagaaaccctacaaatgtaatgagtgtggcaagacctttagtcacaagtcatcccttacatgccatcgtagacttcatactggagagaaaccttacaaatgtgaagaatgtgacaaagcttacagtttcagatcaaattttgaaatacatcggaaaattcatactgaagacaatgcttacaagtgtaatgagtgtggaaagacctttagccggacatcatcccttacatgccatcgtagacgtcatactggagagcaaccttacaaatgtgaagaatgtgacaaagctttccgtttcaaatcaaaccttgaaagacataggagaattcatactggagagaaaccatacaagtgtaatgagtgtggcaagacctttagtcggaagtcatacctcacatgccatcatagacttcatactggagagaaagcttacaagtgtaatgagtgcggcaagacctttagttggaagtcatcccttacctgccatcgtagacttcattctggagagaaaccttacaagtgtaaggagtgtggcaagaccttcaatcagcagttaacccttaaacgccatcgtagacttcatagtggagagaacccttacaaatgtgaagatagtgacaaagcttacagtttcaaatcaaaccttgaaatacatcagaaaattcatactgaagagaatccttacaagtgtaatgagtgtggcaagaccttcagtcggacgtcatcccttacatgccatcgtagacttcataccggagagaaaccttacaaatgtgaagaatgtgacaaagctttccgtgtgaaatcaaaccttgaaggacataggagaattcatactggagagaaaccttacaagtgtaatgagtgtggcaagacctttagtcggaagtcatattttatatgccatcatagacttcatactggagagaaaccttataagtgtaatgagtgtggcaagaactttagtcagaagtcatcccttatatgccaccatagacttcatactggagagaaaccttacaagtgtaatgagtgtggcaagacctttagtcagaagtcaaaccttacatgccatcgtagacttcatactggagaaaaacaagtgtaa

SEQ ID NO: 119866 - DNA, 450 bp, Homo sapiens
cacttgtatgccttcttcattcagtggagtccagaaatatatgcagaagatactggcgaatataccagagaacctggatttatagtagtaaaaaagattgaggagtctgaaacaattgaggattctagtaatcaagcagcagccagagaatgggagattactacaagggaagacataaattcaaagcaggttgctacagtgaaagcagacctggagtctgaatcttttcgaccaaacctaagtgatcccagtgaacttttactgccagatcaaattgaaaagcttaccaagcatcttccaccaagaacaattggctatccatggactcttgtttatggtactggaaaacatggcacaagcttgaaaactctttatcgaacaatgacaggtttagacaccccagtgctgatggtgattaaagacagtgatggacaggtttttggtgcgtta

SEQ ID NO: 119867 - DNA, 1509 bp, Homo sapiens
  misc_feature (1)...(1509): n = a,t,c or g
cactgaaagcatcggaaccgccccggaatcccggtcgacccacgcgtccgcggacgcgtggggaattacttggtctataaggttaattttttggtcatattgaataaggcacattttttatatgctttggagatacgtgctacatccttttgttaaaaagtctttttagtgatactaattctgcgttcagcgcgtgaaaagtaaaataccacaattttaaaagtctaattatttttaattttgtttaatgacagagatatagatcagctatcaggaagggacttctgccattcaaagaaaatgacaggaagtaacactgaggaaatagactcaagaatccgagatgcaggtaatgatagtgccagcactgctcctaggagcactgaggagtctctttctgaagatgtgttcacagaatcagaactttcccctatacgagaggagcttgtatcttcagatgaactgcgacaagataaatcttctggtgcgtcatcagaatctgtgcaaactgtcaatcaggctgaagtagaaagtctgacagtcaaatcagaatctactggtactcctggtcacttaagatctgatactgaacattctacaaatgaagttgggactttatgtcataaaactgatttaaataatcttgaaatggccattaaggaagatcagattgcagataactttcaaggaatatcaggtcctaaagaagacagcacaagtataaaaggtaattcagaccaggattcttttcttcatgagaattcgttacaccaagaagagagtcaaaaagaaaatatgccttgtggggaaacagcagaatttaaacaaaagcaaagtgttaacaaaggaaaacaaggaaaggagcaaaatcaggacttcacaggacagagggcagganggagctacgcaaactttgggaaaacccatactatgcaacaaactaaacagcaaagggaaaatattcaacaagtgtcacaaaaagaagctaagcataaaattacatctgctgatggacacatagaaagttctgcacttttaaaagaaaagcaaaggcatcgattacataagttcttgtgtctcagagttggaaaaccaatgaggaaaacgtttgtatctcaagcaagtgctacaatgcaacagtatgcacagagagataagaaacatgaatattggtttgctgtgccacaagaaaggacagatcacttgtatgccttcttcattcagtggagtccagaaatatatgcagaagatactggcgaatataccagagaacctggatttatagtagtaaaaaagattgaggagtctgaaacaattgaggattctagtaatcaagcagcagccagagaatgggaggaactgtctcagtttctgtgcaagactctgcagggtataatttctaaaggaaaaataaatctcctcaccagtcctttgaccggaattggtgcagttcaaaagaaaatggaagagaaaaaaataattttggaaactccttgctacattgtctga

SEQ ID NO: 119868 - DNA, 201 bp, Homo sapiens
gtcggcagcgtgcgcgatggtgttgttggagagcgagcagttcctgacggagcttgaccagacttttccagaagtccggacgtcggcagctctattatcaccttgagagagagacaaaagacaaactagagaccaagcagcagcagcagcagcagcagcagcaccttccgcagcagcaacaacagcaacaacaacagcgac

SEQ ID NO: 119869 - DNA, 524 bp, Homo sapiens
  misc_feature (1)...(524): n = a,t,c or g
gtgtgttttgcgctgtagaancggcacgagaccaacccattcaaagaaaggtactgtggagggctttgagcccgcagacaacaagtgtctgttaagagctaccgatgggaagaagaagatcagcactgtggtgagctccaaggaagtgaataagtttcagatggcttattcaaacctccttagagctaacatggatgggttgaagaagagagacaaaaagaacaaaactaagaagaccaaagcnnnnnnnnnnnnnnnnnnnnnnnnnnnnnncgcagcagcaacagcagcaacaacagcagcaacaacagcagcaacagcagcacagtaaagggcatacatttcctgctttcaccaattaaccactgaattgctattttttccttttggccagatagctaggtttctggttcccccacaagtagtgttttcacataagattagggtgcttttggaaagataattgcagcgttatatgaatagtgcgtaagaatctagttattttgcattggctaattggctgg

SEQ ID NO: 119870 - DNA, 2250 bp, Homo sapiens
atggtgttgttggagagcgagcaggtatggctaggcctggccggccgagggaagggggcggctcaggcgttactcgagacctgtgcctcctgcaggaggaccagggccttgacgcggcaggacgaggatttggggctggctaacggggctgggcctgttgttttccagttcctgacggagctgaccagacttttccagaagtgccggacgtcgggcagcgtctatatcaccttgaaaaagtgtaagcagcgggaggggagccgggcgatgctccctgggttcccgtacactcctgtatcatcaaaagccatgtatgacgcttactggaacggtaaattcagagactgcgctttccattctggctttaatgaggatccattcgtttgtgaatatcaaggccaatcgtctgacctgcctcaacctcctgtcaatgctggcggcggctctggtggtggttctggtggcggctctgagggtggcggctctgagggtggcggctctgagggtggcggttctgagggtgacggctctgagggtgacggttccggtggcggctccggttccggtgattttgattatgaaaaaatggcaaacgctaataagggggctatgaccgaaaatgccgatgaaaacgcgctacagtctgacgctaaaggcaaacttgattctgtcgctactgattacggtgctgctatcgatggtttcattggtgacgtttccggccttgctaatggtaatggtgctactggtgattttgctggctctaattcccaaatggctcaagtcggtgacggtgataattcacctttaatgaataatttccgtcaatatttaccttctttgcctcagtcggttgaatgtcgcccttatgtctttggcgctggtaaaccatatgaattttctattgattgtgacaaaataaaaatattacgtggtgtctttgcgtttcttttatatgttgccacctttatgttaccggttattgccaacattgctatcccgcaaaagaggccgtttatgcaacaaaccaggtgcgaagttcaatgcagggaagacattgaggtgcaaaaactgaagagttacgacaaacttcttgcaagcatcaacaagaaacctggcgtcaatggttggcaaaaacgtcgtatcacggtaaatgccggcgaagcgcacgatcagcaagcgttagattatgcgctttatcatctgcgcatcatgacgcctgcccacgacgagcgcagcagcattgcggcaaaaggcttaaccggcgaaggctacaaaggccacgttttctgggatacagaagtatttttgttaccgtttcatctgtttagcgatccgacggttgcccgaagtttactgcgttatcgctggcacaacttgccaggcgcgcaggagaaagcgcgacgcaacggctggcagggcgcgctatttccgtgggaaagcgcgcgcagcggcgaagaagagacgccggaatttgccgccattaacattcgcaccgggctgcggcaaaaagtggcctcggcgcaggcggaacatcatctggtggccgatatcgcctgggcggttattcaatactggcagaccacgggggatgaaagtttcattgcgcatgaaggcatggcgctacttctggagacggcaaagttctggattagccgcgcggtgagagttaacgatcgtctggaaattcatgatgttattgggccagacgaatataccgaacatgtcaataataatgcatacaccagctatatggcccgctacaacgttcaacaggcgctgaatattgcccgccagttcggctgtagcgacgatgcgtttatccatcgcgccgaaatgttggggatcgtcgctcacaaaaaggggatctgtcaccagcattcgaatgctcattcgagcgccaaccctgctcctaagaagtcagacacacaaacacacattcagagccagctgggctggggacacagtcccagaagtacagaatgtgttcgcttccaggtggcatgcctgtgcttcagctgtggctgtaccagcacggatgcagcctcaggctcctctcccagccttggcagccatccagaaagccagcccgaagaggaagggttaagtgcctggggacccagcccagacagcggctgctggaacagggaaggcagcctccaggccatggcacagagggctcctccagcacgagcctgccagccgccgcctttgttgatggactctgccacatgctcggctgacacgtga

SEQ ID NO: 119871 - DNA, 342 bp, Homo sapiens
atggtgttgttggagagtgagcagttcctgacggagctgaccagacttttccagaagtgctggacatcgggcagcatctatatcaccttgaagaagtatggtggtggaaccaaacccgttccaaagaaaggttctgtggagggctttgagccctcagacaagtgtctgttaagagctatcgatgggaaaaagaaggaaaagaattcattcctcaactacaacgtctcctgtatccttactatgcctcagtacatgagacagggctatggcaagatgcttattgatttcagtcttggtcttgatgccaagtttgggaaaggagctaagaagacatcccactag

SEQ ID NO: 119872 - DNA, 755 bp, Homo sapiens
cggctctcactgctaggggcttaagcggagggagtcgagccagcgtcgccgcgatggtgttgttggagagcgagcagttcctgacggagctgaccagacttttccagaagtgccggacgtcgggcagcgtctatatcaccttgaagaagtatgacggtcgaaccaaacccattccaaagaaaggtactgtggagggctttgagcccgcagacaacaagtgtctgttaagagctaccgatgggaagaagaagatcagcactgtggtgagctccaaggaagtgaataagtttcagatggcttattcaaacctccttagagctaacatggatgggttgaagaagagagacaaaaagaacaaaactaagaagaccaaagcagcagcagcagcagcagcagcagcacctgccgcagcagcaacagcagcaacaacagcagcaacaacagcagcaacagcagcacagtaaagagcatacatttcctgctttcaccaattaaccactgaattgctattttttccttttggccagatagctaggtttctggttcccccacagtaggtgttttcacataagattagggtccttttggaaagaatagttgcagtgtttataggatagttgtggtaagaatctagtttattttgcatttggctaattggtctgtgctgcatggttatatactcctggattatagattaaaagtctctgtagacatctctgtgaagagcaagctatcattaaacatgtctgtttatc

SEQ ID NO: 119873 - DNA, 300 bp, Homo sapiens
ttatttatcctcctcctcttcttccttctcctcttcctcttccttctcctcctcctcctcctccttctcctcctcctccctaatcatttcttgaatgattgaaggagtaatgggaccctccttattccttactcctaaattctcactattgattgaacgtctcatacgcaggcactgagacacctcagtgaataaaatatagtcctcgccttccttcttggggcttccattaaatttgatcacagttttacacaggagctttcggaatgaagacgcaaagatagacaggaagctgtccat

SEQ ID NO: 119874 - DNA, 642 bp, Homo sapiens
gctagcccccacattattcctgataccacacctgacccccatgactgtatctctctaatccacctggcattcactccatttccccatacttccttctttcctattcctcaccctgatcacacttggtttattgatggcagttccacctggcctaatcgccattcaccagcaaaggtgggctatgctatagtagtatcttccacatctatccttgaagctaccgctctgcccccctccactacctctcagcaagctgaactcattgccttaactcgagccctcgctcttgcaaaaggactacatgtcaatatttatactgactctaaatatgccttccatatcctgcaccacaatgctgttatatgggcagaaagaggtttcctcagtacgcaaaggtcctccatcattattgcctccttaataaaaactcttctcaaggccgctttacttccaaaggaagctggagtcattcactgcaagggccatcaaaaggcatcagatcccatcgctcagggcaatgcttatgctgataagtccgataacggactggcctttactagtcaaatcacccaagcagtttctcaggctcttggtattcagtggaaccttcataccccttaccgtcctcaatcttcaggaaag

SEQ ID NO: 119875 - DNA, 583 bp, Homo sapiens
gaagctggagtcattcactgcaagggccatcaaaaaggcatcagatcccatcgctcaggacaatgcttatgctgataagttagctaaaaaagcagctagcgttccaacttctgtccctcacgggatttctcaggccccccctcccctccctacgcatcaagctcggtactggcaaattgactttactcacatgcctcgagtcaggaaactaaaatacctcttggtctgggtagacaccttcactggatgggtagaggcctttcccacagggtctaagaaggccactgcggtcatttcttcccttttgtcagacataattcctcagtttagccttcccacctctatacactccgatagcagactggcctttattagtcaaatcacccaagcagtttctcaggctcttggtattcagtggaaacttcgtaccccttaccatcctcaatcttcaggaaagtgctgggattacaggcataagtcactgcatccagccaaatgtttgctgaattcttacagccccagcaatgtccaaggctctggagacaccgtggtggacaggacaccatccctgtccttaagaaag

SEQ ID NO: 119876 - DNA, 409 bp, Homo sapiens
cccacgcgtccgcccacgcgtccggtcgttgcccaatagagactggagagagagagagagtgtgtagagccactgaacatcagggctgcacactgtagggcctggggcagacaggacatgctgcagcaggggaaaagcccctggcccatgtggaagatgcaagctgggtgggtgctgtggatgccatagtgatgtggaatgagaggagaaaatgggagcctgggctccaaacaaggagtaagcagagccacacttcttactctctcactgaatcaggtgttgaagagccatggacaagactacctcgttggccacaagctgagccgggctgacattcacctggtcaaacttctctaccacgtggaagagcttgacaccagcctcatctccaacttccctgtgctgaagg

SEQ ID NO: 119877 - DNA, 425 bp, Homo sapiens
ctgcacgaattccgcacgagctgcttctgtgggatgtggtgacaggacagagtgtggaaagagcatctgtctccaggaacgtggtcactcacctgtgctgggtccccagagaaccatacatactacagacctctgaagataaaaccctcagattatgggacagtcgggggctgcaggtagctcatatgtttcctgcaaagcagcacattcagacctactgtgaagtcagtgtggatggacacaagtgtatctcctgcagcaatggctttggaggagaaggctgtgaagccacgttgtgggacctaagacagactcgaaacagaatatgtgagtataaggggcatttccagactgtcgcatcctgcgtctttctaccaagagcattggccttgatgcctttaattgctacctcatcacatgattgg

SEQ ID NO: 119878 - DNA, 453 bp, Homo sapiens
atgatgcataccagtgtagagagcataaaagaagagattagacagttccttttgctgacaattaactcctgtgtctccatattatgggacagtcgggggctgcaggtagctcatatgtttcctgcaaagcagcacattcagacctactgtgaagtcagtgtggatggacacaagtgtatctcctgcagcaatggctttggaggagaaggctgtgaagccacgaatccaggtactcctttggtgcagaatgactattttgcttattgggccaaagtagtttacaagtgtagttacaatttagcctctcgtgttgtacagaatgggtatgtctgcacagaaggctctttccgctacactgagctgcgacccacttatttccgagaatgcaataagggtatgaagacaggccagcgtacagtatacacccaattatcaacaaagaacatggaataa

SEQ ID NO: 119879 - DNA, 2755 bp, Homo sapiens
gaattccgaagctttgttctttagctctttgcaataaatcttgctgctgctcactctttgggtccacactgcctttacgagctgtaacactcaccgcgaaggtctgcagcttcactcctgaagccagtgagaccacgaacccaccaggaggaacaaacaactccagatgtgctgccttaagagctgtaacactcaccgcgaaggtctgcagcttcagtcctaagccagcaagaccacgaacccaccagaaggaagaaactctgaacacatccaaacatcagaaggaacaaactctggacatgccgcctttaagaactgtgacactcaccacgagggtccgtggcttcattcttgaagtcagtgagaccaagaacccaccaattccagacacattttggcaaccacaaagggactatcacctattgccaagcggtgagactatcgccaagtggtgagaccatcgtctatcgctgagcagcaaaacaatcgcctatcgccaagcaaatcgaagccatcaagctacagatggtcttacaaatggaaccccaaatgagttcaactaacaacttctaccgaggacccctggaccgacccgctggcacttccactggcctagagagttcccccttgagacactacaactgcagggccccttcttcacttctatccagcaggaagtagctagagcagtcatcggccaaattcccaacagcagttggggtgtcctgtttagaggggggattgagaggtggcagtgtgctggcagccctcgcagccctcgctcactcttggctcctcctcggccttggcgcccactctggccatgcttaaggagcccttcagcctgccactgcactgtgggaacactggccaaggccagagccagctcactcagcttgtggggaagtgtggagggagaggcgcaggcgggaactggggctcgatgcggcgcttgcgggccagcgtgagttccggtggttggtggcttggcgggccccagactcggagcggctggcctgccctgctggccccaggcagtgaggggcttagcacccaggccagcagctgtggatggtgcgctgagtctcccagcagtgctggcccaccccaccagcactgcactcgatttctcgccaggccttagctgcctccccgcaggcaggccttgggacctgcagcccaccatgcctgagtctcccctgctgccgccgtgggctcctgcgtggcccaagcctccccgacgagcactgccccctgctccccggtgcctggtcccatcgaccccaagggctgaggagtgcaggtgcatgctgcgggactggcaggcagctccacctgcggccccatgcaggaagccagctgggctcctgagtctggtggggacttggagaatttttatgtctagctaagggattgtaaatacaccaatcagcactctgtatctagctcaaggattgtaaatacaccaatcagcaccctgtgtctagctcagggtttgtcaatgcaccaatcggcactctgtatctagttaatctggtggggagttggagaatctttatgtctagctaagggattgtaaatacaccaatcagcactctgtatctagctcaaggtttgtaaacacaccaatcagaaccctgtgtctagctcagggtttgtgaatgcaccaatcagcactctgtatctagttaatctggtggggacttggagaatctttatgtctagctaagggattgtgaatgcaccaatcggcactctgtatctagctcaaggttgtaaatggaccaatcagcactctatgtctagctcagtgtttgtaaatacaccaatcgacactctatctagctaatctagtggggacgtggagaacttttgtgtctaactcagggattgtaaatgcaccaatcagaaccctgtcaaaatggaccaatagctctctgtaaaacagactgactttctgtaaaatggaccaatcagcaggatgtgggtggggccagataagagaagaaaagcaggctgcctgagccagcagtggcaacccgcttgggtccccttccacactgtggaagctttgttctttcgctctttgcaataaatcttgctgctgctcactctttgggtccacactgcctttatgagctgtaacactcaccgcgaaggtctgcagcttcatctgaagcagcgagacacgaacccaccaggaggaacaaacaactccgatgcgctgccttaagagctgtaacaccgcgaggtctcgagcttcactcctgagccagcaagaccacaaacccaccagaaggaagaaactcaggaaaacagccgaacatcagaaggaataaactctggacacaccacctttaagaactgtgacactcgctgcgagcgtctgtggcttcattcttgaagtcagtgagaccaagaacccaccaattctggacacaattgcactctagcctgggcaacaagagtgaaactcatctcgaaaaaaaaaagagtctggaagggccttctgagttgtaatattatgaacttaaattttgaggtcctgaagttttgttgcagtgtgaatgataagagtagtctttttttgatatcatctgtagaagacccaattttggggtttcagattaggaagggtttgatggtttttagtggactatgaaaaggttttttttggtgaaaatatattttggtataatgtactaaagtcttgtagtatttagtcataatagagtttaacagtggaagggaattc

SEQ ID NO: 119880 - DNA, 1554 bp, Homo sapiens; identical to SEQ ID NO: 119390

SEQ ID NO: 119881 - DNA, 522 bp, Homo sapiens
ttaactctgtcctctgcactggaatgcagcttgcaactcttctttgcctttgttgagcaggaagcatgatagctgaaggccaaggttgaagttcggatgctttatcttcttgataaagaagggcataattatgcacggataatattgaaataacatccaaagtacacttgcactgtagtcaccatggggcagggctcgggacctgcagcccactatgcctgagcctcccaccccctccgtgggctcccgtgcagcccgagcctccccgatgagcgccaccccctgctccacagcgcccagtcccatcgaccatccaagggcgcaaacgtctgcagcttcactcctgaagccagtgagaccacgagcccacgcgaaggtctgcagcttcactcctgagccagcgagaccacgaacccaccagaaggaagaaactccgaacacatctgaacaccagaagaaacaaactccggacacgccacctttaagaactgtaacactcactgcgaggctccacggcttcat

SEQ ID NO: 119882 - DNA, 541 bp, Homo sapiens
atgggacaagtgtgggctctggttcgttccaccttggaactttttcacactgatgatgaggaggaaggagagtatgacgaagtaacagaagaggttacagagcaggtttatttgccagctaaagctaaagtggcacaggaggaagaggttcatccctacccttctgcaccccctcattattattttgaagaaaaagagtggccagaccctccagatctttcttttctggaggacactgggcgaaaagtagttgccccagtgactgagcagcacctcgagcgactgctgtcagttctattcaggcaggagttcagcaggctagacgagaggggaccaaaagaactgtatgcagattttatagcttggaatctcttaagacaggagtctcttaaaaaggtgatttcagattcagctgctcaggatatagtgttgcagttattagcttttggcaatgttaatctcgattgccaggctgctttgcgacctattagagggaaagcacatttagttgattatatcaaggcctgtgacggtatcggag

SEQ ID NO: 119883 - DNA, 717 bp, Homo sapiens; identical to SEQ ID NO: 119392

SEQ ID NO: 119884 - DNA, 322 bp, Homo sapiens
aggatgaagaaccaattgagcatgactgccaacaaattatagtccagaattatgccacccgagatgatctcttagaagtccccttagctaatcctgaccttaacctacatagggatggaagttcatttgtggagaatgggatgcgaagggcaggttatgccatagttagtgatgtaaccgtacttgaaaagagctcccctctggaggacactacaactgcagggccccttcatcaccccatccagcaggaagtagctagagtggtcatcagccaaattcccaacagtagttggggtgtcctgtttagagggggtattgagag

SEQ ID NO: 119885 - DNA, 689 bp, Homo sapiens; identical to SEQ ID NO: 119393

SEQ ID NO: 119886 - DNA, 1148 bp, Homo sapiens; identical to SEQ ID NO: 119396

SEQ ID NO: 119887 - DNA, 355 bp, Homo sapiens
cgtcgacttttttttttttttttgcagccagatttattgcaaagagcggaagaaaaaagcttccacagtgtggaaggggacccgagcgggttgccctatttcaaacatttcttaatttcatttctgttttgttttctatgtatttaagtcttcagaggctaaagcagaaaaggttagagaatggaacttctctacttcttgaaaagtataactaaactttttactaatattaatgttgaactggctcaaaatattgctaactaataaaggagcagggctgatatctttgaaggctgtaagagaatatatttctatgtgactctgcaagagggatttggatctgttcaggtcgagc

SEQ ID NO: 119888 - DNA, 472 bp, Homo sapiens
cacagccctcatgcttgccatatgccatggatcatcagagatagttggcatggttcttcagcaaaatgttgacatctgtgctgaagatacgtgtggaatgattgcaacgttatgctgttgcttgtgggtttaatctcattgatcaacaacttttggaatataacaaaaggtatctaaaaattctcaaaatagcaatccaggtaagacctctgatagtaaactacacttggtggtgctaccatgagattataggagtgttgatcacaaaagaactattaaaaaagcaatgtgtaagtagcatgtgtttacatatatacctatatgtaagtgtttttatatatacatagctttgatttaattttttagtttataattcagaattaagaatttagttgggcaacccgctcgggtcccacttccacactgtggaagctttgttctttcgctctttgcaataaatcttgctagtaaa

SEQ ID NO: 119889 - DNA, 852 bp, Homo sapiens; identical to SEQ ID NO: 119397

SEQ ID NO: 119890 - DNA, 807 bp, Homo sapiens
atgaacaaagaactgggaatcagcagttacaagttttgtggaatggggaggaaaactagtgtttctgctgctaaatcagtgagcgcaactattccaatcagcagggtccagggactgttgcaggttcttgggcaagaggtatttctgctgctgtgtcaagaccaagaggaacaggccaaaagggaaaagcgagatcagagaaaggccacagccttagccatggccctcagacaaacaaaccttggtggttcagagaggatagaaaatggagcaggccaatcacctagtagggcttgttatcagtgtggtttacaaggacactttaaaaaagattatccaacaagaaaccagctgccccctgtccactatgctgaggcaatcactggaagatgcactgcccaagaggacaaaggtcctgtgacagccatcttgctattactcacctttaggccctgtatttttaacctccttgtcaaatttgtttcctgtaggatcgaggccatcaagctacagatggtcttacaaatggaaccccaaatgagctcaactaacaacttctaccaaggacccctggaccaacctgctggccctttgactggcctaaagagttcccctccggaggacactacaactgcagggcccctacttcgccccatccagcaggaagtagctagagtggtcatcacccaattcccaaaagcagttggggtgtcctttttagaggggggattgagaggtgaagccagctggacttcctgggtagagtggggacttggagaacttttctgtccagctaacggattgtaa

SEQ ID NO: 119891 - DNA, 726 bp, Homo sapiens
atgtttcggaaggatgaagaactgacttcctcacagagggatttagctgtaaggaactgggcatggagcctagcccgtggtgagcgctcagcaaacatgcacgcagtacacacctcgcttctagtggaaaggacaatactgaccacgaccaaggaaagagggtctaccttgcaatatcccttaagacctggagctcataaaggattgcaagatattgttaaacgtttcaaagctcaagccttaataaggaaatgcagcagtccctgcaacaccccaattctaggagtacaaaaaccgaatggtcagtggagactagtgcaagatcttagacttatcaatgaggcagtaattcctctatatccagttgtacccaacccctataacctgctctctcaaataccagaggaagcagaatggttcactgttctggacctcaaggatgccttcttctgtattcccctgcactctgactcccagtttctctttgcctttgaggatcccacagaccacacgtcccaacttacgtggacggtcttgcccccagggtttagggatagccctcccctgtttggtcaggcactggcccaagatctaggccacttctcaagtccaggcactctggtccttcagtatgtggatgatttacttttggccaccagttcagaagcctcttgccagcaggctactctagatctcttgaactttctagctaatcaagggtactag

SEQ ID NO: 119892 - DNA, 882 bp, Homo sapiens
tcagccggcttcatttctgaatgatttcagatggccaacgctcagctcagcaactgtgggctgcatgctaaccctggggggctggtagcaggcccacagctttgttctctgtccacttgaggttaagcacctgctatgcaggacgggctgaagtgctctggtctgctgacaacactctttcttagctgcctcttctaacaatccctggctgcctaaaccctttctgttcacagcaaggccagatgccccagatatcgccctggggtttcttgccttggtgtacccgaagaattggatctcacgtgggcttggagaatgaatgcaaggttttattgagtggaagtagctctcagcagatgggggagccagaagggagacagagtaggaagatggttttcctgttggagtcaggtcactcagcagccgggctctcctctgaccaccccgtccaaaccccacgttgttccacctgtcgatggcctgctggtgcctgtcgatgtgctctcgacgtccagctgcttgtgtgttcctccgccagtgtgctcctcttgacgtccagctgcttgtgtctctgcctggtagggtctcagggggttttataggcacaggatggggacgtggccggccagggtggttgtggaagctttgttctttcgctctttgcaataaatcttgctgctgctcggtctttgggtccacattgccttcatgagctgtaacactcactgcgaaggtccgcagcttcactccgtgagggttcgcggcttcattcttaaagtcagtcagaccaagaacccaccaattccggacacagtatgagtaggtatagtgtgtcccaccgctcccaggggccccttttacatgcacaagtgcacaggccat

SEQ ID NO: 119893 - DNA, 846 bp, Homo sapiens
atgggacaagtgtgggctgtggttcgttctaccttggaactttttcacactgatgatgaggaggaaggagagtataacaaagtaacagtagaggttacagaccaggtttatttgccacctaaatctaaagcagaaaaggaaggagaggttcatccctacccttctgcaccccctcattattattttgaagaaaacgaccctccagatctttcttttctggaggacactggagggaaagcacatttagttgattatatcaaggcctgtgatagtatcagaggtaatctacataaagctactttgttggcacaggcgatggcaggactgagagtggataaaggaaatactccatttcctggagcttgttttaactgtgggaagcatggtcatactaaaaagaatgtagaaaaaaaatcagcgactgagcaatactgtgaacggtttgcatttacaattcctgcagtaagcaacctgcagcctgcgaagtgttttcattgtttcacagatgggtatagtaatggtaaagcttcttattctggatcaaaaggtaaagttttccagacaccctatacttcagctcaaaaagtggagcttgtagctgtaattgaggtattgactgcttttgatatgcctattaatgtgatttctgattcttcatacatggttcactccacacagttaattgaaaatgctcagttacaatttcatacagatgaacaactgataataaaaacaaaaaagggggagaaacagggattaagggatagcccatatacaattgaatctagcattattaactttcaattttttaagcctgcccaaaggccagatgttatcagcagctga

SEQ ID NO: 119894 - DNA, 1779 bp, Homo sapiens; identical to SEQ ID NO: 119401

SEQ ID NO: 119895 - DNA, 1185 bp, Homo sapiens
atgggaaaagtgtgggctgtggttcgttccaccttggaactttttcacactgatgatgaggaggaaggagagtataacgaagtaacagaagagattacagagcaggtttatttgccagctaaagctaaagcggtaaaggagagagaacaacggggaaatattacagctacatttgagccttttccttttaaattgctcaaagaatttaaacaagctataaatcagtatggaccaggttctcattttgtaatgggactgttaaagaatgttgctgtttccagtcagatgattcctactgactgggatgctcttactcaggcttgtctaactcctgctcagttcttacaatttaaaacttggtgggcccatgaagcttccattcaggctgcttgcaacgcccaggcccagcctcaaattaatataactacaggccaacttttgggggttggcggctgggctggtttagatgcacaagtggtcatgcaggatgatgccatagaacagcttagaggagtgtgcattagagcttgggaaaaaatccctttatgtggagaacaatacgcttcctttagtgctataaaacagggaccaaaagaaccatatgtggattttatagcttggttacaggagtctcttaaaaaggctgggcgacagagtgagatttcatctcaaaacaaaaaggtgattgcagatttggctgctcaggatatagtgctgcagttattagcttttgacaatgctaatcctgactgccaggctgctctgcgacctatcagaggcaaagcacatttagttgattttatcaaggcctgtgatgttatcggagcatattggacagctaacaggcgagaagcttttcaaagccccttcccctccatactggggctggcagggggccaggagggaggccccagagcagaagcacttgtgcagccacccccagggcgctgttcctgctgggttacaatctccccactgaaccagaagaaagctctactgaggatcacacatggcacagatgtggtcacacatggctccaaagtccgaacggaagtcttggcactggacccaggcaagaagctccagaatatgctgctgtccagtcggaaagggcttgctgcctccctaaacaccttccagctacattcactctcagaaaaactcaggggtgagattcatggatga

SEQ ID NO: 119896 - DNA, 357 bp, Homo sapiens
atggacggcaagctttgggtaactctcacagtggaagaacagatggacaagaacattcctggcatccctgagtgtaatagcaaacatactggagcctttactgaatattctacatgtagcagtgtggctgatgctcccaaactaatcttgagtgaaaaagcaagtcataatgtgtctggaattggtgggttcttggtctcactgacttcaagaatgaggccacggaccctcgcgtgtgttcgtggccttgctggctcaggagtgaagctgcagacctttgcggtgagtgttacagctcataaaggcagtgtggacccaaagagtgagcagcaacaagatttattgcaaagagcttaa

SEQ ID NO: 119897 - DNA, 3103 bp, Homo sapiens
atgacagctgaagaaagggacaaattccctaccagtcagcaagctgtccccagtatggatgcccactgggacctcgactcagatcatggggactggagtcgtaaacatctgttgacctgtgttctagaaggactaaggagaattaggaaaaagcccatgaattattcaatgatgtccaccataactcagggaaaggaagaaaatccttctgccttccttgagcagctacaggaggccttaagaaaatatactcctctgtcacccaactcactagtgggtcaattgatcctaaaagataagtttattacccaatcaaccacagatatcagaagaaagctccaaaatagggaccaagaggaacaggcccaaaaggaaaagcgagatcagagaaaggccatagccttagtcatggccctcagacaaaccttggtggttcaaagaggacagaaaatggagcaggccaatcacctggtggggcttgttaccagtgtggtttgcaaggacaccttaaaaaagattgtccaacgagaaacaagccgccccatcgtccatgtccactatacggaggcaatcactggaagtcacactacccagagggcaaagcttctctgggccagaagcccccaaccagatgatccaatgacaggactgaggatgactgcggcaagcacccgttcatgtcatcaccccctcactgagccctgggtatgtttaatcattgagggccaggaaattgacttcctcctggacactggcacgaccttctcagtgttaatcccctgtcttggacgactgtcctcaaggtccgttaccatccaaggaatcctgggacagcctgtaaccaggtatttctcccacctcctcagttgtaattgggagactttgctcttttcacatgcctttcttgttatgcctgaaagtcccacacccttattagggagggatatattagccaaagctggagctattatctccatgaagacagggaacaagttacccatttgttgtcccctacttgagggaatcaaccctgaagtctgggcattggaaggacaatttggaagggcaaaaaatgcccatccactccaaatcaggctaaaagaccccatcagttttccttatcaaaggcaatatcccttaaggcctgaagctcataaaggattacaggatattgttaaacatttaaaagctcaagactcagtaagaaaatgcagcagtccctgcaacaccccaattctaggagtacaaaaactgaacagtcagtggagactagtgcaagatcttagactcatcaatgaggcagtaattcctctatatccagttgtacgcaacccctatacccttctctctcaagtaccagaggaagcagaatggttcactgttctggacctcaaggatgccttcttctgtattcccctgcactctgactcccagtttctttttgcctttgaggatcccacagaccacacatcccaacttatgtggatggtcttgccccaaaggtttagagatagccctcatctgtttggtcaggcacaggcccaagatctaggccacttctcaagtccaggcactctggtccttcaatacagcgagatagccaagaccctctatactctaatcaaggagatggagagggcaaatactcacctagtagaatgggaaccagaggcagaaacagccttcgaaaccttaaagcaggccctagtacaagctccagctttaagccttcccacaggacaaaacttcgctttatatgtcatagagagagcagggatagctcttggagtccttactcagactcacaggacaaccccacaaccagtggcatacctaagtaaggaaattgatgtagtagcaaaaggctggcctcactgtttaaggacagttgtggcagtggctgtcttagtgtcagaggctatcaaaataatacaaggaaaggatttcactgtctggactactcatgatgtgaatggcatactaggtgccaaaggcggtttatggccatcagacaactgcctacttagataccaggcactactccttgaggaaccagtgcttcaaatacatatgtgcatagccatcaaccctgccacttttctcccagaagatggggaaccaatcaagcatgactgccagcaaattatagtccagacttatgccacccaagatgatctcttagaagtccccttagctaatcctgactttaacctatataacagtggaagttcatttgtagagaatgggatacaaagggcaggttatgccatagttagtgatgtaactgtacttggaagtaagcctctttccccagggactagcacccagttagcagaactagtggcacttacccgagccttagaactgggaaaaggaaaaagaataaatgtgtatacagatagcaagtatgcttatctaatcctacatgcccatgctgcaatatggaaagaaagggagttcctaacctctgggggcacccccattaaataccacaaggaaattatggagttattgcacacagtgcaaaaacccaaagaggtggcagtcttacactgccgaaaccatcaaaaaggatcgaggccatcaagctacagatggtcttacaaatggaaccccaaatgagctcaactcacaacttctaccaaggacccctggaccaacccgctgaccctttgatgggcctagagagttcccctctggaggacactacaactgcagggccacttctttgcccctatccagcaggaagtaactagagcggtcatcggccaaattcccaacagcagttggggtgtcgtgtttagagggggaattgagaggagcttgctacaagtgctggaaatctggccactgggccaaggaatgcccacagcccagaattcctcctcatccacgtcccatctgtgtgggaccccactgaaaatcagacttttcaactcaccaggcagccactcccagagcccctggaactctggcccaaggctctctgactccttcccagatcttcttggcttagcggctgaagacggacgctgcccagtctcctcagaagcccccgagactatcacgaatgccgatcttctggtaacactcacaatggagg

SEQ ID NO: 119898 - DNA, 1025 bp, Homo sapiens
ttttttttttttgggtttccatgtattttattccattccactcataccaagagacaattctttttgaggtgtgtttagctctctagacttaattactgctgtgtttgtcacattggctgaattgagatcggtgacataaggattcctgggagcctgcgctgggcgcgaatttaagatggctcctccatgatcttcactctctgggtgaaaactgtcggtcagcccatgcccaggattgttgatcagtgctgaaggtcctgaggctgtttttagcatagtctaaaacgcgagggtccgtggcttcattcttgaagtcagtgagaccacgaacccaccaggaggaacaaataactccggacgcaccacctttaagagctgcaacgttcattgcaatggtctgcggcttcactcctgaagtcaagcgagaccacaagcccactggaaggaacaaattccagacacattttggcgacgaccaagggacaattgccaagcatcctctttgtggtctaggaggacaggcaaaggtgcaggttttcgaggatgagtcggtaatggccactaaatccgaccttcctcggtcctccttgtggtctaggaggaaaactagtctttcagctgctgcatcagtgagtgcaactattctgatcagcagggtccagggactattgcaggttcttgggcggcagtgggggaaacaaacaaaccaaaactgtcccatgagagccatcgtgctattactcgcctttgggccttctatttttaatctttttgtcaaatttgtttcctccaggatcgaggccatcaagctacagatggtcttacaaatggaaccccacatgtgctcaactaacaacttctaccaaggacccctggatcgacctgctggccctttcactggcctaaagagttcccctctggaggacactacaactgcagggccccttctttgcccctatccagcaggaattagccagagtggtcatcgcccaattcccaacggcagttgggggtgtcctgtttag

SEQ ID NO: 119899 - DNA, 3620 bp, Homo sapiens
gaggacctatcagcttacccccatatcctagcctccctatagctccccgtcctattaacgataatcctcctctaatctcccctgcccagaaggaaatatgcgaagaaatctccaaaggacaacaaaaacccctgggctatcggttatgtccccttcaagctgtagggggaggggaatttggcccaacctgggtacatgtccccttctccctctctgatttaaagcagatcaaggcagacctggggaatttttcagatgatcctgataggtacataaatgtcctacagggtctaggacaaatcttctatctcatttggagagatgtcatgctattgttagatcaaaccctggcctttaatgaaaagaatgcagctttagctgcagcccaagagtttggagatacttggtatcttagtcaagtaaatgacagaatgacagctgaagaaaggggcaaaatccctaacggtcagcaagctgtccccagtatggatccccactgggaccttgactcagatcatggggactgcagttgcaaacatctgttgacctgtgttctagaaggactaaggagaattaggaaaaagtacatgaattattcaatgatgtccaccataactcagggaaaggaagaaaatccttctgcctccctcgagcggctatgggaggccttaagaaaatatactcccctgtcaaccaaatcacttgagggtcaattgattctaaaagataagtttattacccaatcagccacagatatcaggagaaagttccaaaagcaagccctgggccctaaacaaaatttggagacattattaaacctggcaacctcagtattctataacagggaccaagaggaacaggcccaaaaggaaaagcaagatcagagaaagaccgcagccttagtcatggccctcagacaaacaaaccttggtggttcagagaggacagaaaatggagcaggccaatcacccgagagggatacattagccaaagctggagctattatctacatgaatatggggaacaagttacccatttgttgtcccctacctgaagagggaataaaccctgaagtctgggcattggaaggacaatttggaaaagcaaaaaatgcccacccagtccaaatcaggctaaaagaccccaccacttttccttatcaaaggcaatatcccttaaggcctgaagctcataaaggattaaaggatattgttaaatatttaaaagctcaagccttagtaaagaaatgcagcagtccctgcaacagcccaattctaggagtacaaaaaccaaacagtcagtggagactagtccaagatcttagactcatcaatgaggcagtaattcctctatatccagttgtacccaacccctatatcctgctctctcaaataccagaggaagcagaatggttcactgttctggacctcaaggatgccttcttctgtattcccccgcactctgactcccagtttctttttgcctttgaggatcccacagaccacatgtcccaacttatgtggacagtcttgccccaagggtttaaggatagccctcatctgtttggtcaggcactggcccaagatctaggttacttctcaagtccaggcactctggtccttcagtacgtggatgatttacttttggctaccagttcagaagcctcgtgccagcaagctactctagatctcttgaactttctagctaatcaagggtgcaagagagtgggaatagctcttggagtccttactcagactcatgggacaaccccacaaccagtggcatacctaagtaaggaaactgatgtagcagcaaaaggtcccctgacagccatcttgctattactcgcctttgggccctgtatttttaacctccttgtcaaacttgtttcctccaggattgatgccatcaagttacaaatggtcttacaaatggaaccccaaatgagctcaactaacaacttctaccgaggacccctggaccgacccgctggccctttcactggcctaaagagttcccctctggaggacactacaagtgcagggccccttcttcgcccctatccagcatctcttctcggcaaagtgaaagaagcggtgaaggtggccattgatgcagaatatcgccacattgactgtgcctatttctatgagaatcaacatgaggtgggagaagccatccaagagaagatccaagagaaggctgtgatgcgggaggacctgttcatcgtcagcaaggtgcacatggcgcatttggtgtggcccactttctttgagagaccccttgtgaggaaagcctttgagaagaccctcaaggacctgaagctgagctatctggacgtctatcttattcactggccacagggattcaagagcttgaaaaagtggtatgcagatgtggtatttagcaagcatcaggatcctgaaaccttgttgaacagaaccaagtgtcctgatgcagattccagtaaacttttcattctgtatttacagactggggatgactttttccccaaagatgataaaggtaatatgatcagtggaaaaggaacgttcttggatgcctgggaggccatggaggagctggtggacgaggggctggtgaaagcccttggggtctcaaatttcaaccacttccagatcgagaggctcttgaacaaacctggactgaaatataaaccagtgactaaccagaactccctaggaacaatgcaaaacagagccggctttccccgtgatgaggattgtttgctgttgcaggttgagtgtcacccatacctcacgcaggagaaactgatccagtactgccactccaagggcatcaccgttacggcctacagccccctgggctctccggatagaccttgggccaaacctgaggacccttccctgctggaggatcccaagattaaggagattgctgcaaagcacaaaaaaaccacagcccaggttctgatccgtttccatatccagaggaatgtgacagtgatccccaagtctatgacaccagcacacattgttgagaacattcaggtctttgactttaaattgagtgatgaggagatggcaaccatactcagcttcaacagaaactggagggcctttgacttcaaggaggagagacatcctagcaaaagtaggggccattatacactagaattaggagaagaaaaaagggtgaacatatatacagactctgagtatgcttacctagtcctccatgcccacgcagtaatatggagagaaagggaattcctaacttccaagggaacacctatcaaacatcaggaagccattaggagattattattggctgtacagaaacctaaagaggtggcagtctttcactgctggggtcatcagaaaggaaaggaaagggaaatagaagggaactgccaagtggatattgaagccaaaagagctgcaagaatcaaagctgtaaaactacaaatggttcttcaaatggagcaccagatgcagtgcatgactaagatctaccgtggacccctggactggccagctagcccatgctccgatgttaatgacattgaaggcacccctcccgaggaaatctcaactgcacaacccctgctacaccccaattcagcaggaagcagttag

SEQ ID NO: 119900 - DNA, 1996 bp, Homo sapiens
  misc_feature (1)...(1996): n = a,t,c or g
atgggacaagtgtgggctctggttcgttccaccttggaactttttcacactgatgatgaggaggaaggagagtatgacgaagtaacagaagaggttacagagcaggtttatttgccagctaaagctaaagtggcacaggaggaagaggttcatccctacccttctgcaccccctcattattattttgaagaaaaagagtggccagaccctccagatctttcttttctggaggacactgggcgaaaagtagttgccccagtgactgagcagcacctcgagcgactgctgtcagttctattcaggcaggagttcagcaggctagacgagagggatgatgccgtagagcagcttagaggagtgtgcattagagcttgggaaaaaatcacttcaggtggagaacaatacccttcctttagtgctgtaaaacagggaccaaaagaactgtatgcagattttatagcttggaatctcttaagacaggagtctcttaaaaagatgattgcagattcggctgctcaggttatagtgttgcagttattagcttttgacaatgctaatgccgattgccaggctgctctgcaacctgtcagagggaaagcacatttagttgattacatcaaggcctgtgatggtatcagaggtaatctgcataaagctactttgttggcacaggaaatggcaggactgagagtggataaaggaaatactccatttcctggagcttgttttaactatgggaagcatggtcatactaaaaaagaatgtagaaaaaaatcagtgagtcaggcagccagatggggaaaaaggaaaactgctgatcctgaaatatgtccaaaatgtaaaaaagggaaatattgggctaatcagtgtcactctaagtttgacaaagatgggaccctgatttcgggaaatgccatgagggctgagcaagactgtgaatggtttacatttacaattcctgcagtaaacaacctgcagcctgctaagcattttcatcgtttcacagatgtgtctagtaatggtaaagcttcttattctggatcaaaaggaggacaggcaagggtccagctttttgagaatgcatcagtaagggccactaactctgaccttcctcagtcctccttgtggtgtaggaggaaaactagtgtttctgttgctgtgttggtgagtgcaactattccgatcagcagggtccagggaccatcacaggttcttgggcagggggagaaacaaacaaaccaaaacgttgtacccaacccctataccctgctctctcaaataccagaggaagcaaaatggttcactgctctggacctcaaggatgccttcttctgtattcccctgcactctgactcccagtttctctttgcctttgaggatctcacagaccacacatcccaacttacgtggaccatcttgccccaagggtttagggatagccctcatctctttggtcaggcactggctcaagatctaggccacttctcaagtccaggcactctggtccttcagtatgtggatgatttacttttggctaccagttcagaagcctcatgccagcaggctactctagatttcttgagctttctagcaaatcangggatcgaggctatcaagctacagatgatcttacaaatggaaccccaaatgagctcaactaacaactaccaaggacccctggaccaacccgctggccctttcaatggcctaaagagttcccctctggaggacactacaactgcagggccccttcttcacccctatccagcaggaagtagctagagcggtcatcagccaaattcccaacagcagttggggtgtccctagccagcagcggcaacccgctcgggtccccttccacactgtggaagctttgttctttcactctttgcaataaatcttgctgctgcccactctttgggtctgcactgcctttatgagctgtaacactcacgacgaaggtctgcagcttcactctgtgaaggtctgcagcttc

SEQ ID NO: 119901 - DNA, 423 bp, Homo sapiens
atgtcttggatgggctcctttctcacaagtcttcctcacctgtcaatatcatgggggaacaggtttgaaatctccaatgatcaaacaagaaatcatttacctgaacagccatcaatcacagtaaagtatgtccagtgcccaccttataaaacaggggacactgaagtcaccctggatgatgagagagctcttgggcaaagaggaagggcagtctactttgttcggcataaagaatcccggcagaggtttgccatgaagaagattaataaacagaacctcatccttcgaaaccagatccagcaggcctttgtggagcgggatatcctgacttttgcagaaaacccctttgttgtcagcatgtattgctcctttgaaacaaggcgccacttgtgcatggtcatggaatatgtggaaggtatctga

SEQ ID NO: 119902 - DNA, 1635 bp, Homo sapiens
atgcagatctttgtgaagaccctcacgggcaagaccatcacccttgaggtcgagcccagtgacaccattgagaatgtcagtgcgaaaattcaagacaaggagggtatcccccctgacaagcagcgtctgatatttgccagcaaacagctggaggatggccgcactctctcagactacaacgtccagaaacagcccaccccgcacctgggtttttatggttttaggtctaatacaagggacgtgaaggacctcttcaaggagaactacaaaccactgctcaatgaaataaaagaggatacaaacaaatggaagaacattccatgcttatggataggaagaatcaatatcgtgaaaatggccatactgcccaaggtaatttatagattcaatgtcatccccatcaagctgccaatgactttcttcacagaattggaaaaaactactttaaagttcatatggaaccaaaaaggagcccgcattgccaagtcaatcctaagccaaaagaacaaagctggaggcatcatgcaacctgacttcaaactatactacaaggctacagtaaccaaaacagcatggtttggagtctactttgttggaggaccaaggtgtggcagctccagctgggtgctagtggattcaggggtgcctgcctccctgcaggcattcaccatgctagtgaaggcaaggcatttttgtggggaacaggaggctcctgctatagactgtctgtgcttttgcactggtgatggtgttggtttggtgagaggcactgaccagtgcagatctgagtgccttcttggtcacctgcaagcaggagggattgctcaggtggggcaactaaagcaaattccacctgtgcagacatgtgcctgcaaagtgatgtggggagttgccatgggctcaggggaagttgcagtatgggtagcgaacacccggctggtgtgcgcagtaagggctgtcttgctggagttctccactggtcaggcatggcccactggtgcagaagctattctgtgggccaccacagcacccaagatggccctagaagaggccagcagaccaaggagtgctcaggttgcaccagccctgactgatggacaagaccactctgcagatatcaagtctgaaaattcccctagggccaaagtctattatgggagcaagttgagcctagagggatcgccatccctgtccatgcactgctgtagacactcctgcactaaaccctctgggctccacatcagctggcttgctgctctaccactttgcttgtctcttgggggctccaccccagagagatgtgggtcagcaatcattcagttcaatcagcccaggatggagagtctgtgctatgggcccaagccaggggctctctgtctggtgacgagcagctgggggattttccagtacctggaggtgtcaccagtgaaagctgcgaaacagcaaagatggtggccttcctttctctctgggagctccatccctgggaaatacaggcctgttgctggcccgaacacactggcaatttatagcactgatctgtcatcaataccacttgctgtcttggatgtgaagatgatttttcctgcagggattccctctacaaaattaaaaacactgggcatgtggaaataa

SEQ ID NO: 119903 - DNA, 608 bp, Homo sapiens
aaatacctcaccaagaaaacccaggcagccagcgtggaggctgttaagatgctggatgagatcctcctgcagctgagcgcctcagtgcccgtggacgtgatgccaggcgagtttgatcccaccaattacacgctcccccagcagcccctccacccctgcatgttcccgctgccactgcctactccacgctccagctggtcaccaacccctaccaggccaccattgatggagtcagatttttggggacatcaggacagaacgtgagtgacattttccgatacagcagcatggaggatcacttggagatcctggagtgactgcgggtccgtcacatcagccccacagcccctgacactctaggttgttaccccttctacttttgtggcaacacccccagctttggctccaaaatcatccgaggtcctgaggaccagacagtgctgttggtgactgtccctgacttcagtgccacgcagaccgcctgccttgtgaacctgcgcagcctgcctgccagcccatcagcttctcgggcttcggggcagaggacgatgacctgggaggcctgggctgggcccctgactcaaaaaagtggttttgaccagagaaaa

SEQ ID NO: 119904 - DNA, 1587 bp, Homo sapiens
cgggatgcggcgcgccgcgcgttgaacctccttggcctgggcgaagctgtgtggaccaagcaagtcaggagtgtggccatgttttctgagcaggctgcccagagggcccacactctactgtccccaccatcagccaacaatgccacctttgcccgggtgccagtggcaacctacaccaactcctcacaacccttccggctaggagagcgcagctttagccggcagtatgcccacatttatgccacccgcctcatccaaatgagacccttcctggagaaccgggcccagcagcactggggcagtggagtgggagtgaagaagctgtgtgaactgcagcctgaggagaagtgctgtgtggtgggcactctgttcaaggccatgccgctgcagccctccatcctgcgggaggtcagcgaggagcacaacctgctcccccagcctcctcggagtaaatacatacacccagatgacgagctggtcttggaagatgaactgcagcgtatcaaactaaaaggcaccattgacgtgtcaaagctggttacggggactgtcctggctgtgtttggctccgtgagagacgacgggaagtttctggtggaggactattgctttgctgaccttgctccccagaagcccgcacccccacttgacacagataggtttgtgctactggtgtccggcctgggcctgggtggcggtggaggcgagagcctgctgggcacccagctgctggtggatgtggtgacggggcagcttggggacgaaggggagcagtgcagcgccgcccacgtctcccgggttatcctcgctggcaacctcctcagccacagcacccagagcagggattctatcaataaggccaaatacctcaccaagaaaacccaggcagccagcgtggaggctgttaagatgctggatgagatcctcctgcagctgagcgcctcagtgcccgtggacgtgatgccaggcgaggtttgatcccaccaattacacgctcccccagcagcccctccaccccttgcatgttcccgctggccactgcctactccacgctccagctggtcaccaacccctaccaggccaccattgatggagtcagatttttggggacatcaggacagaacgtgagtgacattttccgatacagcagcatggaggatcacttggagatcctggagtggaccctgcgggtccgtcacatcagccccacagcccctgacactctaggttgttaccccttctacaaaactgacccgttcatcttcccagagtgcccgcatgtctacttttgtggcaacacccccagctttggctccaaaatcatccgaggtcctgaggaccagacagtgctgttggtgactgtccctgacttcagtgccacgcagaccgcctgccttgtgaacctgcgcagcctggcctgccagcccatcagcttctcgggcttcggggcagaggacgatgacctgggaggcctggggctgggcccctgactcaaaaaagtggttttgaccagagaggcccagatggaggctgttcattccctgcagtgtcggcattgtaaataaagcctgagcacttgctgatgcg

SEQ ID NO: 119905 - DNA, 491 bp, Homo sapiens
  misc_feature (1)...(491): n = a,t,c or g
ccggctggaaccatggagggtgtagaagagaagaagaaggaggttcctgctgtgccagaaacccttaagaaaaagcgaaggaatttcgcagagctgaagatcaagcgcctgagaaagaagtttgcccaaaagatgcttcgaaaggcaaggaggaagcttatctatgaaaaagcaaagcactatcacaaggaatataggcagatgtacagaactgaaattcgaatggcgaggatggcaagaaaagctggcaacttctatgtacctgcagaacccaaattggcgtttgtcatcagantcagaggtatcaatggagtgagcccaaaggttcgaaaggtgttgcagcttcttcgccttcgtcaaatcttcaatggaacctttgtgaagctcaacaaggcttcgattaacatgctgagggattgtagagccatatattgcatgggggtaccccaatctaactaatctacaagcgtggntatngcaaaatcaattag

SEQ ID NO: 119906 - DNA, 442 bp, Homo sapiens; identical to SEQ ID NO: 118708
  misc_feature (1)...(442): n = a,t,c or g

SEQ ID NO: 119907 - DNA, 891 bp, Homo sapiens
  misc_feature (1)...(891): n = a,t,c or g
gaattccgccagaaacccttaagaaaaagcgaaggaatttcgcagagctgaagagaagaagaaggaggttcctgctgtgccagaaacccttaagaaaaaagtgaaggaattttgcagagctgaagatcaagcgcctgagaaagaagtttgcccaaaagatgcttcaaagggcaaggaggaagtttatccatgaaaaagcgaagcacttatcacaaggaatataggcagatgtacagaacctgaaattctaatggctgaggatggcaagaaaagctggcaacttctatgtacctgcagaacccaaattggcgtttgtcatcagaatcagaggtatcaatggagtgagcccaaaggttcgaaaaggtgttgcagcttcttcgccttcgtcaaatcttcaatgggaaccttttgtgaagctcaacaaaggcttccgattaacatgctgagggattgtaggagccatatattggcatggggggtaccccaaatcttgaagtcagtaaatgaactaatctacaagccgtggttatggcaaaatcaataagaagcgaattgcttttgacagataaccgctttgattgctcgatctcttggtaaaatacggcatcnttcttgcatgggaggatttgattcatgagatctatactgtttggaaaaccgcttcaaagaggcaaataacttccctgtgggcccttcaaatttgtcttctccaccaaggtggaaatgaaagaaaaagaccacccatttttgtaagaaggtggaagatgctggcaacagggaggggaggaccagatccaacaggccttatttggaaggaatggacttaaggtgtctaccatgattatttttctaagctggttcggtaaataaccagtacctggtctcaaattg

SEQ ID NO: 119908 - DNA, 459 bp, Homo sapiens
  misc_feature (1)...(459): n = a,t,c or g
gaagctgatccttaagcggcgcatacaggctaggttaagtactgaatcattcctacatgattcctggcaggagaaacgtgacaaggtgcatctcaagacaactagaagtgcaacctcacgccttggaattgccggataaatgttccttggcctttgttgtacgcatcaaaaggattgatggcgggagtttactggtgcagagaaccattgcaagactttgcctgaagaaaatttttagtggtgtctttttaaaaatgctgcgtatagtggaaccttatgtgacctgaggatttccaaatctgaagtctgtctgggaattcattttgaaacatggacaagccaaggtcaagaataagaccatnnnnnnnnnnnnnnnnnnnnnnnnnnnnnnnnnnnnnnnnnnnnnnnnnnnnnnnnnnnnnnnnnnnnnnnnnnnnnnnnnnnnnnnnnnnnnnnnnn

SEQ ID NO: 119909 - DNA, 453 bp, Homo sapiens
atggcagagcaaaagcaaagaaaaatccctttggttccagaaaatctcctgaaaaagaggaaggcttatcaagtcctcaaagccactcagacaaagcaggcacttttggcaaagaaggagcagcggaaaggaaaagggctcagcaaaaggattgttggcgtgagtctactggtgcagacagccattgcaagacttcatcttaagaaaatttttagtggtgtctttgtaaaagtcaccccccagaacctaaaaatgctgcgtatagtggaaccttatgtgatctggggatttccaaatctgaagtctgtccgggaattcattctgaaacatggacaagccaaggtcaataagaacaccatccctctgacagacaacacagtgattgaggagcacctggggaagtttggtgtcatttgcttggaagacctcattcatgaaattgcctcccagtga

SEQ ID NO: 119910 - DNA, 552 bp, Homo sapiens; identical to SEQ ID NO: 115513

SEQ ID NO: 119911 - DNA, 698 bp, Homo sapiens
  misc_feature (1)...(698): n = a,t,c or g
aagagcaaagaaaaatccctttggttccagaaaatctcctgaaaaagaggaaggcttatcaagccctcaaagccacccaggcaaagcaggcacttttggcaaagaaggagcagaagaaaggaaaagggctcaggtttaagcgactggaatcattcctacatgattcctggcggcagaaacgtgacaaggtgcgtctcagacgactagaagtgaaacctcatgccttggaattgccagataaacattccttggcctttgttgtacgcatcgaaaggattgacggcgtgagtttactggtgcagagaaccattgcaagacttcgcctaaagaaaatttttagtggtgtctttgtaaaagtcaccccccagaatctaaaaatgctgcgtatagtggaaccttatgtgacctggggatttccaaatctgaagtctgtccgagaactcattttgaaacgtggacaagnccaaggtcaagaataagaccatccctctgacagacaatacagtgattgaggagcacctgggtgagtgctacagcttaggggtcagctggggcagaaagccagggtctttgaagctttgatgtgagattcacggttgtattcttcttggggccccaagagtctgccagagtggccagcttagtatatgctggatacatgttaaataaaggaatctgagcttttgtgtttcttaaaa

SEQ ID NO: 119912 - DNA, 2833 bp, Homo sapiens
atgtttggccgctcgcggagctgggtgggcgggggccatggcaagacttcccgcaacatccactccttggaccacctcaagtatctgtaccacgttttgaccaaaaacaccacagtcacagaacagaaccggaacctgctagtggagaccatccgttccatcactgagatcctgatctggggagatcaaaatgacagctctgtatttgacttcttcctggagaagaatatgtttgttttcttcttgaacatcttgcggcaaaagtcgggccgttacgtgtgcgttcagctgctgcagaccttgaacatcctctttgagaacatcagtcacgagacctcactttattatttgctctcaaataactacgtaaattctatcatcgttcataaatttgacttttctgatgaggagattatggcctattatatatcgttcctgaaaacactttcgttaaaactcaacaaccacactgtccatttcttttataatgagcacaccaatgactttgccctgtacacagaagccatcaagtttttcaaccaccctgaaagcatggttagaattgctgtaagaaccataactttgaatgtctataaagtggataaccaggccatgctgcactacatccgagataaaactgctgttccttacttctccaatttggtctggttcattgggagccatgtgatcgaactcgatgactgcgtgcagactgatgaggagcatcggaatcggggtaaactgagtgatctggtggcagagcacctagaccacctgcactatctcaatgacatcctgatcatcaactgtgagttcctcaacgatgtgctcactgaccacctgctcaacaggctcttcctgcccctctacgtgtactcactggagaaccaggacaaggtcttcttaattatacatcatgcaccgctggtgaactcgttagctgaagtcattctgaatggtgatctgtctgagatgtacgctaagactgaacaggatattcagagaagttctgtcttacccactctaagctccttatggcagggatctcacctgtcactgaatcagctgcagtctgggctgcacaaatgctcatctcacttatgcggagcccaggctgcagctgattcagtgacaggtgagatccctgccataaggagcttagagtggctaatcagtgctggttccaaggcgcgcacattcttcttcctgaaaatgctaataggcttctgggagaaggttgattgtgaatatcaaaggcgtcaagtgctgagcacgcggctgcaagaggccttgccgtcaaatcgcctcactgatgttgcagctgtgcattcttcatgcatgttgggctttggttccacagctccacgcggctcctggattggcgatccagcggctgtgcatctgcccctacctggggagctggccgagcaccttgggtccaagggtaccaccactgtcaccaagcaccagccccaggccaagcccagcattcggtgcttcattaaacccaccgagacactcgagcggtcccttgagatgaacaagcacaagggcaagaggcgggtgcaaaagagacccaactacaaaaacgttggggaagaagaagatgaggagaaagggcccaccgaggatgcccaagaagacgccgagaaggctaaaggtacagagggtggttcaaaaggcatcaagacgagtggggagagtgaagagatcgagatggtgatcatggagcgtagcaagctctcagagctggccgccagcacctccgtgcaggagcagaacaccacggacgaggagaaaagcgccgccgccacctgctctgagagcacgcaatggagcagacccttcctggatatggtgtaccacgcgctggacagcccggatgatgattaccatgccctgttcgtgctctgcctcctctatgccatgtctcataataaagaaaatctcctgaaaaagaggaaggcttatcaggcactcaaagccacccaggcaaagcaggaacttttggcaaagaaggagcagaagaaaggaaaagggctcaggtttaagctactggaatcattcctacatgattactggcagcagaaacctgacaaggtgcatctcagacgactagaagtgaaacctcatgccgtggaattgccagataaacattccttggcctttgttgtacgcatcgaaaggattgatggcgtgagtttactggtgcagagaaccattgcaagactttgcctaaagaaaatttttagtggtgtctttgtaaaagtcaccccccagaatctacaaatgctgcgtatagtggaaacttatgtgacctggggatttccaaatctgaagtctgtccgagaactcattttgaaaccgtggacaagccaaggtcaagaataagaccatccctctgacaagacattacagtgatggaggagcacctggggaaagtttggcgtcatttgcttggaagacctcattcatgaaaattgccttcccagggaagcatttccaggagatctcatggttcttgtgccctttccaccgtctcagtggcccatcatgctaccaaaaataagagtgggcttcctcaaggagatgggcacacctgggctatcggggtgaacgcatcaaatcagctcatccgtcagctgaactagacccaggtgccaaacttgcggtaaattttttatccagtgaagtgggaagcatgtgttttgttgttttgggaatttttatcaagtgtcttcagagaagattatttccctgctttatcttccagaaactggaaaggaagggtcaaagaaaagacagttaggctgggccggtcgtggttggctca

SEQ ID NO: 119913 - DNA, 405 bp, Homo sapiens
  misc_feature (1)...(405): n = a,t,c or g
ctggagatttccatcatggcggcgtccatttcgggctacaccttcagtgctgtgtgtttccacagcgccaacagcaacgcggaccacgaaggatttttactgggagaggtaagacaagaggaaacgtttagcatcagtgactcacaaatcagcaacacagaatttctgcaagtaattgaaagtcattgggtggtacagattccggcgcaatacgcagcagcagatgtcctacagagagcaggttcttcacaagcagctcacccgcatcctcggcgtgcccgacctcgtctttcttctcttcagcttcatctccactgccaacaattccactcacgctntagaatatgtgctcttcagaccaaatagaaggtataatcagaggatatcactcgctattcccaatct

SEQ ID NO: 119914 - DNA, 843 bp, Homo sapiens
atggtcctgaggctctcgggactatggtctgctggcagggaagcagccgtgtgcgtctccagccagagccgcaagtggatgggaagtggctcctcttcgtgtatccgcccccagatcatgaacggccccctgcacccccgccccctggtggcgctgctggacggccgcgactgcactgtggagatgcccatcctgaaggacctggccactgtggccttctgtgacgcgcagtcgacgcaggaaatccacgagaaggttctaaacgaagccgtgggcgccatgatgtaccacaccatcaccctcaccagggaggacctggagaagttcaaggccctgagagtgatcgtgcggataggcagtggctatgacaacgtggacatcaaggctgccggcgagctcggtgagtgcgaggcagcgctggctgcctggagttgtccggagctctgtgggccctgctcgggtgggcttggagaagcagctggaactgggaccacggagcagccgcttctggctgtagcaaggtggctgcctccaggccgggctgtggagcaccttgcggccctgccttcacatgacacaggtcagcgaaataaatatgcctgtatgaagctgattgctgtggcccaggagaagaggcaaagcgcgcgtccagacaccgccgaggacgccctccaggccgccgtcagccggcgcccccgagcgccacgcaccccgcggcagtccagcaccctcaagaccgcagtcggccgcggaaaggaacgggaactgggccgacgcgcgccgccgactcacaatcagggccgcgcgccggctgacgtcaccctgtgtcgaccagccccctga

SEQ ID NO: 119915 - DNA, 1260 bp, Homo sapiens
tggagatttccatcatggcggcgtccatttcgggctacaccttcagtgctgtgtgtttccacagcgccaacagcaacgcggaccacgaaggatttttactgggagaggtaagacaagaggaaacgtttagcatcagtgactcacaaatcagcaacacagaatttctgcaagtaattcaaatctataaccatcagccttgttcaaaactttttagtttttatgactacgcaagcaaagtgaatgaggagagtttggacaggattcttaaagatcggagaaagaaagtcattgggtggtacagattccggcgcaatacgcagcagcagatgtcctacagagagcaggttcttcacaagcagctcaccccgcatcctcggcgtgcccgacctcgtctttcttctcttcagcttcatctccactgccaacaattccactcacgctttagaatatgtgctcttcagaccaaatagaaggtataatcagaggatatcactcgctattcccaatctaggaaatactagccagcaagagtacaaagtgtcttcagtgccaaatacttctcagagttatgccaaagtgattaaagaacatggtactgacttttttgacaaggatggagtaatgaaagacatcagggcgatttatcaggtttataatgcacttcaggagaaagttcaggcagtgtgtgcagatgttgaaaagagtgagcgagttgttgaatcttgtcaggcagaagtgaacaaattaagaagacaaatcactcagaggaaaaatgaaaaggaacaagaaagaagattgcagcaggcagtgttaagcagacagatgccgtctgaaagcttggacccagcgttcagtcctcggatgccgtcctctgggtttgcagctgaaggcagaagtacacttggagatgcagaggcctcggatcctcctcccccttactctgattttcacccaaacaatcaagaaagtactttgagccactctcgcatggaaaggagtgtctttatgcctcgacctcaagctgtgggctcttccaattatgcttccaccagtgccggactgaagtatcctggaagtggggctgaccttcctcctccccaaagagcagctggagacagtggtgaggattcagacgacagtgattatgaaaatttgattgaccctacagagccttctaatagtgaatactcacattcaaaggattctcgacccatggcacatcccgacgaggaccccaggaacactcagacctcccagatt

SEQ ID NO: 119916 - DNA, 991 bp, Homo sapiens
atgagcaccgacatgaagctctgcgtcagcgtggatgaacatatggggctcgcatctgatgccgacaagacgagcgagatagcgatgtgtcgggctcaccaagtctacatcgagcgaagaacttcgagacatgccgacgggatcataaaagtcattgggtggtacagattccggcgcaatacgcagcagcagatgtcctacagagagcaggttcttcacaagcagctcacccgcatcctcggcgtgcccgacctcgtctttcttctcttcagcttcatctccactgccaacaattccactcacgctttagaatatgtgctcttcagaccaaatagaaggccgccgccggcgcagccaatgagcgaccgcctctttccgggctcagggggctggtcgacacagggtgacgtcagccggcgcgcggccctgattgtgagtcggcggcgcgcgtcggcccagttcccgttcctttccgcggccgactgcggtcttgagggtgctggactgccgcggggtcagcgaaataaatatgcctgtatgaagctgattgctgtggcccaggatattgaagatttgcccccaacagtccaagaaaaattatttgatgaggtgcttgatagagacgttcaaaaagaattagaagaagaatctccaattattaacctggtccttggaattggctacacgtttggacagtcgactgtatgcactttggaaccggactgcaggagactgcctacttgattcagttctacaagctacctggggcatctatgacaaggactcagtgcttcggaaagccctgcatgacagcctgcatgactgttcacattggtgagctggcattctgccctgtttcaacccaggagtgcatttgctggattatttccttgtagtggtgggatactttttatgtcagttatattttctatggaaactggaggaaaaacagttcattttggacattaaaatactttgaacacgtaaaaaa

SEQ ID NO: 119917 - DNA, 3066 bp, Homo sapiens; identical to SEQ ID NO: 117706

SEQ ID NO: 119918 - DNA, 628 bp, Homo sapiens
cctgtgccagcacaaccggatcaagcacaaaggcatcaggaaagtgtatgcctgctcgcactgcccagactccagacgtacctttaccaaacgattgatgctagagaagcacgtccagctgatgcacagcctcaaggaccctgacctgaaagaaatgacagatgccaccaatgaggaggaaacagaaataaaagaagacaccaagttccccagtcccaagtggaagttggaagaaccagttctcaagagtgccatgtgtggcttcaccaccgaaaacctgcttcagttccacgaacacatccctcagcacaaatctgatagttcttcctaccagtgccaggagtgtggcctctggtacacgtctcacgtctctctgtccaggcacctcttcattgtacacaagttaaaggaacctcagccagtgtccaagcaaaatggagctggggaagataaccaacaggagaacaaacccagccatgaggatgaatcccccaatggcaccgtgtcagacagaaagtgcaaagtgtgcgtgaaaacttttgaaactgaagctgccttaaatactcacatgcggatacatggcatggccttcatcaaatccaaaaggatgagctcagccaagaaatag

SEQ ID NO: 119919 - DNA, 1163 bp, Homo sapiens
atgcagagagatgtgtacatatcccacgtcaggaaggagcatgggaaacaaatgaagaaacaaccctgctgccagcgtgacaagcctttcagctcatcccacagcctgtgctggcacaaccggatcaagcacaaagtcatcaggaaagtgtacacctgttcacactgctcagactctagaggtacctttaccaaacagttgatgttggagaagcatgtccagctgacgcatggcatcaaggaccctgacctgaaagaaatgacagacgccatcaatgaggaggaaacagaaataaaagaagaccccaaggtccccagtcccaagtggaagttgaaagaaccggttctggagttcaggcctcccagaggagcaatcactcaaccactgaaaaagctgaaaatcaatgtttttaaggttcacaagtgcgctcgtgcgtggcttcaccaccgaaaacctgctgcaatttcacgaacacatccctcagcacaaatcggatggttcttcctaccagtgccgggagcacctctttgttgtacacaagttaaaggaacctcagccagtgtccaagcaaaacggggctggggaagataaccaacaggagaacaaacccagtcacgaggatgaatctcccaatggcgccatgtcagacagaaagtgcaaagtgtgtgcaaaaacttttgaaactgaagctgccttaaacactcacatgcagacacatggtatggccttcatcaaatccaaaaggatgagctcagacgagaaatagccacagatgctccatgattaaaatccctgtccacattggaataaaaaagacatttttgttacaaagtttgcagtatgctgagagttacacagtactgtctagggctgttgcaatattattcttcttttcaatgttaccttccttcacctcgtcgtatatatcctcgataagtattaaaacagtatttgagtttaaaagagtttgtatatatttaaatgaataactttttatactctttgttacatgtttgtatcagtatttagtggaaaaccatttgagttgttttgggttagaatttttctttttgtactgtttctttaaaacagagttcttagtaacaggggcagttcctgaattcaaataaaccattttgtatgtttggaaaaaaaaaaaaaaa

SEQ ID NO: 119920 - DNA, 1146 bp, Homo sapiens
ctacatgatttccttatataacaaattctgaattttctctttacacaattctgtcagggtggcgaccagctccttattcatcggcacgggttcttcgtccatccataaatcgatatcaataccaatgtccatttcatcgcaaatcgcccgcatgtcgttttctaactgttgggtgaaatcgcgcagcacggcagcgtcggtatgacgacaatcaatggtgaacgtggttttacccggcaccacatttaccgtattcgggcgcggctctactttgccaaaggtcagaaccagcggatcgcccatccttttcgctttttcgaccgactgatggcaaatgcgactgaaagcgtaaactgtatcacgacgataacccatcggcgtggtgcctgcatggtttgattcgccgttcagcgttaccgtataacgacgctgcccgacaattgcattcaccacgccaattgattgcccattactttccagcacacagccctgttcaatatgcagttcaacaaaggctttaatatcctgacgcggagttagtggggcgttcggaagagtaaatccgcaagccttcatcgcatcgacaaaactatttcctttggcatcacagatattccgcacgtcgtcaggattcgccagccccaaaatattttttacctgcaggaagcggcggcggaagtcaggcatacgctggtaactttgaggcagctggtaacgctctatgatccagtcgattttcagagagacgatgcctgagccatccggcttacgatactgacacagggattcgtataaacgcatggcatacggattggtgatttcttttgttttactaagccgaaactgcgtaaacccgttctgctgtctgcagatctgagctttcttcttggacaccttatacacacagttctccaggtgctgaagcagggcattcgtccccttcgcacacccaactgccatggcatgttccagcagaaggtcatccgtgtacaggagcaagacgcagcgcaggttactcatcagagcttcaaagacgatttgtgcgttgttctgggtgataccctgcaccatcgcttttttctgatcttccggcattgaaccttgtttcacttcatccagcgccagcagaaccacattaccttgcat

SEQ ID NO: 119921 - DNA, 1140 bp, Homo sapiens
cgccgcccagacatcttccggcttgcaactggaatgaagtattgctgccggatggcgctgcacgcagaggcacagcgccaccgggtatacagattgttgacaaagtgcgctttgtttatgccggatgcggcgttaacgccttatccggcctacaaaatcgtgcaaattcaatacattgcagaattttccgacaagaaaaatagcttccgttttcatcatatttctactgacgaagtctatggtgatttgcctcatccagatgaagtaaataatacagaagaattacccttatttactgagacgacagcttacgcgccaagcagcccttattccgcatccaaagcatccagcgatcatttagtccgcgcgtggaaacgtacatatggtttaccgacaattgtgactaattgctcgaacaactatggtccttatcatttcccggaaaagcttattccactggttattcttaatgcactggaaggtaaggcattacctatttatggcaaaggagatcagatccgcgactggttgtatgttgaagatcatgcgcgtgcgttatataccgtcgtaaccgaaggtaaagcgggtgaaacttataacattggtgggcacaacgaaaagaaaaacatcgatgtagtgctcactatttgtgatttgctggatgagattgtaccgaaagagaaatcttatcgtgagcaaatcacttatgttgctgatcgtccgggacacgatcgccgctatggagttcccccagtctcaataagctttgaggtgatgccgggggagagcgtggatgggaaatttgatagtttcaggagtttgaagaaggcacttctagaagagattggtgatgaaaacagcaaggtctacagagctcttatggagtgtgaagatctggatgctgccggaattgccgcgagcgtaaaacgtgattatcaacaaaatcgcgtggcgcgttgggcagatgatcaaaaaattgtcggtcaggccgatcccgtggcttgggtcagtttgcaggacattcagggtaaagatgataaatggtcagtaccgctaaccgtgcgtggtaaaagtgccgatattcattaccaggtcagcgtggactgcaaagcgggaatggcggaatatcagcggcgttaa

SEQ ID NO: 119922 - DNA, 1383 bp, Homo sapiens
atgtatgatgctgaccgcgactcactcacagccgttgatgtgattcacaaagaagtttatcccgagcagtcagacgctccgaaaagagaactttgtctggcaaatgactcctggattttctactatgttcgcaagcatccggtgacgctgctgccttatcaggtctggcgtcacgccatcggtacgccagcatcgcaagataaactgatctacgaagaaaaagacgatacttattacgtcagcctgcataaaacgacctcgaagcactatgtagtcattcatttggccagcgccaccaccagtgaagttcgcctgctgaacgcggaaatggccaatgccgagccgtttgtttttctgccgcgccgcaaagatcacgaatacagccttgatcactaccagcatcgtttttatctgcgttccaaccgccacggcaaaaactttggcttataccgtacccgtatgcgtgatgagcaacagtgggaagagttaattccgccacacgaaaacatcatgctggaagggtttacgctgtttaccgactggctggcctacgattgtggtgcgttctggggcgaacaaggcactcgcgccgcatccgccaacagtcaatggaattatcagaagccattaacgccgctgatattccgccattcccgctttgcagtccacgctgacctggtaatgaatatcggcacttttaccacgcacgacgatgagagcagcaaagcaaagattgggaatgacaccattgtcttcaccttgtataaaaaagaagcggccatgtgggagaccctttctgtgacgggtgttgacaaagagatgatgcaaagaattagagaaaaatctattttacaagcacaagagagagcaaaagaagctacagaagcaaaagctgcagcaaagcgcgaagatcaaaaatacgcactaagtgtcatgatgaagatttcagacaatgtatggaaaaacattgtgaaaatccctgtcctgttttattccgttctgatgaccggtgcaagcagctcccagtcacgctgcgtcttgctcctgtacacggatgaccttctgctggaacatgccatggcagttgggtgtgcgaaggggacggatgccctgcttcagcacctggagaactgtgtgtataaggtgtccaagaagaaagctcagatctgcagacagcaggtacactacctgggattcgctattcggaaaggggagcgcagcctggggtcagaaagaaagcgggtcatctgcagcctacaggaacctaaaaccagaaggcaaaacatggatgcaaaatctcttataaatactggcaacggaatccagcagcactcgagaaagcttacccacaccgatcaagtcggctccatccctgggatgtaa

SEQ ID NO: 119923 - DNA, 558 bp, Homo sapiens
cggacgcgtgggtgcggacgtatttgttttcttcaagcatttggtcgagattaagaattaaaaatgtcatccaaacaagaaataatgagtgaccagcggtttagacgggttgcaaaggacccgagattttgggaaatgccagaaaaggatcgaaaagtcaaaattgacaagagatttcgagccatgtttcatgacaagaagttcaagttgaactatgccgtggataaaagagggcgccccattagccatagcactacagaggatttgaagcgtttttacgacctttcagattctgattccaatctctctggtgaagatagcaaagcattgagtcaaaagaaaataaagaagaaaaaaacccagactaaaaaagaaatcgattcaaaaaatctagttgagaaaaagaaagaaaccaagaaggctaatcacaagggttctgaaaataaaactgatttagataattctataggaattaaaaaaatgaaaacctcatgtaaatttaagatagattcaaacataagtccgaagaaggatagcaaagaatttacacaaaaaaat

SEQ ID NO: 119924 - DNA, 900 bp, Homo sapiens
atgctgagcgctggcctaggactgctgatgctggtggcagtggttgaatttctcatcggtttaattggaaatggaagcctggtggtctggagttttagagaatggatcagaaaattcaactggtcctcatataacctcattatcctgggcctggctggctgccgatttctcctgcagtggctgatcattttggacttaagcttgtttccacttttccagagcagccgttggcttcgctatcttagtatcttctgggtcctggtaagccaggccagcttatggtttgccaccttcctcagtgtcttctattgcaagaagatcacgaccttcgatcgcccggcctacttgtggctgaagcagagggcctataacctgagtctctggtgccttctgggctactttataatcaatttgttacttacagtccaaattggcttaacattctatcatcctccccaaggaaacagcagcattcggtatccctttgaaagctggcagtacctgtatgcatttcagctcaattcaggaagttatttgcctttagtggtgtttcttgtttcctctgggatgctgattgtctctttgtatacacaccacaagaagatgaaggtccattcagctggtaggagggatgtccgggccaaggctcacatcactgcgctgaagtccttgggctgcttcctcttacttcacctggtttatatcatggccagccccttctccatcacctccaagacttatcctcctgatctcaccagtgtcttcatctgggagacactcatggcagcctatccttctcttcattctctcatattgatcatggggattcctagggtgaagcagacttgtcagaagatcctgtggaagacagtgtgtgctcggagatgctggggcccatga

SEQ ID NO: 119925 - DNA, 859 bp, Homo sapiens
atgttggagattcttctacctgactgctgctatcagtcctaccagcccccaacgtttggtgcttgttctaaagggcatgtcctaggagtcgctttaaactctcaaagtatcactctctatacaaacaagaagtgcaaagaatcagatatcaccaaggagagaattcagaagatcctggcaactggtgccaatgttattctaaccactggtggaattgatgatatgtgtctcaagtattttgtgcaggctggtgctatggcagttagaagagttttaaaaagggaccttaaacgcattgccaaagcttctgcagtgctgggattacagcactattcatcaaatagtgctgtattcaccaaagacaaggaatcaacttacgtgcccatcaccagtggactggataaagaaaatttggtacatatacaccatggaatattatgcagccgtaaaaagaatgaaaccatgttctttgcagcaatatggatacagctgaaggccattatcctaagtgaattaatgcaggaacagaaaaccaaatatagcatgttctcacttgccactgcctaaaacaggctccagtccagtgggtaatgaaggtgatccctttcctgaactaaacagatcatgtggcactgtgaatgcccaaagcagatataagattctaggtggtctctttatggttccccagagggttcgcagcagatgtacttcgtggctcacagcggtaaccaacctagaatataccctttattggcattccctctttccctatcttactccctttactcattcattccagatttctcgaagcaacgctcaaataaactgtctgtatttaaaacctgtcatcaactcttaa

SEQ ID NO: 119926 - DNA, 1696 bp, Homo sapiens
acgtgtatcgctgccgtcaagatggaggggcctttgtccgtgttcggtgaccgcagcactggggaaacgatccgctcccaaaacgttatggctgcagcttcgattgccaatattgtaaaaagttctcttggtccagttggcttggataaaatgttggtggatgatattggtgatgtaaccattactaacgatggtgcaaccatcctgaagttactggaggtagaacatcctgcagctaaagttctttgtgagctggctgatctgcaagacaaagaagttggagatggaactacttcagtggttattattgcagcagaactcctaaaaaatgcagatgaattagtcaaacagaaaattcatcccacatcagttattagtggctatcgacttgcttgcaaggaagcagtgcgttatatcaatgaaaacctaattgttaacacagatgaactgggaagagattgcctgattaatgctgctaagacatccatgtcttccaaaatcattgggataaatggtgatttctttgctaacatggtagtagatgctgtacttgctattaaatacacagacataagaggccagccacgctatccagtcaactctgttaatattttgaaagcccatgggagaagtcaaatggagagtatgctcatcagtggctatgcactcaactgtgtggtgggatcccagggcatgcccaagagaatcgtaaatgcaaaaattgcttgccttgacttcagcctgcaaaaaacaaaaatgaagcttggtgtacaggtggtcattacagaccctgaaaaactggaccaaattagacagagagaatcagattatcaccaaggagagaattcagaagatcctggcaactggtgccaacgttattctaaccactggtgggaattgatgatatgtgtctgaagtattttttggaggctggtgctatggcagttagaagagttttaacaagggaccttaaacgcattgccaaagcttctggagcaactattctgtcaaccctggccaatttggaaggtgaagaaacttttgaagctgcaatgttgggacaggcagaagaagtggtacaggagagaatttgtgatgatgagctgatcttaatcaaaaatactaaggctcgtacgtctgcatcgattatcttacgtggggcaaatgatttccatgtgtgatgagatggagcgctcttttacatgatgcactttgtgtagtgaagagagttttggagtcaaaatctgtggttcccggtgggggtgctgtagaagcagccctttccatataccttgaaaactatgcaaccagcatggggtctcgggaacagcttgcgattgcagagtttgcaagatcacttcttgttattcccaatacactagcagttaatgctgcccaggactccacagatctggttgcaaaattaagagcttttcataatgaggcccaggttaacccagaacgtaaaaatctaaaatggattggtcttgatttgagcaatggtaaacctcgagacaacaaacaagcaggggtgtttgaaccaaccatagttaaagttaagagtttgaaatttgcaacagaagctgcaatcaccattcttcgaattgatgatcttattaaattacatccagaaatccttcggattaaacatggaagttatgaagatgctgttcactctggagcccttaatgattga

SEQ ID NO: 119927 - DNA, 525 bp, Homo sapiens
  misc_feature (1)...(525): n = a,t,c or g
atggaggcgaagtgtgagtgggagcaggagattgtctcctctggtgttgctttcccttccagccccgccccaaatcgggacatgctgggccctggaggtcccgcccgcgcagccggcccggttttctcccgccaccagggggcggcggcgctaagggcggccttctgggccgaagccggcgacgctctaggtagctgcggcggctcctctgtggccagtggcagcggcgctctagccggcggccgtgaggggcgggctctcagtggtgcggccggcaggcagcgatggcggccngcggagtccggtgttgaccgtggcgagccggagcccatggaggtggaggagggcgagctggaaatcgtgcctgtgcggcgctcgctcaaggaactgatcccgatcactgtcgtcttcctgaaagatgagaagtaccattctttgcctatcatcattaaaggcagcgttggtggacttctggtgttgatcgtgattctggtcatcctgttcaagatgatgagcttgatgtag

SEQ ID NO: 119928 - DNA, 3929 bp, Homo sapiens
gaattccggcccccgtgtctgggcgtccgcctcctggcctcctggctgaggggaagctgagtgggccacggcccatgtgtcgcactcgcctcggctcccacacagccgcctctgctccagcaaggatgtggctcttccacactctgctctgcatagccagcctggccctgctggccgctttcaatgtggatgtggcccggccctggctcacgcccaagggaggtgcccctttcgtgctcagctcccttctgcaccaagaccccagcaccaaccagacctggctcctggtcaccagccccagaaccaagaggacaccagggcccctccatcgatgttcccttgtccaggatgaaatcctttgccatcctgtagagcatgtccccatccccaaggggaggcaccggggagtgaccgttgtccggagccaccacggtgttttgatatgcattcaagtgctggtccggcggcctcacagcctcagctcagaactcacaggcacctgtagcctcctgggccctgacctccgtccccaggctcaggccaacttcttcgaccttgaaaatctcctggatccagatgcacgtgtggacactggagactgctacagcaacaaagaaggcggtggagaagacgatgtgaacacagccaggcagcgccgggctctggagaaggaggaggaggaagacaaggaggaggaggaagacgaggaggaggaggaagctggcaccgagattgccatcatcctggatggctcaggaagcattgatcccccagactttcagagagccaaagacttcatctccaacatgatgaggaacttctatgaaaagtgttttgagtgcaactttgccttggtgcagtatggaggagtgatccagactgagtttgaccttcgggacagccaggatgtgatggcctccctcgccagagtccagaacatcactcaagtggggagtgtcaccaagactgcctcagccatgcaacacgtcttagacagcatcttcacctcaagccacggctccaggagaaaggcatccaaggtcatggtggtgctcaccgatggtggcatattcgaggaccccctcaaccttacgacagtcatcaactcccccaaaatgcagggtgttgagcgctttgccattggggtgggagaagaatttaagagtgctaggactgcgagggaactgaacctgatcgcctcagacccggatgagacccatgctttcaaggtgaccaactacatggcgctggatgggctgctgagcaaactgcggtacaacatcatcagcatggaaggcacggttggagacgcccttcactaccagctggcacagattggcttcagtgctcagatcctggatgagcggcaggtgctgctcggcgccgtcggggcctttgactggtccggaggggcgttgctctacgacacacgcagccgccggggccgcttcctgaaccagacagcggcggcggcggcagacgcggaggctgcgcagtacagctacctgggttacgctgtggccgtgctgcacaagacctgcagcctctcctacgtcgcgggggctccacagtacaaacatcatggggccgtgtttgagctccagaaggagggcagagaggccagcttcctgccagtgctggagggagagcagatggggtcctattttggctctgagctgtgccctgtggacattgacatggatggaagcacggacttcttgctggtggctgctccattttaccacgttcatggagaagaaggcagagtctacgtgtaccgtctcagcgagcaggatggttctttctccttggcacgcatactgagtgggcaccccgggttcaccaatgcccgctttggctttgccatggcggctatgggggatctcagtcaggataagctcacagatgtggccatcggggcccccctggaaggttttggggcagatgatggtgccagcttcggcagtgtgtatatctacaatggacactgggacggcctctccgccagcccctcgcagcggatcagagcctccacggtggccccaggactccagtacttcggcatgtccatggctggtggctttgatattagtggcgacggccttgccgacatcaccgtgggcactctgggccaggcggttgtgttccgctcccggcctgtggttcgcctgaaggtctccatggccttcacccccagcgcactgcccatcggcttcaacggcgtcgtgaatgtccgtttatgttttgaaatcagctctgtaaccacagcctctgagtcaggcctccgtgaggcacttctcaacttcacgctggatgtggatgtggggaagcagaggagacggctgcagtgttcagacgtaagaagctgtctgggctgcctgagggagtggagcagcggatcccagctttgtgaggacctcctgctcatgcccacagagggagagctctgtgaggaggactgcttctccaatgccagtgtcaaagtcagctaccagctccagacccctgagggacagacggaccatccccagcccatcctggaccgctacactgagccctttgccatcttccagctgccctatgagaaggcctgcaagaataagctgttttgtgtcgcagaattacagttggccaccaccgtctctcagcaggagttggtggtgggtctcacaaaggagctgaccctgaacattaacctaactaactccggggaagattcctacatgacaagcatggccttgaattaccccagaaacctgcagttgaagaggatgcaaaagcctccctctccaaacattcagtgtgatgaccctcagccggttgcttctgtcctgatcatgaactgcaggattggtcaccccgtcctcaagaggtcatctgctcatgtttcagtcgtttggcagctagaggagaatgcctttccaaacaggacagcagacatcactgtgactgtcaccaattccaatgaaagacggtctttggccaacgagacccacacccttcaattcaggcatggcttcgttgcagttctgtccaaaccatccataatgtacgtgaacacaggccaggggctttctcaccacaaagaattcctcttccatgtacatggggagaacctctttggagcagaataccagttgcaaatttgcgtcccaaccaaattacgaggtctccaggttgcagcagtgaagaagctgacgaggactcaggcctccacggtgtgcacctggagtcaggagcgcgcttgtgcgtacagttcggttcagcatgtggaagaatggcattcagtgagctgtgtcatcgcttcagataaagaaaatgtcaccgtggctgcagagatctcctgggatcactctgaggagttactaaaagatgtaactgaactgcagatcccttggtgaaatatctttcaacaaatctctatatgagggactgaatgcagagaaccaccagaacttaagatcactgtcgtcttccatgaaagctgagagtaccatttcttcgcctatcaccatttaagggcacgcgttggtggacgttctggtgttgatcgtgattctggtcatcctgttcaagtgtggctttttttaaaagaaaatatcaacaacttgaacttgggagagcattcaggaaggcccagctgtaaattcagagaattctgctcgaagaagagaattaggacctgctatccgactgggagaggctattcagccagtcctgggacttggagacccgagcaatcctttgcgattactttttccttcaggatgatctagagcagcatggagctgttggtagagatattagtttttaaccatacattgtcccaaaaagtgtctgtgcattgtgcaaaaagtaaacataagaaacctttggtattaaataaatttacacttttatttgcaaaaaaaaaaaaaaaaaaaaacgtt

SEQ ID NO: 119929 - DNA, 3192 bp, Homo sapiens; identical to SEQ ID NO: 117657

SEQ ID NO: 119930 - DNA, 2466 bp, Homo sapiens; identical to SEQ ID NO: 117659

SEQ ID NO: 119931 - DNA, 1830 bp, Homo sapiens; identical to SEQ ID NO: 117660

SEQ ID NO: 119932 - DNA, 245 bp, Homo sapiens
agagccctgtcgagcctgattgtgtagaagtgttggactcaattgactctagcagacctgacctccgggaccagccttgggcatcagtagactgggaactatacgtggatgggagcagcttcttcaacccccaaggagagagagaggctcgaaaagcagcatctgccccctttcgggcatcagtgctccctcaagcacctgatcttggacctacttcttctaaagaagaaaaggactttctccag

SEQ ID NO: 119933 - DNA, 801 bp, Homo sapiens
atggtcacggggaagtgtactccccctgcgatattgggagtaatgttgtcctccccaaacctggatgttagcaacgagatcacagagggggtgtacacaccctgcgacattggaagtaatatgatcctctccccacctggatactgggaaagatatcacagcgcggtgctgaggaacctgctcagcatcccggctgtcagctctgactcccacctccacacccccacgtacttcttcctctccatcctgtgctgggctgacatcggtttcacctcggccacggttcccaagatgattgtggacatgcagtggtatagcagagtcatctctcatgcgggctgcctgacacagatgtctttcttggtcctttttgcatgtatagaaggcatgctcctgactgtaatggcctatgactgctttgtaggcatctatcgccctctgcactacccagtcatcgtgaatcctcatctctgtgtcttctttgttttggtgtcctttttccttagcctgttggattcccagctgcacagttggattgtgttacaattcaccatcatcaagaatgtggaaatctctaattttgtctgtgacccctctcaacttctcaaacttgcctcttatgacagcgtcatcaatagcatattcatatatttcgatagtacaatgtttggttttcttcctatttcagggatcctttcatcttactataaaattgtcccctccattctaaggatgtcatcgtcagatgggaagtataaaactttctccacctatggctctcacctagcatttgtttgctga

SEQ ID NO: 119934 - DNA, 367 bp, Homo sapiens
ctctctctccttgggggttgaagaagctgctcccatacacgtatagttcccagtctactgatgcccaagcttggtcccggaggtcaggtctgctagagtcaactgaatccaacacttctacacaatcaggctcgacagggctctctgactccggatcttcccactgaaaggcaaacagcttctgcctctcaggggctaatctgataggaaagaaagcgtctttcaggttccagaaggtgaaccagctgtcttcagctggcggcaacaccaataatgtggacgggttaggtactgttggatgtaaagtcagtgtagcttgatggagcaagcgcaaatcctgtaccggccggtagtccttggtccgtgg

SEQ ID NO: 119935 - DNA, 622 bp, Homo sapiens
gttgatgaccttctgctgggacaccccacggcagtcgggtgtgccaagggaacagatgccctacattggcacctggaggactgtgggtgtaaggtgtccaagaagaaagctcagatctgccgacagcaggccttggcagcaactgccctgcgagtacaagaagcaaataagctgactcttgagcaaaacctgaacataaaggcctcccgtgctgtggtgactttaatgaatactaaaggacatcattggctaacgaatgccagactcacccagtaccagacttggctctgtgaaaatccccgtataaccattgaagtttgtaacagcctacaccccgccaccttgctcccggtatcagagagccccgtcgagcctcgttgtgtagaagtgttggacacaattgactctagcagacctgacctccggggccagccttgggcatcagtagactgggaactatacgtggatgggagtagcttcttcaacccccaaggagagagaggtgcagggtgtgcagtgataaccctggacactgttgttgaagccagatcgttgtcccaggccacatcagcccagaaagctgaactcattgctttcattcgggccttagaactcagtgagg

SEQ ID NO: 119936 - DNA, 639 bp, Homo sapiens
atggggatgaccacagcgtacatcactgatgccaccactccattcctgggagatgatgacacagctgaagtcagatgggcagatggccacaaatcggtcataggccatcagagtcaggagcatgtcttctatacatgcaaaaaggacaaagaaagacatctgtgtcaggcagcccgcataagagatgactctgctatgcgactgcatgtccacaatcatcttgggaactgtggccgaggtgaaaccaatgtcagcccaggacaggttggagaggaagaagtacatgggggtgtggaagtgggggtcagagctgccagccaggatgatgaacaggttcctcagcatcgtgaccagggcggggaagacaataatactgccctcagtatcgcgggaaatgtacgtcaccctgtgatatttttcctaatatccagagggagagagaatgatattactcccaatatcgtagaagtgtacagcccccctgtgatattgttcttaatatccgtgggatggccaattcctggctttggtcccactgaggactccgtggacagtgctgccagctcaggtccctactcctccccacctaattctgacaaggtgttctcatgctccttggaaacatcaagaccagactaa

SEQ ID NO: 119937 - DNA, 939 bp, Homo sapiens
atgtccggccagtttgattttttattgtggactcccgaggaggacaactcggacgagagcgacgcggagggcgagcatggggacggcgcggaggaggaggcgccgcccccggtgcccaggcctggccccaagcccgctggactcggccgccggccctgcccctacgaacaggcgcaggggggcgacgggccggaggagcagtggatgagcttttgctgggacatcccacggaagtcgggtgcgccaagggaacggattaccctacgtcgacacctggaggactgtgggtgtaaggtgtccaagaagaaagctcagatctgccgacagcagaaagacccccaagaagaaagtccggcacaattctacgagagactgtgtgaggcctacggtatgtatactccctttgatcccgatagccctgaaaatcagcgcatgattcacatggctttagtccgtcaaagtgcagaagacatgagaagaaaactgcagaaacaggctgggcttgcagggatgaatccatcccaattactagaaagagctagccaggtgtttgtaaacagggatgcagtaagccataaggaaaacagcaaagagaatggagggagagaggatgatatgactcccaatatcgcagggggggtacacaaccctgtgatattgttcctaacatccggagagaaagaagatgatatcactctcaatatcgcagaagggcccgaccccctggaccccactgatctgaacggggcgcacttcgacccggaagtttacctagacaagctgcctagagagtgccctctggcccagctgatggacagtgagacagacatggtgcagcagatccgggctctagacagcgacgtgcaaaccctggtatatgagaactacgataagttcatcccagccacagaaattgacaaacaacataaaactgtatga

SEQ ID NO: 119938 - DNA, 1863 bp, Homo sapiens; identical to SEQ ID NO: 117677

SEQ ID NO: 119939 - DNA, 3735 bp, Homo sapiens
gaaatgactaacaaggtcacgggggagtgtactccccctgcaatactggcagtaatctcgtcctccccaaacctggatgtgagcgacaagatcacagagggggtgtacacaccctgcgacattggaagtaatatgatcctctccccacctggatattgggaaagatatcacagcgcggaggatccagaactgcagcccatcctcgctgggctgtccctgtccatgtatctggtcacggtgctgaggaacctcctcatcagcctggctgtcagctctgactcccacctccacaccccaatgtgcttcttcctctccaacctgtgctgggctgacatcggtttcacctcggccacggttcccaagatgattgtggacatgcggtcgcatagcggagtcatctcttatgcggactgcctgacacggatgtctttcttggtcctttttgcatgtgtagaagacatgctcctgactgtgatggcctatgactgctttgtagccatctgtcgccctctgcactacccagtcatcgtgaatcctcacctctgtgtcttcttagtttcggtgtcctttttccttagcctgttggattcccagctgcacaggatccttttgtcttactgtaaaattgttccctccattctaaggatttcaacatcagatgggaaatataaagccttctccacctgtggctctcacctggcacttgtttgcttattttatggagcaggcattggcgtgtacctgacttcagctgtgtcaccaccccccaggaatggtgtggtggtgtcagtgatgtacactgtggtcacccccatgctgaaccctttcatctacagcctgagaaacagggacattcaaagcaccctgcggaggctgctcagcagaacagtcgaatctcatgatctgttccatcctttttcttgtgtggggaagcgcaaatccaaccaagaatgtgataccacacatttggatggatgtgataaacaaacaagcattggtgaaactagagggaaggagtacaccctgtgtgacagtaggagtaacctcacccaaggatataaggaacaaatacagaggatgcacacgtgttgtgacattagcagtaacatccatttaggatattacgaatattaccacaatgtgaataccccctgtgatattaggagtaacatccccctacaatattgggaaccatatcacacggtgtacaccccctgtgacattagagggaggcccatgaaccgaggaagcaggtggccatctgtggcagctgtcacagcccagcataaagctaagcacttctacttattatatcattcaaaagctgcctcagcctgcaagggcagtaattccccaaagcaggctccagggcccaaggaaagccctcggcagggaaacattgagtgtcaggcacagggaatcaggccatcgggtcacctggacaccgtaaggctccaagagctgccccctctccaccaggaggaactgacttaccaaggtgacagtctagagactgcttgcccaattaaagccatgatccccaatctcacactccaactacgggaggacattcaaaccaaaggcaaagaagttgaaaactttgaaaaaaatttagaagaatgtataactagaataaccaatacggagaagtgcttaaaggagctgatggagctgaaaaccaaggctcgagaactacgtaaagaatgcagtagcctcaggagccgatgccatcaactggaagaaagggtatcagcaatggaagatgaaatgaatgaaatgaagtgggaagggaagtttagagaaaaaagaataaaaagaaataagcaaagcctccaagaaatatgggactatgtgaaaagaccaaatctacgtctcattggtgtacctgaaagtgacggggagaatggaactaagttggaaaacactctgcaggatatcgtccagaacttccccaatctagcaaggcagaccaatgttcagattcaggaaatacagagaacgccacaaagatactcctcgagaagagcaactccaagacacataattgtcagattcaccaaagttgaaatgaaggaaaaaatgttaagggcagccagagagaaagaaatacaaactaccatcagagaatactacaaacacctctacgcaaataaactagaaaatctagaggaaatggataaattccttgacacatacactctcccaagactaaaccaggaagaagttgaatctctgaatagaccaataacaggctctgaaattgtggcaataatcaatagcttaccaaccaaaaagagtccaggaccagatggattcacagccgaattctaccagaggtacaaggaggaactggtaccattccttctacaactattccaatcaatagaaaaagagggaatcctccctaactcattttatgaggccagcatcatcctgataccaaaggctggcagagacacaaccaaaaaagagaattttagaccaatatccttgatgaacgttgatgcaaaaatcctcaataaaatattggcaaaacgaatccagcagcacatcaaaaagcttatccaccatgatcaagtgggcttcatccctgggatgcaaggctggttcaatatacgcaaatcaataaatgtaatccagcatataaacagagccaaagacaaaaaccacatgattatctcaatagatgcagaaaaggcctttgacaaaattcaacaacccttcatgctaaaaactctcaataaattagaattggaaaaaactactttaaagttcatatggaaccaaaaaagagcccgcatcgccaagtcaatcctaagccaaaagaacaaagctggaggcatcacactacctgacttcaaactatactacaaggctacagtaaccaaaacagcatgcctggccccacaccacagtccatcaactcctgctccaggtggaaacctcagaaacccacaaagctcggacctgctccaggtcaccaagcagcagggccaggcactggcaatccaacgagaagccccactacatcgcattccagctcctgaagccattccctggtattttcagccccagccggccacacagctcggatctcctcctgtggatccccccagctctgcgatgatggcagaagagcacacagatctcgaggcccagatcgtcaaggatatccactgcaaggagattgacctggtgaaccgagaccccaagaacattaacgaggacatagtcaagaacgcctgccttcttcagaaaaacaaacacccatttgccccccggctcaggctacacaacacccagaggaaccagatgcccaccagccctacaaacacttgttccaggtttgtgctcatcagggacaccctgttgcacaaagaagaaactgacctggtggattttgaagacgtgatcgcagagcctgtgggcacctacagctttgacggcgtgtggaaggtgagctacaccaccttcactgtctccaagtactggtgctaccgtctgttgtccacgctgctgggcgtcccactggccctgctctggggcttcctgttcgcctgcatctccttctgccacatctgggcggtggtgccatgcattaagagctacctgatcgagatccagtgcatcagccacatctactcactctgcatccgcaccttctgcaacccactcttcgcggccctgggccaggtctgcagcagcatcaaggtggtgctgcggaaggaggtctaa

SEQ ID NO: 119940 - DNA, 2379 bp, Homo sapiens; identical to SEQ ID NO: 117674

SEQ ID NO: 119941 - DNA, 6741 bp, Homo sapiens
  misc_feature (1)...(6741): n = a,t,c or g
atgaggggagctcagaaggccacaaacgttaacaagctctctgaggtcattcagggtaaagaagaaagtccagcacaattctaccagagactgtgtgaggtctatcgtatgtatactccctgtgatcccgatagccctgaaaatcagcacatgattcacatggctttagtccgtcaaagcccagaagacatgagaagaaaactgcagaaacaggctgggcttgcagggatgaatccatcccaattactagaaatagctagccaggtgtttgtaaacagggatgcagtaagccgtaaggaaaacggcaaagagaatggaggtcaggcccggcgatatgccgacctgtttagccctgtcgagcctgattgtgtagaagtgttggactcaattcactctagcagacctgacctccgggaccagccttggccatcaggagactgggaactatatgtggatgggagcagcttcttcaacccccaaggagagagaggtgcagggtatgcagtgataaccctggacactgttgttgaagccacatcgttgccccaggccacttcaggccagaaagctgaactcattgctttcattggggccttagaactcagtgagggtgagactgtcaacatttacactgattctcgccatggcactgaagagggacagcaaatcttgaagcagccggtgtcagagagactggactttgtgtgcagttttctgcagagaaggaacagcttctacatgggcacttgccaggatgagcctgagcagctggatgactggaaccgcattgcagagctgcagcagcgcaatcgagtgtgccccccacatctgaagacctgctatcccctggagtccaggccttccctgagcctgggcaccatcacagatgaggagatgaaaactggagacccccaagagaccctgcgccgagccagcatgcagccaatccagatagccgagggcactggcatcaccacccggcagcagcgcaaacgggtctccctagagccccaccagggccctggaactcctgagtctaagaaggccaccagctgtttcccacgccccatgactccccgagaccgacatgaagggcgcaaacagagcactactgaggcccagaagaaagcagctccagcttctactaaacaggctgaccggcgccagtcgatggccttcagcatcctcaacacacccaagaagctagggaacagccttctgcggcggggagcctcaaagaaggccctgtccaaggcttcccccaacactcgcagtggaacccgccgttctccgcgcattgccaccaccacagccagcgccgccactgctgccgccattggtgccacccctcgagccaagggcaagctgggccaggacgacgtgacgctggacaacctgttcagggtccacgagcacacaggagaagttggtgctgtgcagggcaggggtcagctgctccagcaccaaggccttgcacagctgcgtacctgtgctcccacgttcccggctggagcggaagggaaggaaaggtatggtttccaggaagttcaccctgttttctacgttgttgtcattgcagaaaatcgaaaacatccctcttccccagaatgcctggtatctgcacagaaggtgctagagggatcagagctggaactggcgaagatgaccatgctgctcttataccactctaccatgagctccaaaagtcccagggactgggaacagtttgaatataaaattcaggctgagttggctgtcattcttaaatttgtgctggaccatgaggacgggctaaaccttaatgaggacctagagaacttcctacagaaagctcctgtgccttctacctgttctagcacattccctgaagagctctccccacctagccaccaggccaagagggagattcgcttcctagagctacagaaggttgcctcctcttccagtgggaacaactttctctcaggttctccagcttctcccatgggtgatatcctgcagaccccacagttccagatgagacggctgaagaagcagcttgctgatgagagaagtaatagggatgagctggagctggagctagctgagaaccgcaagctcctcaccgagaaggatgcacagatagccatgatgcagcagcgcattgaccgcctagccctgctgaatgagaagcaggcggccagcccactggagcccaaggagcttgaggagctgcgtgacaagaatgagagccttaccatgcggctgcatgaaaccctgaagcagtgccaggacctgaagacagagaagagccagatggatcgcaaaatcaaccagctttcggaggagaatggagacctttcctttaagctgcgggagtttgccagtcatctgcagcagctacaggatgccctcaatgagctgacggaggagcacagcaaggccactcaggagtggctagagaagcaggcccagctggagaaggagctcagcgcagccctgcaggacaaggccagggcaaaaggagatcttggtaacaagatgatgggccccatgtttgctgatgtttatgagggcttgtgtggtaatctgaaatgccttgaagagaagaacgaaatccttcagggaaaactttcacagctggaagaacacttgtcccagctgcaggataacccaccccaggagaagggcgaggtgctgggtgatgtcttgcagctggaaaccttgaagcaagaggcagccactcttgctgcaaacaacacacagctccaagccagggtagagatgctggagactgagcgaggccagcaggaagccaagctgcttgctgagcggggccacttcgaagaagaaaagcagcagctgtctagcctgatcactgacctgcagagctccatctccaacctcagccaggccaaggaagagctggagcaggcctcccaggctcatggggcccggttgactgcccaggtggcctctctgacctctgagctcaccacactcaatgccaccatccagcaacaggatcaagaactggctggcctgaagcagcaggccaaagagaagcaggcccagctagcacagaccctccaacagcaagaacaggcctcccagngcctccgccaccaggtggagcagctaagcagtagcctgaagcagaaggagcagcagttgaaggaggtagcggagaagcaggaggcaactaggcaggaccatgcccagcaactggccactgctgcagaggagcgagaggcctccttaagggagcgggatgcggctctcaagcagctggaggcactggagaaggagaaggctgccaagctggagattctgcagcagcaacttcaggtggctaatgaagcccgggacagtgcccagacctcagtgacacaggcccagcgggagaaggcagagctgagccggaaggtggaggaactccaggcctgtgttgagacagcccgccaggaacagcatgaggcccaggcccaggttgcagagctagagttgcagctgcggtctgagcagcaaaaagcaactgagaaagaaagggtggcccaggagaaggaccagctccaggagcagctccaggccctcaaagagtccttgaaggtcaccaagggcagccttgaagaggagaagcgcagggctgcagatgccctggaagagcagcagcgttgtatctctgagctgaaggcagagacccgaagcctggtggagcagcataagcgggaacgaaaggagctggaagaagagagggctgggcgcaaggggctggaggctcgattacagcagcttggggaggcccatcaggctgagactgaagtcctgcggcgggagctggcagaggccatggctgcccagcacacagctgagagtgagtgtgagcagctcgtcaaagaagtagctgcctggcgtgagcggtatgaggatagccagcaagaggaggcacagtatggcgccatgttccaggaacagctgatgactttgaaggaggaatgtgagaaggcccgccaggagctgcaggaggcaaaggagaaggtggcaggcatagaatcccacagcgagctccagataagccggcagcagaacgaactagctgagctccatgccaacctggccagagcactccagcaggtccaagagaaggaagtcagggcccagaagcttgcagatgacctctccactctgcaggaaaagatggctgccaccagcaaagaggtggcccgcttggagaccttggtgcgcaaggcaggtgagcagcaggaaacagcctcccgggagttagtcaaggagcctgcgagggcaggagacagacagcccgagtggctggaagagcaacagggacgccagttctgcagcacacaggcagcgctgcaggctatggagcgggaggcagagcagatgggcaatgagctggaacggctgcgggccgcgctgatggagagccaggggcagcagcaggaggagcgtgggcagcaggaaagggaggtggcgcggctgacccaggagcggggccgtgcccaggctgaccttgccctggagaaggcggccagagcagagcttgagatgcggctgcagaacgccctcaacgagcagcgtgtggagttcgctaccctgcaagaggcactggctcatgccctgacggaaaaggaaggcaaggaccaggagttggccaagcttcgtggtctggaggcagcccagataaaagagctggaggaacttcggcaaaccgtgaagcaactgaaggaacagctggctaagaaagaaaaggagcacgcatctggctcaggagcccaatctgaggctgctggcaggacagagccaacaggccccaagctggaggcactgcgggcagaggtgagcaagctggaacagcaatgccagaagcagcaggagcaggctgacagcctggaacgcagcctcgaggctgagcgggcctcccgggctgagcgggacagtgctctggagactctgcagggccagttagaggagaaggcccaggagctagggcacagtcagagtgccttagcctcggcccaacgggagttggctgccttccgcaccaaggtacaagaccacagcaaggctgaagatgagtggaaggcccaggtggcccggggccggcaagaggctgagaggaaaaatagcctcatcagcagcttggaggaggaggtgtccatcctgaatcgccaggtcctggagaaggagggggagagcaaggagttgaagcggctggtgatggccgagtcagagaagagccagaagctggaggagaggctgcgcctgctgcaggcagagacagccagcaacagtgccagagctgcagaacgcagctctgctctgcgggaggagctcgagcacaccagcacacaggccctggtgagtgagctgctgccagctaagcacctctgccagcagctgcaggccgagcaggccgctgccgagaaacgccaccgtgaggagctggagcagagcaagcaggccgctgggggactgcgggcagagctgctgcgggcccagcgggagcttggggagctgattcctctgcggcagaaggtggcagagcaggagcgaacagctcagcagctgcgggcagagaaggccagctatgcagagcagctgagcatgctgaagaaggcgcatggcctgctggcagaggagaaccgggggctgggtgagcgggccaaccttggccggcagtttctggaagtggagttggaccaggcccgggagaagtatgtccaagagttggcagccgtacgtgctgatgctgagacccgtctggctgaggtgcagcgagaagcacagagcactgcccgggagctggaggtgatgactgccaagtatgagggtgccaaggtcaaggtcctggaggagaggcagcggttccaggaagagaggcagaaactcactgcccaggtggagcagctagaggtatttcagagagagcaaactaagcaggtggaagaactgagtaagaaactggctgactctgaccaagccagcaaggtgcagcagcagaagctgaaggtggggcagctgggggaatgggtctggcctctggacaagggagggaagctattctctaagctctggggccgtggggggttggtttataagtggttcctgctaatctataaaatcagctatgccactggcattgttggctacatggctgtcatgtttaccctctttggtcttaacttattattcaagatcaaaccagaagatgccatggactttggcatctcccttctcttctatggcctctactatggagttctggaacgggactttgcagaaatgtgtgcagactacatggcatctaccatagggttctacagcgagtcgggcatgcctaccaaacatctttcagacagtgtgtgtgctgtgtgtgggcagcagatctttgtggacgtcagtgaagaggggatcattgagaacaccggtgctcagcttccacgagttctgcatccgtggctggtgcatcgtgggaaagaagcaaacgtgtccctactgcaaagagaaggtagacctcaagaggatgttcagcaatccgtatcctttattggggtcgttgttgggagtgggctgtgggaagaaagtactggccagtgtgacctgcatttgggtcctcctggggccctcacttctgcccccaaccagaacatgtcaaaccatgaacaacaaaaagattatgaaggtgatgatgaggataaagaggatgatgacagacaccatggcatcatgaacccttactga

SEQ ID NO: 119942 - DNA, 1551 bp, Homo sapiens
cagccatttggtgtgtctcagcaaatcccgctgagttccgaggccgcctaggtatgcaatcctgctgagagttgttcccaggtcagagaatggagagagccctgtgcatgatgggatatccctgcctagatctttcagtgagtctctacctcagctactcttaggatcagggggagaaccatggaaaggcccggtgtcagacatccggaaagaagatgggatgaatgttttacctctgaagtacatcccaaatgtgggagttaacttcagctttgctggggtctatttggccagtgaaactctgcctgggttcattcgcacatccggaagccacttcacggggagccgtcgcaaccggaaccacacacttggcatcggcggttgagccaaatgggggactcgtggtgcaagcaacgctcccccacgtgttagcgtgcgtgagattcggttggcggaattttactaggtgcgtgttggtagagtggggctgaggttttcttgctcctgtggatgtataggaagtcaaaggtcctgcccagccctgcggtcccctgagtcaactctgtttcggagacataacgatttggattgctaacaagtcaagaaatgttcaagtccttggatgtagggaaaagaaagagagatcagactgtcactgtgtctatgtcgaaagggaagacataagagactctattttgaaaaggacctgtactttaaacaattgctttgctgagatgttgttcatttgtagctttgccccagccactttgccccagccgctttgacccaacttggagcacacaaaaacctatgttgtataaaatcaaggtttaagggatctagggctgtgcaggacgtgccttgttaaccaaatgtttacaagcagtatactttgtaaaagtcattgccattctctagtctcaataaaccagggacacaatgcaccgtggaaagccgcagggacctctgcccttgaaagcagggtattgtccaaagtttctccccatgcgatagtctgaaatatggcctcgtgggatgagaaagacctgactgtcccccagcctgacacccgtaaagcgtctgtgctgaggtgtattagtcaaagaggaaagcctcttgcagttgacatggaggaaggccactgtctcctgcttgcccctgggaactgaatgtctcggtgtaaaacccgatcgtacatttgttcaactctgagctcggagaaaagctgccctgtggagggaggcgagacatgttggcagtaatgctgccttgttattctttactccgctgagatgtttgggtggagagagacataaatctggcctacgtgcacgtccaggcatagtaccttcccttgaacttaattatgatatagattcttttgctcacatgttttttgttgacctccttattatcaccctgctctcctagtatattcctttttgctgaaataatgaaaatcataatcaataaaaactgagggaactcagaggccggtgcaggtccttggtgtgctgagtgccggtcccctggacccactgttgtttccct

SEQ ID NO: 119943 - DNA, 2777 bp, Homo sapiens
atattaggaaaaaatgtccctggggatgtgaacagccctgcgatattgagagtagtatcatcctctccccttgcatactgggaaaaatatcacagattatatttggatcaatatcaccggctgtgtgtacacctactgcgatattgaacgtagtatcatgctctctccctccctggagattaggagcaatatcacagctcgtttacgacccaaaacggggacacaaatgcccctgagagtgcagcgttatactgggatagacgaggatggtcacgtggtggagaggcgtgtttttggtgaagaaaggcggagagtcctccaagcaggaactaagtggctagaggaacatgcactagctgattatcaaaacccccaagaatatggaaggacccagttgccaggaaccgacccccagttggacccacatgaaagagaggagatgcaaaggctaaaccgagacagggaagctctcttggaaggattaatgaggggagctcagaaggccacaaacgttaacaagctctctgaggtcattcagggaaaagaagaaagtccagcacaattctacgagagactgtgtgaggcctatcgtatgtatactccctttgatcccgatagccctgaaaatcagcacatgattcacatggctttagtccgtcaaagcgcagaagacatgagaagaaaactgcagaaacaggctgggcttgcagggatgaatccatcacaattactagaaatagctagccaggtgttcataaacagggatgcagtaagccctaaggaaaatggcaaagagaatggaggatggcccccctgtttgagggccttggcagcaactgccctgctagtacaagaagcaaataagctgactcttgggcaaaacctgaacataaaggcctcccgtgctgtggtgactttaatgaatactaaaggacatcattggctaacggatgccagactcaccaagtaccaaactttgctctgtgaaaatccccgtataaccactgaagtttgtaacaccctacaccctgccaccttgctcccggtatcagagagccctgtcgagcctgattgtgtagaagtgttggactcagttgactctagcagacctgacctccgggaccaggcttgggcatcagtagactgggaactatacgtggatgggagcagcttcttcaacccccaaggagagagaggtgcagggtatgcagtggtaaccctggacactgttgttgaagccagatcgttgccccaggccacttcagcccagaaagctgaactcgttgctttcattcgggccttagaactcagtgaggaagaaaaggactttctccaggtagagggaaggacaagtgatggaggaaggatggattcggttaccggatgggagagtactgtgccacagctgctaggagctgcagttgtactggctgtgcaagaaaccacccatcgacatcaggagtcactggaaaagttgttaggccggtatttctacatctcgcctttgtcagctcttgccaaaacggtgaggcagcggtgtgttacctgccgacagcatgatgcgaggcaaggtccagccgttctgcctggcataggagcttatggagcagccccctttgaaggtctccaggtggacttcacagagatgccaaagtgtggaggtaacaagtatgtactagttcttgtgtgtacctactctgggtgggtggaggcttatccaacgctaactgagaaagctcgtgaagtaacccgtgtgcttcttcgagacctgattcctagatttcgaccgcccttacggatcggctcagacaaggggcctgcgtttttggctgccttgttacagaagacagcaaaggtgtccaagacacagagagccacggaatctcacaggtgtctgagaattcctcctcctgggactctcagaggatccagaactgcagccggtcctcgctttgctctccctgtccctgtccatgtatctggtcacggtgctgaggaacctgctcagcatcctggctgtcagctctgactcccacctccacacccccatgtacttcttcctctccaacctgtgctgggctgacatcggttacacctcggccacggttcccaagatgattgtggacacgcagtcgcatggcagagtcatctctcatgctggctgcctgacacagatgtctttcttggtcctttttgcatgtatagaagacatgctcctgactgtgatggcctatgactgctttgtagccatctgttgccctctgcactacccagtcatcgtgaatcctcacctctgtgtcttcttcgttttggtgtcctttttccttagcctgttggattcccagctgcacagttggattgtgttacaattcaccatcatcaagaatgtggaaatctctaattttgtctgtgacccctctcaacttctcaaatttgcctgttctgacagcatcatcaatagcatattcatatatttccataaggatccagaactgcagccggtcgtcgctgggctgttcctgtccatgtgcctggtcacggtgctggggaacctgctcatcatcctggccgtcagccctgactcccacctccccacccccatgtacttcttcctctccaacctgtccttgcctgacatcggtttcacctccaccacggtccccaagatgagcgtggacatccagtctcacagcagagtcatctcctatgcaggctgcctgactcaaatgtctctctttgccatttttggaggcatggaaaaaagacatgctcctgag

SEQ ID NO: 119944 - DNA, 3804 bp, Homo sapiens
ctaatatccagagcgaaagaggatgatatgactgtcaatatcgcagagggtgtacacccctcctgtaatattgttctgaataccctttccggaactctgaggccgggaggcggcatgcagtttccgtgtgatccccaataccgttgccgtcttctgtagcaagtcagccacaaacgcaggcccgttatctgagccgatccggaagggcagttccaatctaggaatcagatctcgaagaagcacacgggttacttcacgagctttctcagctcttgttggataggtctccacccacccagagtaggtacgcccaagaactggtaaatacttattccctccacactctggcatctctgtgaagtctacctggagatcttcaaaggcggctgctccataagcttgtatgccgggcggaacggctggaccttgcctcgcatgatgctgtcggcagctgacacaacgctgcctcaccgttttggcaagggctgactccggatcttcccactgaaaggcaaacagcttctggctctcaggggctgatctgataggaaagaaagcgtctttcaggtccaagcaggtgaaccagctgtcctcagctggcagcaaccccaacaatgtggacgggctaggtactgttggatggaaagtcagggtagcttgactaagcaagcgcaaatcctgtcccggcctgtagtccttggtccatagctcttcccttgcttctttggggggaccgctctgattgctgcagctaaccaacaggtcggcgtttcgccgggcctgacgttcattctctttgcgcttttcctcgcggcttactgcgtccccgtttaccaacacctgcttagcacaggcctcacacagtctctggtggaattgtgctggactttcttcttttccctgaatgacctcagagaccttgttaacgtttgtggccttctgagctcccctcttgaatccttccaagagagcttccctgtctcggtttagcctttgcatatcctctctttcatgtgggtccaactggggctgggttcctggtaactgggtccttccatactcttgggggttttgataatcagctggtgcatgttcctctagccacttagttgctgcgtggagccctctccgcctttcgcctttcatctctcctgtgacacccatcctaatacccagcgggtagagtatgacatgactgccaacatagcgatcaatgtacagccacccggtgatattgctcctaatattcacggaagaagcgtacgatattaatcccaatatcgcagggagtgtacacctcttctgtgatattgttccgggtggctgtacattcattgctatgttgggagtaatatcatacgcttcttccgtggatattatactcggatcaatatcactggctgggtgtacacctactgcgatattgaacgtaatatcatgctctctccctccctggacattaggagcaatatcacagctcgtttgagacgcaaaacggggacacaaatgcccctgagagagcagcggtatactgggatagatgaggatggtcacgtggtggagaggcgtgcttttggctaccagcccttcacctgtgtcgaccttctcaactggaaaaacaatacaccgccctataccgaaaagccacaagccctaattgattttctccaagctgttatccagacccacagccccaccttggctgattggcaccagttgctcgtgttcctctttaacagcgaagaaaggcggagagtcctccaagcagcaactaagtggctagaggaacatgcaccagctgattatcaaaacccccaagagcatggaaggacccagttgccaggaacagacccccatttggacccacatgaaagagaggatatgcaaaggctaaaccgagacagggaagctctcttggaaggattaatgaggggagctcagaaggccacaaacgttagcaagctctctgaggtcattcagggaaaagaagaaagtccagcacaattcgacgagagactgtgtgaggcctatcgtatgtatactccctttgatcccgatagccctgaaaatcagcgcatgattcacatggctttagtccgtcaaagcgcagaagacatgagaagaaaactgcagaaacaggctgggcttgcagggatgaatccatcacaattactagaaatagctagccagatgtttgtaaacagggatgcagtaagccctaaggaaaacggcaaagagaatggagatggggtttctaaaggatggcccccctgtttgagggccttggcagcaactgccctgctagtacaagaagcaaataagctgactcttgggcaaaacctgaacataaaggcctcccgtgctgtggtgactttaatgaatactaaaggacatcattggctaacggatgccagactcatcaagtaccaaactttgctctgtgagaatccccgtataaccattgaagtttgtaacaccctacaccccgcctccttgctcccggtatcagagagcactgtcgagcctgattgtgtagaagtgttggattcagttgactctagcagacctgacctccgggaccaagcttgggcatcaggagactggaaactatacgtgtatgggagcagcttcttcaacccccaaggaaagagagaggtgcaggcccttgccaaaacggtgaggcagcggtgtgttacctgccgacagcatgatgcgaggcaaggtccagccgttccacacggcatacgagcttatggagcagccccctttgaaggtctccaggtggacttcaaagagatgccaaagtgtggaggtaacaagtatgtactatttcttgggcgtacctactctgggtgggtggaggcctatccaacacgaactgagaaagctcgtgaagtaacccctgtgcttcttcgggatctgattcctaaatttcgaccgcccttatggatcggctcaaacaacgggcctgcatttttggctgccttggtacagaaaacggcaaagatattaggaaaaaatgtcactggggatgtgaacagccctgcgatattgagagtagtatcatcctctccccccttgtatattgggaacaacatcacagaggatccagaactgcagccagtcctcgctttgctgtccctgtccctgtccatgtatctggtcacggtgctgaggaacttgctgagcatcctggctgtccgctctgagtccccgctccacacaaccatgtacttcttcctctccatcctgtgctgggctgacatcggtttcacctcagccacagttcccaagatgattgtggacatgcagtggtatagcaaagtcatctctcatgcgggctgcctgacacagatgtctttcttggtcctttttgcatgtatagaaggcatgctcctgactgtgatggcctatgactgctttgtaggcatctgtcgccctctgcactacccagtcatcgtgaatcctcatctctgtgtcttctttgttttggtgtcctttttccttagcctgttggattcccagctgcacagttggattgtgttacaattcaccatcatcaagaatgtggaaatctctaattttgtctgtgacccctctcaacttctcaaacttgcctgttctgacagcgtcatcaatagcatcttcatatattttggtagtactatgtttggttttcttcccatttcagggatccttttgtcttactataaaatcgtcccctccattctaaggatttcatcgtcagatgggaagtataaagccttctccacctatggctctcacctagcagttttttgctga

SEQ ID NO: 119945 - DNA, 3357 bp, Homo sapiens
gggcggcggagagggagcagccagttggtgtgtctcagaaaatcccactgagttccgaggcctcctagatgtggaatcctgctgagagttgttcccaggtcagagaatggagagagcctgtgcatgatgggacatccccgcctagatctttcagtgagtctctacctcagctactcttaggatcagggggagaaccatggtgtcagacatccggaaagaagacgggatgaatgttttacctctgaagtacatcccaaatgtgggagttaacttcagctttgctggggtctatttgggcagtgaaactcttgctgggtcctttcgacatccggaatgcactttacgggggggccgcggcacctgaaccacacacttggcatcggcggttgagccaaatggggactcgtggtgcaagcaacgctccccacgtgttagcgtgcattatattcggatcaatatcaccggctgggtgtgcacctgctgcgatattgaacgtaatatcatgctctctccctccctgaacattaggaacaatatcacagctcgtttacgacccaaaacggggacacaaatgcccctgagagagcagcggtatactgggatagatgaaaatgctcatgtagtggagagacgtgtttttgggtaccagcccttcacctgcgtcgaccttctcaactggaaaaacaatacatcgccctataccgaaaagccacaagccctaattgatttgctccaaactgttatccagacccacaaccacacctggaccgattggcaccagttgctcattttcctctttaacagtgaagaaaggcagagagtcctccaagcagcaactaagtggctagaggaacatgcaccagctgattatcaaaaccccgaacagtatggaaggacccagttgccaggaaccgacccccagttggacccacatgaaagagaggagatgcaaaggctaaaccgagacagggaagctctcttggaaggattaatgaggggagctcagaaggccacaaacgttaacaagctctctgaggtcattcagggaaaagaagaaagtccagcacaattctacgagagactgtatgaggcctatcatatgtatactccctttgatcccgatagccctgaaaatcagcgcatgattcacatggctttagtccatcaaagtgcagaagacatgagaagaaaactgcagaaacagactgggcttgcagggaagaatccatcccaattactagaaatagctagccaggtgtttgtaaacaggtatgcagtaagccgtaaggaaaacggcaaagagaatggaggtcaggcccggccacacgccgacctgtttgtcagctgcagcaatcagaggggcccccgcaaagaggcaagggaaagggggccctgggaaagaaactcagcttggctgtcagagtttgcagcgttgatgaccttctgctgggacaccccacggcagtcgggtgtgccaagggaacagatgccctacattggcacctggaggactgtgggtgtaaggtgtccaagaagaaagctcagatctgccgacagcagacggagtttctaaaggatggcccccctgttggagggccttggcagcaactgccctgctagtacaagaagcaaataagctgactcttgggcgaaacctgaacataaaggcctcccgtgctgtggtgatgaatactaaaggacgtcattggctaacgaatgccaggctcaccaagtaccaaactttggtctgtgaaaatccccgtataaccattgaagtttgtaacaccctacaccccgccaccttgctgccggtatcagggagccctgtcgagcctgattgtgtagaagtgttggactcaattgactctagcagacctgagctccgggaccagacttgggcatcagtagactgggagccacacgtggatgggagcagcttcttcaacccccaaggagagagaggtgcagggtatgcagtgataactctggacactgttgttgaaaccaggtcgttgccccaggccacttcagcccagaaagctgaacttaatgctttcatttgggccttagaactcagtgaggaggatccagaactgcagccggccctcgctttgctgtccctgtccctgtccatgtatctggtcacggtgctgaggaacctgttcagcatcctggctgtcagctctgactgccccctccacacccccatgtacttcttcctctccaacctgtgctggcctgacatcggtttcacctcggccatggttcccaagatgattgtggacacgcagtcgcatagcagagtcatctctcatgcgggctgcctgacacagatgtctttcctgctccttgttgcatgtatagaaggcatgctcctgactgtgatggcctatgactgctttgtagccatctgtcgccctctgcactacccagtcatcgtgaatcctcacctctgtgtcttcttcgttttggtgtcctttttccttagcctgttggattcccagctgcacagttggattgtgttacaattaaccatcatcaagaatgtggaaatctctaatttggtctgtgacccctctcaacttctcaaacttgcctgttctgacaggggcattcactaaccatattcatatatttcgatagtactatgtttggttttcttcccatttcagggatctttttgtcttactataaaattgtcccctccattctaaggatttcatcgtcagatgggaagtataaagccttctccacctgtggctgtcatctagcagttgtttgctggttttatggaacaggcattggcatgtacctgacttcagctggtgtcaccaccccccaggaatggtgtggtggcatcagtgatgtacgctgtggtcacccccatgctgaaccttttcatctacagcctgagaaacagggacatacaaagtgccctgtggaggctgctcagcagaacagtcgaatctcatgatctgttatctcaagatctgctccatcctttttcttgtgtgggtgagaaaggtcaaccacattaaatctctacttctgcaaatcctgcctcttagtcacattatttttgtgggcttgatgggcttttattcctttccgcatttcctttgtgaatattgctttcttcgttatgcctttaactgggaatggggtgaggattctggggatcccttgtttagcagaaacctcatgactgaatcccctatacccagggggcctcttttagtttttgagcaataaccctgtcatccaggtggaatcacaaccatcttttcatatacacgaagtcctcacttcgttttggaattccctgaaaactgactttatggaaacaatgtacaggag

SEQ ID NO: 119946 - DNA, 1494 bp, Homo sapiens
atgaaatctgggcaccctgaaaaagaacaggataacagcgatgttcaggaaacaagggagataaccataaggggcctgctgtgcactgctctgatgaggcattccactggggcaattgcctacctgggagtgctctcaggatctgcttcactcaagctggctggagtccccctcagatgctgtgagggtgacaaagatgcagggcacccactggaaacacagacggcactctgcgaaagaggaaggggcgccaggagcttggttggcaacaccatcatgacatcacaacctgttcccaatgagaccatcatagtgctcccatcaaatgtcatcaacttctcccaagcagagaaacccgaacccaccaaccaggggcaggatagcctgaagaaacatctacacgcagaaatcaaagttattggggtaaatctaattcagaacgtgttggagaggggttgggggaagtgccaagagatgatatatgtcttgggactggacatctgtcgacccttttttgtgagtagagtttctgaggagggcaggatggggcaaagaggggaggaagatgccaatagcttagacttcccacctgccagcttgctatgtttgatctgccaggagcaaggagtcaacggtgaatcttgttctcctgtcggaatgtatcacagagaaattgtgcctgtttatgaggttctttcggtgataactggccttcaaattcaggttttcagtggcaaggaagctgacagtgttataaagcggtctattggttggggtccattctttaagcccagaaccaaagacaaaaaccacatgattatctcaatagatgcagaaaaggcctttgacaaaattcaacaacacttcatgctaaaaactctcagtaaattaggtattgatgggacgtatctcaaaataataagagctatctatgacaaacccacagccaatatcatactgaatgggcaaaaactggaagcattccctttgaaaactggcacaagacaaggatgccccctctcaccactcctattcaacatagtgttggaagttctggccagggcaattaggcaggagaaggaaataaagggtattcaattaggaaaagaggaagtcaaattgtccctgtttgcagatgacatgattgtatatctagaaaaccccattgtctcagaccaaaatctccttaagctgatcagcaacttcagcaaagtctcaggatacaaaatcaatgtacaaaaatcacaagcattcttatacaccaataacagacaaacagagagccaaatcatgagtgaactcccattcacaattgcttcaaagagaataaaatacctaggaatccaacttacaagggatgtgaaggacctcttcaaggagaactacaaaccactgctcaatgaaataaaagaggatacaaacaaatggaagaacattccatgctcatgggtaggaagaatcaatatcgtgaaaatggccatactgcctaaataa

SEQ ID NO: 119947 - DNA, 458 bp, Homo sapiens
  misc_feature (1)...(458): n = a,t,c or g
cggaattcctcggtcgaaaangngaacgccctagcgccgctgggcctgcaggtctctgtcgagcagcggacgccggtctctgttccgcaggatgagggtaaaactgattattatgctcggaaacgcttggtgatacaagataaaaataaatacaacacacccaaatacaggatgatagttcgtgtgacaaacagagatatcatttgtcagattgcttatgcccgtatagagggggatatgatagtctgcgcagcgtatgcacacgaactgccaaaatatggtgtgaaggttggcctgacaaattatgctgcagcatattgtactggcctgctgctggcccgcaggcttctcaataggtttggcatggacaagatctatgaaggccaagtggaggtgactggtgatgaatacaatgtggaaagcattgatggtcagccaggtgccttcacctgctattt

SEQ ID NO: 119948 - DNA, 1243 bp, Homo sapiens
atgggtggcaacgcggctgataaatttcgggctggtgtagagttagcccttcaatctggaaacaaggtgtgcgtttgttcccctaggacaacaatctctggggatgcagttgctcccagatcagtcttaccaggatgtagacacattccaggggaaatttcgcagcactctcactgctgggccggcaggtctctgtcgagccgcaaacgcgggtctctgttccgcagaatggggtttattaaagttgttaagaataaagcctactttaagagataccaagtgaaatttagaagacgcccgaaagggtaaaacgtgattattatgctcggaaacgcgttggtgatacaagataaaaataaatacaacacacccaaataccaggatgatagttctgtgtgacaaacagagatattcatttgtcagatgctttatgcccccgtatagagggggatatgatagtctgcgcagcgtattgcacaccgaacttgccaaaaatatgggtgtgaagggttggcctgacaaattatgctgcagcatatttgtactggcctgctgctgggcccgcaggcttctcaataggtttggcatggacaagatctatgaaggccaagttggagttgactggtgatgaatacaatgtggaaagcattgatggtcagccaggtgccttcacctgctatttggatgcaggccttgccagaaactaccactggcaataaagtttttggtgcccctgaagggaagctgtggatgggaggcttgtctatccctcacagtaccaaaccgattccctgggttatgattctgaaaagcaaggaatttaatgccagaagttacatccggaaagcacatcatggggccaaaatgtttgcaaaattacatggcgctacttaatggaaagaagatggaagatgcttacaagaaaacagttctcttcaatacataaaagaacagcgtaacttccagacatgatgggaggagatgtataaggaaagctcatgctgctatacgagaggaatccagttctatggaaaagaaggcccaaggaaagaagtttaaaaagaagaggtggaaccgtccccaaaatgtcccttgctcagaagaaggatcgggtagctcaaaagaaggcaagcttcctccagagctccaggagcgggctgctggagagcttaaccccagccattttcccatgattttttcagatatagataataaacttatgaacagcaaaaaaaaaaaaaaa

SEQ ID NO: 119949 - DNA, 1194 bp, Homo sapiens
atgactatctcaatagatgcagaaaaggcctttgataaaattcaacagcgcttcatgctaaaaactctcaataaactaggtattgatgggacctatctcaaaataataagagctatttatgacaaacccacagccaatatcatactgaatgggcaaaaactggaagcattccctttgaaaactggcacaagacagggatgccctctctcaccactcctattcaacacaatgttagaagttctggccagggcaatcagacaagagaaagaaataaagggtattcgattaggaaaagaggaagtcaaattgtccctgtttgcagaagacatgactgtatgtttagaaaaccccatcgtctcagcccaaaatctccttaagctgataagcaacttcagcaaagtctcaggatacaaaatcaatgtacaaaaatcacaagcattcctatacaccaagaacaggcaaacggagagccaaatcatgagtgaactcccattcacaattgcttcaaagagaataaaatacctaggaatccaacttacaagggatgtgaaggacctcttcaaggagaactacaaaccattgctcaacaaaataaaagaagacacaaacaaatggaagaacattccatgttcatggataggaagaatcaatattgtgaaaatggccatattgcccaaggtaatttatagattcaatgccatccccatcaagctaccaatgactttcttcacagaattggtagaaacttctttaaagttcatatggaaccaaaaaagagcctgcattgccaagacaatcctaaaccaaaagaaaaaggctgcaggcatcacgctacctgacttgaaactatactataaggctacaattgaataccaggccaccttcagcttgaataaccaagttgaagagcccacgctcatccttgcacaacgcacaaacttccagtggctccaccccattcccccagtgtgcatgtgggcattattcagaaagaatcagtcagaaatgtgtgggcaaacaggggcagttctccctctaggtcgtgggtttcatctgggaccagcagtctggtctttcagccttcaggctgttttaggcttgaagggactcactattcctactgaaatcaagaaattgatttctatttcagcttctcgaacaacctgcaaagaacaaccagtacaacccttttga

SEQ ID NO: 119950 - DNA, 418 bp, Homo sapiens
ccaggatcgaccccagctgaccaagaagttctgtgaggccagctggaggtttctcttctacctgtcctccttcgtgggcggcctctcggtcctgtaccacgagtcatggctgtgggcaccagtaatgtgctgggacaggtacccaaaccagactctgaagccatccctgtactggtggtacctcttggagctgggtttctacctctcactgctaatcaggctgccctttgatgtcaagcgcaagggtgggggaccttccagcatcaagcctcgtccccactatgacccaccgtctactgcaggatttcaaggagcaggtgatacaccacttcgtggcggtcatcctgatgaccttctcctacagtgccaacctgctgcgcattggctctctggtgctgctgttacacgattcctctgg

SEQ ID NO: 119951 - DNA, 1065 bp, Homo sapiens
atgacaggagcaataggaccatatggtgaacaagaggatgattgggccgatgacaatgaatgccacgctcagcctgacctctgtgtcaacggccgctgtgtcaacaccgcgggcagcttccggtgcgactgtgatgagggattccagcccagccccacccttaccgagtgccacgacatccggcaggggccctgctttgccgaggtgctgcagaccatgtgccggtctctgtccagcagcagtgaggctgtcaccagggccgagtgctgctgtgggggtggccggggctgggggccccgctgcgagctctgtcccctgcccggcacctctgcctacaggaagctgtgcccccatggctcaggctacactgctgagggccgagggcccctgccctcccacccctctaatctcaccttcgcagaagaagccatccccggcaaagccctggcggcaggtgcagcggtaggagccagggacattgagacagtcacctcttgggctgcaccggtgctcctgggagacgcattcatccaggtctgcaggagatggagcccagaccccccaccccatggttgttttgagaagcaaacggggaaaacagagtccggtcaccggggcccagggtcggacccctggtacgaaccgcgggtgaatatccgggggaccaggcccacccggggggtatgttcgcgcgtgacggaccagtcccccgggaatgctcgggcacaccgaaagaggggacgggccccaaccggggagggcaagacggggaaaacccggaggaataggcccagtgaaaccgccggcaagcaggggaaaggggaccgggcccgggaacgatttcaaggagcaggtgatacaccacttcgtaggcggtcaatcctgatgaccttctcctacagtgccaacctgctgcagcattggctctctggtgctgctgttacacgattcctctggatgatcatccaggaaggcgtgccgaccttcgagagcatcaaggatgccgtggccgagcccgtcgtctacatgatcgaccgctacgtggtggtgttgttgcttcgataa

SEQ ID NO: 119952 - DNA, 249 bp, Homo sapiens
atgcacccctttgtgcagcccacccatggacaggagaagacacccctggagcatatctttagggccatcctcatcaagaaaaccgacaggagagctgtaagcatcaggctaggtaagaaagaacacaggactcgtggccagcaggcctgtgttctaggctgcatgaggctactggaaaatgaggctgaagaagttattaatgacttctcagttctgaagtttgaagtgggtagtgggagtgtgtggtga

SEQ ID NO: 119953 - DNA, 642 bp, Homo sapiens
ctcagggagcccgcgaccgcgccttctcctccgtcggtcccatacgctgctgaaatgggttgcggattgaacaagttagagaaacgtgatgaaaaacggcctgggaatatttattcaactttgaagaggcctcaggtggaaaccaagatagatgtgtcctatgaataccgcttcctggagttcacgactctgagtgctgcggagctccctgggtcctcagcagtgaggctggcctccctgcgtgacctgcccgcccagctcctggagctgtaccagcagggcttctcgctggcggccctgcaccccttcgtgcagcccacccatgagcgggagaagacgcccctggagcacatctttagagccatcctgatcaagaaaaccgacagatctcagaaaactgatcttcacaatgaaggctacatcttggaattagattgctgttcctccttagaccacccgacagaccagaaactcatcccagagttcattaagaagatccaggaggctgcaagccagggcctgaaattcgttggtgttatacctcagaaaatcaagaagaaggaatcgaagtttcagtggcgattctccagagaagaaatgcacaacaggcagatgaggaaatcaaaaggtaaactcagtgcc

SEQ ID NO: 119954 - DNA, 1064 bp, Homo sapiens
ctgcttctgcaatggccacgctgatcaatgcatacctgttcatggcttcagacctgtcaaggccccaggaacattccacatggtccatgggaagtgtatgtgtaagcacaacacagcaggcagccactgccagcactgtgccccgttatacaatgaccggccatgggaggcagctgatggcaaaacgggggctcccaacgagtgcagaacctgcaagtgtaatgggcatgctgatacctgtcacttcgacgttaatgtgtgggaggcatcagggaatcgtagtggtggtgtctgtgatgactgtcagcacaacacagaaggacagtattgccagaggtgcaagccaggcttctatcgtgacctgcggagacccttctcagctccagatgcttgcaaaccgtgttcctgccatccagtaggatcagctgtccttcctgccaactcagtgaccttctgcgaccccagcaatggtgactgcccttgcaagcctggggtggcagggcgacgttgtgacaggtgcatggtgggatactggggcttcggagactatggctgtcgaccatgtgactgtgcggggagctgtgaccctatcaccggagactgcatcagcagccacacagacatagactggtatcatgaagtttcctgacttccgtcccgtgcacaataagagcgaaccagcctgggagtgggaggatgcgcaggggttttctcccacttcttggatttttaaaccacagtctggagtgatagctactgtagaaaggaaatagactttgtatgaactctttaagttgaaaagtaaaaaatatatgtggtttggatgtgtgctttaattcagctttagaaattaataccactacccgtgaattatatggcctgacaatatgaattaggtgtactgtactgaagaacagtactccacaaacatgggtggtaacaagagttccatcccaggaggccaaacggtgcaacagaagggtaggttagatgctattaagaaggcacttaatagtacatcatgtaagatggcaactgtattaaagaaaaatccggaaaaaaaa

SEQ ID NO: 119955 - DNA, 558 bp, Homo sapiens
atggtgaagccctgtctctataatacacgaattagccaggcgtgttggtgtgcacctgcaagaataattaaaaagttcttttatgtcaacccaaagaaaggcagttttgacctttttgtcctcgacacattgtttgctcgaagtaagaaatgttcacgtggaatagctgccattaatatgggtgacctcaagagggacagttttttcaaagcaaaagacagaggagaggtgatggggaaggaggagagaagagagagagggagtaggggaggagcaggggaaggggcagaagaagaagaagagactgttgcagataaaaagagacttgaggtcaagcgagcgtgttcctgccatccagtaggatcagctgtccttcctgccaactcagtgaccttctgcgaccccagcaatggtgactgcccttgcaagcctggggtggcagggcgacgttgtgacaggtgcatggtgggatactggggcttcggagactatggctgtcgaccatgtgactgtgcggggagctgtgaccctatcaccggagactgcatcagcaggtga

SEQ ID NO: 119956 - DNA, 597 bp, Homo sapiens
attcccgggtcgacgatttcgtgcggctggcgctagggaactgcagggtctagggtgttgtcggagtggcagttggtccgaatttctcccgaagcccgcggaggagcggcgcgccgcgattcaccagcctggtcccttctgcggagagcgatgccgcttcccgacaccatgttctgcgctcagcagatccacattcccccggagctgccggacatcctgaagcaattcaccaaggctgccatccgcacccagccggccgacgtgctgcggtggtccgcgggctatttttcagctctgtcgagaggagatccacttcctgtaaaggacagaatggaaatgcccacggcaacccagaaaacagacacaggcctgactcaaggactcctgaaagttttgcacaggcagtgtcaccacaagcggtatgtggaattaacagatcttgagcacaaaaggaagaacctgtggcctgccgaaggaaaaattcaaagcgctcttacaactggatccttgtgaaaacaaaatcaagtggataaactttttagcgcttggatgcagcatgcttggtgggtccttgaacactgcgctgaagcacctgtg

SEQ ID NO: 119957 - DNA, 4612 bp, Homo sapiens
gtgtcgctcgctttctgtcagcctctctccctctccctctcccctctccttcctctcgcttcctctctcgcacctgagcgtacgcacctgcccgggcccggctccctcctcctctcccctccctctttccccgcccggccgcgggagcctcgtggctgcgtcaccgccgcccccccagacaagatggacaccgcggaggaagacatatgtagagtgtgtcggtcagaaggaacacctgagaaaccgctttatcatccttgtgtatgtactggcagtattaagtttatccatcaagaatgcttagttcaatggctgaaacacagtcgaaaagaatactgtgaattatgcaagcacagatttgcttttacaccaatttattctccagatatgccttcacggcttccaattcaagacatatttgctggactggttacaagtattggcactgcaatacgatattggtttcattatacacttgtggcctttgcacggtgggaggttgtccttcttccagcatgccgcatctacaagtgcttgtttcttggctccgtgagctcactactgacgctgccattagatatgctgtcacggaaaaatttgttggcagattgtttgcaggggtgtttttgtggtgacgtgcacactgtgtgcattcatcagcctggtgtggttgagagagcagatagtccatgggggagcaccaatttggttggagcatgctgccccaccgttcaatgctgcggggcatcaccaaaatgaggctccagcaggaggaaatggtgcagaaaatgttgctgctgatcagcctgctaacccaccagctgagaacgcagtggtgggggaaaaccctgatgcccaggatgaccaggcagaagaggaggaggaggacaatgaggaggaagatgacgctggtgtggaggatgcggcagatgctaataacggagcccaggatgacatgaattggaatgctttagaatgggaccgagctgctgaagagcttacatgggaaagaatgctaggacttgatggatcactagtttttctggaacatgtcttctgggtggtatctttaaatacactgttcattcttgtttttgcattttgcccttaccatattggtcatttctcccttgttggtttgggatttgaagaacacgtccaagcatctcattttgaaggcctaatcacaaccatagttgggtatatacttttagcaataacactgataatttgtcatggcttggcaactcttgtgaaatttcatagatctcgtcgcttactgggagtctgctatattgttgttaaggtctctttgttagtggtggtagaaattggagtattccctctcatttgtggttggtggctggatatctgttccttggaaatgtttgatgctactctgaaagatcgagaactgagctttcagtcggctccaggtactaccatgtttctgcattggctagtgggaatggtatatgtcttctactttgcctccttcattctactactgagagaggtacttcgacctggtgtcctgtggtttctaaggaatttgaatgatccagatttcaatccagtacaggaaatgatccatttgccaatatataggcatctccgaagatttattttgtcagtgattgtctttggctccattgtcctcctgatgctttggcttcctatacgtataattaagagtgtgctgcctaattttcttccatacaatgtcatgctctacagtgatgctccagtgagtgaactgtccctcgagctgcttctgcttcaggttgtcttgccagcattactcgaacagggacacacgaggcagtggctgaaggggctggtgcgagcgtggactgtgaccgccggatacttgctggatcttcattcttatttattgggagaccaggaagaaaatgaaaacagtgcaaatcaacaagttaacaataatcagcatgctcgaaataacaacgctattcctgtggtgggagaaggccttcatgcagcccaccaagccatactccagcagggagggcctgttggctttcagccttaccgccgacctttaaattttccactcaggatatttctgttgattgtcttcatgtgtataacattactgattgccagcctcatctgccttactttaccagtatttgctggccgttggttaatgtcgttttggacggggactgccaaaatccatgagctctacacagctgcttgtggtctctatgtttgctggctaaccataagggctgtgacggtgatggtggcatggatgcctcagggacgcagagtgatcttccagaaggttaaagagtggtctctcatgatcatgaagactttgatagttgcggtgctgttggctggagttgtccctctccttctggggctcctgtttgagctggtcattgtggctcccctgagggttcccttggatcagactcctcttttttatccatggcaggactgggcacttggagtcctgcatgccaaaatcattgcagctataacattgatgggtcctcagtggtggttgaaaactgtaattgaacaggtttacgcaaatggcatccggaacattgaccttcactatattgttcgtaaactggcagctcccgtgatctctgtgctgttgctttccctgtgtgtaccttatgtcatagcttctggtgttgttcctttactaggtgttactgcggaaatgcaaaacttagtccatcggcggatttatccatttttactgatggtcgtggtattgatggcaattttgtccttccaagtccgccagtttaagcgcctttatgaacatattaaaaatgacaagtaccttgtgggtcaacgactcgtgaactacgaacggaaatctggcaaacaaggctcatctccaccacctccacagtcatcccaagaataaagtagttgtctcaacaacttgaccttcccctttacatgtccttttttgtggacttctctctttggagatttttcccagtgatctctcagcgttgtttttaagttaaatgtatttgacttgtgttctcagcattcagagagcagcggtgtaagattctgctgttctccctggatcttctgacattactgctgtctgagatttgtatatgtgtaaatacaagttccttgataccctaaaaccttggattaaacagaatgtgcattgtacatctttaaacaaaatgtatattaatttattaaatctagttgtcactttattttggacctgctgtgatctcgacaggaaacgtgccacagagcagtagtgcgcaggcaagacttttcagtgacgccttgtggaacgcagttcatgatgtcctagcagctctcactaagggaactgtacattctttctttcttggctattcagaccttaccaagaacgttaaaggaaacaagtagaaatcagcagtggagtgtctgtggtaagaaaacatgaactttatgcttcactgttagttgtttgtggaagttattttgtataacaccaaagctgttgtacatttcctactgcctgatttttttcatgtgtctgtgtttgtaatattgtatagtatcttgtgctaggtgaggaaattatttttaattttgataatttaatattcctagtgtgatcagcattgggagttgggtttcagtggggcatgtctatacttagagaaaaaaagtccaaatgaagattttcatgagtcagcccccccgcccgcccccaccccacacccacatcctctcttttccacacacaactatctgtttattttttgtagcagtggccgaaagtcctgcaaggtcataaatctttcagagtgacatcaccaactgtactgcatcttactggatttaggacttctgagatgcttgtgaagtatagatgtggttgtggtcttagattgacagcattagagaagactggttagaacatctggtctcgctggttagtgcctcgttggctgaggactaggtgtgcatttctcctagcttttcatcaggaaatcccaaagtttccaaagctttttgtttacagaataaaacttcaaataaaaccaattcattatttgtccagaaggaagcttggctgagctggccttttaacataggaatgtatttcgttggaaacattctgaaaaatctcagagaactgaacccttacaaactttgttttccctcataaccaaagcttcaggttagaagtttagaaaaatagaatggttgggtacatgatctaaatgtttaatgctaaaggtatatcgtaagggtagtgtttgtttttgaacgataatttagaagttctcatagaaagcgtataacataggtcttcagaaactataaaagaattttcatatagtattaaaatccatagactaaaatctgagaattttttaacatatgcaagtcagccaaacataagctaccaaaataaagagcaatgtgttctggctgttttatacttcaacaattttttccctaagtggtaagcaattactttaaaacatatttttaaaaacatcggtatcgggagctgcggtggctccggccggttgtcctggcacacaaggaggcgaggctatgcgttcgaggccaacctaggcaaaattgg

SEQ ID NO: 119958 - DNA, 908 bp, Homo sapiens
gagaatctgggagagatgtgaaaactggaagagaaacaggaagtacctccaggattcacctaaatagatgctgcggtttctatcaaaccacaggccaccccagcatctcagtggcttctataggttgtcctgaaagagccatgatgccagggcccttgatggattcccagataccagctgctcctccagacaccaattccaccctccacctttctgtgtccgtcccagaccaaggcagcccagcgcgccgcgattcaccagcctggtcccttctgcggagagcgatgccgcttcccgacaccatgttctgcgctcagcagatccacattcccccggagctgccggacatcctgaagcaattcaccaaggctgccatccgcacccagccggccgacgtgctgcggtggtccgcgggaccaaaccctgtgctaaagagtacatatacaacagctgacaagacatgccctcacttaagtctacagttcaacacctttctgcataaaggaacagatgggaaaagaggaaagaggacactgggctacaggaaaaagcagaagaagatagagcatgagaaagaagaggctccagcaggaggaaatggtgcagaaaatgttgctgctgatcagcctgctaacccaccagctgagaacgcagtggtgggggaaaaccctgatgcccaggatgaccaggcagaagaggaggaggaggacaatgaggaggaagatgacgctggtgtggaggatgcggcagatgctaataacggagcccaggccttggcgttagattctcatgggagcgggaaccctattgggaactgcgagtgcgagggatccagattgtgtgctcattatgagaatctaatgcctgatgatctgaagcagaacagtttcatcctgaaatcccgttga

SEQ ID NO: 119959 - DNA, 554 bp, Homo sapiens
  misc_feature (1)...(554): n = a,t,c or g
gggtgggccccgnnnaattgatcccatcgcaagngttggaattcctatctattatggccactggtggtgggatccgggcaatgacttccctgtatgggcagctggctggcctgaaggagctgggcctcttggattgcgtctgctacatcaccggggcctcgggctccacctgccccatgatcacaagctctcagatcaacgggaggccctgagtcatggccagaaccctctgcccatctactgtgccctcaacaccaaagggcagagcctgaccacttttgaatttgggggtatctggagcaacctgtatgcagccaacctccaggacagcttatactgggcctcagagcccagccagttctgggaccgctgggtcaggaaccaggccaacctggacaaggagcaggtcccccttctgaagatagaagaaccaccctcaacagccggcaggatagctgagtttttcaccgatcttctgacgtggcgtccactggcccaggccacacataatttcctggcgtggcctcattttcacaagatactttcagcatccc

SEQ ID NO: 119960 - DNA, 5241 bp, Homo sapiens
atggcggaggcggctttggaagccgtgcggagcgagttacgagaattcccggccgctgcaagggtcccacctcctgaggcaagaggattgtttgagtccagcagttttgatgacagtggcgggcagttggaagcagatgctgtcatcatgctggctgcatacttcgcggacgcggcggaggcggcttcgtggctgcgcgagcggcgatcctcgctggagagagcgtcctgcggtcaggaccaggcggccgccgagaccctgctgaggcgccacgtgcggctggagcgcgtcctgcgcgccttcgcggccgagctgcggcggctggaggagcaggggcgggcggcctcggcccgggcgtcgttattcacggtgaactctgccctgagccctccaggagaaagcctgaggaacccagggccctggagtgaggcttcctgccaccctggccctggggatgcctggaagatggccctcccagctgagcctgaccctgactttgatcccaacactatactccagacacaggaccacttgagtcaggactatgagagtctgcgggccctggcacagctccgcagggcccggttggaggaggccatggccctgttcggtttctgcagttcctgtggggagctccagttgtggctggagaagcagacagtgctgctccaaagggtgcagccccaggctgacaccctggaggtcatgcagctcaaatatgagaacttcctcactgccctggctgtgggaaagggcctctgggctgaggtcagcagctctgctgagcaactgaggcagagatatcctgggaactccacacaaatccaacgacagcaggaggaactgagccagaggtgggggcagctggaggccctgaagagggagaaggccgtgcagctggcacacagtgtggaagtgtgcagttttctgcaggagtgtggacccacacaggtccagctgcgagacgtgctcctccagctggaggccctgcagccagggagctcagaggacacccgccacgccctgcagctggcccagaagaagaccctggtgctggagaggagggtctacttcctccaaagtgtggtcgtaaagtacggccagcgcagtggtggcattgggaggcaggtcgaggagccaggctacgcagagagccagcctctgcaaggacaggtggagacactgcaggggctgctgaagcaagtacaggaacaagtggcccaacgggcccggcgccaggctgagactcaggcccggcagagcttcctgcaagagagccagcaactgctactgtgggcagagagtgtccaggctcagctgcgcagcaaggaggtgtcagtggatgtggcctcggctcagcggctgctgagggagcatcaagacctgctggaggagatccacctgtggcaggagaggctgcagcagctggacgctcagagccagcccatggcagccttggactgcccagactcccaagaggtgcccaacactctgagggtcctggggcagcagggccaggagctgaaggttttgtgggagcagaggcagcagtggctgcaagaggggctggagctgcagaagtttggccgagaagtggatggtttcactgccacctgtgccaaccaccaggcctggctgcacctggacaaccttggggaggacgtgagggaggccctgagcctgctgcagcagcaccgggagtttgggcggctcctgagcaccctggggcctcgggcagaggctctgcgggcacacggcgagaagctggttcagagccagcacccagctgcacacacggtcagagagcagctgcagagtatccaggcacagtggaccaggctccaggggaggagtgagcagaggaggaggcagttgctggcttccctccagctccaggagtggaagcaggatgtggcagagctgatgcagtggatggaagagaaggggctgatggctgcgcatgagccctccggagcgcgcagaaacatcctgcagacactcaagcggcacgaagcagctgagagcgagctactcgccacccgcagacacgtggaggccctgcagcaggttgggagagagctgttgagtaggaggccctgtggccaggaggacatacagaccaggcttcaaggcctgagaagcaagtgggaagctttgaaccgcaagatgactgagcgtggggacgagctccagcaggctggacagcaggagcaactcctgaggcagctgcaggatgcaaaggagcagctggagcagctcgaaggggccctacagagctcggaaacagggcaggacctgcgctccagccagaggctgcagaaacggcaccaacagctggagagtgagagccggaccctggctgccaagatggctgccctcgcctccatggcccatggcatggccgcctccccggccatcctggaagagacccagaagcacctccggaggctggagcttctgcaggggcatctggccatccggggcctgcagctgcaggcctcagtggagctgcaccagttctgccacctgagcaacatggagctctcttgggtagccgagcacatgccccatggcagccccaccagctataccgagtgcttgaatggtgcccagagccttcaccgcaagcacaaggagctccaggtggaggtaaaagctcaccaggggcaggtgcaacgggtgctgagttctgggcggagcctggcagcctcagggcacccccaagcccaacacatcgtggagcagtgccaggagctggaaggccactgggcagagctggagagggcatgtgaagcgcgggcccagtgtctgcagcaggctgtcactttccagcagtactttctggatgtgtcagagctggagggctgggtggaggagaagcggccgctggtgagcagtcgggactatggcagagacgaggcagccaccctcaggctcattaacaagcaccaggctctacaggaggaactagccatttactggagctccatggaggagcttgaccagacggcccaaaccctcactggccccgaagtccctgagcagcagcgtgtggtgcaggagaggctccgggagcagctgcgggcactgcaggagttggcggccacacgggaccgggaactggaggggaccctgaggctgcatgagttcctgagggaggctgaggacctgcagggctggctggcaagccagaagcaggcagccaaaggaggggagagcctgggagaggaccccgagcacgccctgcacctctgcaccaagtttgcaaagtttcagcaccaagtggagatgggcagccagcgggtggccgcctgccggctgctggcggagagcctgctagagcgtgggcacagtgctggccccatggtccgtcagaggcagcaggatctgcagaccgcctggtcggagctgtgggagctgacccaggcccgaggccacgcgctccgagacaccgagaccaccctcagagttcacagagatctcttggaagtcctcacccaggtccaggagaaagccacgagcctccccaacaatgtggcacgggacctgtgtgggctggaggcgcagctgagaagccaccaggggctggagcgagaactcgtgggcaccgagcggcagctgcaggaactgctggagactgcaggcagggtgcagaagctgtgtccggggcctcaggcccatgcggtgcagcagaggcagcaagctgtgacgcaggcgtgggcagtgctgcagcgacgcatggagcagcgcagggcccagctggagcgggcacgcctcctggcccgcttccgcacggcgttctcccctctgttctctgagagggcagccttcaccctcgggcatacagagatgcaggacaaagcccagcagtgcagtggtagtcgtagcccagtagtgaagaacctgggctctgcagtcagcactgccaagttcatgtcccgaccccatcaactcacagccgtgggactgggcaagattggcaacagtattgtctgtgttatcaacgccaaaagaataatgtacatgaaattacaggctcggatgaccctccctagctctgtgcctcctacaacccactcctccaaatcagccacacgaaagctagacccaggaaagagggaaatagagggtaattcaaagaaaaggtttaaacagcctgaccgaagatggcagcttgctggtccttaccgattcaggaaagcgtttccaaagcgactgagctttctaaacggctttttggggtccacgactaaagcattccctggggtgctgccctcagtctctccatacatcacggcgatgaaggagtctgtggtgggctccggaccaatcctcatgcctgggaaatcctgctccagtatctggagcaacctgtatgcagccaacctccaggacagcttatactgggcctcagagcccagccagttctgggaccgctgggtcaggaaccaggccaacctggacaaggagcaggtcccccttctgaagatagaagaaccaccctcaacagccggcagaatagctgagtttttcaccgatcttctgacgtggcgtccactggcccaggccacacataatttcctgcgtggcctccatttccacaaagactactttcagcatcctcacttctccacatggaaagctaccactctggatgggctccccaaccagctgacaccctcggagccccacctgtgcctgctggatgttggctacctcatcaataccagctgcctgcccctcctgcagcccactcgggacgtggacctcatcctgtcattggactacaacctccacggagccttccaggttgagaagggtgggcagcccaccagggaggcgcagttgcagctcctgggccggttctgccaggagcaggggatcccgttcccacccatctcgcccagccccgaagagcagctccagcctcgggagtgccacaccttctccgaccccacctgccccggagcccctgcggtgctgcactttcctctggtcagcgactccttccgggagtactcggcccctggggtccggcggacacccgaggaggcggcagctggggaggtgaacctgtcttcatcggactctccctaccactacacgaaggtgacctacagccaggaggacgtggacaagctgctgcacctgacacattacaatgtctgcaacaaccaggagcagctgctggaggctctgcgccaggcagtgcagcggaggcggcagcgcaggccccactga

SEQ ID NO: 119961 - DNA, 522 bp, Homo sapiens
atgaggctgaggcgtggactcctcacagagtggtgcgagttctctccctacgaggtcggcttccccaagtacggggccttcatcccctctgagctctttggctccgagttctttatggggcagctgatgaagaggcttcctgagtcccgcatctgcttcttagaaggtatctggagcaacctgtatgcagccaacctccaggacagcttatactgggcctcagagcccagccagttctgggaccgctgggtcaggaaccaggccaacctggacctgttggactacggctccctgcgtccagaccgcccactgcacaaccttgcttttgctttcctggtggctgagcaggagctgggcattgctcagctgctggaccccgaggacgtggcagccgcacagccagatgagcgctctatcatgacctacgtctccctctactaccactactgctcccgcctgcatcaggggcagactgtccagaggagactcactaaggtgggggagaaaggaggggtggggtga

SEQ ID NO: 119962 - DNA, 3068 bp, Homo sapiens
acgagggacgcagccatggcggaggcggctttggaagccgtgcggagcgagttacgagaattcccggccgctgcaagggagctctgcgtgcctcttgctgtgccctacctggacaaacccccaactccgctccacttctaccgggactgggtctgccccaacaggccgtgcattatccgcaacgctctgcagcactggccggccctccagaagtggtccctcccctatttcagagccacagtgggctccacagaggtgagtgtggccgtgaccccagatggttacgcggatgccgtgagaggggatcgcttcatgatgccagctgagcgccgcctgcccctgagcttcgtgctggatgtgctggagggccgggcccagcaccctggagtcctctatgtgcagaagcagtgctccaacctgcccagcgagctgccccagctgctgcctgatctggaatcccatgtgccctgggcctccgaagccctgggaaagatgcccgatgctgtgaacttctggctgggggaggcggctgcagtgacttctttgcacaaggaccactatgagaacctctactgcgtggtctcaggagagaagcatttcctgttccatccgcccagcgaccggcccttcatcccctatgagctgtacacgccggcaacctaccagctaactgaagagggcacctttaaggtggtggatgaagaggccatggagaaggcagaggtgtccaggacctgcctgctcacggttcgtgtcctgcaggcccatcgcctaccctctaaggacctagtgaccccctctgactgctacgtgactctctggctgcccacggcctgcagccacaggctccagacacgcacggtcaagaacagcagtagccctgtctggaaccagagctttcacttcaggatccacaggcagctcaagaatgtcatggaactgaaagtctttgaccaggacctggtgaccggagatgaccctgtgttgtcagtactgtttgatgcggggactctgcgggctggggagttccggcgcgagagcttctcactgagccctcagggtgaggggcgcctggaagttgaatttcgcctgcagagtctggctgaccgtggcgagtggctcgtcagcaatggcgttctggtggcccgggagctctcctgcttgcacgttcaactggaggagacaggagaccagaagtcctcagagcacagagttcagcttgtggttcctgggtcctgtgagggtccgcaggaggcctctgtgggcactggcaccttccgcttccactgcccagcctgctgggagcaggagctgagtattcgcctgcaggatgcccccgaggagcaactaaaggcgccactgagtgccctgccctctggtcaagtggtgaggcttgtcttccccacgtcccaggagcccctgatgagagtggagctgaaaaaagaagcaggactgagggagctggccgtgcgactgggcttcgggccctgtgcagaggagcaggccttcctgagcaggaggaagcaggtggtggccgcggccttgaggcaggccctgcagctggatggagacctgcaggaggatgagatcccagtggtagctattatggccactggtggtgggatccgggcaatgacttccctgtatgggcagctggctggcctgaaggagctgggcctcttggattgcgtctcctacatcaccggggcctcgggctccacctgggccttggccaacctttatgaggacccagagtggtctcagaaggacctggcagggcccactgagttgctgaagacccaggtgaccaagaacaagctgggtgtgctggcccccagccagctgcagcggtaccggcaggagctggccgagcgtgcccgcttgggctacccaagctgcttcaccaacctgtgggccctcatcaacgaggcgctgctgcatgatgagccccatgatcacaagctctcagatcaacgggaggccctgagtcatggccagaaccctctgcccatctactgtgccctcaacaccaaagggcagagcctgaccacttttgaatttggggagtggtgcgagttctctccctacgaggtcggcttccccaagtacggggccttcaatcccctctgagctctttggctccgagttctttatggggcagctgaagaagaggcttcctgagtcccgcatctgcttctttagaaggtatctggagcaacctgtatgcagccaacctccagggacagcttatactgggcctcagagcccagccaattctggggaccgctggggtcaaggaaccaggccaacctgggacaaggagcaggtcccccttctgaagatagaagaaccaccctcaacagccggcaggatagctgagtttttcaccgatcttctggacgtggcgtccactggcccaggccacacaaaattttcctgcgtgggcgttccattttccacaaagactactttcagcatcctcacttctccacatggaaagctaccactctggatgggctccccaaccagctgacaccctcggagccccacctgtgcctgctggatggtggctaactttaataaataccagctgcctgcccctcctgcagcccactcgggacgtggacctcatcctgtcattggactacaacctccacggagccttccagcagttgcagctcctgggccggttctgccaggagcaggggatcccgttcccacccatctcgcccagccccgaagagcagctccagcctcgggagtgccacaccttctccgaccccacctgccccggagcccctgcggtgctgcactttcctctggtcagcgactccttccgggagtactcggcccctggggtccggcggacacccgaggaggcggcagctggggaggtgaacctgtcttcatcggactctccctaccactacacgaaggtgacctacagccaggaggacgtggacaagctgctgcacctgacacattacaatgtctgcaacaaccaggagcagctgctggaggctctgcgccaggcagtgcagcggaggcggcagcgcaggccccactga

SEQ ID NO: 119963 - DNA, 432 bp, Homo sapiens
atgtatgcctcgtcctggttcctcacactgttcctgagcaccttcccactccccgtcgccacccgggtctttgacatcttcatgtatgaggggctggagatcgtgttccgagtgggcctcgccctgctgcaggtgaaccaggcagagctgatgcagctggacatggaggggatgtcccagggcaacagggctcgggcggcccccggtggtcagggcctgcatgttggtgaccagtacttccagagagtgatcccccaccagttcgacagctgcccggacaagctggtcctcaaagcctaccaggtcaagtacaaccccaagaagatgaagaggctggagaaggagtacgcagccatgaagagcaaggagatggaggagcagatcgagatcaaagccagctgtgagcgcctcccccgcctgacgccgcggtaa

SEQ ID NO: 119964 - DNA, 693 bp, Homo sapiens
atgaagatgagagtgggctgtatgttaactgcagaaagcctctcagatggagggaatagtcaccagaggactctcagcttgtttgaagaaagcaaagaaagtcagtgtgaggccaggggagaggtcagtaaggcaggggtttggctggtgccacttgaaccaagttcagatgcactgcccaaaataacatccctcgtccggccagcagtgccgtggagaccgagttctgaagcaggcctttgtgaggtcagaggtggagttctgggaaaggccagcaaagcccccataaaggagccacagctggatcggggcatggggctcggggcccagcggcgtgggagctctgggaccgaggtgcagtcaggagagaccctgggggccagcggcagtccaagaggacttttggagccaaggcctgactgggtctcaaacaatggggcaggcagtttggggtttcagcagcttccaattgtggacaagataaggaccattgcccaggctgtctgtggagccaaagatatcgaactctgtcctgaggcacaagtcaaaatagatcgttacactcagcagtactactcctgtgtgaaccagaatttggagcagggacagaggtttttccactttgatgattcttattcttcatctctacagtacaggactgcatctggacagcacggactgagttatttctga

SEQ ID NO: 119965 - DNA, 376 bp, Homo sapiens
gcacgagtcaagaccgacacccgcgctgagattgacttggtgtgtgagcttgcaaagcgggctggtgcctttgatgcagtcccctgctatcactggtccgttggtggaaaaggatcggtggacttggctcgggctgtgagagaggctgcgagtaaaagaagccgattccagttcctgtatgatgttcaggttccaattgtggacaagataaggaccattgctcaggctgtctatggagccaaagatattgaactctctcctgaggcacaagccaaaatagatcgttacactcaacagggttttggaaatttgcccatctgcatggcaaagacccacctttctctatctcaccaacctgacaaaaaaggtgtgccaa

SEQ ID NO: 119966 - DNA, 474 bp, Homo sapiens
atgagggtgcttacaaagaaggacgaaaaaggagcaaagagcagaagaagttcattccatgcaatggaatcccacccaagtgttcttaaagcacacttggcttcaagccatctgccatctttcattgctcatgtggatcatttccgatctgggttaaaaggtaatgcattcgtgggccctgaaatccagaaagtgaaaccccagcttccaattgtggacaagataaggaccattgcccaggctgtctatggagccaaagatatcgaactctgtcctgaggcacaagtcaaaatagatcgttacactcagcagaactatggtgtgcagcctggatgcaccaagccaagatctgcagtgagcactcaagtgggagaggagcctacactgactttcaaaacattgagaggaagcatagctgcaacccatgaggaaatacggaggagccacatgactgagcaggagcctacacagtga

SEQ ID NO: 119967 - DNA, 609 bp, Homo sapiens
atggccaaggtcccggagctggaagacaccttcctgcaggcgcagcctgcgccccaactgtccccggggatccaggaagactgctgtgtgcagctcctgggcaagggcttgctagtctatccggaagaaacagtgtacctggcggccgaagggcagcccgggggcgagcagggcggcggggagaaaggcgaagacccggagctgccgggggcagtgaaatcagaaatgcacttaaacaatggtaacttttcctctgaagaagaggacgccgacaaccacgacagcaaaaccaaagcagcggatcaatacctgtctcagaagaaaaccatcacgcagattgtgaaggataaaaagaagcagacacagctcacgctgcagtgcccctggcagtgcccttctactttctgtctcaatgaagttgactcctggataccccatgttccaattgtggacaagataaggaccattgctcaggctgtctatggagccaaagatattgaactctctcctgatgcacaagccaaaatagatcgttacactcaacaggaggctcagccaccttcaccaaaaggaccgtatgcctcgagtgtccctcctactttggtgtag

SEQ ID NO: 119968 - DNA, 2756 bp, Homo sapiens
gcagccccggcggccgaacgcccgcggcgcgggactccatcgtcagagaagtcattcagaattcaaaagaagttctaagtttattgcaagaaaaaaaccctgccttcaagccggttcttgcaattatccaggcaggtgacgacaacttgatgcaggaaatcaaccagaatttggctgaggaggctggtctgaacatcactcacatttgcctccctccagatagcagtgaagccgagattatagatgaaatcttaaagatcaatgaagataccagagtacatggccttgcccttcagatctctgagaacttgtttagcaacaaagtcctcaatgccttgaaaccagaaaaagatgtggatggagtaacagacataaacctggggaagctggtgcgaggggatgcccatgaatgttttgtttcacctgttgccaaagctgtaattgaacttcttgaaaaatcaggtgtcaacctagatggaaagaagattttggtagtgggggcccatgggtctttggaagctgctctacaatgcctgttccagagaaaagggtccatgacaatgagcatccagtggaaaacacgccagcttcaaagcaagcttcacgaggctgacattgtggtcctaggctcacctaagccagaagagattccccttacttggatacaaccaggaactactgttctcaactgctcccatgacttcctgtcagggaaggttgggtgtggctctccaagaatacattttggtggactcattgaggaagatgatgtgattctccttgctgcagctctgcgaattcagaacatggtcagtagtggaaggagatggcttcgtgaacagcagcacaggcggtggagacttcactgcttgaaacttcagcctctctcccctgtgccaagtgacattgagatttcaagaggacaaactccaaaagctgtggatgtccttgccaaggagattggattgcttgcagatgaaattgaaatctatggcaaaagcaaagccaaagtacgtttgtccgtgctagaaaggttaaaggatcaagcagatggaaaatacgtcttagttgctgggatcacacccacccctcttggagaagggaagagcacagtcaccatcgggcttgtgcaggctctgaccgcacacctgaatgtcaactcctttgcctgcttgaggcagccttcccaaggaccgacgtttggagtgaaaggaggagccgcgggtggtggatatgcccaggtcatccccatggaggagttcaaccttcacttgactggagacatccacgccatcaccgctgccaataacttgctggctgccgccatcgacacgaggattcttcatgaaaacacgcaaacagataaggctctgtataatcggctggttcctttagtgaatggtgtcagagaattttcagaaattcagcttgctcggctaaaaaaactgggaataaataagactgatccgagcacactgacagaagaggaagtgagtaaatttgcccgtctcgacatcgacccatctaccatcacgtggcagagagtattggatacaaatgaccgatttctacgaaaaataaccatcgggcagggaaacacagagaagggccattaccggcaggcgcagtttgacatcgcagtggccagcgagatcatggcggtgctggccctgacggacagcctcgcagacatgaaggcacggctgggaaggatggtggtggccagtgacaaaagcgggcagcctgtgacagcagatgatttgggggtgacaggtgctttgacagttttgatgaaagatgcaataaaaccaaacctgatgcagaccctggaagggacacctgtgttcgtgcatgcgggcccttttgctaacattgctcacggcaactcttcagtgttggctgataaaattgccctgaaactggttggtgaagaaggatttgtagtgaccgaagctggctttggtgctgacatcggaatggagaaattcttcaacatcaagtgccgagcttccggcttggtgcccaacgtggttgtgttagtggcaacggtgcgagctctgaagatgcatggaggcgggccaagtgtaacggctggtgttcctcttaagaaagaatatacagaggagaacatccagctggtggcagacggctgctgtaacctccagaagcaaattcagatcactcagctctttggggttcccgttgtggtggctctgaatgtcttcaagaccgacacccgcgctgagattgacttggtgtgtgagcttgcaaagcgggcatggtgcctttgatgcagtcccctgcctatcactggtccgttggtggaaaaggatcggtggacttggctcgggctgtgagagaggctgcgagtaaaagaagccgattccagttcctgtatgatgttcaggttccaattgtggacaagataaggaccattgctcaggctgtctatggagccaaagatattgaactctctcctgaggcacaagccaaaatagatcgttacactcaacagggttttggaaatttgcccatctgcaatggcaaagaccgatctttctctgtctcaccaacctgacaaaaaaggtgtgccaagtgacttcatcttacctatcagtgatgtccgggccagcataggtgctgggttcatttaccctttggtcggaacgatgagcaccatgccaggactgcccacccggccctgcttttatgacatagatcttgataccgaaacagaacaagttaaaggcttgttc

SEQ ID NO: 119969 - DNA, 457 bp, Homo sapiens
  misc_feature (1)...(457): n = a,t,c or g
tgcggctcaaggagaagaagctggtgaaggaggtcatcgccgtcagctgtgggcctgcacagtgccaggagacgattcgtaccgccctggccatgggtgcagaccgaggtatccacgtggaggtgcccccagcagaagcagaacgcttgggtcccctgcaggtggctcgggtcctgtggtgacagctgacctgaggctcaacgagccccgntacgccacgctgcccaacatcatgaaagccaagaagaagaagatcgaggtgatcaagcctggggacctgggtgtggacctgacctccaagctctctgtgatcagtgtggaggacccgccccagcgcacggccggcgtcaaggtggagaccactgaggacctggtggccaagctgaaggagattgggcggatttgagcccctcccagagatggcaataaaactgactctcaacaaaaaaaaaaaaaa

SEQ ID NO: 119970 - DNA, 1054 bp, Homo sapiens
  misc_feature (1)...(1054): n = a,t,c or g
atggagcagtgcgtagtcacagaaaccctcctgcacctgcaccaactctggggcttcctgccgggatctcatatcctgagccagatcccctgtggggaaatgagggagacgattcgtaccgccctggccatgggtgcagaccgaggtatccacgtggaggtgcccccagcagaagcagaacgcttgggtcccctgcaggtggctcgggtcctggccaagctggcagagaaggagaaggtggacctggtgctgctgggcaaacaggtagctgtggtcagccctccctgtgcccccttgctcatccctgctcgggaggagggtggtggagatacgggnaccccccccctcctccctccatacggcccggacccgccgaccatcacggtctcctcggaccgcgacgccgcgcctgcccgctttgtcaccgcgggcagtaacgtgaccttgcgctgcgccgccgccgtctgctggccggccccgcctgacatcacgtggagcctggcggacccggccgaggccgcggtgcccgcggggtcgcgcctcctgctgcccgcggtcggaccgggccacgcaggcacctacgcctgcctggagggagaacctgtgtaccggccgccgccgccgatcgctgttcaaccttacagtggcgggcggccctggcaagagagtccatggagtggtcgagaggattcgatgtgttcctatgagcacagcccgtacctgcgaagaacgtcatgagcactgccacccagcccaggatgtaggaccaggaaaagcgccagtccccaaagcggcggcccaggaagctgacggtgactccagtgtagatggccaaggccaacacgacgaaaagggctggggagagagggcgggaggatgcagccccattaccagtgctcaaggttacccacaaacggcgccagagtgcccatatatgacagtccaggtcctagacatcacccaccagcccttttatgtggatctccaccaccagatcccagatccctggatcctcattctcagggtctttgagacccatggtgccagtcactag

SEQ ID NO: 119971 - DNA, 930 bp, Homo sapiens
  misc_feature (1)...(930): n = a,t,c or g
ttggagatcgatatcactagtccangtggtggaattcgagccgctgagggtgcgggctgaccctgtttggtggctgcggcgggatagatggcggacgtgcgcgtgctcgtagctgtcaagagggtcatcgactacgccgtgaagatccgagtgaagcctgacaggaccggtgtggtcacggatggtgtgaagcactccatgaaccccttctgtgagatcgcggtggaggaggctgtgcggctcaaggagaagaagctggtgaaggaggtcatcgccgttcagctgtgggcctgcacagtgccaggagacgatttcgtaccgccctggccagtgggtgcaagaccgaggtatccacgtggaaggtgcccccagcagaagcagaacgctttgggtccccttgcaggtggctcgggtcctgggccaagcttggcagagaaggagaaggttggacctggtgctgctgggcaaacaggcccatcgcatgcactgactgtaaccagcacagggcagatgacagctggatttcttgactggccacagggcacattttgcctcccaggtgacgctggagggggacaagttgaaagtggagcgggagatcgatgggggcctggagaccctgcgcctgaagctgccagctgtggtgacagctgacctgaggctcaacgagccccggtacgcccacgctgccccaacatcatgaaagccaagaagaagaagatcgaggtgatcaagcctggggacctgggtgtggacctgacctccaagctctctgtgatcagtgtggaggacccgccccagcgcacggccggcgtcaaggtggagaccactgaggacctggtggccaagctgaaggagattgggcggatttgagcccctcccagagatggcaataaaactgactctcaacatcaaaaaaaaaaaaaaaaa

SEQ ID NO: 119972 - DNA, 777 bp, Homo sapiens
atgtcagcaccgcccctagtgtgcacacacctggccggggccgcggcagcgcctgggcttggccacagctttgctccaaaatcggagcgggcattgggagtgcggagaggctcagaacacgcacttctgagctgggcagttgcagctgtgcccgggagcacggggcttctgccctgcaaacttggaaggggtggggttccctcctgttcccaacccaagggctacatggagcacgttgccccagccacgcctccactgctgcagcgacatctttgcaggagctgctctagacagaataataccacctacctcataggattattcaccccagcagtcagtgactactctagaattgctttgggtcctaaacggggtccatctgttactgaaaaggaggtgctgacgtgcatcctttgccaagaagaacaggaggtgaaaatagaaaataatgccatggtattatcggcctgtgtccagaaatctactgccttaacccagcacaggggaaaacccatagaactctcaggagaagccctagacccacttttcatggatccagacttggcatatggaacttatacaggaagctgtggtcatgtaatgcacgcagtgtgctggcagaagtattttgaagctgtacagctgagctctcagcagcgcattcatgttgacctttttgacttggaaagtggagaatatctttgccctctttgcaaatctctgtgcaatactgtgatccccattattcctttgcaacctcaaaagataaacagatag

SEQ ID NO: 119973 - DNA, 1557 bp, Homo sapiens
gcgcccgcccgccggggtctcggcgatcgctgctcctcctcctccttctcctcctcttttttctcctccgcctcctccccccgccgcctcgccaccgccgcggctagggctggaggcgccgctgtcattcctgtgccggaggaaccggcgctgccggtgcctgggggtcggggcgcgggcgaagccgggccgcggaggacacaacaggtagagccgggggtgcccggccgcgcgccccccgcgcatcatgcagctctttgtcacctctctcgcccccaggccaaaatcctgagcatgatggaagacaataagcagctcgcgctccgcatcgatggggcggtccagtcggccagccaggaggtgaccaacctgcgagccgaactcacggccaccaaccggagactggcggaactgagcggcggcggcggccccggcccgggcccgggagccgcggccagcgcctcggcggcgggggactcggcggcgacgaacatggagaacccccagcttggagcgcaagtgctcctgcgggaagaagtgtcgcggctccaggaggaagttcaccttctccggcagatgaaggagatgttggcgaaggacctggaggagtcgcagggcggcaagtcctctgaggtcctctcggccaccgagctcagggtccagctggcccagaaggagcaggagctagccagagccaaagaagccttgcaggccatgaaagctgatcggaagcgcttaaagggcgagaagacagacctggtgagccagatgcagcagctgtatgccacactggagagccgcgaggagcagctccgagacttcatccgcaactatgagcagcaccgcaaggagagcgaggatgcggtcaaagcgctggccaaggagaaggacctgctggagcgtgagaagtgggagctgcggcgccaagccaaggaggccacagaccacgccacggcactgcgctcccagctggacctcaaggacaaccggatgaaggagctggaggccgagctggccatggccaaacagtccttagctacgctgaccaaggacgtccccaagcggcattccctcgccatgccgggcgagacggtgctcaatggcaaccaggagtgggtggtgcaggcggacctcccgctgaccgcagccatccggcagagtcaacagactctctaccactcacacccccctcaccctgcggaccggcaagcggtcagggtgagcccctgccactcccggcagccctctgtcatctccgacgcatctgccgccgaaggcgaccggtcgtccacaccgagcgacatcaactcccctcgacaccggacacactccctctgcaacgtaaggccagcagcagcggggcctgggcccctgggccctgcccagaaactgcaggggcgggggtggcggggtgaagccatactcgctgtttcctctcgtccacccagggagcactctggcgaatgcatttcctgttctgttctttccttttgcaagaagcgatggatgtggggagaaaaaggaatgaggcccgtttgctccttgtgtccgggaggg

SEQ ID NO: 119974 - DNA, 762 bp, Homo sapiens
atgatagcaagtccctatgaagtggacccattttctgtcttggttcttaacatcagcctactggggtgtgagattgggactatttggggaacacgcaaaagggggaaccctgaaacagaacccacagtactgccaaattctcatagctgtgaatcccatggagagacagctgtggatgacagacttctctggaatccttctcccaacagtttgcaggccaaaatcctgagcatgatggaagacaataagcagctcgcgctccgcatcgatggggcggtccagtcggccagccaggaggtgaccaacctgcgagccgaactcacggccaccaaccggagactggcggaactgagcggcggcggcggccccggcccgggcccgggagccgcggccagcgcctcggcggcgggggactcggcggcgacgaacatggagaacccccagcttggagcgcaagctgctacacagatctgtgccgcagatcccagcagaacctttgtgtgccatcaactcatcctttctgtgccctcaaataacttaaattctgaaacagacaagctggaaacagaggagtcctctggaacttgctggctggccacagagcagataggcagctccaaggaggggacattttcctggagcttctacttcccaggggagctgccaagtgaaaagacagttgctggaatggaggccaaatccttcatgtgctggtccaccaggactggagcagggccacccaaggcatttgttatctgctaa

SEQ ID NO: 119975 - DNA, 640 bp, Homo sapiens
aaatgccagattattgtcactgtttcatccgcacatttttgccaacgtgccgttatgcaccatagcaggaccaagagaagatgacctgtaattcaggatctaatgacgaaaaattgtagactcagtgttttatcaaggattctatgttttgaagctttttaattcatacataattttatatttcttgtcaccaacccgccagagtaagaaatattctagtactttgaacatgagaattaaacagtggtcaaatcaaggggatagaattggagcttggaggagctgtaaacaggctttgcagtgaccccagcctttaaatgacaggcgtgtgccttttctctccctgccccaagatgctgacccgctggtcacaggggcccccggtgcacccatggacttgcagtgccacgacgccaaccgggactacgtcatcgtgacctggaagccgcccaacaccaccactgagagccccgtcatgggctattttgtggaccggttcgtggtgcacggcttaaccacgggagagcagtacatcttccgagtcaaggcggtcaatgctgtggggatgagtgaaaattcccaggaatcagacgtcataaaagtgcaggccgcactcagacccatcgaggacaccagatga

SEQ ID NO: 119976 - DNA, 540 bp, Homo sapiens
ctagtctttttgtctgcatggcattgtgggggatgtggcgatgagggccaggatcgcagaagtcagagtacccgtggctggagcttccattttaaatgaagtgttcttgcttatggcttgatggtatcctttcagattttgcatctggctgtactccagatgtttatatagaaacttcacagtagacatgatggtggcgtaggtttgcaggaaggatcctttcctacttacagagtgacccaatgtggccgatcccttccgtgaggcaggaagccccagctcacaggccagcagctgagataagaagtcatgtcctttttcaatgacatcagcagacaaagagaatattatggatgtgtttagtggaagaagcagcagaatcagctggggtccccagttggctttgctttgaccctcttccaccaccaccaccaccatcaccaccaccaccacaaccaccactgccaccatcaccaccaccaccacaaccaccaccatcactaccaccaccaccatcaccaccagtaccatcaccaccat

SEQ ID NO: 119977 - DNA, 283 bp, Homo sapiens
ctgggtgaaactgcaagtcgagagcgtgggaaaccagcaagttgagagaggatccagaagtaaccccttctaaaacgggaaagatgccttccgaaagcacttggccctaaagagaaaacactaggaggatgggaaccagggacagagaagctacttgctctgcagctgtttgggccagtatgttccctaatcttgatggccatcctgggcttattttcctgagagtctctaagtgactcactgcatcacgtaaaactaagaaaaaggatgtcctgaaaaaaaa

SEQ ID NO: 119978 - DNA, 597 bp, Homo sapiens
atggccatcaagattagggaacatactggcccaaacagctgcagagcaagtagcttctctgtccctggttcccatcctcctagtgttttctctttagggccaagtgctgtagcagcagcaggagacctggtggaggaccttcagtctagagaagaccagtaccaggccatccggtctatagatgcagaaaaagtattcaacaaaatccagcatccctttatgattaaaactctcagcaaaattggcatacaagggacataccttaatgtaatgaaagccatctatggcaaacccacagccaacataatactgaatggagaaaagttgaaagcattccctctgggcactggaacaagacaaggatgcccactctcaccactcctcttcaacatagtactggaagtcctagccagagcaatcaaacaagagaaagaaataaagggcatccaaatcagcaaagaggaagtcaaactgtcactgtttgctgaggatgtgatcgtttaccttgaaaaccctaaagactcctccagaaagcttctagaactgataaaagcattcggcaaagttttcagatacaaaattaatgtacaaaaatag

SEQ ID NO: 119979 - DNA, 597 bp, Homo sapiens
cttacgtatgggtgcacacaagataactaaccttatttcggattccagaactttaactttaaatatatcacacccatttgtattccacatacctgctgactgccattattttacctaaacatatgactctgcctcatcataaggactcttattgcaagatacctctaagatgaagcgcttcaatcaaacgctttcaaccaacaaaattggttatacaagtccgcaaccctcagtcataccacctacttattaaagaacaaagacagaaacagtcttctgaaacagtctttaatatttatgaaaggagacatggatgaatgtactcatgtagcaaatttctcaggtactaatttttatatgaaattgagaatatttgctgatgtcctgagcaatagagcaagaatctgtcaaaaaacaaaaaacaaacaaacaaaaaaaaacgaggaggaggagaggaaaaaggtgaaggaggagaaggaggagatgaagaaagaagaagaaggaagaataaagaaggaagaagtggaacacaaagtggtcgactaccaaaaactcaggcttgacatgcctgcatttcgactctatgagaccccttag

SEQ ID NO: 119980 - DNA, 939 bp, Homo sapiens
  misc_feature (1)...(939): n = a,t,c or g
atgtgtgatctntacatcaggcgcggactcatgnacgtagttctagtgctcctggtcatgctagtgcattttggctgccatggtgcacaggagaggctccaggagcaggacgagaggctccgagagcaggaggagtggagggtgcgggagcaggagagactgtgtgagcaaaatgagaggcttcgggagcagcagaagacgctacgggagcagggtgagaggctgcgaaagcaggagcagaggctatgcaagcaggaggagaggctgcgaaaggaggaggagaggctgcgaaagcaggaaaagaggctgtgggaccaggaggagaggctgtgggaccaggaggagaggctgtgggagaaggaggagaggctacaaaagcaggaggagaggctcatgctctcccagaaccacaagctcgacaagcagctggccgagccacagtgcagcttcgaggatctgacccttcacctcactatcttctactcatccttcaagtctcagcttaaatgtcatttcctcagagaagccttcctggatctcaccaccatcattgccacttgggctagtccgagccaccgcttcgctagcctgggttcctgtgaggaccttctcaccagcctgggttcctgtgaggaccttctcaccggactcgctgctcccgcctttgctctcaaaccatccatttacccaagacgatggtttagcccctggaggctgttgcctggagcccaggagtcagtctgggtgcaggcctgggtagaggtccaggagcagattctaccccccagctcatacctcctgtgcaccatggcagccaaagggtggtcctctacactcaagcctggatgtcatgcttcttcagggcgttttaatatccctgctccagtccttgccacactcgccctggggttgtcgtctctcagggaagtactagcctga

SEQ ID NO: 119981 - DNA, 2043 bp, Homo sapiens
ataatagaagaatttgttagtggcctggagtcttacattgaggatgaagacagtttcaggaactgccttttgtcttgtgagcgtctgcaggatgaggaagccagcaagaacagtgatgaaatcaacatacctcgactcattgtcagtcaactaaaatggcttgacagagttgtggatggcaaggacctcaccaccaagatcatgcagctgatcagtattgctccagagaacctgcagcatgacatcatcaccagcctacctgagatcctaggggattcccagcacgctgatgtggggaaagaactcagttcctcaggaaatcaagaaagcagcggtcagagctgtattattctcctctttgatgtaataaagtcagctattagatatgagaaaaccatttcagaagcctggattaaggcaattgaaaacactgcctcagtatctgaacacaaggtgtttgacctggtgatgcttttcatcatctatagcaccaatactcagacaaagaagtacattgacagggtgctaagaaataagattcgatcaggctgcattcaagaacagctgctccagagtacattctctgttcattacttagttcttaaggatatgtgttcatccattctgtcgctggctcagagtttgcttcactctctagaccagagtataatttcatttggcagtctcctatacaaatatgcatttaagttttttgacacgtactgccagcaggaagtggttggtgccttagtgacccatatctgcagtgggaatgaagctgaagttgatactgccttagatgtccttctagagttggtagtgttaaacccatctgctatgatgatgaatgctgtctttgtaaagggcattttagattatctggataacatatcccctcagcaaatacgaaaactcttctatgttctcagcacactggcatttagcaaacagaatgaagccagcagccacatccaggatgacatgcacttggtgataagaaagcagctctctagcaccgtattcaagtacaagctcattgggattattggtgctgtgaccatggctggcatcatggcggcagacagaagtgaatcacctagtttgacccaagagagagccaacctgagcgatgagcagtgcacacaggtgacctccttgttgcagttggttcattcctgcagtgagcagtctcctcaggcctctgcactttactatgatgaatttgccaacctgatccaacatgaaaagctggatccaaaagccctggaatgggttgggcataccatctgtaatgatttccaggatgccttcgtagtggactcctgtgttgttccggaaggtgactttccatttcctgtgaaagcactgtacggactggaagaatacgacactcaggatgggattgccataaacctcctgccgctgctgttttctcaggactttgcaaaagatgggggtccggtgacctcacaggaatcaggccaaaaattggtgtctccgctgtgcctggctccgtatttccggttactgagactttgtgtggagagacagcataacggaaacttggaggagattgatggtctactagattgtcctatattcctaactgacctggagcctggagagaagttggagtccatgtctgctaaagagcgttcattcatgtgttctctcatatttcttactctcaactggttccgagagaatgaccttctcaccttcactgtggaactactgttcgtcctggcacaggcatatgcctactgttttgattcaattgtaaatgccttctgccaggaaacatcacctgagatgaaggggaaggtgctcactcggttaaagcacattgtagaattgcaaataatcctggaaaagtacttggcagatgcatataccaatggaacagaagagagcccagaaataagtccatacacctacaatgaactcattctcagcaaaggtgccaagaatatacattggggaaagacactctcttcaataaatggtgttgggaaaactggatatccatatgcagaagaatga

SEQ ID NO: 119982 - DNA, 2301 bp, Homo sapiens
atgtcccgaaaggggccgcgagcggaggtgtgtgcggactgcagcgccccggaccctggctgggcatccatcagcaggggtgtgctggtgtgtgacgagtgctgcagcgtgcaccggagcctgggacgccacatctccattgtcaagcaccttcgccacagcgcctggcctcccacgctgctgcagatggtgcacacgcttgccagcaacggggccaactccatctgggagcactccctgctggaccccgcacaagtgcagagcggccggcgtaaagcaaacccccaagacaaagtccaccccatcaagtcagagttcatcagggccaagtaccagatgctggcatttgtgcacaagctttcctgccgggacgaatgatggagtcaccgccaaagaccttcagcaaagcaaactaacactcgagcgtgcggaacaggcaaaccctggaagacatgtctgcgcctgctctcccctgggtgccccaggccaacttcttccacccagagaagggcaccacacctctgcacgtggctgccaaggcaggacagacactgcaggccgagctgtcttgtagtgtatggggctgaccctggctcccctgatgttaatggccgcacacccattgactatgcccaggcaggcggggcaccatgagctggcggaaaggctggttgagtgcccaatatgagcctcactgagcggctggccttctacctctgtggacgcaagccggatcacaagaatgggcattacatcatcccacagatggctgacagccttgacttatccgaattggccaaagctgctaagaagaagctgcaggcgctcagcaaccggctttttgaggaactcgccatggacgtgtatgacgaggtggatcgaagagaaaatgatgcagtgtggctggctacccaaaaccacagcactctggtgacagagcgcagtgctgtgcccttcctgcctgttaacccggaatactcagccacgcggaatcaggggcgacaaaagctggcccgctttaatgcccgagagtttgccaccttgatcatcgacattctcagtgaggccaagcggagacagcagggcaagagcctgagcagccccacagacaacctcgagctgtctctgcggagccagagtgacctcgacgaccaacacgactacgacagcgtggcctctgacgaggacacagaccaggagcccctgcgcagcaccggcgccactcggagcaaccgggcccggagcatggactcctcggacttgtctgacggggctgtgacgctgcaggagtacctggagctgaagaaggccctggctacatcggaggcaaaggtgcagcagctcatgaaggtcaacagtagcctgagcgacgagctccggaggctgcagcgagagatccacaagctgcaggcggagaacctgcagctccggcagcctccagggccggtgcccacacctccactccccagtgaacgggcggaacacacacccatggcgccaggcgggagcacacaccgcagggatcgccaggccttttccatgtatgaacctggctctgccctgaagccctttgggggcccccctggggacgagctcactacgcggctgcagcctttccacagcactgagctagaggacgacgccatctattcagtgcacgtccctgctggcctttaccggatccggaaaggggtgtctgcctcagctgtgcccttcactccctcctccccgctgctgtcctgctcccaggagggaagccgccacacgagcaagctttcccgccacggcagtggagccgacagtgactatgagaacacgcaaagtggggacccactgctggggctggaagggaagaggtttctagagctgggcaaagaggaagacttccacccagagctggaaagcctggatggagacctagatcctgggcttcccagcacagaggatgtcatcttgaagacagagcaggtcaccaagaacattcaggaactgttgcgggcagcccaggagttcaagcatgacagcttcgtgccctgctcagagaagatccatttggctgtgaccgagatggcctccctcttcccaaagaggccagccctggagccagtgcggagctcactgcggctgctcaacgccagcgcctaccggctgcagagtgagtgccggaagacagtgcccccagagcccggcgccccagtggacttccagctgctgactcagcaggtgatccagtgcgcctatgacatcgccaaggctgccaagcagctggtcaccatcaccacccgagagaagaagcagtga

SEQ ID NO: 119983 - DNA, 1341 bp, Homo sapiens
  misc_feature (1)...(1341): n = a,t,c or g
gtgtttgacctggtgatgcttttcatcatctatagcaccaatactcagacaaagaagtacattgacagggtgctaagaaataagattcgatcaggctgcattcaagaacagctgctccagagtacattctctgttcattacttaggcattttagattatctggataacatatcccctcagcaaatacgaaaactcttctatgttctcagcacactggcatttagcaaacagaatgaagccagcagccacatccagcaactacactcgagcgtgcggacaggcaacctggagacatgtctgcgcctgctctccctgggtgcccaggccaacttcttccacccagagaagggcaccacacctctgcacgtggctgccaaggcaggacagacactgcaggccgagctgcttgtagtcgccgcaaagaatccggaaaaacgtgaatataccaccgaaaacggatctccggctgaaacccctacgtgtagcgcaggaaaacgaggaacaccacgaaccaagatgtcggacatctccagcgaggacctgcgtcgtgaaattcaggcggttttgaaggacgccgatttggcgaccatttcggcaaagagggtgcgcgagcaggtggagggaaagctgaactgctcgttgctgagccgcaagaaggagttcgacaagatcgtgatggaggtgatcaacgagcagcaggacgaggaggacgaagacgatgacgagggcaaggatcccgatgccgatcccgacgatgagagcgagcccagcgaggaggaggaccccagcagcagcgaggaggaggccgccaagaagaagaagcagacccccaagaagaggccacagcccacgaagcacaaggcgcccaagaagaagcgcaagaccctaaatgccgacgattccggcaccgctgatgaacgactgccnnnnnnnnnnnnnnnnnnnnnnnnnnnnnnnnnnnnnnnnggtgtagagtacaatagcacacttcacacttgtcctgaagtggttggtgccttagtgacccatatctgcagtgggaatgaagctgaagttgatactgccttagatgtccttctagagttggtagtgttaaacccatctgctatgatgatgaatgctgtctttgtaaagctcagcaaccggctttttgaggaactcgccatggacgtgtatgacgaggtggatcgaagagaaaatgatgcagccggattccagcccaaactctgggtctggatgagtggcactggccttgttccatttgtctgtccccagccggccacgcccagccttgccctggcccggcctagctctgcgtgcccaaagaccacccctgtctga

SEQ ID NO: 119984 - DNA, 531 bp, Homo sapiens
ttactctggtgcccttgaggaggaggaactagagacttcagtagcaacaggcaaatggctggccaggtaattgggaatggggtggaatgacggcttttgcggattacaaggaggtacatctgcagagggaattaaggacaacctgggtgtcctggaagcccatttgagttggaaacggtaatggtggattttccagctctgatactttcttagcgtcgtgcattccaccccacacctgttacttctgctagaagcaccctccactcctttggacaactgcgtcttccccattccatgtagtctggtgggacccttctgattagtatgatgcaggccaatcagagtctttccttggaattttctaaatggacctccttccccttggattaggaactgtgaaggtgtgatctcagagctgtcagtgaacacaccagattgctcagtagtatctgatccccacccccaaacctcagtcacttgacaagtttccacaatcattgtgatagaagaaggagttcctgtgtagggcat

SEQ ID NO: 119985 - DNA, 1738 bp, Homo sapiens
gaattcctcgcctcgggacccgcggtccccgctcttgctggatttttcaagccacattcaattgataggatgaaaaaatttaagagaaggctatccctcacactccgaggaagtcagactattgatgaatcattgtctgaattggctgaacaaatgactattgaagaaaacagcagcaaggataatgagcctattgtgaagaatggcaggcctccaacgtctcacagtatgcattccttcctccaccagtacacaggatctttcaagaagcccccattgcggagaccacacagtgttattggagggagccttggctccttcatggcaatgcccagaaatggaagcagattagatattgttcatgaaaatctaaaaatgggatcagatggtgagagtgaccaagcttctgggacatcatctgatgaagtccagtcacctacaggtgtttgtctcagaaatcgtatacatagacggatctcaatggaggatttaaataagcggttatcactgcctgcagacatcagaatacctgatggatatcttgaaaagttgcagataaacagtccaccatttgaccaaccaatgagtcgaaggtctcgtagagcttccttatcagaaattggctttggaaaaatggaaacctacatcaaattggaaaagcttggagagggtacatatgcaacagtatataaaggaagaagtaaattgacagagaatttggtggcattaaaagagatccgattggaacatgaagaaggtgcaccctgcacagctataagagaagtttcactattaaaggatttaaaacatgcaaatatagtaaccttacatgacattgttcacacagataaatccttgactttggtgtttgagtatctggataaagacctgaaacagtacatggatgactgtggaaacatcatgagtatgcacaacgtaaagctgtttctgtaccaaattctacgtggtttggcatattgccatagaagaaaggtattgcatcgagacttgaaaccacagaacctcctcattaatgagaaaggagaattaaagctagcagattttggactagcccgagccaagtcagttcccacaaagacctactcaaatgaagttgtcacactatggtaccggccacctgatgtgcttcttggttcctcggagtacttaacacagattgacatgtggggtgttggttgcattttctttgaaatggcttctggaagacctttatttccaggatcaaccgtggaagatgaactgcacttaattttccgactgctaggaactccatctcaggaaacttggccaggtatttcttcaaatgaggagttcaagaactacaactttccaaaatataaaccagagcctctaattaaccacgcacccaggttagactctgaaggaattgagttgataagaaaatttcttcagtatgaatctaagaaaagggtttcagctgaagaggccatgaaacatgtgtactttcgaagtctgggaccaagaatacatgctttaccagaaagtgtatcaatattcagtttgaaagagattcagttgcaaaaggacccgggttttcgaaattcttcttatccagagacaggacatgggaagaacagaagacagagcatgctcttttaagtctgataacatggtttcaagcccagcccccagcctttcttaccaatcaaggactcagaactgaaggcaattatttcttttggtggacttggaatct

SEQ ID NO: 119986 - DNA, 1101 bp, Homo sapiens
atgggatcagatggtgagagtgaccaagcttctgggacatcatctgatgaagtccagtcacctacaggtgtttgtctcagaaatcgtatacatagacggatctcaatggaggatttaaataagcggttatcactgcctgcagacatcagaatacctgatggatatcttgaaaagttgcagataaacagtccaccatttgaccaaccaatgagtcgaaggtctcgtagagcttccttagggccgctgtgtttctcggaatgcgcgcgggatgcccggttgccacgagaccgtcgccaggcaaccgcgtgtacacatactccaggcgggccggggcgcgtcaatatggcggcgcagggctccccctcgagctctccgtcagacgactctaccacctcggggtctctgccagaactgccgccgacctccaccgcgacttcgaggtcgcccccagagtcgaaggggagctcccggagctcgctgcttcagtggacctgccccgaggactcattgcccctagccgtgttttatgggccgctggacgcgaaaaacccgctcctggcctcttgtgagaaggagatccaggagttgttaggctttatgaggaaaaagaaggctttagccaccacggaggaagagaagcacgaattccgccggcgttgttcttgggggaatgctttccaacttttgctcattcagtatgatattggctgtgactttgtcattgatggctcttattatcttgaggaatacaaactggcccttttacaatgctatggaagatatcttcagcagttcaataccaattttgatgagaataaagtggatgtaactcaattcaaagctacctttttcccaaaaggctttaaagataaaactgctggacttacactaagaaagtatcagagctggaaaatccaccattaccgtttccaactcaaatgggcttccaggacacccaggttgtccttaattccctctgcagatgtacctccttgtaatccgcaaaagccgtcattccaccccattcccaattacctggccagccatttgcctgttgctactgaagtctctagttcctcctcctcaagggcaccagagtaa

SEQ ID NO: 119987 - DNA, 546 bp, Homo sapiens
aactcttcccaggttcttcagttttaatatttgtgggtaaatgaggctccatttcggctgctcacaatgccccagccctaccctcaaattaatataactgcagaccaactttgggggtcagtggctgtgctggtttagatgcacaagtggtttgccaggattgtgcatttgagcttgggaaaaaaccacttcaggtggagaacaatacccttcctctagtgctataaaacagggacctaaagaaccatatgcagattttatagctcggttacaggagtctcttaaaaaggtgattgcagatttggctgctcaggatatagtgttgtggttattagcttttgacaatgctaatcctgagtgccaggctgctctgcgacctatcagagggaaagcacatttagttgattataccaaggtctgtgatggtatcagagataaactgcataaggctactctgctagcccaggcaatggcaggactgagaatgggtaaaggaaatactccgtttcctggagcttgttttaactgtgggaagcatggtcatac

SEQ ID NO: 119988 - DNA, 648 bp, Homo sapiens; identical to SEQ ID NO: 118026

SEQ ID NO: 119989 - DNA, 378 bp, Homo sapiens
ttactcattgtgactggttgttccactttcctcaggttttcttttatcatcagtgacagcttcttgatctgtccccaggtgggtggcagagtttgactggtattgctcatgacagttgaagtcctcctcagcatcagtatcaacctggccagtgtcctccagaaaagaaagatctggagggtcattttcttcaaaataataatgagggggtgcagaatggtagggatgaacctctccctcctttgccgctttagctttagctggtaaataaacatgctttgtaacctcttctgttacttcgttatactctccttcctcctccacatcagtgtgaaaaagttccaaggtggaatgaaccagaccccacacttttcccat

SEQ ID NO: 119990 - DNA, 507 bp, Homo sapiens
  misc_feature (1)...(507): n = a,t,c or g
aagctgtnnnttatgacgtatgtacgactggcgcagagcgacgaggtgacaggagaatccgtaccctactgcaccccctcattattattgtgaagaaaaagagtggcctgaccctccagatctttcttttccagaggacagtgggcaaaaattagttgccccagtgactgttcaagcagcacctcgagcgactgctcttagttctattcagtcaggaattcagcaagctagatgagaaggtgattaagaggcttggcagttccctgttagactacactgcccagaccaacagggaaatattgtagctacatttgagcctttttgttttaaattactcaaagaatttaaacaagctattaatcagtatggaccaggttctcctttttgtaatgggactattaaagaacattgctgtttccagtcagatgattcctactgactgcgacgctcttactcaagcttgtctaactcctgcttagntcttacaatttaaaacttggtgggcag

SEQ ID NO: 119991 - DNA, 936 bp, Homo sapiens; identical to SEQ ID NO: 119402

SEQ ID NO: 119992 - DNA, 843 bp, Homo sapiens
atgggaaaagtgtggggtctggttcattccaccttggaactttttcacactgatgtggaggaggaaggagagtataacgaagtaacagaagaggttacaaagcatgtttatttaccagctaaagctaaagcggcaaaggagggagaggttcatccctaccattctgcaccccctcattattattttgaagaaaatgaccctccagatctttcttttctggaggacactgggacccccagacttgctgctgctgccaccactaaggccaatgccaatacaaccactgctgctgtcaccctcgatgcaccggcactccctacaaggcccctactagctggccacagccacagccctgccacagggagtgtaacccctgatagcgcccccaacccgtccccacctcgaacactgcagcacccaatagagaccccaacccgcccccacactgggagaaataacgcccgtaacagtgccccaagccccactccatccccgggcagtgcagccctggatagcaccccaacccgctcctggctgcaggcagtgatgcccggaatagcgcccccaagccgctccccaccgtgggcagtgcagttgagaatactcacctacctgggctgcctttctaccactccagcagccgtgcagtccctgtcacagccaccagcttcagtgaggcaagccagggtgccacaggctccggcctccagcttgtgtcaggagaaaccaccttcccctccccctgtagcaccgcacggagctgctgcagctgctcgtccgccatcttaccactccagctgcgcttcagtcgctgtcgtcgcagccaatgttctaattggatga

SEQ ID NO: 119993 - DNA, 648 bp, Homo sapiens
atgggacaagtgtgggctgtggttcgttctaccttggaactttttcacactgataatgaggaggaaggagagtataacaaagtaacagtagaggttacagaccaggtttatttgccacctaaagctaaagcagaaaaggagggagaggttcatccctacccttctgcaccccctcattattattttgaagaaaacgaccctccagatctttcttttctggaggacactggtggattagaagatattattccgaatatcacaggggttgtacatccccaagtgatattgttaatatccagtgggaaagaggatgatattactccccatatcacgggggatgtaaacccgtttgtgatattagtaacaatatcactgaaggggtctacaccccctgtgatagtgacagtaatatcctctccccccccagatattaggaacaataacacgggaggatgtacaccccctgtgacattgacagtaatatcaacctctccccccaccccggatattaggaagaataccaccgggggacacttgcttcccttcttcctgccctcggacatgagactccaggttcttacgcctttggactctgggactttcaccagcggcttccccgaggctctcaggccctcggcctcatactga

SEQ ID NO: 119994 - DNA, 1161 bp, Homo sapiens
atgggtatttcctgcccagggtcctcaaaaatgcttaatagtcgagcgctccctgtgctgaaactgacccaaggagctctgcgggattgtaaagaacgagcaaactacacaaacttcaacatttacaaggctgtagagagccagggaaagtttgtatgtgttctctataatggacagcaaagccctgaatatgtcatgataccatgtacatctgtgtctccaacaggccaggaagtccctgaggacagaggaatgagaatggtgatgaagaataaacccaataagcctagcaaaatgcagagtctgaaatccagtaagcatctcacaaattctgtcattgttattgctgtaggaattttcttctcggtcactttgcaagccagggacccccagctggatgatgccatagaacagcttagaggagtgtgcattagagcttgggaaaaaatcacttcaggtggagaacaatacccttcctttagtgctataaaacagggaccaaaagaaccatacattgattttatagctcggttacaggagtctcttaaaaagatgattgcagattcggctgctcaggatatagtgttgcagttattagctttcgacaatgctaatcccgattgccaggctgctctgcgacctatcagagggaaagcacatttagttgattgtatcaaggcctgtgatgatattggagatgggtctagtaatggtaaagcttcttattttggctcaaaaagtaaagttttccagacatcctatacttcagctcaaaaagcagagcttgtagcggtaattgaggtattgactgcttttgatatgcctattaatgtgatttctgattcttcatacatggtttattccacacagttaattgaaaatgctcagttacgatttcatacagatgaacaactgatgactttatttacccaattgcaaacagcatttaggagtacaatgcatcctttttacatcactcacattagggctcatacacctcttccaggacctttgactgaagggaatcaaatggccgatcgcctagttgctaatgcaatatctaatgctagacactttcacaatttaacccatgttaatgcctctggtctcaaacgcagatacaacattacctggaaagaagctaaagctattatccagtga

SEQ ID NO: 119995 - DNA, 981 bp, Homo sapiens
atgggcattgccttgggctccccaactactggtcctaaagccatgaagcagaatctgtctatagggccagctggcatcctccttccacagcctgtcatgacccctggatgcccagctgccgcacctcccgtggccccacgctgtggctacgtgttgtctgaagacgcctggggaaaccttcagggcctctgtactggcctgtcatgtggtcaaccagtggcgccatgggccacggattccggcggggctcaggatccagtggctctcctacctccttttccttcacgtgggttgttgggcccctcctgcatgcagcgcagccaggtggtgaagggtgggcgacagagtgagatttcatctcaaaacaaaaaggtgattgcagatttggctgctcaggatatagtgctgcagttattagcttttgacaatgctaatcctgactgccaggctgctctgcgacctatcagaggcaaagcacatttagttgattttatcaaggcctgtgatgttatcggaggcatcccgaatttgctcctccatccacggggactgagagccattactattgctgtatttggtaagcaaaatacgtacatcaggctcgaaccctttaagatcaacgttcttgagcagatcacgaagcatatcgaaaaactgcagtgcggaggtgtagtcaaacaactcagcaggcgtgggaacaatcagcacatcagcagcacatacgacattaatcgtgccgatacccaggttaggcgcgctgtcaataactatgacatcatagtcatgagcaacagtttcaatggccagtcggagcatcaggtgtggatcgcagggttactgtactggaaacaggctcagtgccaatacagcaccaagaatgtccatggccacctcacccaccacatctgcaagggtgacatcacaagccatctgcagctctggacaacacaagcccctgttggcctggtgatgaagctgtga

SEQ ID NO: 119996 - DNA, 1185 bp, Homo sapiens; identical to SEQ ID NO: 119895

SEQ ID NO: 119997 - DNA, 2129 bp, Homo sapiens
tccaggttgaagggtcgccagagcaacagtttgaggattggggaactaagctggaggacacccaagtactcttaagcaatcctcgtagtgagtaagatggggagcttggaagcatcgggtaacaatgggacaagtgtgggctctggttcgttccaccttggaactttttcacactgatgatgaggaggaaggagagtatgacgaagtaacagaagaggttacagagcaggtttatttgccagctaaagctaaagtggcacaggaggaagaggttcatccctacccttctgcaccccctcattattattttgaagaaaaagagtggccagaccctccagatctttcttttctggaggacactgggcgaaaagtagttgccccagtgactgagcagcacctcgagcgactgctgtcagttctattcaggcaggagttcagcaggctagacgagagggatgatgccgtagagcagcttagaggagtgtgcattagagcttgggaaaaaatcacttcaggtggagaacaatacccttcctttagtgctgtaaaacagggaccaaaagaactgtatgcagattttatagcttggaatctcttaagacaggagtctcttaaaaaggtgatttcagattcagctgctcaggatatagtgttgcagttattagcttttggcaatgttaatctcgattgccaggctgctttgcgacctattagagggaaagcacatttagttgattatatcaaggcctgtgacggtatcggagctaagcaagacagtgaacggtttgcatttacaattcctgtggtaaacaatctgcagcctgctaagcattttcattatttcacagatgggtctagcaatggtaaagcttcttattctggatcaaaaggccaaaaccagcagccaatttggatactatcaagacacctaaaaccttatcatgagccagatgccaaggaagagattccaggaggatcccgaggaccccctggttgcagccatgtcgagactgatgctgaggaggaccctaactgtcacgagcaacacccgttgaacacagccacccacctggggacagatcaagaagctgtcacagatggtggaagaaaacctgaggaaagcgggacaactggtcacaatgaataatttaatggtagctatgatagtggttatcaccactactgaggaacaagagtatagtgaagtaacagaagaggttacagagcaggtttatttgccagctaaagccaaagtggcaaaggagggagaggttcatccctacccttctgcaccccctcattattattttgaagaaaaagagtggcctgaccctccagatctttcttttctggaggacactaggcaaaaagtagttgccccagtgactgttcgagcagcgcctcgagcaaccgttctcagttctattcaggcaggaattcagcaagctagatgagagggcgatttagaggcttggcaattccctgttagaatacaccccccagatcaacagggaaatattatagttacatttgagccttttccttttaaattatttaaagaatttaaacaagctgttaatcagtatggaccaggttctccttttgtaatgggactgttaaagaatgttgctgtttccagttggatgattcctactgactgggatgctcttactcgagcttgtctaactcctgctcagttcttacaatttaaaacttgtgctatgaaacagggaccaagggaaccatatgttgattttatagctcggttacaggagtctcttaaaaagatgattgcagattcggctgctcaggagatagtgttgcagttactagctttcgacaatgctcatcccgattgccaggctgctctgcgacctatcagagggaaagcacatttagttgattatgtcaaggcctgtgatggtattggagagtatacgccttctacttatgaaaagaaagttaactgtaaaacagcttcatgcaggtccttcaggaggtatccagaagaaggcattgttatcacaggagatgacagctccatgcgtgtcgttgtccctgaggaccttccagtggggcaagatgtggaggtggaagacagggatattgatgatcctgaccctgtgtag

SEQ ID NO: 119998 - DNA, 303 bp, Homo sapiens
atgagctgcgcggggcgggcgggccctgcccggctcgccgcgctcgccctgctgacctgcagcctgtggccggcacgggcagacaacgcgagccaggagtactacacagcgctcatcaacgtgacggtgcaggagcccggccgcggcgccccgctcacgtttcgcatcgaccgcgggcgctacgggcttgactcccccaaggccgaggtccgcggccaggtgctggcgccgctgcccctccacggagcggaaggagcccccgagagcagcagcgaggaggaccacacttccccaactttctga

SEQ ID NO: 119999 - DNA, 424 bp, Homo sapiens
aggaattacgcacgaggcgccctccgcaagggcggcggagaccggttacaggtgatttctgattttgacatgaccttgagcaggtttgcatataatggaaagcgatgcccttcttcttacaatattctggataatagcaagatcatcagtgaggagtgtcggaaagagctcacagcgctccttcaccactattacccaattgagatcgacccacaccggaccgtcaaggagaagctacctcatatggtggaatggtggaccaaagcgcacaatctcctatgtcagcagaagattcagaagtttcagatagcccaggtggttagaaattatccgacagatgaaagtgttccaccccaacatccacatcgtgtctaactacatggattttaatgaagatggttttctccagggatttaagggccac

SEQ ID NO: 120000 - DNA, 2979 bp, Homo sapiens
atggcggctgcggcagtggcggcggcggcggcggcggccgcggctgcatctcttcagaacgagcagcggcgccagggcctcttctgcgacattaccctgtgcttcggcggggctggaggccgcgagttccgggcccaccgctcggtactggctgccgccaccgagtacttcacgcccctgctctcgggccagttttccgagtcccgctcgggacgggtggagatgcgcaagtggagctccgagccggggcccgaacccgacacagtggaagccgtaatcgagtacatgtacaccgggcgcatccgcgtcagcacgggcagcgtgcacgaggtgctggagttggccgacaggttctctgttggggccataaatgctccaggagattttggcccaagtgtgtccatgcacagtagcactggtgccgctgctcctggggagaaggaccagagtcagcgacctgcaggcctggaaagtaggataaacaacccagacatgcgagtgcagatcctcaaagattacgtcaggcagcacttccctgccactcctctgctcgattatgcactggaagtagagaagattaccacctcgaagaagccaaatcttatcctgaatgtagatggtctcatcggagtcgcatttgtagacatgcttagaaactgtgggtcctttactcgggaggaagctgatgaatatattgacattggagccctcaatggcatctttgtgctgggaaggagtatggggttcattggtccggagctgctccctaagcctaacagctgtctagctccaggaaggaggccaaaagcgtccactgaccgactcagaattttggaaggccaagtcaggcagattgctagagcccagaagttcaagtacagcctgggtaacatggtccagtttggccatgctggagcttgtgccaaccaggcttctgaaactgcagtagccaagaaccaggctttgaaggaagcaggagtgtttgtgccccggagctttgatgagcttggagagatcatccagtctgtatacgaagatctcgtggccaatggagtcattgtacctgcccaggaggtgccgcccccaaccgtgcccatggactactcctgggccaggagggggatttggcagggtcataggacaatagtggagggaagggagggatataagaccttcttcaacacactctaccataacaacattccccttttcatcttttctgcgggcattggtgatatcctggaagaaattatccgacagatgaaagtgttccaccccaacatccacatcgtgtctaactacatggattttaatgaagatggttttctccagggatttaagggccagctcatacacacatacaacaagaacagctctgcgtgtgagaactctggttacttccagcaacttgagggcaaaaccaatgtcatcctgctgggagactctatcggggacctcaccatggccgatggggttcctggtgtgcagaacattctcaaaattggcttcctgaatgacaaggctgctgatatgatacggagaaatttccacaaagtgattcaggatgaagaattttatacgttacctttccatctcattagagactggctttcagatttggaaattacagttgattctgaagaggttctctttgaaaccgttttgaaatgggttcagagaaatgctgaagagagagagagatactttgaagaactttttaaattgctcaggttgtcccagatgaaacctacctaccttactcgacatgtcaaaccagagaggctggtagccaataatgaagtttgtgtcaagttggtcgctgacgcagtggagagacatgctctgagagctgagaatatacaatctggcacatgccagcaccccacttctcatgtgtcactattgcctcgttatgggcaaaacatggatgtgatcatggttattggaggtgtgtcagaaggaggggactatttaagtgaatgtgtgggatactttgttgatgaggacagatgggtaaatctgccacatattcataatcacctcgatggacatgctgttgcagtaacagaatcctacgtgtatgttgctggatcaatggagccagggtttgctaaaactgtagaaaggtataacccaaatttgaatacatgggaacatgtttgtagtctgatgacaagaaagcattcttttggactaacagaagtcaaagggaagctctatagcattggaggacatggcaactttagtcctggttttaaagatgtgactgtttataatcctgagcttgataaatggcacaacttggaatcggcaccaaagattcttcgagatgtcaaagcactagccattgaagaccggtttgtatacattgccgcccgcactcctgtagaccgggacactgaagatggattaaaggctgtaattacttgctatgatacagagactcgacagtggcaagatgtggaatctttgccgcttattgacaattactgctttttccaaatgtctgtggtcaattcaaacttttatcagacagcatcatgttgtcccaagagttattgtttagaaaacgaagaggcagtaagaaaaattgccagccaagtgtctgatgagatccttgaaagcttgcctccagaagtcctaagcatcgaaggagcagccatttgctattacaaagatgatgtcttcattataggaggctggaaaaacagtgatgatattgataaacagtatcggaaagaagcctaccgatattgtgcggagaggaagaggtggatgcttcttcctcctatgccacaacctcgttgtagagccactgcttgtcacgtgaggatcccataccggtacttgcatggcacacagagataccctatgcctcaaaacctgatgtggcagaaggaccgcatcagacagatgcaagagatacatcgtcacgccctgaacatgaggcgagtgccaagctctcagattgaatgctag

SEQ ID NO: 120001 - DNA, 544 bp, Homo sapiens
tttcgtgggatggcagaggaggtgaggagggatgaagcgtccggagtggggcgggcccggactccgacccccggggcgcttcgagccccccagctggtcaccgaggcaccgccgcttcacccaggtgagcaccctgatgaaggccacggtcctgatgcggcagcctgggcgggtgcaggagatcgtgggcgccctccgcaagggcggcggagaccggttacagatttctcaatatggtcatgctgcttcctctaattggacagaaggcgcccacaccagtacctagggccgatattatcctccccaagccagcggctccccagtgatttctgattttgacatgaccttgagcaggtttgcatataatggaaagcgatgcccttcttcttacaatattctggataatagcaagatcatcagtgaggagtgtcggaaagagctcacagcgctccttcaccactattacccaattgagatcgacccacaccggaccgtcaaggagaagctacctcatatggtggaatggtggaccaaagcgcacaat

SEQ ID NO: 120002 - DNA, 4556 bp, Homo sapiens
atgcatgctgagtacttcatgaacaatgttaagatgaatgactatgtcaaagacagtgaggaatgcaaaccagtcatcattaatgccctaaaggccatgtatgacctcaacatgaatggaccctctaattctgatttcaccaacccactcaccagaccacgcttgccctatgccatcctctttgcaattggtggctggagtggtgggagccccaccaatgccattgaggcatatgacgctcgggcagacagatgggtgaatgttacttgtgaggaagagagtccccgtgcctaccatggggcagcctatttgaaaggctatgtgtatatcattggggggtttgatagtgtagactatttcaatagtgttaagcgttttgacccagtcaagaaaacttggcatcaggtggccccgatgcactccagacgttgctatgtcagtgtgacagtcctcggcaattttatttatgccatgggaggatttgatggctacgtgcgtctaaacactgctgaacgttatgagccggagaccaatcaatggacactcatcgcccccatgcacgaacagaggagtgatgcaagcgccacaacactttatgggaaggtaaaggaccaggcggggctcattccaccggatgccaccctctacttcgatgtggttctgctggatgtgtggaacaaggaagacaccgtgcaggtgagcacattgctgcgcccgccccactgcccccgcatggtccaggacggcgactttgtccgctaccactacaatggcaccctgctggacggcaccttcttcaacaccagctacaggaagggcggcacttatgacacctacgtcggctctggttggctgatcaagggcatggaccaggggctgctgggcatgtgtcctggagagagaaggaaattatcatccctccattcctggcctatggcgagaaaggctatggtgagggtgggaaaggacacaaggggaaattccgcagaagagggaaaaaccaggcctccacatacagttgctcaggttgtatactgcacgagggcatccaaccaaggactcaagggacagtgatccccccacaggcctcgctggtctttcacgtcctcctgattgacgtgcacaacccgaaggacgctgtccagctagagacgctggagctcccccccggctgtgtccgcagagccggggccggggacttcatgcgctaccactacaatggctccttgatggacggcaccctcttcgattccagctactcccgcaaccacacctacaatacctatatcgggcagggttacatcatccccgggatggaccaggggctgcagggtgcctgcatgggggaacgccggagaattaccatccccccgcacctcgcctatggggagaatggaactggagacaagatccctggctctgccgtgctaatcttcaacgtccatgtcattgacttccacaaccctgcggatgtggtggaaatcaggacactgtcccggccatctgagacctgcaatgagaccaccaagcttggggactttgttcgataccattacaactgttctttgctggacggcacccagctgttcacctcgcatgactacggggccccccaggaggcgactctcggggccaacaaggtgatcgaaggcctggacacgggcctgcagggcatgtgtgtgggagagaggcggcagctcatcgtgcccccgcacctggcccacggggagagtggaggtgttaccaaaatagtctcagtagtcttaaaatatctttatgcttatgaactccacccttgtatccaaaagaactggtgggaagaaaagatccctctggcaaaaaccaccctggagaagacctggctgttccacgagatcggccgctgctacttggagctggaccaggcctggcaggcccagaattatggcgagaagtcccagcagtgtgccgaggaggaaggggacattgagtggcaactgaatgccagtgttctggtggcccaggcacaggaagcttcactgtatgaagatagaataataacaagagagaaggacatgaggagagtgagagatgagcccgagaaggtggtgaagcagtgggaccatagtgaggatgagaaagagacagatgaggacgatgaggcttttggggaagctctgcagagcccagcaagcggaaagcagaaggatgtactgacccagctatctcttttgctgagggctgaagttgctttggtattcgatttgataaacaacccagacatgcgagtgcagatcctcaaagattacgtcaggcagcacttccctgccactcctctgctcgattatgcactggaagtagagaagattaccacctcgaagaagccaaatcttatcctgaatgtagatggtctcatcggagtcgcatttgtagacatgcttagaaactgtgggtcctttactcgggaggaagctgatgaatatattgacattggagccctcaatggcatctttgtgctgggaaggagtatggggttcattgttacttcgggccatctggttgtatacgtgcaggaagccaattttgagaatgttctgcacaccaggaaccccatcggccatggtgaggtccccgatagagtctcccagcaggatgacattggttttgccctcaagttgctggaagtaaccagagttctcacacgcagagctgttcttgttcccaaacaggatttggctcacatcttcattaaaatccatgtagttagacacgatgtggatgttggggtggaacactttcatctgtcggataatttcttccaggatatcaccaatgcccgcagaaaagatgaaaaggggaatgttgttatggtccagtttggccatgctggagcttgtgccaaccaggcttctgaaactgcagtagccaagaaccaggctttgaaggaagcaggagtgtttgtgccccggagctttgatgagcttggagagatcatccagtctgtatacgaagatctcgtggccaatggagtcattgtacctgcccaggaggtgccgcccccaaccgtgcccatggactactcctgggccaggctcacagcgctccttcaccactattacccaattgagatcgacccacaccggaccgtcaaggagaagctacctcatatggtggaatggtggaccaaagcacacaatctcctatgtcagcagaagattcagaagtttcagatagcccaggtggttagagagtccaatgcaatgctcagaatccctctgtgtcgtaccaacagccgcatcgttccgaggctgtggaggccgggcgcagcggcgtcaagatggcggctgcggcagtggcggcggcggcggcggcggccgcggctgcatctcttcaggtactggaaatggagagcatggagacgggccgccgccggctcggcaggactggccgccgaggtccgaggcagcggcacggtggacttcgggcctgggccggggatctctgcaatggaggcgagcgggggcgatccgggcccagaagccgaggatttcgagtgcagctctcactgctcagagctgtcctggcggcagaacgagcagcggcgccagggcctcttctgcgacattaccctgtgcttcggcggggctggaggccgcgagttccgggcccaccgctcggtactggctgccgccaccgagtacttcacgcccctgctctcgggccagttttccgagtcccgctcgggacgggtggagatgcgcaagtggagctccgagccggggcccgaacccgacacagtggaagccgtaatcgagtacatgtacaccgggcgcatccgcgtcagcacgggcagcgtgcacgaggtgctggagttggccgacagctctggcttccaggcgaagagcacccacctcactgcagccctgccagatgtaccatgcgccacatacttccatgtgatcgccctgcagacagacagcatggccgttcagttcaggaaatattcgccgagtgtagattggctccaggctgccaagctcaaatgtgccttggacgatgccaacaagggtatcatcagagaactgaggaaaaccaactacgtggagaatctcaaagaaaaaagcgagggaggaaagagcaccaccctcttcagccgccacaccaaggccattgtgtggggcatgcagacccgggccgtgcaaggcatgctggactttgactatgtctgctcccgagacgagccctcagtggctgccatggtctaccctttcactggggaccacaagcagaagttttactgggggcacaaagagatcctgatccctgtcttcaagaacatggctgatgccatgaggaagcatccggaggtagatgtgctcatcaactttgcctctctccgctctgcctatgacagcaccatggagaccatgaactatgcccaggtggaggagcggcgggagcgctacatggactcctatgacatcgtgctggagaaggacgagactctggatgtggtcaacgggctactgcagcacatcctgtgccagggggtccagctggagatgcaaggcccctga

SEQ ID NO: 120003 - DNA, 434 bp, Homo sapiens
  misc_feature (1)...(434): n = a,t,c or g
cttgaccnncncgtggaatnnnnnnnnnnnnnnnnnnnnnnnnnnnnnnnnnnnnnnnnnnnnttaagattcttttctttgtcttaactttagataacctgacgacaatgtgcctaggcgatgatctttttctgatgaatttcccagggnnnnnnnnnnnnnnnnnnnnnnnnnnnnnnnnnnnnnnnnnnnnnnnnnnnnnnnnnnnnnnnnnnnnnnnnnnnnnnnnnnnnnnnnnnnnnnnnnnnnnnnnnnnnnnnnnnnnnnnnnnnnnnnnnnnnnnnnnnnnnnnnnnnnnnnnnnnnnnnnnnnnnnnnnnnnnnnnnnnnncnnnnnnnnnnnncccttttttttggaaaaaaggtttatttttttcccccagtcttaaggggtggggggcaattttgggttattggaaccttccccccccggat

SEQ ID NO: 120004 - DNA, 461 bp, Homo sapiens
  misc_feature (1)...(461): n = a,t,c or g
ccccccagcccccccctttcgagatcatattgagagcggtggaattcctagatccaaatacaagaagcacaaagaacatctgggaaattcatcgcaaaaagatcatcatctaggcacattgtcgtcaggttatctaaagttaagatgaaagaaagagctgtgaaacaaaagcaccaggtaacctgtaaaggaaaacttacnnnnnnnnnnnnnnnnnnnnnnnnnnnnnnnnnnnnnnnnnnnnnnnnnnnnnnnnnnnnnnnnnnnnnnnnnnnnnnnnnnnnnnnnnnnnnnnnnnnnnnnnnnnnnnnnnnnnnnnnnnnnnnntatgaaggcaagatacagctttttcagacaaacagagaattcaccactaccaagccaccagtgcaagaatgctaaaaggaactctaaatcttgaaacaaatccaggaaacatatcaaaacagaacctctttaaa

SEQ ID NO: 120005 - DNA, 1107 bp, Homo sapiens
atggcagcagacctgggggccacaccctgcaaagccacaggggaagacatgcccaaggccttaggagtccactgcttgcaccagtgtgccttggatgtgggacatggggtcaaaggagattattttggagccttaagatttaacgactgctttgctggttttcagacgtctccagatcaactgcaagaacaaaccagcaatcccgagaggacccacagaccctctgaaaaaagcggactgctcctgcaggaccagggagacaccacaaataccgaagaagagaattctaaaagcttggaaaacatatttgggagagtaatcaaggaaaatttccaaagccttgttagagacctagacatccgaatacaagaagcacaaagaacacccgggaaattcatcacaaaaagatcatcacctaggcacattgtcatcaggttatccaaagttaagacaaaggaaagaatcttaagagctgtcagacagaagcaccaggaaaatatcacaatcctaaacctatatacacccaacactggagcccccagatttataaaacaattactaacagacctaagaaatgagatagacagcaacacaataatagtggggtacttcagtactccactgacagcactagacaggtcatcaagacagaaagtcaatgatgaaacagtggatttaaactataccttggaacaaatggacttaacagaaatatacagaacatttcatccaacaaccacagaatacacattctattcaacagtgcatggaactttctccaagatagaccatatgatatgccataaaatgagcctcaatgaatttaagaaaactgaaattatatcaagcactctctcagatcacagtggaataaaactggaaatcaactccaaaatgaaccttcaaaaccatgcaaatacatggaaattaaataacctgctcctgaatgagcactgggtcaaaaacgaaatcaagatggaaattgaaaaattcttcaaactgaacgacagtaatgacacaacctatcaaaacctctgggatatggcaaaggcagtgctgagaggaaagttcatagccctaaacacctacatcaaaaaaatgatgtag

SEQ ID NO: 120006 - DNA, 2367 bp, Homo sapiens
atggtctctggacacctgggctgtgcactgcagcagtgcgatgagggacagctggatgctgacgagcctcggcccgctttcctgacctggctcccaggatgctgcagtcagtcttcaccttccagtcaggagacctggagagtgttctctcgggagtctgtccagccaaagaagaaagagttaaagaaatgtgggctcctaaggacgtgtcagggatcatctcccccggtccagaccaggaagggctctagaccaaagggctctgggacaaaagtccattctcctaatcagactccaagggccacaacagctgagaaagggcggtctggctgggtaactccccagcacttccagggagaatgccctgatgcagtgattccggaagccaagaataagcacagggacagttcccggctcctggtggagcccaacgtttcatgggaattggctacacttggagagccacaagcatgtgccatgtgcccagcattaactgtcattatctccttgaatctgaacaatgctccaagtagcattgttaatgccattgtgcagataaagactttgatcctccatatggacagtggaataatgaggcctatcttgttctctcttctgttaagcccctggaagccttttgggaactcggaagcacttatcctcagacatgtggctcattcttgtttcctccaggagccaataggtggtagcaacgggccagcaaagaagcacctgctaagagacctggacattcaaatacaagaagcacaaagaacacctgggaaattcatcgcaaaaagatcatcacctaggcacattgtcatcaggttatctaaagttaagacaaaggaaagaatcttaagagctgtgagacaaaagcaccagatacagaattgtggaatggataagaattcaccaaccatctgctgccttcaagagactcacccaacacataaggacttgcacaaacttaagtgggcagttttgggtggagcagaccctccttctctcagttctgatggttcagagctggttctttctccctccagtccacttgaaagttcagttgagaaccttttgtcccctcttccttacctgtctagtctactctatacccacgactccctgaggaacttagcccaggaggtggcagatggggaagaaggcactgtgagagtacatcttcccttttctatgtctgatttggctctatgtaaagagaagtttggtcatttctctgaagatccaggaaaattcatagacgagtttgagaaattaactctgacctatggtttaacttggcaagatccgcatgttttgtgttctctgtgttgtacagtggaagagaaacaacgcattttggggacagctaggactcatgcagatgaagtattggctcataatctgaaccataatatgtatcaggcaggaggtatagcagttccagatcaagatccagagtggaactatcaaaggggcagtgaggacttggggaggagaattgaaactacaaaaaccagctatgggtccccaaactcctatggacagcttttggagatgacatttttagtttttaacaacagggacaaagcagaggaagcagaaagagcaagaaggacctcccacaaggtgcagctcttggctgcagcctccaacttacctcccacgtggggctgccctcctggctgttggcctggacaagggaagctgaaagatcattcttgtatacaaattatggagctagtttactccagccatctggatttaaaggatgagcctctagataatcctgaggtagaatggtttacagatggaagtagcttcgtgcaccaggaaaactggcaagctggggctgttgtcagtcaacatgaggtaattggatctcaagccttacaagcctctaccttagctcaaaaggcagaattaatagctcttattagagccctgcaactgggaaaggacctaagaattaacatttacactgattctaagtatgcctttctggaatggggactcctaactgttaagggttcccctgcaaaacattacttagaaattcggagaatattgggtgctgttttgctgcccaaggaagtagctataaaccattgtagaggttatcaaagaggagactctggtgcggctaagggaaactcctttgcagatgcaactgctaacgcagcagcactaaaggagccaataggacttattggcatgttggtgccctcagccactgcattgacagaccctagatatactaaagaggaacaagaatgggctaaaggtcagggtttaattaaagatcctctggctggcttatcaatgacaacaaactgttattaccaggtgctaatcagtggaaaataa

SEQ ID NO: 120007 - DNA, 469 bp, Homo sapiens
atgtacatggcaggaattgatggcgagaaggagcacgccaatgccaagaagatcctgcagagttcctatcagactgagattgggcagaccctggacctcctcacaacgccccagggcaaaattggcactgacatccaggacaacaaatgcagctggctggtggttcagtgtctgcaacgggccactccagaacagtaccagatcctgaaggaaaattacgggcagaaggaggctgagaaagtggcccgggtgaaggcgctatatgaggagctggatctgccagcagtgttcttgcaatatgaggaagacagttacagccacattatggctctcattgaacagtacgcagcacccctgcccccagccgtctttctggggttgcgcgcaaaatctacaagcggagaaagtgacctagagattgcaagggcggggagaggaggctctcaataaataatcgtgtaaccttaaa

SEQ ID NO: 120008 - DNA, 1464 bp, Homo sapiens
atgcaggaggactttcaagtagaggtactagtggaatatcctttacgttgtctggtgttggttgcccaggttgttgctgagatgtggcgaagaaatggactgtctcttattagccaggtgttttattaccaagatgttaagtgcagagaagaaatgtatgataaagatatcatcatgcttcagaagaaatatgatgctggatttctttcacagattggtgcatctttaatggatcccaataagttcttgttactggtacttcagaggtatgaacttgccgaggcttttaacaagaccatatctacaaaagaccaggatttgattaaacaatataatacactaatagaagaaatgcttcaggtcctcatctatattgtgggtgagcgttatgtacctggagtgggaaatgtgaccaaagaagaggtcacaatgagagaaatcattcacttgctttgcattgaacccatgccacacagtgccattgccaaaaatttacctgagaatgcttttcatattctggcattgggtttactagaagagaagcaacagcttcaaaaagctcctgaagaagaagtaacatttgacttttatcataaggcttcaagcacaaggagagaatttgatcccttgccttttccagcttctagaggctgcccatattccccagctgatggcccactttctccatcttcaaagtcagcagcaacagtgggccaagtcctcatgagcttcaggcagcaccagtgtctgggggcttgtcgagtacctgttctacaacatggaattccactcagcatagcatgtaaccagggaacccatttcacagatctggtagtgttccggagtggcccgttgcagacactgaaccagcagccagctgcatttattgtcctggatgtcagtgccaactttgctggtcacactggggtccccaaaagaggtgaagcaggatcttcttggcattgtcgtgctccttctcgccatcaatgcctgccatgtacatggctgcagctacaggaatgtagaagtagaaactgccttgtacttgacagtagatttgtacctcttttcagtgaatctgccaagatccgcattgccctggggggctgtgatgaggtccagggtctgcccaatctcagtctgatagaaactctgccggaagagctggatcaggttctggcaatagggctgctcccagcaatagagcttcagcaggcagtagatacatgcttccacaaggatagcatcactgatggcatccaaacccacgcccggcttctgaaaccagcagatctgttaccagcggtgagcaatgaatccgtgatgtcatttgccaccaggaacaaagcttgcagcagttccacacaccagcccacagtcagggcccgctggagactctcagcatcatgtttccttggctccaccagctcccagaacgctactagcactgtcaaaccccggtga

SEQ ID NO: 120009 - DNA, 1309 bp, Homo sapiens
cgcccccccattgaatcgattgctctctagtccgcgtggtggaattcgcgggaactactcgacccacagagccgatcgcggagcggattctgcttttaggagtacccgccaacaagcgggaccgagcaggaatccgtatctgggaacagagccctttgctcctccctcagaatgaacggagaccagaattcagatgtttatgcccaagaaaagcaggatttcgttcagcacttctcccagatcgttagggtgctgactgaggatgagatggggcacccagagataggagatgctattgcccggctcaaggaggtcctggagtacaatgccattggaggcaagtataaccggggtttgacggtggtagtagcattccgggagctggtggagccaaggaaacaggatgctgatagtctccagcgggcctggactgtgggctggtgtgtggaactgctgcaagctttcttcctggtggcagatgacatcatggattcatcccttacccgccggggacagatctgctggtatcagaagccgggcgtgggtttggatgccatcaatgatgctaacctcctggaagcatgtatctaccgcctgctgaagctctattgccgggagcagccctattacctgaacctgatcgagctcttcctgcagagttcctatcagattgagattggggcagaccctggacctcctcacagcccccccagggcaatgtggatcttgtcagattcactgaaaagaggtacaaatctattgtcaagtacaagacagctttctactccttctaccttcctatagctgcagccatgtacatggcaggaattgatggcgagaaggagcacgccaatgccaagaagaatcctgctggagatgggggagttctttcagattcaggatgattaccttgacctctttggggaccccagtgtgaccggcaaaattggcactgacatccaggacaacaaatgcagctggcttggtgggttcagtgtctgcaacgggccactccagaacagtaccagatcctgaaggaaaattacgggcagaaggaggctgagaaagtgggcccgggtgaaggcgctatatgagggagctggatctgccagcagtgttcttggcaatatgagggaaggacagttacagccacattatggctctcattgaacagtacgcagcacccctgcccccagccgtctttctggggcttgcgcgcaaaatctacaagcggagaaagtgacctagagattgcaagggcggggagaggaggctctcaataaataatcgtgtaaccttaaaaaaaaaa

SEQ ID NO: 120010 - DNA, 532 bp, Homo sapiens
agacttaatgaggcagaacaaaagtacaaggatattcaagataaactacaaattattagtgaagagacaaatgcgcgagcaccagaatgtatggcattgaaagcagatgttgttgctaagaaaagggcctataatgaagctgaggttttatataaccgatccttaaacgaatataaagcattaaagaaagatgatgagcagctttgtaaacgaattgaagagctgaaaaaaaagtactgaccaatctttggaacctgaacggttggaaagacaaaaaaaaatatcttggttaaaagagagagtaaaggcctttcaaaatcaagaaaattcagtcaatcaagagatcgaacagtttcagcaagccttagaaaaggacaaagaagaacatggcaaaattaagagagaaaaattagatgtgaagcatgcactgagctacaatcagaggcttctgaaagaattgaaagatagtaaaactgatcgactcaaaagatttggccctaatgttccagctcttcttgaagccatagatgat

SEQ ID NO: 120011 - DNA, 868 bp, Homo sapiens
  misc_feature (1)...(868): n = a,t,c or g
atggccaaaagaaaggaagaaaatttttcctctcctaaaaatgccaaaaggccaagacaagaagaattggaggattttgataaagatggtgacgaagacgaatgtaaaggtactactttngatatctcaataacattgaggaacagaggagatgatgcctttaaagccagtgtgtatggtaactctatacttatacagcaacacatcagcatagatggaagtcgatcttataaacttaaaagtgcaacaggctccgtggtttccacgaggaaagaagagctgattgcaattcttgatcattttaacatccagttcttcatgaaagcaacgcaacttgaacagatgaaggaagattattcatacattatggaaacgaaagaaagaacaaaggagcagatacatcaaggagaagaggtcagacttaatgaggcagaacaaaaagtacaaggatattcaagacaaactagaaaagattagtgaagagacaaatgcacgagcaccagaatgtatggcattgaaagcagatgttgttgctaagaaaagggcctataatgaagctgaggttttatataaccgatccttaaacgaatataaagcattaaagaaagatgatgagcagctttgtaaacgaattgaagagctgaaaaaaagagtcattcttgactcctttctgctaccccacatcctactggctgtacttcagaaatatatccaagatctgaccacttgtgtggtgactctactggctcacgccatcatcatgtttcccttgagaattgcacaggctgatctccctgcttctggttacttggcaccacagtctcagtacagcagccaacggctgactgtgacctctaggcctggatga

SEQ ID NO: 120012 - DNA, 3079 bp, Homo sapiens
aaaggaagggagggagggagaaaggagaagttggtttagaggccagccggacgagctttgggcaccgcccttaggagggccaccctcagagtctgacagcaggtgaaggtcctaaatctccccaaactaactggtgtcttttctcctcttccaagatgctcttcccgagggagatgctagccctttgggtccttacctcctgccctcaggagccccggagagaggcagtcctggcaaagagcaccctgaagagagagtggtaacagcgccccccagttcctcacagtcggcggaagtgctgggcgagctggtgctggatgggaccgcaccctctgcacatcacgacatcccagccctgtcaccgctgcttccagaggaggcccgccccaagcacgccttgccccccaagaagaaactgccttcgctcaagcaggtgaactctgccaggaagcagctgaggcccaaggccacctccgcagccactgtccaaagggcagggtcccagccagcgtcccagggcctagatctcctctcctcctccacggagaagcctggcccaccgggggacccggaccccatcgtggcctccgaggaggcatcagaagtgcccctttggctggaccgaaaggagagtgcggtccctacaacacccgcacccctgcaaatctcccccttcacttcgcagccctatgtggcccacacactcccccagaggccagaacccggggagcctgggcctgacatggcccaggaggccccccaggaggacaccagccccatggccctgatggacaaaggtgagaatgagctgactgggtcagcctcagaggagagccaggagaccactacctccaccattatcaccaccacggtcatcaccaccgagcaggcaccagctctctgcagtgtgagcttctccaatcctgaggggtacattgactccagcgactacccactgctgcccctcaacaactttctggagtgcacatacaacgtgacagtctacactggctatggggtggagctccaggtgaagagtgtgaacctgtccgatggggaactgctctccatccgcggggtggacggccctaccctgaccgtcctggccaaccagacactcctggtggaggggcaggtaatccgaagccccaccaacaccatctccgtctacttccggaccttccaggacgacggccttgggaccttccagcttcactaccaggccttcatgctgagctgcaactttccccgccggcctgactctggggatgtcacggtgatggacctgcactcaggtggggtggcccactttcactgccacctgggctatgagctccagggcgctaagatgctgacatgcatcaatgcctccaagccgcactggagcagccaggagcccatctgctcagctccttgtggaggggcagtgcacaatgccaccatcggccgcgtcctctccccaagttaccctgaaaacacaaatgggagccaattctgcatctggacgattgaagctccagagggccagaagctgcacctgcactttgagaggctgttgctgcatgacaaggacaggatgacggttcacagcgggcagaccaacaagtcagctcttctctacgactcccttcaaaccgagagtgtcccttttgagggcctgctgagcgaaggcaacaccatccgcatcgagttcacgtccgaccaggcccgggcggcctccaccttcaacatccgatttgaagcgtttgagaaaggccactgctatgagccctacatccagaatgggaacttcactacatccgacccgacctataacattgggactatagtggagttcacctgcgaccccggccactccctggagcagggcccggccatcatcgaatgcatcaatgtgcgggacccatactggaatgacacagagcccctgtgcagagccatgtgtggtggggagctctctgctgtggctggggtggtattgtccccaaactggcccgagccctacgtggaaggtgaagattgtatctggaagatccacgtgggagaagagaaacggatcttcttagatatccagttcctgaatctgagcaacagtgacatcttgaccatctacgatggcgacgaggtcatgccccacatcttggggcagtaccttgggaacagtggcccccagaaactgtactcctccacgccagacttaaccatccagttccattcggaccctgctggcctcatctttggaaagggccagggatttatcatgaactacatagaggtatcaaggaatgactcctgctcggatttacccgagatccagaatggctggaaaaccacttctcacacggagttggtgcggggagccagaatcacctaccagtgtgaccccggctatgacatcgtggggagtgacaccctcacctgccagtgggacctcagctggagcagcgaccccccattttgtgagaaaattatgtactgcaccgaccccggagaggtggatcactcgacccgcttaatttcggatcctgtgctgctggtggggaccaccatccaatacacctgcaaccccggttttgtgcttgaagggagttctcttctgacctgctacagccgtgaaacagggactcccatctggacgtctcgcctgccccactgcgtttcagaagcggcagcagagacgtcgctggaaggggggaacatggccctggctatcttcatcccggtcctcatcatctccttactgctgggaggagcctacatttacatcacaagatgtcgctactattccaacctccgcctgcctctgatgtactcccacccctacagccagatcaccgtggaaaccgagtttgacaaccccatttacgagacagggggaacccaaaaggtttagggtttcatttaaaaagaggtaccctttaaaaaggggcttgtgaactcaaccccaatttccccgagacatttatccaaaggccctgggggccttgatttaaacccccaaaaggcggctgttttttggttaaactttttaacaaagggttacgggttttttccccggattttataaattttaaaagtg

SEQ ID NO: 120013 - DNA, 6397 bp, Homo sapiens
aaaggaagggagggagggagaaaggagaagttggtttagaggccagccggacgagctttgggcaccgcccttaggagggccaccctcagagtctgacagcaggtgaaggtcctaaatctccccaaactaactggtgtcttttctcctcttccaagatgctcttcccgagggagatgctagccctttgggtccttacctcctgccctcaggagccccggagagaggcagtcctggcaaagagcaccctgaagagagagtggtaacagcgccccccagttcctcacagtcggcggaagtgctgggcgagctggtgctggatgggaccgcaccctctgcacatcacgacatcccagccctgtcaccgctgcttccagaggaggcccgccccaagcacgccttgccccccaagaagaaactgccttcgctcaagcaggtgaactctgccaggaagcagctgaggcccaaggccacctccgcagccactgtccaaagggcagggtcccagccagcgtcccagggcctagatctcctctcctcctccacggagaagcctggcccaccgggggacccggaccccatcgtggcctccgaggaggcatcagaagtgcccctttggctggaccgaaaggagagtgcggtccctacaacacccgcacccctgcaaatctcccccttcacttcgcagccctatgtggcccacacactcccccagaggccagaacccggggagcctgggcctgacatggcccaggaggccccccaggaggacaccagccccatggccctgatggacaaaggtgagaatgagctgactgggtcagcctcagaggagagccaggagaccactacctccaccattatcaccaccacggtcatcaccaccgagcaggcaccagctctctgcagtgtgagcttctccaatcctgaggggtacattgactccagcgactacccactgctgcccctcaacaactttctggagtgcacatacaacgtgacagtctacactggctatggggtggagctccaggtgaagagtgtgaacctgtccgatggggaactgctctccatccgcggggtggacggccctaccctgaccgtcctggccaaccagacactcctggtggaggggcaggtaatccgaagccccaccaacaccatctccgtctacttccggaccttccaggacgacggccttgggaccttccagcttcactaccaggccttcatgctgagctgcaactttccccgccggcctgactctggggatgtcacggtgatggacctgcactcaggtggggtggcccactttcactgccacctgggctatgagctccagggcgctaagatgctgacatgcatcaatgcctccaagccgcactggagcagccaggagcccatctgctcagctccttgtggaggggcagtgcacaatgccaccatcggccgcgtcctctccccaagttaccctgaaaacacaaatgggagccaattctgcatctggacgattgaagctccagagggccagaagctgcacctgcactttgagaggctgttgctgcatgacaaggacaggatgacggttcacagcgggcagaccaacaagtcagctcttctctacgactcccttcaaaccgagagtgtcccttttgagggcctgctgagcgaaggcaacaccatccgcatcgagttcacgtccgaccaggcccgggcggcctccaccttcaacatccgatttgaagcgtttgagaaaggccactgctatgagccctacatccagaatgggaacttcactacatccgacccgacctataacattgggactatagtggagttcacctgcgaccccggccactccctggagcagggcccggccatcatcgaatgcatcaatgtgcgggacccatactggaatgacacagagcccctgtgcagagccatgtgtggtggggagctctctgctgtggctggggtggtattgtccccaaactggcccgagccctacgtggaaggtgaagattgtatctggaagatccacgtgggagaagagaaacggatcttcttagatatccagttcctgaatctgagcaacagtgacatcttgaccatctacgatggcgacgaggtcatgccccacatcttggggcagtaccttgggaacagtggcccccagaaactgtactcctccacgccagacttaaccatccagttccattcggaccctgctggcctcatctttggaaagggccagggatttatcatgaactacatagaggtatcaaggaatgactcctgctcggatttacccgagatccagaatggctggaaaaccacttctcacacggagttggtgcggggagccagaatcacctaccagtgtgaccccggctatgacatcgtggggagtgacaccctcacctgccagtgggacctcagctggagcagcgaccccccattttgtgagaaaattatgtactgcaccgaccccggagaggtggatcactcgacccgcttaatttcggatcctgtgctgctggtggggaccaccatccaatacacctgcaaccccggttttgtgcttgaagggagttctcttctgacctgctacagccgtgaaacagggactcccatctggacgtctcgcctgccccactgcgtttcggaggagtccctggcatgtgacaacccagggctgcctgaaaatggataccaaatcctgtacaagcgactctacctgccaggagagtccctcaccttcatgtgctacgaaggctttgagctcatgggtgaagtgaccatccgctgcatcctgggacagccatcccactggaacgggcccctgcccgtgtgtaaagtagcagaagcggcagcagagacgtcgctggaaggggggaacatggccctggctatcttcatcccggtcctcatcatctccttactgctgggaggagcctacatttacatcacaagatgtcgctactattccaacctccgcctgcctctgatgtactcccacccctacagccagatcaccgtggaaaccgagtttgacaaccccatttacgagacaggggaaaccagagagtatgaggtttctatctaaagagagctacacttgagaaggggacttgtgaactcaaccacaatctcctcgagacattcatccagagaccatgtggcacttgattgaaaccccagaatgtcgactgtcttttgtttagactctttatcaaaggtttactgttttcttccctgtatttattatatttaaaagtgaaataggtgtgggtttggatgtttcgcggcctcagccaaattcatgttacagcctcaattctgaaggcaggtggaagacttgcaaaatggcaaaccgcggcagcaaaaacacaaaacagcagatggagtttctcccatcagcaatgccatgctaaggctgcattgaattgcatgcatctttgggaaccatgcccatgatgttttcagtacaaatctaagtcccaagattaggttggaaagggtatttcttgttggcttagtttgggttggaatttagcatgggtacttaaacccatttggagagctgtgctcctaaacaaattctgtgtcctctcttcccattttgccagcttctgaaaggtttttccacagcccctccctctcacggttcttctgaaggtagcaaaggtgttatataaacattgtcttttaccactctggcctcgctggacagtgacaaaacaagaaaacgttttctttctagaaaggtgataaacgaccaaaggcaatttttcagagacaaatgagagatttgagagttccaatgaagaattgggtgagggggatcattgggtaagggaattgggttaaaatgttcttttctttgacactctttcaatgatgaaagagcgtgtaatttatgctacaagtgccagaattgatcaccatgttcagcaagccactctcaagctgtggtaataaacacacaggcttgggaggcaccagcggccccactcatacagtgacaaggatttgtgatgggaaaaaggaggtgccatgtttggaaatgcaggggtgagctctggtttctcctggggttctggaatatctcagccctcaaaatagaggagactcaagtgcactgattctctaaaaggtgtcatcttcagaatatacttgccatcaagtatttcagggggcgggagggtcccatgagaagaaactatttttctattctccaaagctgtctggatgttggagggtggtgtgaatgctgactgaggaggtgcagagaacaggggcaggggattttaaatcacagcagaccatccagtggaatcctgtatcatctgatctgaacatcaatgaagacagagagaggaatttcattcagaaaggattccatagccccacatctagtcacacgggcattcctcttattttatcagggtctgttttcccccaacccagtgaaaccggtgagtgtgtaactcttgggaagattcttttctaaatacaggtataaagagaaggtggagggtgcgggtgcatggaagaaatactatgtgtgaagcagattcaccttcctgggaccggtgacatggtggtgacagtcaatggcttggacagacagacgggctcagtggcatttggaaccctctttggtgccctcccattctctctggaattgtttcaagtctgctggttttcaaacaagaaaagacctttctggccatagggagaatagcagggagtctatgttttggtggttacattggaaacatcttaagcaagagagggaaagttgattttaggcacacatgtaccctccttgacagcaggaactcagacttcaatcttgggggtctaagaccagaatattttccttctgccagaaaagaatcttgcacatatactcctgaggcatgagtgtgtggtccatggcaagaaatagctaaaggctgctttccaggacccaaagccccatttaatgcaagaaccagagaagtgttctaggccattagtggacaatgtcatgtttggagaaagataacaacacaaataatgtaacctttccttaaaaggcagaactcaatccattttatttgatgcttattctaaccctaaccctgggtcacctggaatgaagaactctatgaataatatttgattttacaacgtgttatggttatgtgaaaactaaacatttgccttttataaagactgacaaaatataaatctttattctaaccctatccccaaaactagccaggccacaccccagatgttcttattgactattgggaagatagaaaaggcgttgtgttttttgtttttttgttgttgttgtcattgttgtttttttcagaagaccagtgtctcagttctgtcttagtagtaccacacccgtaaccgtgttttaaaagtttgttttagcctagagacagatcatacgagttcaacaatgtacagtgtgattgaaaagacaggttggtgtctatttttctttttaaaatatctgaatgtgtatttgtaatacgtaaaggtaaaaaaaaatagtgccaaaaatgtgcaaggcatctcattacagctcatgtacgtctgtttttataagatcaatattaaaacccattgggattaaatatttttgaataggatacactcttgagaaactcgagaatggactgagccttcctacaagccactctttgtttttaaaacagtggggaaatacgtttacagagattgtgagcttcagagaatgcatgtgatggtgtgtattacatgctaattcatataagctgtatctgtcagctaccaccctgtgctttaaaaatgcacacactcaaccctctttagcttggagctcagctttttgctttttttttttttttttttgtagaattatttagctaacataagtattctgattgctacctgatggccattcttacttagtttcatagatgtgctttaactatgatcctttgaagctcaccccttggagagcctacagaacctcaggctgatagctttgaagactgccaaacagcccagaaggaagcaaagcatctgcataatcaggagggttgtataacaagtagtgatttggcaaatatgtgggtagctttaggctgaggcacgggcctcaggcaaaaatgcccttcgagtgaatccgaagggcatgatcttcctatgtccttgactaggcatgacgagtcatttgaggtcagatattatttgagttgttcagcacccccaaaggtaggcattctcctgggaaattttcatttccattttatcgccaaacaaaataaaaagcaaaacaaactttttaagctagaataatgaaattaagtcattttccactttgtatatattgatgctaataaaacagatg

SEQ ID NO: 120014 - DNA, 396 bp, Homo sapiens
gccatggtcaaaaatggcagacaatgattgaagctcacgttgatgtcaagactaccgatggttacttgcttcgtctgttctgtgttggctttactaaaaaacgcaacaatcagatacggaagacctcttatgctcagcaccaacaggtccgccaaatccggaagaagatgatggaaaatcatgaccggagaagtgcagacaaatgacttgaaagaagtggtcaataaattgtaagtgtttctttgcttcctcacacaacacaaccttgagtattggattattcctgagatgagagaacgcatatgagacaaggtaaaggtctgtggaaatcctgtctgtgaatccttctagctatatctctttaagtgaaagagtgttaagtactcagtaaatatg

SEQ ID NO: 120015 - DNA, 681 bp, Homo sapiens
ggaccctggtaagccaacggggacgatgtcagaaagtggtctggagcttcagaaggaccctgcaggtaagcacgtaaccttatttggaaataaggtctttgcagatgtaattcgtcagatggggtcatattggattggggtgggccttaagtccaatgactggtatcttcctaagaaggtcatgtggaagatgcagagagacacactcagagaagaatgccatgtgatgatgggggcaggtaggagaactggacaaagagttcagggtgcatttggaggattgcagggcagggacaaggaaaagctgcaatacctggacaagtccctgatgacagctcagcatcaggacctactgtgtgccaggtagttcggcggcggcagcagcagcatcagcgacagcagcagcacaggcagcagcagcacctgggagctagttagaaatgcagacgcttggatcccatcccaggcctacccagtcagagtctacattttaacaaggtccccaggtgtctcattgaccaccaggataccctttcttatgcatcagaagggcatcaccagcatagtcttggcttcagctctccactcctgcataaaatgtgtatgttcccctgcctctggaacctttattgttggtggtactgctgctgctgctgatgatgatgatatttagttggtttt

SEQ ID NO: 120016 - DNA, 3308 bp, Homo sapiens
aaaggaagggagggagggagaaaggagaagttggtttagaggccagccggacgagctttgggcaccgcccttaggagggccaccctcagagtctgacagcaggtgaaggtcctaaatctccccaaactaactggtgtcttttctcctcttccaagatgctcttcccgagggagatgctagccctttgggtccttacctcctgccctcaggagccccggagagaggcagtcctggcaaagagcaccctgaagagagagtggtaacagcgccccccagttcctcacagtcggcggaagtgctgggcgagctggtgctggatgggaccgcaccctctgcacatcacgacatcccagccctgtcaccgctgcttccagaggaggcccgccccaagcacgccttgccccccaagaagaaactgccttcgctcaagcaggtgaactctgccaggaagcagctgaggcccaaggccacctccgcagccactgtccaaagggcagggtcccagccagcgtcccagggcctagatctcctctcctcctccacggagaagcctggcccaccgggggacccggaccccatcgtggcctccgaggaggcatcagaagtgcccctttggctggaccgaaaggagagtgcggtccctacaacacccgcacccctgcaaatctcccccttcacttcgcagccctatgtggcccacacactcccccagaggccagaacccggggagcctgggcctgacatggcccaggaggccccccaggaggacaccagccccatggccctgatggacaaaggtgagaatgagctgactgggtcagcctcagaggagagccaggagaccactacctccaccattatcaccaccacggtcatcaccaccgagcaggcaccagctctctgcagtgtgagcttctccaatcctgaggggtacattgactccagcgactacccactgctgcccctcaacaactttctggagtgcacatacaacgtgacagtctacactggctatggggtggagctccaggtgaagagtgtgaacctgtccgatggggaactgctctccatccgcggggtggacggccctaccctgaccgtcctggccaaccagacactcctggtggaggggcaggtaatccgaagccccaccaacaccatctccgtctacttccggaccttccaggacgacggccttgggaccttccagcttcactaccaggccttcatgctgagctgcaactttccccgccggcctgactctggggatgtcacggtgatggacctgcactcaggtggggtggcccactttcactgccacctgggctatgagctccagggcgctaagatgctgacatgcatcaatgcctccaagccgcactggagcagccaggagcccatctgctcagctccttgtggaggggcagtgcacaatgccaccatcggccgcgtcctctccccaagttaccctgaaaacacaaatgggagccaattctgcatctggacgattgaagctccagagggccagaagctgcacctgcactttgagaggctgttgctgcatgacaaggacaggatgacggttcacagcgggcagaccaacaagtcagctcttctctacgactcccttcaaaccgagagtgtcccttttgagggcctgctgagcgaaggcaacaccatccgcatcgagttcacgtccgaccaggcccgggcggcctccaccttcaacatccgatttgaagcgtttgagaaaggccactgctatgagccctacatccagaatgggaacttcactacatccgacccgacctataacattgggactatagtggagttcacctgcgaccccggccactccctggagcagggcccggccatcatcgaatgcatcaatgtgcgggacccatactggaatgacacagagcccctgtgcagagccatgtgtggtggggagctctctgctgtggctggggtggtattgtccccaaactggcccgagccctacgtggaaggtgaagattgtatctggaagatccacgtgggagaagagaaacggatcttcttagatatccagttcctgaatctgagcaacagtgacatcttgaccatctacgatggcgacgaggtcatgccccacatcttggggcagtaccttgggaacagtggcccccagaaactgtactcctccacgccagacttaaccatccagttccattcggaccctgctggcctcatctttggaaagggccagggatttatcatgaactacatagaggtatcaaggaatgactcctgctcggatttacccgagatccagaatggctggaaaaccacttctcacacggagttggtgcggggagccagaatcacctaccagtgtgaccccggctatgacatcgtggggagtgacaccctcacctgccagtgggacctcagctggagcagcgaccccccattttgtgagaaaattatgtactgcaccgaccccggagaggtggatcactcgacccgcttaatttcggatcctgtgctgctggtggggaccaccatccaatacacctgcaaccccggttttgtgcttgaagggagttctcttctgacctgctacagccgtgaaacagggactcccatctggacgtctcgcctgccccactgcgtttcggaggagtcctgtttaatgtgacaacccagggctgcctgaaaatggataccaaatcctgtacaagcgactctacctgccaggagagtccctcaccttcatgtgctacgaaggctttgagctcatgggtgaagtgaccatccgctgcatcctgggacagccatcccactggaacgggcccctgcccgtgtgtaaagttaatcaagacagttttgaacatgctttagaagcagaagcggcagcagagacgtcgctggaaggggggaacatggccctggctatcttcatcccggtcctcatcatctccttactgctgggaggagcctacatttacatcacaagatgtcgctactattccaacctccgcctgcctctgatgtactcccacccctacagccagatcaccgtggaaaccgagtttgacaaccccatttacgagacagggggaacccaaaaggtttagggtttcatttaaaaagaggtaccctttaaaaaggggcttgtgaactcaaccccaatttccccgagacatttatccaaaggccctgggggccttgatttaaacccccaaaaggcggctgttttttggttaaactttttaacaaagggttacgggttttttccccggattttataaattttaaaagtg

SEQ ID NO: 120017 - DNA, 1188 bp, Homo sapiens
atggacataaagatggaaatagtagacactggagactccaaagatttggcggacctgttgatgctaagcataagaagtcttccatatttgattgttgcattttttagtaaaaccaacacagaacagacaaagcaagtaaccattggtagtcttgacatcaacatgagcttcgatcactgtctgccattttttgaccatggaacacattttgtcatgggtaagattcatgccatggaagttcgtcagtgtccccaccctccccaaattcatgtctgccgaaaagctcaggatgtaaccttatttggaaataaggtctttgcagatgtaattcgtcagatggggtcatattggattggggtgggccttaagtccaatgactggtatcttcctaagaaggtcatgtggaagatgcagagagacacactcagagaagaatgccatgtgatgatgggggcagagagccagactggacaaagagttcagggtgcatttggaggattgcagggcagggacaaggaaaagctgcaatacctggacaagtccctgatgacagctcagcatcaggacctactgtgtgccaggcccacacacatccgaggcattgttcttgttggctgcgagagctcgttaggctctgggcagaggctggctggactccaggaggcagacatcaagccccacaactcaaagaatggaggagcctggggcttggcattagatgatgccagtccactcctccgcatgcactggggctctgatgcccacctctccagaggtcaagctaataccaaggccaaggcccccaccatcaatcacaatgttagcatggagtatcttgctaacactggcgttgcccaaggaccccagctcctaaagtacaagaagtgcgaaaggaaggctgtccttgttcaacgaggctacaggaaaagaagaggccttagaggagagctgagcttcagttcgggcaagaaggtatcaaggaatgactcctgctcggatttacccgagatccagaatggctggaaaaccacttctcacacggagttggtgcggggagccagaatcacctaccagtgtgaccccggctatgacatcgtggggagtgacaccctcacctgccagtgggacctcagctggagcagcgaccccccattttgtgagaaaaagctcatggtctgcatgctctaa

SEQ ID NO: 120018 - DNA, 762 bp, Homo sapiens
ttttttttttttttttttcacaaatagcactttttatttgccactatttgaagtctgaactttaaacagattcttggactggtggttcatatccatcagctcgttcaactttagcacctgtctcgtccccaagtggctttttccagaaactactgcccttccacccatggaagctcccaatgagctttcccaaattcaaaacttggggcttcttcagcatttttactttttctaacggaagacatcatgggagaggataaaataagattggcaaagcccttttcctatgtcttttcccaatgcttgtctgggaatcaaatttattggaccacttcctttcaaagtcatttgtctggcacctctcgggtcaatgaatttccatcatctgtctgccggaatttggcggacctgttggtgctgagcataagagggtcttccgtatctgattgttgcgttttttagtaaaaccaacacagaacagacgaagcaagtaaccatcggtagttcttgacatcaacgtgagcttcaatcattggtctgccatttttttgaccatggaacacattttgtcaccgggtaagatcccatgccatggaaagtagataaggcagtgtattaccctgaaacaaacctcagtaatcagcttgaattttctaaatgcaactgcatcattctggcaatcgagcagactcacttcaaacacacgacccttgagaccatcagagacaaaattggttccttgggtcctggtgacgagcgtct

SEQ ID NO: 120019 - DNA, 417 bp, Homo sapiens
  misc_feature (1)...(417): n = a,t,c or g
aaaaggtcccggagagctgagccacaagatgtgtgacttcaccgaaaaccagaccgcagagttcaaggaggccttccagctgttggaccgaacagagatgaatgtgaaggtgctggactttgagcactttctgcccatgctgcagacaggggccaagaacaaggaccagggcacctatgaggattatgtcgaaggacttcgggtgtttgacaaggaaggaaatggcaccgtcatgggtgctgaaatccggcatgttcttgtcacactgggtgagaagatgacagaggaagaagtanagatgctggtggcagggcatgaggacagcaatggttgtatcaactatgaagagctcgtccgcatggtgctgaatggctgaggaccttcccagtctccccagagtccgtgcctttccctggg

SEQ ID NO: 120020 - DNA, 856 bp, Homo sapiens
tcggcactagcgcaggagatgggtgcccccatccgcacactgtcctttggccaccggacatcatgcctcccaagaaggatgttcccgtgaagaaaccagcagggccctccatctccaaacctgctgctaagccagcagcagcaggggctcctccagccaagaccaaagctgagccagctgtcccccaggcccctcagaaaacccaggagcctccagtcgatctctccaaagtggtgatcgagtttaacaaggaccagctggaggagttcaaggaggccttcgagctgtttgaccgagtgggggatggcaagatcctgtacagccagtgtggggacgtgatgagggccctgggccagaaccccaccaacgccgaggtgctcaaggtcctggggaaccccaagagtgatgagatgaatgtgaaggtgctggactttgagcactttctgcccatgctgcagacagtggccaagaacaaggaccagggcacctatgaggattatgtcgaaggacttcgggtgtttgacaaggaaggaaatggcaccgtcatgggtgctgaaatccggcatgttcttgtcacactgggtgagaagatgacagaggaagaagtagagatgctggtggcagggcatgaggacagcaatggttgtatcaactattgaagagctcgtccgcatggtgctgaatggctgaggaccttcccagtctccccagagtccgtgcctttccctgtgtgaattttgtatctagcctaaagtttccctaggctttcttgtctcagcaactttcccatcttgtctctcttggatgatgtttgccgtcagcattcaccaaataaacttgctctctgggccctcgg

SEQ ID NO: 120021 - DNA, 758 bp, Homo sapiens
  misc_feature (1)...(758): n = a,t,c or g
gcacggatattccgggtcgactcacgcgtncggaaaagggcccggagagctgagcagtctatatgtgtgacttgaccgaaaaccagaccgcagatctgatcccaagcactggagttcaaggaggcgcttccagctgtttgaccgaacaggtgatggcaagatcctgtacagccagtgtggggatgtgatgagggccctgggccaaaaccctaccaacgccgaggtgctcaaggtcctggggaaccccaagagtgatgagatgaatgtgaaggtgctggactttgagcactttctgccccatgctgcagacagtggccaagaacaaggaccagggcacctatgaggattatgtcgaaggacttcgggtgtttgacaaggaaggaaatggcaccgtcatgggtgctgaaatccggcatgttcttgtcacactggggtgagaagatgaccgaaggaggatgttcatatgctggtggcagggcatgaggacagcaatggttgtatcaactatgaagcgtttgtgaggcatatcctgtcggggtgacgggcccatggggcggagctcgtccgcatggtgctgaatggctgatgaccttcccagtctccccagagtccgtgcctttccctgtgtgaattttgtatctagcctaaaggttccctaggctttcttgtctcagcaactttcccatcttgtctctcttggatgatgtttgccgtcagcattcaccaaataaacttgctctctgggccaaaaaaaaaaa

SEQ ID NO: 120022 - DNA, 408 bp, Homo sapiens
atgattcacaactctagccacagcaaagtcctggcctatgtgggtaagcatccgttgatccagatcatgggcactgggcaggctgggagctggcgctcacataaacaaagacagcagctggccaaagctcgaactgcagagctgggaggtctcaacaaggaccagatgcatggggatagcagtgtcttcctggactctcctagcagtctggagccctgtgcccccagccagggaccacatcctgagcttgggtgccgacttcaccttgatctccctcggcagcaccaggagaaagtggagcggctgttagaggtgtcacgtgaacctgacaagggctggcggggactggcagaccatctgggctaccaagctgaggctgtagaaatcatggcccaaggccaggtgtga

SEQ ID NO: 120023 - DNA, 621 bp, Homo sapiens
tcggctggggaaaaagctccttgctggctgccatcgcgggagagctccacagatgggaacaagtacaatgtggtggccatactctccactgagctcctgaacaaatgctgcgtgggcatgtgacagtgcgggggctgtccaagggctttggcctggccacccaggaaccctggatccagtttgccaccatccgagacaacatcctctttgggaagacatttgatgcacagctgtacaaggaggtgctagaagcctgcgccctcaatgatgacctcagtatcctgcctgctggagaccagacaaaggtgggggagaagggtgtcacccttagcggaggacagcgtgcccggattgcccttgctcgtgctgtctaccaggaaaaggagctttatttcctcaatgaccctctggccgctgtgaatgcaaatgtggccaaccccctgctgcacaggggcatcctgggcatgttgagttaccccacacggtgctctcaccccccgcactgagtacctgaaaagggctgacgcggtgctgttaatggaggccgggcgcctcatccgggctggacctccctttgagattctgcccctggtacaagctgtccccaagtcgacgcggccg

SEQ ID NO: 120024 - DNA, 952 bp, Homo sapiens
  misc_feature (1)...(952): n = a,t,c or g
ctcactgccaccaaggtgttcacggccctggcactggtgcgaatgctcattcttcctctcaacaacttcccttgggtgatcaatggtctcctggaggccaaagtgtccttggaccggatccagcttttcctcgaccttccaaaccacaacccccaggcctactacagcccagatccccctgcagagccatctacagtattggagctgcatggagccttgttctcctgggacccagttggaaccagcctggagaccttcatcagtcatctcgaagtgaaaaagggtatgctggtgggcatcgtggggaaggtcggctgtgggaagagctccctgctggctgccatcgctggagagctccacagatgggaacaagtacaatgtggtggccatactctccactgagctcctgaacagatgctgcgtgggcatgtggcagtgcgggggctgtccaagggctttggcctggccacccaggaaccctggatccagtttgccaccatccgagacaacatcctctttgggaagacatttgatgcacagctgtacaaggaggtgctagaagcctgcgccctcaatgatgacctcagtatcctgcctgctggagaccagacagaggtgggggagaaagtgtcacccttagcggaggacagcgtgcccggattggcccttgtcgtgctgtctaccaggaanaaggagctctatctcctgatgaccctctggccgctgtgnatgcaatgtggccaaccacctgctgcacggtgcatcctgggcatgctgagctacaccacacggctgctctgcacccaccgcnctgagaaccctggaaaggccnnnaccgtgctgcttgatgaaggccgggccgcctcatcccgggctggaacctcccctctgagatcttgcccatggtaacagctgnttcccaagtcgaagccgggcgcaaatccagaattta

SEQ ID NO: 120025 - DNA, 789 bp, Homo sapiens
cactcgaacctcgttgcatgcagccttgttctcctgggacccagttggaaccagcctggagaccttcatcagtcatctcgaagtgaaaaagggtatgctggtgggcatcgtggggaaggtcggctgtgggaagagctccctgctggctgccatcgctggagagctccacagatgggaacaagtacaatgtggtggccatactctccactgagctcctgaacagatgctgcgtgggcatgtggcagtgcgggggctgtccaagggctttggcctggccacccaggaaccctggatccagtttgccaccatccgagacaacatcctctttgggaagacatttgatgcacagctgtacaaggaggtgctagaagcctgcgccctcaatgatgacctcagtatcctgcctgctggagaccagacagaggtgggggagaagggtgtcacccttagcggaggacagcgtgcccggattgcccttgctcgtgctgtctaccaggaaaaggagctctatctcctcgatgaccctctggccgctgtggatgcagatgtggccaacccacctgcttgcacagggtgcaatccctggggcaatgcctgagcctaacaccacaccgggctggcttctggcaccccaacccgccacctggaaggtacccctgggggaagagggggggccttgaaccgcccggggtggcctggccttgaaatgggaagccgggcgcctatccgggctggacctcctctgagattctgccactggtacaagctgtccccaagtcgacgcggccg

SEQ ID NO: 120026 - DNA, 497 bp, Homo sapiens
ggcaccgcggccgccgggcctcgccgtccccgccacgggttcgtcgcgtctccccgtccccgcctcgggcccgtcgcggctccccgtcgccaccgcggggccgacgactcttcccgccgggcccggccggcttcagaggcagcagccgaggggagtcccgcgccgactatgcccgggacggccgcggagaccatccaggcgacagcggcagccggagacgctctcctggtctgtgttctgactctttggaaaagagcttaaggatcactgttggcaatgaccacttctgtgttagcacaccagaacggcgacggcttagtgatcggctggggtcaccagtggataatctggaagacatggacaggggatgacctgactgatgattctgtcttcactcgaagctcccagtgctctcggggtcttgagcgatatatttcccaggaggaagggcctctcagtcccttcttgggacaacttgatgaggactaccgaacaaa

SEQ ID NO: 120027 - DNA, 1401 bp, Homo sapiens
atgctcattcttcctctcaacaacttcccttgggtgatcaatggtctcctggaggccaaagtgtccttggaccggatccagcttttcctcgaccttccaaaccacaacccccaggcctactacagcccagcagatgcttgtgtggcttctttgcagggtatgctggtgggcatcgtggggaaggtcggctgtgggaagagctccctgctggctgccatcgctggagagctccacaggctgcgtgggcatgtggcagtgcgggggctgtccaagggctttggcctggccacccaggaaccctggatccagtttgccaccatccgagacaacatcctctttgggaagacatttgatgcacagctgtacaaggaggtgctagaagcctgcgccctcaatgatgacctcagtaaatgtcaccaccactaccctacccagaaaaaagaagtccgaaaggaaaaacagtattctaaaaaatgttccctttccctcacctatcccccagatcagtacagctcagacaccattggagaactgaggtctaagcagcaaagcaggctgcgtgggcatgtggcagtgcgggggctgtccaagggctttggcctggccacccaggaaccctggatccagtttgccaccatccgagacaacatcctctttgggaagacatttgatgcacagctgtacaaggaggtgctagaagcctgcgccctcaatgatgacctcagtaaatgtcaccaccactaccctacccagctgcggcggcgcgctccgagcctgcgtctagggcgcccccgggtcagagctgtcgccgtggccgccgctgcaagaaccatgtaccgcagcagcgctcgctcctccgtctcttcccaccggcctaaagacgacggcgggggcggcccgcgcagcggccgcagctctggctcctcctcaggcccggctcgccgcagctcaaagccgcctccgccctccggctcctcgtcgcggaccccggctcgccgaccccgctcgccctcagggcaccgcggccgccgggcctcgccgtccccgccacggggtcgtcgcgtctccccgtccccgcctcgggcccgtcgcggctccccgtcgccaccgcggggccgacgactcttcccgccgggcccggccggcttcagaggcagcagccggggggagtcccgcgccgactatgcccgggacggccgcggagaccatccaggcgacagcggcagccgggtaatcccacccctcgtccaggactccctccatcccccagtcccctcccccggaattcccgtttccagaaacgcccggggcctccagaccagggtcctaagcgcgaagcctccggccaactccctcggggatgccgagcctggaggcttctgtcagacccgggagcgttga

SEQ ID NO: 120028 - DNA, 918 bp, Homo sapiens
atgagcttccttagaattaccccttcgacgcatagttctgtttcatctggacttttgaggcttagtatctttctactacttagctttcctgactcaaacggaaaagccatttggacagctcacctgaatataacatttcaggttggaaatgagatcacatcggaattaggagagagtggagtgttcgggaatcattctcctctggaaagggtgtctggtgtggtggcacttcctgaaggatggaatcagaatgcctgtcatcctttgaccaatttcagcaggcccaaacaggcagactcatggctggccctcatcgaacgtggaggctgtacttttacacataaaatcaacgtggcagcagagaagggagcaaatggggtgatcatctacaactatcaaggtacgggcagtaaagtatttcccatgtctcaccaggggacggaaaatatagtcgcggtgatgataagcaacctgaaaggcatggaaattttgcactcgattcagaaaggagtctatgtgacagtcatcattgaagtggggagaatgcacatgcagtgggtgagccattacatcatgtatctatttaccttcctggctgccacaattgcctacttttacttagattgcgtctggagacttacacctagagtgcccaattctttcaccaggaggcgaagtcaaataaagacagatgtgaagaaagctattgaccagcttcaactgcgagttctcaaagaaggggatgaggaattagacctaaatgaagacaactgtgttgtttgctttgacacatacaaaccccaagatgtagtacgcattttaacttgcaaacattttttccataaggcatgcattgacccctggcttttagcccataggacatgtcccatgtgcaagtgtgacatcctgaaaacttaa

SEQ ID NO: 120029 - DNA, 567 bp, Homo sapiens
ggggaagactgatcgccggcaggccggctcggaccatgagcacagttccaagaatgcagggatgaggaggagccgggctgggctgttgagtccaggctgagcccacacatcatgttcctctctcagagcatcttgacaggagggaaccatctctgtgggacccgcctctgccatgaaattgcccatgcctggtttggcctaaccatcggggcccgagactggacggaggagtggctgagtgaaggcttcgccactcacttggaggatgtgttttgggccacagcacagcagctggccccctatgaggcccgggagcagcaggagctgagggcttgtctgcgctggcgtcgcctccaggacgagatgcaatgctcccccgaggagatgcaggtgttaagatgcaagacgcagacctatttgaaatgtgttttggctgtggaacgggcaggtctttggttgattgaatgtggagaagaggaaaatgagtgtatccagaatgactttgaggtttttgagttggacagttgggtagatggtgatcccatttgtgtgatggtaaagacatga

SEQ ID NO: 120030 - DNA, 318 bp, Homo sapiens
tcatgtggagctcccaggaatgtctggcagctggaaagtgctctcatgtgggagccattgaccccactcttcactctttccactggaggactggaagcccaggaaggtgccggtcgctaaccacctctggtcctctaccctcctaaggctcagagcattcttgacgagctcagagcaacccatcccgtgggtggagctcggaggaaaagtcagcatcaactgtgccaagactgggtactcagcgacagtgatattccacacgaagcctttcagctcgtaagaactgatttgtgtgtacttcacgttcagtgctatcat

SEQ ID NO: 120031 - DNA, 744 bp, Homo sapiens
ccaccgcttttggtgaaccgacccacgcgtacggaagttcccaaggacagggtcaagcctaagaggactgctttccgctctcctgccagctgtcgcaaacaccccatggccgatgacccttcccaaaagctacaaactaaggtttgtggctgagcaagtgtcccatcacccacccatctcctgcttctactgtgagtgcgaggagaagagactgtgcgtcaacactcatgtatggaccaaaagcaagttcatgggcatgtccgcgggggtctctatgataggggaaggtgtgttgaggctcctggaacacggggaggagtacgtattcaccctgcctagtgcctacgccgggtccattctcaccatcccgtgggtggagctcggagaaaaagtcagcatcatctgtgccaaggctgggtactcagcgacagtgatattccacacgaagcctttctatggagggaaagtccacagggttcccgcagaagtgaagcacaacccaaccacccccattgtttgtaaagcccatggggaatggaatggtactttagagttcccctacaacaatggagaaaccaaagtcatcgacacaaccacactgccagtgtatcccaagaagatcagacctcttgagaagcagggacccatggagtccagcaacctctggcgggaggtgacccgatacatgcggttggggaacattgacgcagccgccgagcataagcggcccctggaggagaagcc

SEQ ID NO: 120032 - DNA, 540 bp, Homo sapiens
atggcgctccattccgacttagacaagggagagggcactgcgaaatacaccctctcaggagatggcgctggcaccgtttttaccattgatgaaaccacaggggacattcatgcaataaggagcctagatagagaagaaaaacctttctacactcttcgtgctcaggctgtggacatagaaaccagaaagcccctggagcctgaatcagaattcatcatcaaagtgcaggatattaatgataatgagccaaagttttgggatggaccttatgttgctactgtcccagaaatgtctcctgtggataaaacaattaggatttttcttgggccaactagaataattagggctgcagagttggagcctttatataaggagtttgcagctcatatccgaagagagaaatgtatttcgaaagtcaaaagtgtagatttttttacttttagttttggagtacctgtgcaggatgtgcaggtttgttacattgataaacatgtgccagggtggtttgctgcacctatcaacccatcacataggtattaa

SEQ ID NO: 120033 - DNA, 700 bp, Homo sapiens
agcacgtgcactgaaaatcaatttaagtatttactcggagttgtcttgaaggcccaatgggaaatgtcagtaagggcacatgagaaaacactttaagaacctattcttccaaagatctttccagtatcttatgacaacacagtaaattatacccactccaactgcaaaagctgaaactactctgctttctcacttacctacacttttgactttccaaatacatttctctcttcggatatgagctgcaaactccttatataaaggctccaactctgcagccctaattattctagttggcccaaggaaaaatcctaattgttttatctaaggagacgggaattttccaatactgtaggagggcatgtgtgtgtgtttgctttaagggaaggctgttttgggtaataaaaagtcactggaggggtccataaatttcatgtttaacacatccagtgtacatgaagtaggcaccgagttaaactatttgtctactatatagcatggtcatcttaaaagccttattttttcctcaaaatattaactttatttttctccctgtaaaatcaagacacagttaaaatggtagccttcctcattttctgggaatactttctaacaagatatgcttctttccaattggacttctaaatttctagcaattctaacagtgcataaaagaggcaaccccaaaagtgtagcaggt

SEQ ID NO: 120034 - DNA, 4167 bp, Homo sapiens
cccgcctaatcttcacccgctgctaggctcgtttaatgagtcttctgagagctaaggagtcctcggattcattcaaagcattctacaatgaacgctaggggggaaaaagaacaaacaaaatacatttcaaatataggattcaattacttttcactactcaatgatgtgtcaaaggcacgctgtgttttgttttgagggcggggagatgacaggagggaatcctgggcccccattggctcgccgctcgccgctgcagttgagctccagccgctccgagagcattattgatctgaagggtaaatgtggagggagccacagagaggggtccaggcttttctgagaagagaggcagcctcttccaggaagaaagtggtgtctactggctgcccggcctggagaaccttctttgaatgaaaacggacaaaatgcaaagcagtgcgttggcacagtgatttggaaaggggaaacagaagagaagggtctcaccttccgcgcaaggctgagctgttggcaccctgctgcggccgtcggtgctgctgctcctgcagctgccttttctgccatcagctttgttacctaacagcttggctcttttgggaatatagacaagctggaacccaggagcagttgggagttttaaagaatgccagcctttttaaagctttgatgtccagtgctatagaatcaagttactgtggaggtcaaaacaatttgagatacataagctggccttagaaaataaattgcctctaacttacagtgaggagctcaacataacagggaaaaggagcacaggatgcagctacttggagggtgttgattgaaaacttcgatctccccaccccattcacggttgatttgacggatttctcaccttgttcacagagaaaatttcaattaaggcccctttagatggaatataatacagcagaagccttttcatcaaaaggattaatgcctgcatcatcatttctgcaataaaacaagaagctaagtggtggaggccacagacacctcaaacctggattccacaattctacgttaagtgttggagtttttattactctgctgtaggaaagcctttgccaatgcttacaaggaactgtttatccctgcttctctgggttctgtttgatggaggtctcctaacaccactacaaccacagccacagcagactttagccacagagccaagagaaaatgttatccatctgccaggacaacggtcacatttccaacgtgttaaacgtggctgggtatggaatcaattttttgtgctggaagaatacatgggctccgagcctcagtatgtgggaaagctccattccgacttagacaagggagagggcactgtgaaatacaccctctcaggagatggcgctggcaccgtttttaccattgatgaaaccacaggggacattcatgcaataaggagcctagatagagaagagaaacctttctacactcttcgtgctcaggctgtggacatagaaaccagaaagcccctggagcctgaatcagaattcatcatcaaagtgcaggatattaatgataatgagccaaagtttttggatggaccttatgttgctactgttccagaaatgtctcctgtgggtgcatatgtactccaggtcaaggccacagatgcagatgacccgacctatggaaacagtgccagagtcgtttacagcattcttcagggacaaccttatttctctattgatcccaagacaggtgttattagaacagctttgccaaacatggacagagaagtcaaagaacaatatcaagtactcatccaagccaaggatatgggaggacagcttggaggattagccggaacaacaatagtcaacatcactctcaccgatgtcaatgacaatccacctcgattccccaaaagcatcttccacttgaaagttcctgagtcttcccctattggttcagctattggaagaataagagctgtggatcctgattttggacaaaatgcagaaattgaatacaatattgttccaggagatgggggaaatttgtttgacatcgtcacagatgaggatacacaagagggagtcatcaaattgaaaaagcctttagattttgaaacaaagaaggcatacactttcaaagttgatgcttccaaccttcaccttgaccaccggtttcactcggcgggccctttcaaagacacagctacggtgaagatcagcgtgctggacgtagatgagccaccggttttcagcaagccgctctacaccatggaggtttatgaagacactccggtagggaccatcattggcgctgtcactgctcaagacctggatgtaggcagcagtgctgttaggtacttcatagattggaagagtgatggggacagctactttacaatagatggaaatgaaggaaccatcgccactaatgaattactagacagagaaagcactgcgcagtataatttctccataattgcgagtaaagttagtaaccctttattgaccagcaaagtcaatatactgattaatgtcttagatgtaaatgaatttcctccagaaatatctgtgccatatgagacagccgtgtgtgaaaatgccaagccaggacagataattcagatagtcagtgctgcagaccgagatctttcacctgctgggcaacaattctcctttagattatcacctgaggctgctatcaaaccaaattttacagttcgtgacttcagaaacaacacagcggggattgaaacccgaagaaatggatacagccgcaggcagcaagagttgtatttcctccctgttgtaatagaagacagcagctaccctgtccagagcagcacaaacacaatgactattcgagtctgtagatgtgactctgatggcaccatcctgtcttgtaatgtggaagcaatttttctacctgtaggacttagcactggggcgttgattgcaattctactatgcattgttatactcttagccatagttgtactgtatgtagcactgcgaaggcagaagaaaaaagacaccctgatgacctctaaagaagacatcagagacaacgtcatccattacgatgatgaaggaggtggggaggaagatacccaggctttcgacatcggggctctgagaaacccaaaagtgattgaggagaacaaaattcgcagggatataaaaccagactctctctgtttacctcgtcagagaccacccatggaagataacacagacataagggatttcattcatcaaaggctacaggaaaatgatgtggatccaactgccccaccatacgattcactggccacatatgcctacgaagggagtgggtccgtggcagagtccctcagctctatagactctctcaccacagaaaccgaccaggactatgactatctgacagactggggaccccgctttaaagtcttggcagacatgtttggcgaagaagagagttataaccctgataaagtcacttaagggagtcgtggaggctaaaatacaaccgagaggggagatttttaaaaaagaaaaagaaacacaaatattaatagaaatctctctcacacacacacacacacacaaacacacacacacacacacactctttctgggacaagattcctttgattacctggtttctagtaagttactaaattaatcatattgtcagttttggtttattctgccaacacgagatacatcctataatgtgtacttgctttgttttgttgttttgttttttcacaatcacactgagacaagctcaggcctattcaatacaatttactgacatgacaacctagaacgaagatagctatgtggcatcacggtggaagagtgttagatttttcttaattccactaaagtgcctattgaaactcttatcatttaaagtggtgtacagtacactctgctgtgatggtattgcgggattcagagataaagacataaaacaaagacaccgtctttatgtcaagaagcaatagcgacactctgactctcctcattccttttgagaacaaaagaagaacactttctgatctccaccttcttctaattcaaaaggttttctttttcttttttaaactgtatgctaaaacgtatttgtttatcctatcctttcagaaaattgaaataaatatgaaaatatcaagttcaatatgtaagtccc

SEQ ID NO: 120035 - DNA, 922 bp, Homo sapiens
atggttgaaatttataatttgaaattcctccattccgacttagacaagggagagggcactgcgaaatacaccctctcaggagatggcgctggcaccgtttttaccattgatgaaaccacaggggacattcatgcaataaggagcctagatagagaagaaaaacctttctacactcttcgtgctcaggctgtggacatagaaaccagaaagcccctggagcctgaatcagaattcatcatcaaagtgcaggatattaatgataatgagccaaagttttgggatggaccttatgttgctactgtcccagaaatgtctcctgtgggacatgcgatgaagattgtgcacgctaccgtgagggcagaagcagataaaacaattaggatttttcttgggccaactagaataattagggctgcagagttggagcctttatataaggagtttgcagctcatatccgaagagagaaatgtatttggaaagtcaaaagtgtagatttttttacttttagttttggagtacctgtgcaggatgtgcaggtttgttacattgataaacatgtgccagggtggtttgctgcacctatcaacccatcacataggtattaagtccagcatgcattagctattttttgaataggatacaacttttatctgaaaagcgtatttcaaactttggaaactaaagcaaacattatatatgaccattaaaatatacatatacatatcatgataggtaaacattatatatgacaattctatgctatacataaatacataaagtctatgtgtataataaataccccatttgtcatagaaagacatactgtgtggtttagctacgattggaaaggtacagttctctaaatcaccatatgcacgttcttttagcaagttagggcctatttctatatagtaatgtgat

SEQ ID NO: 120036 - DNA, 981 bp, Homo sapiens
tttttttttgcctgctgctatatctgaggttgtacttttgttctgatctttgtaacacctcaaaaaaaaaaaatgggttaagagaaggatgaacagaagaatggatatgagacctatctgataaggcaagcagattaatagacgaatggaggaatgtttggatgtatatgtatatgtgttcattgcagttttcaactttttgtgttgaaatttttataaaaagaagttggagaaataaaaaacaagaaaacagaaccataagatttttatttaacatttttgattaaaggaattgtattgcaaattatgactttttaattttgccaacatccttttaatggtgttctttctttgtccttctctttctcttcctctctctctccctctcttccctaaagctccattccgacttagacaagggagagggcactgcgaaatacaccctctcaggagatggcgctgggcccggtttttaccattgatgaaaccacaggggacaattcatgcaataaggagcctacgatagagaagaaaaacctttctacactcttcggtgctcagggctgtggacatagaaaccagaaagcccctggagcctgaatcagaattccatcatcaaagtgcaggatatttaatgataatgagccaaagttttggggatgggaccttatggttgctactggtccccagaaatggtcccctgtggggtgagtagggcaaatcaaaattctgtgagatacaatgagacctcttcaacattgactttttgcaggttgatgtaaacatcttatctatcatctaaaagaattatttttcaattctagaaaatacagttcttttcatttatttttgtaacttttttgtttttctttctgcttcattatgaagataactacaggaatatataacattagttcctgttttccaccctgtgaatttacctgaattcatagaatccttgcgtgctttaagcaaaaaatg

SEQ ID NO: 120037 - DNA, 1510 bp, Homo sapiens
atggctccaggacccttctcctcggccctcctctcgccgccgcccgctgccctgccctttctgctgctgctctgggcgggggcatctcgtggccagccctgccccggccgctgcatctgccagaacgtggcgcccacactgacaatgctgtgcgccaagaccggcttgctctttgtgccgcccgccatcgaccggcgcgtggtggagctgcggctcaccgacaacttcatcgccgccgtgcgccgccgagacttcgccaacatgaccagcctggtgcacctcactctctcccggaacaccatcggccaggtggcagctggcgccttcgccgacctgcgtgccctccgggccctgcacctggacagcaaccgcctggcggaggtgcgcggcgaccagctccgcggcctgggcaacctccgccacctgatccttggaaacaaccagatccgccgggtggagtcggcggcctttgacgccttcctgtccaccgtggaggacctggatctgtcctacaacaacctggaggccctgccgtgggaggcggtgggccagatggtgaacctaaacaccctcacgctggaccacaacctcatcgaccacatcgcggaggggaccttcgtgcagcttcacaagctggtccgtctggacatgacctccaaccgcctgcataaactcccgcccgacgggctcttcctgaggtcgcagggcaccgggcccaagccgcccaccccgctgaccgtcagcttcggcggcaaccccctgcactgcaactgcgagctgctctggctgcggcggctgacccgcgaggacgacttagagacctgcgccacgcccgaacacctcaccgaccgctacttctggtccatccccgaggaggagttcctgtgtgagcccccgctgatcacacggcaggcggggggccgggccctggtggtggaaggccaggcggtgagcctgcgctgccgagcggtgggtgaccccgagccggtggtgcactgggtggcacctgatgggcggctgctggggaactccagccggacccgggtccggggggacgggacgctggatgtgaccatcaccaccttgagggacagtggcaccttcacttgtatcgcctccaatgctgctggggaagcgacggcgcccgtggaggtgtgcgtggtacctctgcctctgatggcacccccgccggctgccccgccgcctctcaccgagcccggctcctctgacatcgccacgccgggcagaccaggtgccaacgattctgcggctgagcgtcggctcgtggcagccgagctcacctcgaactccgtgctcatccgctggccagcccagaggcctgtgcccggaatacgcatgtaccaggttcagtacaacagttccgttgatgactccctcgtcttacaggtgggtgcgggtgctgcagtcccagggcctcctcccaagcccagggggaccctccctcccacctgcccattcccttggccttcttgctcagccagggttctag

SEQ ID NO: 120038 - DNA, 606 bp, Homo sapiens
atgagtgaaagccaggatgaagttcctgatgaagttgagaaccagtttatattgcgtctgcctctggaacatgcttgtactgtcaggaacctagcacgttctcaaagtgtcaagatgaaggataaactaaaaattgacttattgcgaagtttaagagttcactgggaagatatcaactttaatctttacttctcttcagctgatgggcgccatgcagttgttgaagtagaagatgtcccactagctgctaagctggttgacttgccttgtgttattgaaagcctgagaacgcttgataaaaaaaccttttataaaacagcagacatttctcagatgcttgtgtgcactgctgatggtgatatccacctttctccagaagaaccagctgcctctactgatcctaatatagtcaggaaaaaagaaagggggagagaagaaaaatgtgtctggaagcatggcactcatttccctacaggaacagttgcagcgttttctgaagaagtgaggagagccattggcgtggcccacaaaccttggattcaccatccagactgcagattggatgaaactgtgcacgtttttgtcccttcagttgccttatgttga

SEQ ID NO: 120039 - DNA, 505 bp, Homo sapiens
ttttaacatcatttattgctaacatgaattcaaagcaagtatacagtttattgatactagaacaaatcaggacatcaagacatgattgccatcctaaaatcttaatcttcagagaacaacatttccaccaggttggcctgaagacactcagattctaccagtttttgaggtgttccatacttaagtagtgtaggcactgctgttactttcaagttttttctgaagtcattatttggatctttccaataaggcttttctcctacttggcagtagatgaacacacatccttcactaatgtgcttcagcccctctcgtacgactggttcagctgcagctaactgaagaggtcaacagaagtcaggtgttcccttctggtcttagagccacgttaagggtaaggaccaaatcccagtcccgatttgcccctgcaccaccgcgcccgtaacaatggaaagcacatgtatttgctgaccaactcacgtatcctgtaagacactaatggtac

SEQ ID NO: 120040 - DNA, 516 bp, Homo sapiens
gcagagtcttggttccagacatccgcggagcaatctgagctgtccccaagtctccttctattaaatcctaccccgccctgccaagagcgctcttccttttaccaccttacccggatgatcttggaatctagttccttaaaacttctcactcccccagtaccattagtgtcttacaggatacgtgagttgctgaaccagtcgtacgagaggggctgaagcacattagtgaaggatgtgtgttcatctactgccaagtaggagaaaagccttattggaaagatccaaataatgacttcagaaaaaacttgaaagtaacagcagtgcctacactacttaagtatggaacacctcaaaaactggtagaatctgagtgtcttcaggccaacctggtggaaatgttgttctctgaagattaagattttaggatggcaatcatgtcttgatgtcctgatttgttctagtatcaataaactgtacccttgctttgaattcatgttagcaataaatgatgttaaa

SEQ ID NO: 120041 - DNA, 1405 bp, Homo sapiens
atggctaaagagacaacaacaagtgttggcaaagatgtggagcaactggagctctcatacattgtcagcaggaatgtaaaacggtaccaccactatgtaaaaaggcctgagacaccttcagagcctgtctccccctccacaggtccaggaaccctggcagctgtgggcccctcagtggccagtctccttccccatatgcctgagccgtcatccccagagcccgtatcccctaccattggccctggaagcccgggagctgtgggcactcccacggccatggaacctctagcagccacaggcctcccagcagtctgccttcttccagacaggccagagacatgctcaaagatggtcccctcccccacagaccccagcagccccacagccatggacactcctgtagtctgtctgcctcccaacaaacctgagacacccccagagccagtcttctccgccatgggcccaggcatcctggtcgaggtgggcacctccatccttgtgggacccttggcatctgcaggtgcggggccatttcagaacttgacgccaaagccccaggcacactcgcaggaggcaccctcccagcctgtccctgtccacagaagcctaaggctctctcgaagctcggccaggaacacccctttcgacaggtccctctcctgcaggcacgggatggagctcgactctacttccttccccacatcccgaggcggccctcatagcctgcaccttcagccacagcggctgcacgtcgtgccaatggcccccttttggggaggtgagcgtgtccggcttcggaggagttccaccgggaccgtggaacggccccattggcaagaccattttcgcctacttttacgggttctaaggaccgccggggggaaaagctggtgccccgactgcgtgctaggctgaacccagtcgtacgagaggggcttgaagcacattagtgaaggatgtgtgttcatctacttgccaagtaggatgaaaagccttatttggaaagattccaaataaatgactttcagaaaaaaactttgaaagtaacaagccagtgcctacactacttaagtatggaacacctcaaaaacttggtagaatctcgagtgtcttcaggccaacctggtggaaatgttgttctctgaagattaagattttaggatggcaatcatgtcttgatgtcctgatttgttctagtatcaataaactgtatacttggctttggaattcatgttaggcaataaatgatgttaaaaaaaactgggcatgtgtctaaacaataggagtgctatttaaaatgcccatgaacctttagtttgcctgtaatacatggatatttttaagatataaagaagtcttcagaaatagcagtaaaggctcaaaggaacgtattcttgaaggtgac

SEQ ID NO: 120042 - DNA, 177 bp, Homo sapiens
ctaaaaaaggcgtgagcagcggcgtctgcgaatgggaacatcaaagactctcctccgtctctcctcttcatcatcttcatctgattcatccatatctgctgaatcatcatcctcgtcttcctcctcttcctcctcctcctcttcttccatctcttcatattcatcaggacccatttc

SEQ ID NO: 120043 - DNA, 383 bp, Homo sapiens
gagataacaaggatcaagtaacagcaatttcagttaacttcctaaatttcctaaggggacaaggattacgggtctcaaagaacaaaatccaattcatagaatctgaggtaaaatatctaggacacctaatcagtaaaggtgaacgaaagataggatccgaacgaattgaagaacagccattccatcttttcattaatgtaagcaaaggagtggccttaggggtactcacccaaaaacatggaggccaccggcagcctgtagtctttctgtcaaaaatccttgacccagtaacccgtggatggcccgaatgtgttcaatccatagcagcaactgccttgctaacagaagaaagcaggaaaataacctttgggggaaacctcttc

SEQ ID NO: 120044 - DNA, 1326 bp, Homo sapiens
atgactttggaagagctggaggatcgtgaagacaagtttaatgaggaggatgaatgtgctattgaaatgtacagacagcagagactggatgagtggaaagcaactaaattgaagaataaatttgaagaagttttggggatctggagggggggcgggggggaacaagggttacaggtctcaaagaataaactccaattcgtagaacctgaggtgaaatacctaggacacctaatcagtaaaggcaaacgaaagataggacccaaacaaattgaaggtatggtatctttgcctttacctgaaacaaagcaggaacttaggaaattctcaggattggttggatattgtcatctgtggattaactcttatgccttaaaaacaaagcccctatatcaaaaactcactcaagaaagaccagaccctgtaaacccttctctggaccccatcagagatccaacagaacagccattccacctttttgttaatataagcaaaggagtggccttaggagtactcacccacaaacacggaggccaccaatggcccgtagccttcctgtcaaaaatccttgaccccgtaacccgtggatggcccgaatgtgtccaatccatagcagcaactgccttgctaacagaagaaagcaggaaaataacctttgggggaaacctcatcataagtacccctcatcaagtcagaactattcttaatcagaaggcagagagatggcttactgactcaagaattttaaaatatgaagttatcttattagagagggatgacctaacactaaccactgacaattcactcaaccccgctgctttcctaacaggaaatccaaacccagaagaatctacgcataaatgcttagatctaatcagttctcaaactagagtcagactggatctaagcaaaacccctttccaaacagggcatcacctctttacagatggttccccccggatcattgaaggaaaaaggtacaacaggtactccacagttgatggggaaatcctcacagagaatcaagaaggaactatttacactgactccaagtatgccttcagagtagtccatacctttggaaaaatctggactgaacgaggcttcatcaatactgcgatccccatcttctcccacgtagacctttctctaaagaaaataggagctcaggagagcccagagggaaagcaggcattaccagatggaagggaaatgctgtctaagcccctcatgagggaaatattgtcacagcttcatccaggaactcactggggtcctcaagctatgtgcaatgtagccctcagagtctatgggtgtatagagtactag

SEQ ID NO: 120045 - DNA, 594 bp, Homo sapiens
agccttgatatctccttccaggtaaacaaatatcgtgggcagattcctatcaggataattgggtatgcaggttgttgaaatggctttgataaatttgacatcaggaaacttcctggcaagtccactgaggtgctgatttatcagggcacagaggggaattccttgtttgtaaaggtgcaagatgacccacaagccctcgccagctttggtaacttcttgaacataatccttccctgagatctccaaaacttctccaaatttattcttcagtttagttgctttccactcagccagtctctgctgtctgcacatttcaatagcacattcatcctcctcattaaactcgtcttcatgatcctccagctcttccaaagtcatatcttcatatgttttcaccactgactgctggaggatgcgctgctcctcttctgcctcctcttccaattctttcagactttccttggggggtaagataccctttttgcgttaagatgtcattccattcagtgtatgcgttgggaaacatgcatcttgtttccagttcagttgctcaaaccagctgtgccgcagcgcccccgcccctcagctctcttt

SEQ ID NO: 120046 - DNA, 1305 bp, Homo sapiens
atggggagcgatcgggcccgcaagggcggagggggcccgaaggacttcggcgcgggactcaagtacaactcccggcacgaggtgagcgcgggccggggacccggggcgctgggaagctcctgcccgcccgaccctgcagcgcggcgctgggctcggccggctcccctggcgtgtccgtcggtggccgagctctgggcgcacagccaggaaatgcttggaaagctaaatatgctgcgaaatgatggacatttttgtgatatcactattcgtgtccaggacaaaatcttccgggcacataagtggttactaggcagcttgcagtgatttctttcgcaccaaacttgtaggccaagccgaggatgagaaacaagaaatgtgttggatctgccatcatgttaccatgactggctttatacctcttttagaatatgcttacacgagccactctatcaattaacacagaaaatattattgatgttctagcagcagccagctatatgcaaatgttcagtgttgccagcacctgctcagagttcatgaaatcaagcattttatggaatacacccaacagccaacctgaaaagggtctagatgctggacaagaaaataattctaactgcaattttacttctcgagatgggagcatttctcccgtgtcctcagagtgcagagtggtagaaagaaccattcctgtctgccgagaatcccggagaaagcgcaaaagctacattgttatgtctcctgaaagtcctgtaaagtgtggcacacaaacaagctcaccccaggtattgaattcttcagcttcctactcagaaaatagaaaccaaccagttgactcttccttagcttttccttggacttttccttttggaattgatcgaaggattcagcctgagaaagttaagcacgcagaaaatacccggacttttagaattacctggcccatctgagaccggtagaagaatggctgattatgtgacttgtgagagcacaaaaactaccttgcctttaggtaccgaagaagatgtccgggtcaaagtagaaagattaagtgatgaggaggtccatgaggaagtgtcccagcctgtcagtgcatctcagagttcgctgagtgatcagcagacagttccaggaagtgaacaagtccaagaggaccttctgattagtccacagtcttcctctataggaaggggtgagcctcctggaaatggtgggtggagtttctccaactttcaggttcccaagaatgacctggagcacttgaataaaaacttccacatccgaggccctgctcctgatgcatga

SEQ ID NO: 120047 - DNA, 601 bp, Homo sapiens
gcggtggaattcatcagcccatgcttgttagtctgttaaagaagaagagaaatgacaacagtgaggctcagctcgcccacctgatacctgagctctgctttctaacagggctgactgaccaggcaacatctgatttccagctgatgaaggctgtggctgaaaagacacgtctcagtccttcaggccggcagcagcgcctggccaggcttgtggacaacatccagaggaataccaatgctcgctttgaactagagacctggggactgcattttggaagccagatatctctgactggccggattgtgccttcagaaaaaatattaatgcaagaccacatatgtcaacctgtgtctgctgctgactggtccaaggatattcgaacttgcaagattttaaatgcacagtctttgaatacctggttgattttatgtagcgacagaactgaatatgttgccgagagctttctgaactgcttgagaagagttgcaggttccatgggatttaatgtggactaccccaaaatcataaaagtacaagaaaatccagctgcatttgttagagctatacagcaatatgttgatcctgatgttcagttggtggc

SEQ ID NO: 120048 - DNA, 1026 bp, Homo sapiens
atgaagcatcctctagcaatggcttcttgggaacaagcaggatctcaaccaacggtcacagagttgtcaagtgaaactcaaagaggtgagactataaagatgactatcaccctgaagagggagctgccatcaagttctcccgtgtgcatccaggtcttcaatatcatcttcagaaaattatccctttggcctgggtttgccatttctgtgtcatattttgaaaggaagctcctgtttagtgctgatgtgagttacaaagtcctccggaatgagacggttctggaattcatgactgctctctgtcaaagaactggcttgtcctgtttcacccagacgtgtgagaagcagctaatagggctcattgtccttacaagatacaataacagaacctactccattgatgacattgactggtcagtgaagcccacacacacctttcagaagcgggatggcaccgagatcacctatgtggattactacaagcagcagtatgatattactgtatcggacctgaatcagcccatgcttgttagtctgttaaagaagaagagaaatgacaacagtgaggctcagctcgcccacctgatacctgagctctgctttctaacagggctgactgaccaggcaacatctgatttccagctgatgaaggctgtggctgaaaagacacgtctcagtccttcaggccggcagcagcgcctggccaggcttgtggacaacatccagaggtttccagtagcagagttcactgttcccccgtgcaaggggcagtacagagaggagacagacaggtacatccagcaagggcaggaaaggaagggccaagcacgagtgggagaagccaaaagactgggatctcataccaggggtcaggatagagaatctctgaccagggtgttccaggctcagcccagagacacagtcctcagctcagtgcagaccctcatccctgagtccatggcactacacagctcctgcgaagctgttcatgtagactttaatgtgagtgatgcctctcagggttga

SEQ ID NO: 120049 - DNA, 609 bp, Homo sapiens
acaaaaattaattcaagatggattaaagacttaaatgttagacctaaaaccataaaaactctagaagaaaacctaggcaataccattcaggaactaggcgtgggcaaggacttcatgactaaaacaccaaaagcaatggcaacaaaagccaaaatagacaaatgggatctaattaaacgaaagagcttctgcacagcaaaagaaactaccatcagagtgaacaggcaacctacagaatgggagaaaatttttgcaatctacccatctgacaaagggctaatatccagaatctacaaagaacttaaacaaatttacaagaaaaaaacaagcacccccatcaaaaagtgggcaaaggatatgaacagacactgctcaaaagaagacatttatgtagccaacggacacatgaaaaaatgctcatcatcactggtcgtaagagaaatgcaaatccaaaccacaatgcgataccatctcacaccagttagaatggcgatcattaaaaagtcaggaaacaacagatgctggagaggatgtggagaaataggaacgcttttacactgttggtgggaatgtaaactagtccaaccattgtggaagacagtgtggtga

SEQ ID NO: 120050 - DNA, 1539 bp, Homo sapiens
atgccaattcagatgcagtatccacaatataagctggtagaaaataagacccaaccaccagtaatttatcagtactggccgccagccgaccttcagtatcggccacctccagaggttaaatacagacctcaagtggtgtgtcctgtgccaaatagcacggcaccataccagcaacccacggcagtggtgtttaatcctaccgcaccacctagtggacaaggcattattgctcaaaatacagatcttgtggagtggttcttccttcctcatagtacaattaagacttttacattgtacttggatcaaatggctacattaattggtcaggcaagattacgaataataaaattgtgtgaaagtgactcagataaaatcattgttcctttaaacaaggaacaggttagacaagcctttatcaattctggtgcatggcagattggtcttgctgattttgtgggaattattgacaatcattacccaaaaacaaaaatcttccagtttttaaaattgactacttggattttacctaaaattactagacataaacctttagaaaatgctctgacagtgtttactgatggttccagcaatggaaaagcggcttacaccaggccaaaagaacgactcattgaaactcaatatcactgggctcaaagagcagagttggttgctgtcattacagtgttacaagattttaatcagcctattaacattgtatcagattctgcatatgtagtacaggctacaaaggatgttgagacagccctaatcaaatatagtatagatgatcagttaaaccagctgtttaatatgttacaacaaactgtaagaaaaagaaatttcccattttatgttactcatattcgagcacatactaatttaccagagcctttaactaaagcaaatgaacaagttgacttgctagtatcatctgcattcctggaagcacaagaacttcatgccttgactcatgtaaatgcaacaggactaaaaaataaatttgacatcacatggaaacaggcaaaaaatattgtacaacattacacccagtgtcagattccacacctgcccactcaggaggcaggagttaatcccagagaacaacattttactggtaaaaagaatagcccacatgaaggaaaactgatttggtggaaagacaagaaaaataagacatgggaaatagggaaggtgataacatgggagagaggctttgcttgtgtttcacaaggagaaaatcagcttcctggttggatacccactagaaatttaaagttctacaatgaaccccttggagatgcgaagaaaagcgcctctgcggagacaaaaaaccctcaattgagcatcatcgactcgccagggaaggcaccaggatgtttaatgcctacaacccaaaactggttggtagaagtacctaccgtcagtgccaccagtaaatttacttatcacatggtgtatccaccagctccgaagagacagcgaccagcaagaacgggccataacgacgatggcagttttgtcaaaaagggggatatgtag

SEQ ID NO: 120051 - DNA, 1396 bp, Homo sapiens
gctaagagaattcatcattaccaaaccaccactacaaaaactgctaaaaggagctctaaatcttgaaacaaatcctggaaacacatcaaaacagaacatttttaagcacaaattacacaggacctataaaacaaaaatacaagttaaaaagctaaaacagaaaacaaaaaacctaagtactcagacaacaaagaatatgatgaatgtaaccatacctcacatctcaatacaaacgttgaatgcatatggcctaaatgctccacttaaaagatacagaactgcagaatgcgtaagaattcaccaaccaaccatctgctgccttcaagagactcacctaacacataaggactcacataaacttaaagtaaagggttggaaaaaggcactccatgcaaatggacaccaaaagcaagcaggagtagctattcttataccaaacaaaacaaattttaaagcaatagcagttaagagagacaaagagggacattatataatggtaaaaggccttgtccaacaggaaaatatcacaatcctaaacatatatggacctaacactggagtttccagattaataaaacaattactagtagacctaacaaatgaaatagacaacaacacaataacagtgagtgacatcaatattccactgacagcactagacagctgcaaaaataaaataaaatacttagaaatatacctaatcacggaggtgaaagacctctacaaggaaaactatgaaacactgctgaaagaaatcacagacgacacaaacaaatggaaacacaacccatgctcatggatgggtagaatcaatattgtaaaaatgaccatagtgccaaatgcaatctataaattcaacacaattctcatcaaaatatcaccatcattcttcacagaattcgaaaaaacaattttaaaattcataaaaagagcccacatagccaaagcaagactacgcaaaaagaacaaacctggaggcatcacattacctgatttcaaactatactgtaaggccatagtcaccaaaacagcatcgtgctggtatgaaaacaatcacatagaccaatggaacagaacagagaactcagaaataaacccaaatacttacagccaactgatctttgacaaagcaaacaaagatataaagtggggaaaggacacccttttcatcaaatggttctgggataaatggctagccacatgtaggagaatgaagctggatcctcatctctcaccttattcaaaaatcaactcaagatggattaagggcttaaatctaagacctgaaactataaaaattctagaagataatgttggaaaaacccttctagacattggctttggcaaggatttcataaccaagaacccaaaagcaaatgcaaaaaaacaaagataa

SEQ ID NO: 120052 - DNA, 1045 bp, Homo sapiens
  misc_feature (1)...(1045): n = a,t,c or g
gctaagagaattcatcattaccaaaccaccactacaaaaactgctaaaaggagctctaaatcttgaaacaaatcctggaaacacatcaaaacagaacatttttaagcacaaattacacaggacctataaaacaaaaatacaagttaaaaagctaaaacagaaaacaaaaaacctaagtactcagacaacaaagaatatgatgaatgtaaccatacctcacatttnnnnnnnnnnnnnnnnnnnnnnnnnnnnnnnnnnnnnnnnnnnnnnnnnnnnnactgcagaatgggtaagaactcaccaaccaatcatctgctgccttcagaagactcacctagcacataaggactcaaataaacttaaagtataggggtggaaaaaggcatttcatgcaaatggacaccaaaagcgagcaggggcagctattcttataccagacaaaacaaattttaaagtaacagcagttaaaagagaccaagagggacattatataatggtaaaaaccttgtccaacaggaaatatcacaatcctaaaaacagaggcacctgcgatgcagaaaaagcattcgacaaaatccagcatccctttatgattaaaactctcagcaaaatcagcattcaaaggacataccttaatgtaataaactccatctatgacaaaccaacagcaaacgtgatactgaatggggaaaagttgaaagcattccctctgggaactggaacaagacaagaatgcccgctgtcaccactcctgttcaacatagtactggaagtcctagccagagcaatcagacaagagaaagaaataaagggcatccaaatcagtaaacaggaagtcaaactgtcactgtttgctgatgatacaatcgtttaccttgaaaaccctaaggactcctccagaaagctcctagaactgataaaagaattcagcaaagtttctggatacaagattaatatacacaaatcagtagttcttccatacaccaacagtgaccaagcagagaatcaaatcaagaactcaacctcttttacaatagctgcaaaa

SEQ ID NO: 120053 - DNA, 360 bp, Homo sapiens
gttttgaagtacaggaagaaggttatctggcaaaaatcctggtccctgaaggcacaagagatgtccctctaggaaccccactctgtatcattgtagaaaaagaggcagatatatcagcatttgctgactataggccaaccgaagtaacagatttaaaaccacaagcgccaccacctaccccacccccggtggccgctgttcctccaactccccagcctttagctcctacaccttcagcaccctgcccagctactcctgctggaccaaagggaagggtgtttgttagccctcttgcaaagaagttggcagtagagaaagggattgatcttacacaagtaaaagggacaggaccagatggta

SEQ ID NO: 120054 - DNA, 639 bp, Homo sapiens
atgatgcaaaaccaaagtacctacttggtggatccctgggtagaggatcctgattggttgagagcccctcatgctttgtacacagagcagaaaatattgagacatcagagggagatcctgctgacagttatctatgccagaggtcagcgtttctcaaacaagtctttgatcaaagtaggatctgtggccgctgttcctccaactccccagcctttagctcctacaccttcagcaccctgcccagctactcctgctggaccaaagggaagggtgtttgttagccctcttgcaaagaagttggcagtagagaaagggattgatcttacacaagtaaaaggatgtcttagtcagttgagtgttgccataaaggaatacctgaggctaggtaacttaggaggaaaagaggtttgtttggctcacaattcggctggctggaaagttgggcatctggtgaaagcctcaatcggctttcactcacggcagaaggcaaatgggagttggcatgtgctgagattacatggagagaggaagcaagagagtggagggagggactcactgaggaaaaggcagctactaacccagcatgccaaagagctggatgaggggtcagcattagaagaaaatgtcaaaatccagtag

SEQ ID NO: 120055 - DNA, 861 bp, Homo sapiens
atgggtcaggcacaaagtaagcccaccccaccaggaactatgttgaaaaatttcaagaaaggatttaagggagattatggtgttactctgacaccaggaaaagttagaactttatgtgaaatagactggccagcattagaggtggatttcccatcagaagtaagccttgacgggtccgttgtttcaaagggagaaaacttagcattccttggagacctgaagggatgcagtgagcttaagaattttcaagagcttatcaatcagtcagccctggttcatccccaagcagatgtgtggtggtattgtggtggacctttactgggcactctgccaaataactggagtggcatttgtgctttagtccagttggctatccctttcaccctggcatttcatcaaccagagggaggaaaaataagacattgtaaagtgagagaagccccttatgggcctttcaactctcacatctatttagatgcaattggaatccaaaagggaataccagatcaatttaaagcccaaaatcaaatagctgcaggatttgagtcaatattttggtgggtgacagttaataaaaatgtagattggataaactacatctattacaaccaacagcaacgagcttttcatgagttaaaagaaaaactcatgtcggccctagccctggggctacctgaccagacaaaaccttttacactatatgtgtcagacagagaaaaaaaaatggcggttagagttttgacccagaccatggggccctggctggggccagtggcctacctctctaaacaactagatggcgtttctaagagttggcccccatgtttgagggctttggcagcaacagccctgctagcataa

SEQ ID NO: 120056 - DNA, 714 bp, Homo sapiens
atgattgaggaactccagaaacgttgcatccacctggagtaccctctgttggcagaatatgactttcagaaggattctgtcaaccttgatatcaacactgacctaaagcccacaggtgtcctcagaccctatcaggagaagagcttgtggaagattaaatcaaattcaaatgagaataatccagaaaaggtggtgaaacaacaggttggaaactggattaggaagatagcggctgcttcatctcttcacagatgtcccaatggatcaatcagagctttaggagttcagtgccacagacccagcaccttgattgacagtactcattttttggcaatgagccacaaggaatatctgcttgaaaccagtggagagtatctggcgtggagatatgcaggctgcctgtccattcatcataacaggctccatctcattagaggatttaatgaatctgaacagttcatcatcaaggccttgcttaatgatggttatctcgatgatgcaccccgtgggcataaacatagccatccctgtcagggacagatgaagagagatgaatatgctcatcatgccaatcacgggccaggaaatagcaagagattaatatcagaagcaggagtgtggcagtgcttgatgtttgtcattgtgacccactgccaaagcatcagcaccaggttctggaacatccgggttgtatgtagcttgcaagctaactga

SEQ ID NO: 120057 - DNA, 2447 bp, Homo sapiens
gggagcttccggattgagccggaagtccccccagagcggatgccgcggcgggcctgtgggagcggggtcatcttctctctgctgctgtagctgccatgggcaaaagagaccgagcggaccgcgacaagaagaaatccaggaagcggcactatgaggatgaagaggatgatgaagaggacgccccggggaacgaccctcaggaagcggttccctcggcggcggggaagcaggtggatgagtcaggcaccaaagtggatgaatatggagccaaggactacaggctgcaaatgccgctgaaggacgaccacacctccaggcccctctgggtggctcccgatggccatatcttcttggaagccttctctccagtttacaaatatgcccaagacttcttggtggctattgcagagccagtgtgccgaccaacccatgtgcatgagtacaaactaactgcctactccttgtatgcagctgtcagcgttgggctgcaaaccagtgacatcaccgagtacctcaggaagctcagcaagactggagtccctgatggaattatgcagtttattaagttgtgtactgtcagctatggaaaagtcaagctggtcttgaagcacaacagatacttcgttgaaagttgccaccctgatgtaatccagcatcttctccaggaccccgtgatccgagaatgccgcttaagaaactctgaaggggaggccactgagctcatcacagagactttcacaagcaaatctgccatttctaagactgctgaaagcagtggtgggccctccacttcccgagtgacagatccacagggtaaatctgacatccccatggacctgtttgacttctatgagcaaatggacaaggatgaagaagaagaagaagagacacagacagtgtcttttgaagtcaagcaggaaatgattgaggaactccagaaacgttgcatccacctggagtaccctctgttggcagaatatgacttccggaatgattctgtcaaccctggatatcaacattgacctaaagcccacagctgtccctcagaccctatcaggagaagagcttgcgaaacgatgtttggaaacgggcgtgcacgttcgggggtcattgttcttccctgcggtgctggaaagtccctggttggtgtgactgctgcatgcactgtcagaaaacgctgtctggtgctgggcaactcagctgtttctgtggagcagtggaaagcccagttcaagatgtggtccaccattgacgacagccagatctgccggttcacctccgatgccaaggacaagcccatcggctgctccgttgccattagcacctactccatgctgggccacaccaccaaaaggtcctgggaggccgagcgagtcatggagtggctcaagacccaggagtggggcctcatgatcctggatgaagtgcacaccataccagccaagatgttccgaagggtgctcaccatcgtgcaggcccactgtaagctgggtttgactgcgaccctcgtccgcgaagatgacaaaattgtggatttaaattttctgattgggcctaagctctacgaagccaactggatggagctgcagaataatggctacatcgccaaagtccagtgtgctgaggtctggtgccctatgtctcctgaattttaccgggaatatgtggcaatcaaaaccaagaaacgaatcttgctgtacaccatgaaccccaacaaatttagagcttgccagtttctgatcaagtttcatgaaaggaggaatgacaagattattgtctttgctgacaatgtgtttgccctaaaggaatatgccattcgactgaacaaaccctatatctacggacctacgtctcagggggaaaggatgcaaattctccagaatttcaagcacaaccccaaaattaacaccatcttcatatccaaggtaggtgacacttcgtttgatctgccggaagcaaatgtcctcattcagatctcatcccatggtggctccaggcgtcaggaagcccaaaggctagggcgggtgcttcgagctaaaaaagggatggttgcagaagagtacaatgcctttttctactcactggtatcccaggacacacaggaaatggcttactcaaccaagcggcagagattcttggtagatcaaggttatagcttcaaggtgatcacgaaactcgctggcatggaggaggaagacttggcgttttcgacaaaagaagagcaacagcagctcttacagaaagtcctggcagccactgacctggatgccgaggaggaggtggtggctggggaatttggctccagatccagccaggcatctcggcgctttggcaccatgagttctatgtctggggccgacgacactgtgtacatggagtaccactcatcgcggagcaaggcgcccagcaaacatgtacacccgctcttcaagcgctttaggaaatga

SEQ ID NO: 120058 - DNA, 936 bp, Homo sapiens
atgaagaaagttttagcgatctggatggaagatcaaaccagccataacatttccttaagccaaagtctaattcagagcaagatcctaactctcttcaattctgtgaaggctgataggggcgaggaagctgtggaagaaaagttggaagctagcagaggttggtttatgaggtttaaggaaggaagctatctctataatgtaaaattgcaaggtgaagcagcaagtgctgatgtagaagctacagcaagttctccaggaaatctagcagagattatcgatgaagccggctacactaaaaaacctcaaattagaagaaggtattattatttaagaaatacatttcataaggctatagttgctatagatagtgattcatctgttggatctgggcaatgtaaattgaaacctggaaaggattcaccattccagacactgagttactggaccatcagagcccctgatgctctcctgtttgtggagaaagaggacactgtagaagacatccagtcctcttgctgctgccccacccaaagaggtttcttgggtgaagagactctggccaccacacagtatttaccaggacagtggcagtggagtgttcctcagccttctgcctcttctgctccattcttatacctgcaaccttctgaggttatttatcaaccagtggaaattgcacaggatggtggatgtgttcctcctccactgtctctgatggaaacttcagttccagagagtcaggcccctctgctgcaggtctgtaggagtttgctggagatccaccccagaccctgtttgcctgggtatcaccagcggaagctgcggaacagcaaagattgctgcctgctccttcttctggaagcttcgtcccagagggacacccaccagatgccaactggagctctcctgtatgaggtgtctgtcaacccctgctag

SEQ ID NO: 120059 - DNA, 882 bp, Homo sapiens
atggcgggctgcaggtccccaaccctgccccatggggaggtggctgaggcctggctggcattgagtgcctgtggcttttccaagcacacggtgcaggctactggtggatctaccattctggattctggaaggtggtggcccttttcttacagctccactaggcagttccccagtggaaatggcgtaaactatagccactgccaaggtacagcttgggccattgcttcagagggtgcaaaatttaaattacatatgtggctttctaccttgggcctgacaggtagcgagaagaagaaggtccattctaccatcaatgaggtggtgacccgagaacacatcatcaacattcacaaaggtgcctgtggagtgaacttcaaaaagcatgtgcctctagaactcagagaaatctggaaatttgccatgaagcaggagggcaagaaggcagaagataattcttgtaaggagggcaagaaggcagaagataattcttgtaaggagggcaagaaggcagaagataatgataaacccaagaatttaggatttgggaggctggaaaagactcatcccactggaaaaatgtttattctttcagatgaagaaggaaaaaatggaatcattgagttaatggagccccttcatgaagaaatctctggaatcttggaagtgttggaagagtctttctcctgggaacaaccaccaaagcgacctccccctgcaccttcagctcccttgctaaaccctgcgattttcagtgcaccacccaccttgattcggcaacccaaggtggatgatatgagtgtggccaccattgagaagaaagccacaacaaccaccagtgccaagccacagatcactgctaattccaaggcagagcttacttga

SEQ ID NO: 120060 - DNA, 949 bp, Homo sapiens
atggccggcgctcgggccgccgccgccgctgcctcggcggggtcctcggcctcttcaggcaaccagccgcctcaggagctggggcttggggagctgctggaggagttctcccggactcagtaccgggccaaggatggcagcgggaccggcggctctaaggttgagcgcattgagaagagatgtctggagctgtttggccgagactactgtttcagcgtgattccaaacacgaatggggatatctgtggccactatccccggcacatcgtgttcctggagtatgagagttctgagaaggagaaagacacggctgcagccaagatctctgatggctcccagtactatgttctgctcatcatcactgatggggtcatctctgacatgacgcagaccaaggaggccatcgtcagcgcctcctcattgcccatgtctatcattatcgtcggtgtaggaccagccatgtttgaggcaatggaagagttggacggtgatgatgtgcgcgtgtcctctaggggacgctacgcagagcgggacatcgttcagttcgtcccattccgagactatgttgaccggtcggggaaccaggtgttgagcatggcccgactggccaaggatgtgctggccgagatcccggagcagctgctgtcctatatgcgcaccagagacatccagcctcggcccccaccccctgccaaccccagcccgatcccagctccagagcagccctgaggattccacatatccaatgcctcacagtctgcaagcctgctcacccactgcttctgctttaagccagaggcacctggaaccctggacttcactgggagggccaacttggaggatcagtgctggctgacaagccctccgcctccttgcctgcagagggcctggcactatcaccacctctctgccttcatgccaataataaagctgatctttattccaaaaa

SEQ ID NO: 120061 - DNA, 1512 bp, Homo sapiens
atgtgtgctgatgtctgggagtacatgtatgatcaggtgtcacgggatgtggatacaaggcgagccctggctgtggtcggggggcagtgggccatgctgggggcagtggaaggccccaggtggaagcaggcggaggacattagagacatctacgacttccgagatgttctgggcacgggggccttctcggaggtgatcctggcagaagataagaggacgcagaagctggtggccatcaaatgcattgccaaggaggccctggagggcaaggaaggcagcatggagaatgagattgctgtcctgcacaaggtgtcgggtggggagctctttgaccgtattgtggaaaaaggcttctacacggagcgggacgccagccgcctcatcttccaggtgctggatgctgtgaaatacctgcatgacctgggcattgtacaccgggatctcaagccagagaatctgctgtactacagcctggatgaagactccaaaatcatgatctccgactttggcctctccaagatggaggacccgggcagtgtgctctccaccgcctgtggaactccgggatacgtggcccctgaagtcctggcccagaagccctacagcaaggctgtggattgctggtccataggtgtcatcgcctacatcttgctctgcggttaccctcccttctatgacgagaatgatgccaaactctttgaacagattttgaaggccgagtacgagtttgactctccttactgggacgacatctctgactctgccaaagatttcatccggcacttgatggagaaggacccagagaaaagattcacctgtgagcaggccttgcagcacccatggattgcaggagatacagctctagataagaatatccaccagtcggtgagtgagcagatcaagaagaactttgccaagagcaagtggaagcaagccttcaatgccacggctgtggtgcggcacatgaggaaactgcagctgggcaccagccaggaggggcaggggcagacggcgagccatggggagctgctgacaccagtggctgggggtgaggagcgggctctgcagaagggcatgggtggtccacaaagggctgcagcctttatctctgatggctcccagtactatgttctgctcatcatcactgatggggtcatctctgacatgacgcagaccaaggaggccatcgtcagcgcctcctcattgcccatgtctatcattatcgtcggtgtaggaccagccatgtttgaggcaatggaagagttggacggtgatgatgtgcgcgtgtcctctaggggacgctacgcagagcgggacatcgttcagttcgtcccattccgagactatgttgaccggtcggggaaccaggtgttgagcatggcccgactggccaaggatgtgctggccgagatcccggagcagctgctgtcctatatgcgcaccagagacatccagcctcggcccccaccccctgccaaccccagcccgatcccagctccagagcagccctga

SEQ ID NO: 120062 - DNA, 1728 bp, Homo sapiens
atgggaatttctgggagatacaattccaagttgagatttggggtgcctattgtcgatgctgcagccgactctagaggatccccggctgcagccaagatctctgatggctcccagtactatgttctgctcatcatcactgatggggtcatctctgacatgacgcagaccaaggaggccatcgtcagcgcctcctcattgcccatgtctatcattatcgtcggtgtaggaccagccatgtttgaggcaatggaagagttggacggtgatgatgtgcgcgtgtcctctaggggacgctacgcagagcgggacatcgttcaggggtatgatatcagctttctgatcaccaacttccacacagagcagatgtacaaacacaagttggtggactttgtgatccacttcatggaggagattgacaaggagatcagtgagatgaagctgtcagtcaatgcccgtgcccgcattgtggctgaagagttccttaagaatgatgttcacaaagtccttgcctctatctcgtttaaaccccaagtgagcgaaggggcagaactcaggcacctcgacactcaggtccagcgctgtgaggacatcctgcagcagctgcaggccgtggtaccccagatagacatggaaggggatcgcaacatctggatcgtgaagccaggagccaagtcccgtggacgaggcatcatgtgcatggaccacctggaggagatgctgaagctggtgaacggcaaccccgtggtgatgaaggacggcaagtgggtggtgcagaagtatattgagcggcccctcctcatctttggcaccaagtttgacctcagacagtggttcctggtaactgactggaacccacttaccgtgtggttctaccgcgacaagctatatccgcttttccaagcagccattctccaactgaagaacctggacaagagtagcaaagagctcctgttacaacctgtgaccatcagcaggaatgagaaggaaaaggttctgattgagggctccatcaactctgtccgggtcagcattgctgtgaaacaggttgagcgcattgagaagagatgtctggagctgtttggccgagactactgtttcagcgtgattccaaacacgaatggggatatctgtggccactatccccggcacatcgtgttcctggagtatgagagttctgagaaggagaaagacacgtttgagagtaccgtacaggtgagcaagttgcaagacctcatccaccgcagcaagatggcccggtgcagaggacggtttgtctgcccagtaatccctgttcaagggcaaggtttcccggtcctctggcgaggatcctccaaggcgtctcacatgaaccggctcagaaacgccaaaatctacgtggagagagctgtcaagcagaagaagatctttacaatccaaggctgctacccggtgatccggtgtctcttgcgccggaggggctgggtggagaagaagatggtccatcgctcaggccccaccctgctgccaccccagaaggatctggatagctcagcgatgggtgacagtgacaccactgaggatgaggatgaagatgaggacgaggagttccagccatcacagctgttcgacttcgatgatttactgaaatttgatgacctagatggaacacatgctctgatggtgggtctatgtctcaatctccggaatttgccgtgggtttgatgaggttgatgcccactcctttcttcc

SEQ ID NO: 120063 - DNA, 2754 bp, Homo sapiens
atggccatgttcatattgtccgtgggtatttgtcactggttcagatgtgacagcatgggggtggactttgatgtgaagactttctgccacaacttgcgggcgactaagccaccatacgagtgcccggtggagacctgccgaaaggtctacaagagttacagtggtattgagtaccacctgtaccactatgaccacgacaacccaccacccccacaacaaactccactccgcaagcacaagaaaaaggggcgccagtcacgcccagccaacaagcagtcacccagcccctcagaggtctcacagtcaccaggccgtgaggtgatgagctatgcacaggcccagcgcatggtggaggtggacttgcatggccgcgtccaccgcatcagcatctttgacaacctggatgtggtgtcagaggatgaggaagcccccgaggaggcccctgagaatggcagcaacaaggagaacactgagacaccagctgctactcccaagtcaggcaaacataagaacaaggagaagcgcaaggactccaaccatcaccaccaccacaatgtttctgcgagcaccactcccaagctgccagaggtggtctatcgggagctggaacaggacacccctgatgccccaccccggccaacttcctattaccggtacatcgagaagtctgcagaggagctggacgaggaagtagagtatgacatggacgaggaggactacatctggctggatatcatgaatgagcgtcggaagacagagggtgtaagtcccatcccgcaggagatctttgagtacctaatggaccgactggagaaggagtcgtactttgagagtcataataaaggcgaccctaatgcgctagtggacgaggatgctgtttgctgtatctgcaatgatggtgagtgccagaacagcaatgtcatcctcttctgtgacatgtgcaacctggccgtgcaccaggagtgctacggtgtcccctatatccctgagggccagtggctgtgccgccgttgcctgcagtcaccctctcgtgctgtggattgtgccctgtgccccaacaagggcggtgccttcaagcagacagatgacgggcgctgggcccatgtggtgtgtgccttgtggatccctgaggtctgcttcgccaacacggtcttcctagagcctattgacagcattgagcacatcccaccagctcgctggaagctcacctgctacatttgcaaacaacggggctcaggggcctgcatccagtgccacaaggccaactgttacacagctttccatgtgacatgcgcccagcaggctggcctttacatgaagatggagcctgtgcgggagacaggcgccaacggcacctctttcagtgtccgcaagacagcctactgcgacatccacacgcctccaggttcagcacgccgactgcctgccctgtcccacagcgagggtgaggaggatgaagatgaggaggaggatgagggtaagggctggagctcagagaaagtcaagaaggccaaggccaagtcccggatcaaaatgaagaaggcacggaagatcctggcagagaagcgggcagcagcacctgtggtgtcagtgccctgcatcccaccacacaggcttagtaaaatcaccaaccgcctgaccatccaaaggaagagccagttcatgcagaggctgcacagctactggacactgaagcggcagtcacggaatggggtcccattgctacgtcgcctgcagacacacctgcaatctcagaggaactgtgaccaagttgggagagattctgaggataagaactgggcccttaaagaacagctcaagtcctggcagcggctccggcatgacttggagcgagctcggctgctcgtggaattgatccgcaagcgggaaaaactcaaaagggagacggacattgccaccatgcagctgtgtgcaaacaagctggacaagaaggacttctttgggaaatcagaccccttccttgtgttctacaggagcaatgaggatggcacgttcaccatctgccacaagacagaggttgtgaaaaacacgctgaatcctgtgtggcagcccttcagcatccctgtgcgggctctgtgcaatggagactatgacagaacggtgaagattgatgtgtacgactgggaccgggatggaagccacgatttcattggtgagttcaccaccagctaccgggagctgagcaaggcccagaaccagttcacagtatatgaggttcttaaccctcggaagaaatgtaagaagaagaaatatgtcaactcaggaactgtgacgctgctctccttctctgtggactctgaattcacttttgttgattacatcaagggagggacacagctgaacttcacagtagccattgacttcacggcttccaatggtgagacacggatgagtgaaaaagtcggagggaatcctctgcagcctacctccctgcactacatgagtccctaccagctcagcgcctatgccatggccctcaaggcagtgggagagatcatccaggactatgacagtgataagctcttcccagcttatggctttggggccaagctgcccccagagggacggatctcccaccagttccccctgaacaacaatgatgaggaccccaactgtgcgggcatcgagggtgtgctggagagctatttccagagcctgcgcacagtgcagctctatgggcccacctactttgctcctgtcatcaaccaagtggccagccttccaagtagctaa

SEQ ID NO: 120064 - DNA, 1062 bp, Homo sapiens
atgggtttcagaagccccagttcctgcccactgcccacacactggctgtggaagctctggggggctgcagccaagatctctgatggctcccagtactatgttctgctcatcatcactgatggggtcatctctgacatgacgcagaccaaggaggccatcgtcagcgcctcctcattgcccatgtctatcattatcgtcggtgtaggaccagccatgtttgaggcaatggaagagttggacggtgatgatgtgcgcgtgtcctctaggggacgctgggcagagcgggagcggtcgttcaggacacagctgaacttcacagtagccattgacttcacggcttccaatggtgagacacggatgagtgaaaaagtcggagggaatcctctgcagcctacctgcctgcactacatgagtccctaccagctcagcgcctatgccatggccctcaaggcagtgggagagatcatccaggactatgacagtgataagctcttcccagcttatggctttggggccaagctgcccccagagggacggatctcccaccagttccccctgaacaacaatgatgaggaccccaactgtgcgggcatcgagggtgtgctggagagctatttccagagcctgcgcacagtgcagctctatgggcccacctactttgctcctgtcatcaaccaagtggccaggtgctggaggaacagtggcaagcaagacaaagcctctggattcggggagcttatgtctggagccctggctgtggtcggggggcagtgggccatgctgggggcagtggaaggccccaggtggaagcaggcggaggacattagagacatctacgacttccgagatgttctgggcaccgcgccgttcaagaggctggtcccaggcacctattcacagggcgcgtcggatacccaccccctcggccccccgcacacgccggtcctcgacccctttccgcaggatggtttcccggtcctctggcgaggatcctccaaggcgtctcacatgaaccggctcagaaacgccaaaatctacgtggagagagctgtcaaggtctaa

SEQ ID NO: 120065 - DNA, 405 bp, Homo sapiens
ccatcatcttctctttcttgggcatcaacgttatctttgtgcaactggccagaaatgtgctttgcatatgcagaaagacccacttctgtgacaccgcacactcggcactcatgactaatgtccctgcccttgaggttctcaagttccctgtgatgcaacatgctccgcatgtgttcgtccatctccttttttgagctgtacacgatgtggcataatatgcattttcgttctcgtaccatagtgaccagatctgaagcactcaacgtcacacattcacaggcaacccctcttactccatcaggccgccgagagccaggcgagggagctccctgacgcctcagacgcccccttcagttttgggtccgggagcctgctccggacccgctccccgccgggccccgccac

SEQ ID NO: 120066 - DNA, 1201 bp, Homo sapiens
gcaccatgggtgtgctccagagcaacttctgcttgctctgagccccctgccctgcctcccctttcaccatgtttcctctgacaagattttaagtacagcaattcaagaagatttctcctcctaaacgacatttatctgaagtctattgcctcttgattgctggaaaagaatcttaaaatcatttcaaaagtaacttataaacaaacttattaaaagtgatgaaaggagcattgaaattaattagcactaatttttcactgtgccaaagtgtgcagtgtccttcagaggaaacaataacagatctggtgagtgtgccatgccagtggggagaattgaatgtccctcatctccctctttccctagggacattagtcatgagtgccgagtgtgcggggtcacagaagtgggtctttctgcatacgcaaagcacatttctggccagctgcacaaagataacgttgatgcccaggaaagagaagatgatggaaaaggagaggaagaggaagaagattattttgacaaggaactcattcaattaataaaacaaaggaaagaacaaagtcggaccctcttccatatttcccagcccctgaactgcctcaatggcccccggtgcttaaggccgattacttctggccatgccaaagtaggatttgcagtgccaaggagggactgctcagcacagcccagactcccattccctctgccagtgcccattctcccctgcaccatctgtcccctgcatgatactttctggaccaaccctcagtaccgtctgaagctcctggaggaggacgatgaccctgatgactcggaggtgatttgcagcttcctggtggccctgatgcagaagaaccggcggaaggaccggaagctaggggccagtctcttcaccattggcttcgccatctacgaggtgtgcagtcctgattggctccagcccaggaaacatactttcccagggaggacgcttccaggggcttctagaggggccctctggcttcctcaatacccagtgacccacagagctcctggtatcaggaccacttgtgtttgtaacaagcaaaaaataccagggggggcattaaagaggcaatggagcgggcctggcaaaacaagtgcctgggggtcaggcttccgcatgcgggctgcaattgctggcattgccttccgcaggctcctcatcctcattcacatctga

SEQ ID NO: 120067 - DNA, 1794 bp, Homo sapiens
atgccctggggagaccccaactaccgcagcgccaacttcaaagagcacatccagcgccggcaccggttttcttatgacacttttgtgacagcgcgtcgccaggctaaccctgcgtggaaaattcgaaggtggaaggcgaggcgccttattgagggggccggcaacggcgtcgccgacggcgagggggcggcgggggctgtgcggcccgggccggaaacgtgcacgtttattctggcctggggaggaggcagcagcaaatgggacttgttcagcacagacaccattgacaggggcctctccactcatccctgccagctggggaacttcggggctgggaagggcctttctgtggccacggtcctggctgaacgcagctcctcgccagcaatagaacaaagctggacggaggatgactttgatgagttgagaggagaaggcttcagacgatcaaacttctccgagctaaaggaggatgatcgaacccatcacaaagaagctaaaaaccttgaaaaaagattagacgaatggctaactagaataaccagtgcagagaagtccttaaatgacctgacggagctgaaaaccatggcacgagaactacatgatgcatgcacaagcttcagtagccaattcgatcaactggaaaaaagggtatcagtgattgaagatcaaatgaatgaaattaaaccaaatctacgtctgattggtgtacctgaaagtgacggggagaatgtaaccaagttggaaaacactcttcaggatattatccaggagaacttccccaacctagcaaggcagaccaacattcaaattcaggaaatacagagaacaccacaaagatactcctcaagaagagcaaccacaagacacataattgtcagactcaccaaggttgatatgaaggaaataatgttaagggcagccagagagaaagatgacatgattgcatatttagaaaaccccatcatctcagcccaaaatctccttaagctgataagcaacttcagcaaagtctcaggatacaaaatcaatgtgcaaaaatcacaagcattcttatacaccaataacagacaaacagagagccaaatcatgagtgaaatcccattcacaactgcttcaaagagaataaaatacctaggaatccaacttacaagggatgtgaaggacctcttcaaggagaactacaaaccactactcaacaaaataaaagaggacaaaaacaaatggaagaacattccatgctcatggataggaagaatcaatatcgtgaaaatgggtatactgcccaagtcaggtccctcatctgcaggtctgttggagtttgctggaggtccactccagaccttgtttgtccggatatcaccagtggaggctgcagaacagcaaatattgcagaacagcaaatattgctgcccgatccttcctctgcaagctttgtctcagaagggcacctatctgtatgaggtgtcagttggcccctactgggatgtatctcccaccaggctgccgcctcgcagtttgatctcagactgctgcactagcagtgagcaaggctccatgggtgtgggacccgctaagccaggcatgggagagaatctccttgtctgccgcttgcgaagaccttgggaaaagcccaatatttgggcagaagtgtcccatttttccagaattgagagatacaacccatccccgccagtaacagtggttcttctaggggtgaggcctactcaatgtgaagatgaagatgaagaggaagaagacctttatgatgacccacttccacttaatgaatag

SEQ ID NO: 120068 - DNA, 984 bp, Homo sapiens
atgatcaaacatgatgtgatgagtgctgtgactgaggtacccccaaaagataaggaagctcaagggaagaagaggcgaaagcctacagttgaggatgcaagcaaatacacagaaataaaccaaccatgtgcctcctttgggaatctgatttggcctatgagtatgggcctgaaaataactagatgtttaattatgcatctaaacttagtccatgaatttgcatgtgaacgcagctcctcaccagcaatggaacaaagctggatggagaatgactttgatgagttgagagaagaaggcttcagacaattggtaataacaaacttctctgagctaaaggaggatgttcgaacccattgcaaagaagctaaaaaccttgaaaaaaagattagacgaacggctaactagaataaccaatgcagagaagtccttaaaggacctgatggagctgaaaaccatggcacgagaactacgtgacgaatgcacaagcttcagtagccaattcgatcaactggaagaaagggtatcagtgatggaagatcaaatgaacgaaatgaagcgagaagagaagtttagagaaaaaagagtaaaaagaaatgaacgaagcctccaagaaatatgggactatgtgaaaagaccaaagctacatctgattggtgtacctgaaagtgacggggaaaatgaagccaagtcggaaaacactcttcaggatattatccaggagaacttccccaacctagcaaggcaggccaacattcaaattcaggaaatacagagaacgccacaaagatactcctggagaagagcaactccaagacacataattgtcagattcaccaaagttgaaatgaaggaaaaaatgttaagggcagccagagagaaagatcgggttacccacaaagggaagcccatcagactaacagcggatctctcggcagaaactctgcaagccagcagagagtgggggccaatgttcaacattcttaa

SEQ ID NO: 120069 - DNA, 2494 bp, Homo sapiens
ttaccacttagattaagttatgaaatttatttatattttaccttttaaaagccagaacataacaaatctcactttctggaaagtcatcttattagaaatacaagaagtgcacttaatacaaggaagtaagtttctcggtgccaccagtgaggtggacatacactcacatcagtccctcaaacgaaggtttcgccagatttccctccagacttctgagatgatctgaattcaggaaggtctgagtgaacttcttccagaaattacagtgaacaagctgaccttaacttttgggtcctcccgagaaatactaatgaaaaaactatttttttccagtgggccctgtgtttgctggcttctcggcatctgcagctcttcaccggcaggcgcggagccccacagcagcagtgtacaagcgcgaggtagcacttgcagccccatcagagacatatgacatcaaaaaaccaacctaaacccatatgccttttggtcaatcagaggttctgctcctacagattaggctgacagctcttggacttatatttattaatatttgtgaaatatgaactccaaggttcttgagctgttcctaaagcaagtttccagcaacagcttttattaacaactgttcatcttgcgatgtgctgtgccttatgaacgatgtctcgtcagaacagaccaggggtggtactgggtttcctatagcttctctctgcatctacaaagcaggttttcaaacacattttacatgtcgaaaccagtgtcataaggaaaacatttgtgacagaaaaacaatgctcagtttaatctaagttaccaagcagaaggtaaaagaactagtatccgctgagtccccaaacctctttcttctaattcatctgaggattttttgtgcttctagaacaagaatgtaggcaggctcccaaatggagaggtaaacatgaccgcgttgtttgaaactacttcattaatttgtaaatcagaaccaaaaagctctggccctcccacttctcttagctgaccctcctccccacttacggataaacagactttaacttccctaacccagaaacacttccaccaaaaatgtatggttataccttatcctaaaaaggcaccatgcaggcatttaagactgaaccagtgaactctaaatatgtagtagtagaaaatatcactaatcaaaacttccagcatcagatggtacaaaaccccaagaggactggtgacatgtaccccgggatggcaaccccagcttctggcaaccccacagcccagcgggagcttcagctctggtcaggtgcacggctgccaaagtctgcacaccttggggacaaggaaaggagacacttgcttcattgtgctattcatgacccagaaaaggtcctggctggcttgaaggacccgagagacaaacactggatgggaggaatgagtgtgaaacaagaggtggagaagctagattatcttccacaggaggcggcagaagctccaggaagtagccgagaaccaatacgaactcgaccgtgtgacaaacaaggttaacagtaggggaaaaacaacctttgggcaaagaaccccaaagggaaagagaaagggctggaccctggggaccccacttccccctgtccagaagtgacccctgtcccccaatgcccatggcctcattttccaggtctgttgaaacaggtaaggtaacaggagtccatagatttcacggtttaatatgtaaatggaagcttctgtaacatgagacaagaatagcaagcacggactctgctcactggtcgatgatggagcgctgcaacaccctgattcatcatgtccctcttcatcaacatcataatccacaaaagtgtcataagaaaaaccggtgccggcgctggatgtgctctctgaagttggcgcttgcgggtagttggggtcatccccaggggcatcgaggcacatatcggacaaaccacagatttgggtatcccgtgctatgggaattaattttgcagtgttcccacaagtccttccctgatccaaagttccttctcagggacagttagggacaaggaaaaggtgtaacggtttgggaacattcccttggctggaagagatgcatcccttaatgggtggccttcacaactttccatgatgtaattccgggtatttggaacaagtagccacgtgggaccggatctttggacagggaagaaattcttacggcagccatggcaagaagtctctgtgcgtctcgatctgccgctcgagctccacggctcggacgccaggtgccagagcgctgcgacacaccccacagacaggcttcttcggcttcagacattcctgcaggcatgcagagcaaaacacgtgtccgcagggcacctgtaccggcttctcgtacacctctaagcacacgggacacgtgaagcgtcctagggggtcagcctccgccgccggccccgccagctgcgcagcacccccgcagtcccgctgttgcgccgccatc

SEQ ID NO: 120070 - DNA, 777 bp, Homo sapiens
atggcctttgaacaagctaaacaagcagtgcaactggccctggatctatggcccatacgggatgggccagtagaactgcaagtaactgtcctagatcaatatgctaattggagccttgggcagaaacaagatgggaagagggtacttttcgggatttggacccagaaaccaccagagggaggaaaagcttatacctctttcaagaagcaactactatttaatcagcaggaagatcaacaggcaaaaatttccaccataactgcgatcttgaatgtgggtaaatggattacaacatgttcaagccttgcaatgagaggcattatagtgtatggtggtataactgatagggattaccagggagagttaaaggtcattttatacaataacactccagattcttttgctataaaaccacagatgcttgttgctcaattgttagtggtaccttgtgaacaattaacccctgaggaaatctttgtccaacagagtctacatacagaactgggggattcagatcccctggtacagggaataacctatctactaatggtcagcacctgtgtctttgtgtctgaggccaagaataaattcatcaactttttagccaccgctgcaacagaagccaaccacaatcaatgttggctatacgtcgagttgcaggaggatgccaaaaatggctaccttggagaatcatccctgacaacatttctgaatggctatattgttaccaatgggccacaacaacaacacttgcaatccaacctgggcttcctttga

SEQ ID NO: 120071 - DNA, 5713 bp, Homo sapiens
cggccgcggcggtagcgcggaaaacaatggggccggggcggtggggagaggccgaggcttgaggtaggcagcaagcgccggctgggggtcgggccgagcggggcaggaggaaaacccgccgccgcgcgcgagcccgctccgctgccctcgggggcatggcgcggccgtgaggcggagaggggtagccgcggggagcgaagcccgcagtgccagccggccccgagaggcccggccccgggcccggcccgtgcagcccgcggcccatggtgctgcccacctgccccatggcggagttcgcgctgccgcggcacagcgcggtcatggagcgccttcgccggcgcatcgagctgtgccggcgccaccacagcacctgcgaggcccgctacgaggccgtgtcgcccgagcgcctggagctggagcgccaacacaccttcgccctgcaccagcgctgcatccaggccaaggccaagcgcgccgggaagcacaggcagccgcccgccgccacggccccggcgcccgccgccccggccccgcgcctggacgccgctgacggccccgagcacggccgcccggccacgcatcttcatgatacagttaagaggaatcttgacagcgccacttcccctcagaatggcgatcaacagaatggctacggggacctctttcctgggcataagaagactcgccgggaggcccctctgggagttgccatctcttccaatggactgcctccagcctcccccctcggtcagtctgacaagccttctggagccgacgccctgcagtccagtgggaagcactctctggggctagactctctcaacaaaaagcgtctggctgactccagccttcacttgaatggaggcagtaaccccagtgagtcatttcctctgagcctgaataaagaactgaagcaggagcctgtcgaagacctgccttgcatgatcactgggactgtcggctccatatcgcaaagcaacctcatgccagacctcaaccttaacgagcaggagtggaaggagctcatcgaggagctgaacaggtcggtgcccgatgaagacatgaaggacctgtttaatgaggacttcgaggagaagaaggacccagagtcttctggctctgccacacaaacccccttggcacaggacattaatattaagacggaattctctccagcagcctttgagcaagaacagttaggctctccacaagtgagggccgggtctgcagggcagacctttctggggccttcctctgcccctgtgagtacagattcccccagcctagggggctcccaaaccttattccacacctctggtcagccccgggcggacaatcccagtccaaacctgatgccggcatcagcccaggcccagaacgcacaaagagcccttgcaggtgtggtattgcccagtcagggcccaggaggggcctcagagctgtcctctgcccaccagctccagcagatcgctgccaagcagaagcgcgagcagatgctccagaacccacagcaggccaccccggcaccagccccgggccagatgtccacatggcagcagacggggccctcccacagttccttagatgtcccttaccccatggagaagcctgccagcccttccagctacaagcaagacttcactaactccaaactgctcatgatgcctagtgtgaataagagttcccctcggcccggaggcccctacctccagcccagccatgtgaacctgctgagtcaccagccaccgagtaacttgaatcagaactccgcgaataaccaggggtctgtgctggactacggcaatacaaaacccctttctcattacaaagcggactgtgggcaaggcagcccggggtctggccagagcaagccagccctgatggcttatcttccccagcagctgtcccatataagtcacgagcagaactccctgtttctgatgaagccaaagccaggaaatatgcctttccgatcactggttccacctggccaggagcagaacccttccagtgtccctgtgcaagcccaggctaccagtgttgggacccagccgcctgccgtgtccgtggccagctcccacaacagctccccctatctcagcagccagcaacaggccgctgtaatgaagcagcatcagttgcttttggaccaacagaaacaaagggagcagcagcaaaagcatttacagcaacagcagttccttcagaggcaacagcaccttctcgcggaacaggagaagcaacagtttcagcgccatctgacccgcccaccaccccagtaccaagacccgacacaaggcagcttcccacagcaggttggacagttcacagggtcctctgctgccgtgcccggcatgaacaccttgggtccatccaactccagctgtcctcgagtgttccctcaggctgggaatctgatgccaatgggccctggacatgcttcagtttcctctctccccacaaactcaggccaacaggaccggggtgtggctcagttccctggctcccaaaacatgcctcagagcagcctctatggcatggcttctggcataacccagatagttgcccagcccccgccacaggccaccaatggacatgcccacattccacggcagaccaacgtgggccagaacacctccgtctcagctgcctatgggcagaactctctgggaagctctggcctctcccagcagcacaataaggggaccctgaaccctggtttaacaaagccaccggtcccaagggtgtcaccagccatgggaggccagaattcctcctggcagcatcagggaatgccgaacctcagtggccagaccccagggaacagcaacgtgagtcccttcactgcagcctccagtttccacatgcagcagcaggcccacctgaaaatgtctagcccgcaattctcccaggcagtgcccaacaggcccatggctcccatgagctcagcagctgccgtggggtccttgctacccccagtgagtgcacagcagaggaccagcgcccctgccccagcaccacccccaacagcccctcagcagggcttgcctggcctgagcccagcagggcctgagctgggggccttcagccagagccctgcctcacagatgggcggtcgggcggggctgcactgcacccaggcctaccctgtgcggaccgcgggccaggagctgccttttgcctatagcgggcagccaggtggcagtgggctctctagtgtggctggacacaccgatctgatcgactccctgctgaagaacaggacttcagaggagtggatgagtgatttggacgacctgttagggtctcagtaatggaaggatttgtagtgtttttagtgttcattcatcctatatttttattctcagattcaaagaaagagcaactactttggaccaaaagcccatggcctggggagctgggcaggtagagcccaagctccaggtgaggcctggccctgggcagggtctgtggctgcgcccctcaggccagcagttgaggtccatcgggctggccccagcccatctgctggcatcagtacctggtgttgggacagcaggatagggttctaaaggtggttttctatccaaacgaccaaaaaaccaacagtaacaccagtgaaaccccacactgtcgggcttataaaaatctgtgccatcatggtgattttatccaagactgctccacttaccccagtgctggggacaagtttctgttgaaactttagatagcagaattatttgcaatttgtagcatagaaaagatttttaaatttttttacaaaaggtttttaaacagattagggtaggtgatggtttaaatcaattaagtggcattggaaacctagggtttccttttgattaagagccttttttgtttctgctctttgtcagctttcaggggagaaggaggccactggaaaattatttccctaagtgcaggctgttgactgcgtatgccaaaaagggacaggaggcatgggatagcaggtctggtgacacagctagggtcttcctagcagctcctcctcctccctcccaaggcccccaggaatcccttcctcccatgtcctggcagcaggaccccaggctacatatggaaggtagagatgtgggggtcctgtatcctggagtattatgtctccccaccttctgcagttttctctgaacatgtatgttgcccatggtgggagcgtggtcactgtgcagttgtgcacagatgtctttcctttaccgttggcctttctgtctgcctctccttcctctctgcagcccaaatggaaaacaattatttactccattggagggaaaggaagagtcttagaattcctaagggaaccttagcataaaggttttggggaaggaggccgtaggccggcccggaggaagcaattccacttggtttgacaacttctgccactcccatgtcagatgacttgcacttcttaaagagattgctttataacactaagacatcctttctaaagattcaagtggacttgactaagctgagggtccacgaaatagaatatgacatgtgagctgtttttggaaaacgaagatggagagagcacttccccgtaacgaaagcaaagtggtaagcacagggtgagacccttttacacagaatggtggagagaaaagagaatgctgaaaagtggctcagatgcagagtgttctgtggagaaactgcagccccacttctgtttccctggagtctcccaatggatcattcaggagtgtcctatgtgagaattgagccaaggaaaatactcatgcaaccagcctgagtcgcggtgaggggatgagaggttgtacacacattggtagttattttgcaccagcagtgcctttctcactgggggtacttggaccctcagatcttcttttctaatagccatttgccaccccaagtggtatgtcggccatttctccttaaaacaccttccctacctttcccatgtactcagtttagctctcaaagaaggggtgaatcataaagccagtgaaaatttcaccctctgagggagttccccaatctgaaggggaagagggtgacctcagcggcttttctcccaaaaatcggctgaaggctggttgtggatccttgttcctctcctgaccccatctggctgctgccccgtctcccacccctgtccccggggctcgctggccctgcactccgccttagtcctggggccggcgacacagtgggggctcctcacttgctgcagtgtcatagcaataaaatgtgattcttggggtccccccagggagctgcccatggctttatttatgaacctggttttcgggagtcaggggaggagatgactttgcttctgtgcacagccccgtcttccaggagccacaactcagaagaaaagggtgctcagacttttgttatacacatttgctttgtgtaaataaatgtttacaattttatatgaaagatggaataagcgctagagcttccaactgtatattttttacttttatagattttaaaactatgatcctttatatgtgtgttttgggggagctatgataagttttatggcaaacggttggtattgttaactttttattgtcatcaaaagttcataaaagtcctattaatccccatattcttctactgcccttaactctggtatacaccaaaaagaaatctttactttccttgttttatcattataaaaataaagtattttgctagt

SEQ ID NO: 120072 - DNA, 1065 bp, Homo sapiens
atggcggcctgcatgtaccgccaaacaagaagcatactagccgaaactatactacgtccgcaatttgctggcacacatactactataatagcccaccaggccaatgcagatcggtgcacatgcaccccaagtagcaccattcaagcatctatcgatcgaccaactagaacaatttggccctcagagagccagcctcctggatgccccccagacacagtgggtgccatggagccagtgcctctccctcactctgctgtcctggagcctggctccctgtgcctctctgggatggcgctccgggacagggaaacagggaagcaggccgggagagcgctcgaggctaggcctatcggccacatcgcaaaccgcacgggcgagcggggattgccgacctcgattagacgctgcgccccgagcggggcgccggagccggtgagaaggtggccagaccgaaagcggcgaaagccacaacaaccagagagagaactgacaagaaatacaggaaatataagtcacgagcagaactccctgtttctgatgaagccaaagccaggaaatatgcctttccgatcactggttaccacctggccaggagccctggtggaccaaggcatcttcgaagagctcacgagagacttcctgccgcagctctcggagaagatgcaggacctgggggtgatctccagcatctcgctgtcctggttcctgaccctcttcctcagcgtcatgcccttcgagagcgccgtggtcatcgtcgactgctttttctatgagggcatcaaggtgatcctgcaggtggccctggccgtcctggacgccaacatggagcagctgctgggctgcagcgacgagggcgaggccatgaccatgctgggcaggtactactgccgctatgtcctcagcgattacggctgtcatggttacgggggcttgcatgcagaacgactgaatgctggcggagtctccgagctaccgacgtcactcttcgcagccaaggatgtttttaaggatcccattttaaaccggcgtttcgaacgcgcggggaatccgcgggccacaaactga

SEQ ID NO: 120073 - DNA, 566 bp, Homo sapiens
ctgccagtagacccccggtcaccctgaggctggtggtccctgctagtcagtgtggctctctcattggaaaaggtggatgcaagatcaaggaaatacgagagagtacaggggctcaggtccaggtggcaggggatatgctacccaactcaactgagcgggccatcactattgctggcattccacaatccatcattgagtgtgtcaaacagatctgcgtggtcatgttggagtcccccccgaagggcgtgaccatcccgtaccggcccaagccgtccagctctccggtcatctttgcaggtggtcaggcctataccattcaaggacagtatgccattccacagccagatttgaccaagctgcaccagttgggcaatgcaacagtgttcattttcccatgacgcatgggcaacaccggatttcagtgggcattggaatccaggttttccagaggtggaaaggctattggggcaggtttggatgcatctgctcagactacttctcatgaactcaccattccaaacgatttgattggctgcataatcgggcgtcaaggcgccaaaatcaat

SEQ ID NO: 120074 - DNA, 713 bp, Homo sapiens
aactctccggtcatcttggcaggtggtcaggacaggtacagcacaggctgcgacagtgcgaggctttcccccacacccaccccgtcccatgtgcctcaaccctgaccctggagggaccacctctagaggcctataccattcaaggacagtatgccattccacagccagatttgaccaagctgcaccagttgggcaatgcaacagtctcattttcccatgcacgcgatggcatacactcggattacagcgcaggttgtggatgcatctgcttcagactacttctcatggaactcaccatttccaaacggattttgattgggctggcataatcggggcgttcaagggcgccaaaaatcaatggaggatcccgtcagatgtctggggcgcagattcaaaattgcgaacccagtgggaaggatctactgattagggcaggtttaccatcactggatctgctgccagcattagcctggctcaatatctaatcaatgtcaggctttcctcggagacgggtggcatggggagcagctagaacaatgcagattcatccataatccctttctgctgttcaccaccacccatgatccatctgtgtagtttctgaacagtcagcgattccaggttttaaataggtttgtaaattttcagtttctacacactttatcatccactcgtgattttttaattaaagcgttttaattcctttaaaaaaa

SEQ ID NO: 120075 - DNA, 1542 bp, Homo sapiens
cctccacccccccttcctcctccgcccgcccgcggggcccccctcgccttcccgcccgcccctattgttccgcccccggcctcccgcccttccccttcccgcccgctccccttttcccctcagtcgcctcgcgcctgcagtttttggctttcaccctcaaccatgtgaccaaagacttgaccactcaaagtccagctccccagaacactgctcgacatggacaccggtgtgattgaaggtggattaaatgtcactctcaccatccggctacttatgcatggaaaggaagttggcagtatcatccggaaagaaaggagaatcagttaagaagatgcgcgaggagagtggtgcacgtattcaacatctcagaagggaattgtcctgagagaattattcactttggctgggacccactaattgccatctttcaaagcctttgctatgatccattgacaaactgggaaggagggacataagcagctctatggaccaatagcacagctgcccagttaggacccccggtcaccctgaagcttgggggcccctgctagtccagtgtggctctctcattggaaaaggtggatgcaagatcaaggaaatacgagagagtacaggggctcaggtccaggtggcaggggatatgctacccaacttcaactgaggcgggccatcactatttgctgggcattccacaatccatcatttgagtgtgttcaaacagatcttgcgtgggtcatgttgggagactctcttccccagttcccccccgaagggcgtgaccatcccggtaccggcccaaagccgtccagctctccggttcatctttggcaggtggtccaggacaggtaccagcacaggcagcgacagtgcgagctttccccacaccaccccgtccatgtggctcaaccctgacctgggagggaccacctctagaggcctataccattcaaggacagtatgccattccacagccagattttgaccaagctggcaccagttgggcaatgcaacagtctcattttcccatgacgcatggcaacaccggattcagtgggcattgaatccagcttttccagaggtgaaaggctattggggcaggtttgggatgcatctgctcagactacttctcatgaactcaccatttccaaacggttttgattgggctggcataatcggggcgttcaagggcgccaaaatcaatggagatccgtcagatgtctggggcgcagatcaaaattgcgaacccagtggaaaggatctactgataggcaggttaccatcactggatctgctgccagcattagcctggctcaatatctaatcaatgtcaggctttcctcggagacggggtggcatggggaacaactagaacaatgcagattcatccataatccctttctgctgttcaccaccacccatgatccatctgtgtagtttctgaacagtcagcgattccaggttttaaatagtttgtaaattttcagtttctacacactttatcatccactcgtgattttttaattaaagcgttttaattccttt

SEQ ID NO: 120076 - DNA, 693 bp, Homo sapiens
atggaagatgttactggaaagcggtcacaattcagaccccaagagagggttcttggatcttatgcaagaaaaaatttggggaaaggtgactgtttctctcttgtttccttgaccgtggacggggtggtggcaggcaagatcctcttccgcagaagccacatccgggacgtagctgtgaagagactgaagcccatcgatgaatactgccgggcacttgtccggctgcccccccacatctcacagtgtgacgaagtcttccggttcttcgaggctcgacccgaggatgtcaaccctccaaaagagtcccagcaggccagccgtgggccgccacctccatcctccaccaagcaacctctcctgagcttctacaccaagtgtcacagcgtccatgaccacatgctcaagagatgcactgtggtttccgatggtgatggagcatcccctctagagcacctgcagctgtcaagcttcctgggctgcctcctggtggttctgccgctggtgtggctgctcagtggtgtcctcctgcgctcctggcttgagcacctgtgtgggacctgcctggcctccttaagctcaatgactgtctctggtaccctgatctggctcttctggaacaagggacacatgagcctggcctcctccctgcaggccttcctgataacctttgttggcgccgacctcaggccttga

SEQ ID NO: 120077 - DNA, 402 bp, Homo sapiens
atggatggccaggcgcgatggctcacacctgtaatcccagcactttgggaggccgaggtatttattgagcatatgttgtatgccctcaacattttaagaactgtacttggacgtgcacgcaccctgtccctcaaccaccgctgccgcctccttcttctgtcactcctggtgctgcactgtgttcgttcagtgagaagctggtacctcttttgtgaagcggcagctgagaagactctggcatttgccatggccgaggaaaagcccaaggcattgtcaatggggcagatcagattccgatttgacagtcagccaatcaatgaaacagacacacctgtacaggtggaaatggaggatatagatataattgatgtgttccaccagcagataggaggtgtctactga

SEQ ID NO: 120078 - DNA, 644 bp, Homo sapiens
  misc_feature (1)...(644): n = a,t,c or g
gaattcccgcctccttcttctgccgctcctggtgctgcttgtgtgctcgtttggtgcgttcctggtacctcttttgtgaagcggcagctgaggagactccggggctcgccatggccgacgaaaagcccaaggaaggagtcaagactgagaacaacgatcatattaatttgaaggtggcggggcaggatggttctgtggtgcagtttaagattaagaggcatacaccacttagtaaactaatgaaagcctattgtgaacgacagggattgtcaatgaggcagatcagattccgatttgacgggcaaccaatcaatgaaacagacacacctgcacagttggaaatggaggatgaagatacaattgatgtgttccaacagcagacgggaggtgtctactgaaaagggaacctgcttctttactccagaactctgttctttaaagaccaagattacattctcaattagaaaactgcaatttggttccaccacatcctgactactaccgtatagttttctctattctttcatttcccccttccccattcctttattgtacataaagtaactggtatatgtgcacaagcatattgcannnnnnnnnnnnnnnaactaaacagccaatggtatgttttgattgacatcaaa

SEQ ID NO: 120079 - DNA, 249 bp, Homo sapiens
atggtttgggccaacgcaggtgccaccacggcgacttgttttcctcccttgcgggtggaggcctccgctcactgcaaggctgccccacaggtctccttccgctaccactgccagctgtactccgagtggagaaagaccaaccagaaagttcgcctgaagatccgggaggcggacagccccgagggcccccagcattctccactggcagctggactcctgaagaaggtggcagaggagacaccagtatga

SEQ ID NO: 120080 - DNA, 477 bp, Homo sapiens
  misc_feature (1)...(477): n = a,t,c or g
agggggggattgccactgcccgcctgcangaattcggcacgagttaagacatgcctattttattaatttacttccaaacgcaacgaaaggtccatggacaatttgtgggccatttaattcagggcccccaattcgtacgtggagaagtgggaatgcaaaagtactttgacctttaaccttcggtccggcgcggtggagggaaacgcctccgtctctatataaggaattttccggtctcttcgggtcctttttcctctcttcagcgtggggcgcccacaatttgcgcgctctctttctgctgctccccagctctcggatacagcctgccaggagtgaagaaagctttgggcaaatatggtcctgccgatgtggaagacactacaggaagtggagctacagatagtaaagatgatgatgacattgacctctttggatctgatgatgaggaggaaagtgaagaagcaaagaggctaaggg

SEQ ID NO: 120081 - DNA, 451 bp, Homo sapiens
actcggcagttcccattatcttcgggagctgtggaggtaggaatttaagacaggcccattttattaatttattttcaaatgcaacaaaaggtccaaggacaatctgtgggccacttaattcagggccctcaattcgtacatggagaactctcagatacagccaaagccatgggttttggagacctgaaaagccccgccggcctccaggtgctcaatgattacctgacagacaagagctacatcaaggggtatgtgccatcacaagcagatgtggcagtatttgaagcagtgccccgcccactgcctgccgacttgtgtcatgctctatgttggtataatcacatcaagtcttacgaaaaggaaaaggccagcctgccaggagtgaagaaagctttgggcaagtatggtcctgcagatgtggaagacactctcgtgccgaattcctgcagcg

SEQ ID NO: 120082 - DNA, 1308 bp, Homo sapiens
atggaacatctgctaaccctggccacatgttccttgatgggaagcagctatagagagggtctaactccagttctcagcttattaaccgaatgttcccgagcccatcgaaacatccgaaaatttctcaaagatcaggagtggggcacggggcacagatgcacatctacggattccgggggtgtgacttgcacgcttgagaggaggaccggaggtcaagctgctgggccaggaatcagaggagtgggcgctacagtgggggtagtgggatgcaggatgcatggatggaaaaggctgggggcacaaacacgcatgcccaagccggaaacgttttcgggggagagcaatgcgcatccccggaatgaggggggggagaaggttctgaagggaccaaaaggacattggggtaaacaaaatgaagctgggcaaaaccacgcaactaagggaaggggaaaaacgggaaaaaagaagaaaggggttggaatttctccaggggacccaaaagaaaaattaaggaaggtccaaaccggccctaaagaagaatcccttcgtgtgatgtatgcgctcgctgtagaaaatatcctcaacacttttacgcacacgcaccacgcattagatagatatagtcttaggagtgcgcttccttttctggcttataatcccatggagaacttacgctttctgggaccttcactggagcacacgtcccctctggaatttgtctgggctgacagctcaactgaagtaaaggtacagcaacccttgatctccttggtttgcttttcctggggtggaaccatgttccgccaccaggatgactgttgtcccggtattctcagcagtgtcacatccaaggtacagctgctatcccatgaggaagggcagaatggaaggagggcatcaatattctctcctcctgaaatgataccaccttcaaaggctgagagagaaaagaagtccctaaggtttaagggcggaggaagagaaagacagcaagcaggcttggttgtgatagtgaaaatcgaaatgagccacataaggtgtctccctccagctttgccttctgccatgagtaaaagcttcctgaggcttccccggaaagatgctgccttgcttcctgtacagcctgtagaactttcagttcctgctgttacggctttgtctgatgatgatgatgatgatgataacgatgatggttatgatgatagcaagccttttttgtgcaggcttagaaaaactccaggccgttttgtacccagtagaaaaaaactcccttttcacacctcttctaaccacagtcaagactggtga

SEQ ID NO: 120083 - DNA, 583 bp, Homo sapiens
atgggtttcagagatctgaaaagcccggctagcctccaggtgctcaacgattacctggtggacaagagctacatcgagggtatgtgccatcacaagcacatcaagtcttatgaaaaggaaaaggccagcctgccaggagtgaagaaagctgtgggcaggtatggtcctgctaaggtggaagacactacaggaagtggagctacaaatagtaaagatgatgatgaaattgatctccttggatctgatgaggaggaaagtgaagaagcaaagagttcagttcctgctgttacggctttgtctgatgatgatgatgatgatgataacgatgatggttatgatgatagcaagccatttttgtgcaagcttagaaaaactccaggccgttttgtaccagttagaaaaaaactccctttccacacctctcctaaacacagtcaagactgggtcaagatccccagtatcactgtcttccgcctccacatcctgtcccactggaaggtcttcaggggcaatggcatgcatggagctgtcatctcctgtgatagcaatgccttctggaataccccctgaaggacctgcctga

SEQ ID NO: 120084 - DNA, 1106 bp, Homo sapiens
atagaccgccttaggaattcgcgcccatggcgcttctagggctggttcccgtcatcttcgggagccgtggaggtacgaacttaagacatgcctattttattaatttacttccaaacgcaacgaaaggtccatggacaatttgtgggccatttaattcagggcccccaattcgtacgtggagaagtgggaatgcaaaagtactttgacctttaaccttcggtccggcgcggtggagggaaacgcctccgtctctatataaggaattttccggtctcttcgggtcctttttcctctcttcagcgtggggcgcccacaatttgcgcgctctctttctgctgctccccagctctcggatacagccgacaccatgggtgttcggagacctgaaaagccctgccggcctccaggtgctcaacgattacctggcggacaagagctacatcgaggggtatgtgccatcacaagcagcatgtggcagtatttgaagccgtgtccagcccaccgcctgccgacttgtgtcatgccctacgttggtataatcacatcaagtcttacgaaaaaggaaaaggccagcctgccaggagtgaagaaagctttgggcaaatatggtcctgccgatgtggaagacactacaggaagtggagctacagatagtaaagatgatgatgacattgacctctttggatctgatgatgaggagggaaagtgaaaagccaaagaggctaaagggaagaacgtcttgcacaatatgaatcaaagaaagccaaaaaacctggaacttgttgccaagtcttccatcttactgctcgtgaaacccttgggactgatgagacagatatggcgaaattagaggagtgcgtcagaagcattcaagcagacggcttagtctggggctcatctaaactaagttccagtgggatacggaattaagaaacttcaaatacagtgtgtagttgaagatgataaagttggaacagatatgctggaggagcagatcactgcttttgaggactatgtgcagtccatggatgtggctgctttcaacaagatctaaaatccatcctggatcatggcatttaaataaaagattgaaagattaaaaaaaa

SEQ ID NO: 120085 - DNA, 211 bp, Homo sapiens
atgatcctgcagcagtccaaggatggagactggtggacggtgctgtctgaagtctcaggcagagagtataacatccccagcgtccacgtggccaaagtctcccatgggtggctgtatgagggcctgagcagggagaaagcagaggaactgctgttgttacctgggaaccctggaggggccttcctcatccgggagagccagaccaggagag

SEQ ID NO: 120086 - DNA, 241 bp, Homo sapiens
ccagtgttggaggttgggtcaagtaggaggtttttgggtcatggtggcaggtccctcatgaatggctgggttctgtccttgtggtaatgagtgagttcttattccattagctcatgtgagagctggttttaaaaagagtctagtgtctttctcacctttctcttgctccctttttggccatgtgatatgcctgctcctcctcttcgccttccaccatgattgtaagcttctttttcttttc

SEQ ID NO: 120087 - DNA, 591 bp, Homo sapiens
atggtggaaggcgaagaggaggagcaggcatatcacatggccaaaaagggagcaagagaaaggtttcccaatgcctatatcaggttgtcaagagttgctagagagaagccaggtgtggtggctcatgcttgtaataccaacactgggaggccaagtagttctacgttgtctatacttgttgctacgtctactactaatagtcccgtggtaataatgttgttacccgttggatttagtcgttttgattattgtgagtactacgatgtgctgcgagctgctggtgcaacccaaggacatagaaaggtaatcagtcagccagatcaaaccctggaaaatttgatgagtgggcttgacccagcagttatggaccagttctacatgaaagatggcgttactgcaaaggatgtcatttgtgagagtggaattcacaacctgataccaggttctgtcattaatgccacaatgttcaatccttatgggtattcgatgaatggaatgaaatcagatggaacttattggactattcacatcactccagaaccagaatctttttatgttagctttgaaacaaacttaagccacctcctatga

SEQ ID NO: 120088 - DNA, 1886 bp, Homo sapiens
  misc_feature (1)...(1886): n = a,t,c or g
gcttacacagtatggccggcgacattagctagcgctcgctctactctctctaacgggaaagcagcggaatacaagagactgaactgtatctgcctctatttccaaaagactcacgttcaactttcgctcacacaaagccgggaaaattttattagtcctttttttaaaaaaagttaatataaaattatagcaaaaaaaaaaaggaacctgaactttagtaacacagctggaacaatcgcagcggcggcggcagcggcgggagaagaggtttaatttagttgattttctgtggttgttggttgttcgctagtctcacggtgatggaagctgcacattttttcgaagggaccgagaagctgctggaggtttggttctcccggcagcagcccgacgcaaaccaaggatctggggatcttcgcactatcccaagatctgagtgggacatacttttgaaggatgtgcaatgttcaatcataagtgtgacaaaaactgacaagcaggaagcttatgtactcagtgagagtagcatgtttgtctccaagagacgtttcattttgaagacatgtggtaccaccctcttgctgaaagcactggttcccctgttgaagcttgctagggattacagtgggtttgactcaattcaaagcttcttttattctcgtaagaatttcatgaagccttctcaccaagggtacccacaccggaatttccaggaagaaatagagtttcttaatgcaattttcccaaatggagcaggatattgtatgggacgtatgaattctgactgttggtacttatatactctggatttcccagaggagnggggtaatcagtcagccagatcaaaccttggaaattctgatgagtgagcttgacccagcagttatggaccagttctaacatgaagatggtggttactgcaaaggatgtcactcgtgagagtggaattcgtgacctgataccaggttctgtcattgatgccacaatgttccaatccttgtgggtattcggatgaatggaatgaaatcgggatggaacttattggacttattcacatcactccagaaccagaattttcttatgttagctttgaaacaaacttaagtcagacctcctatgatgacctgatcaggaaagttgtagaagtcttcaagccaggaaaatttgtgaccaccttgtttgttaatcagagttctaaatgtcgcacaaggcttggtttgccccaaaaagattgagggttttaagcgctttggattgccaagagggttggttcaaggattccaatttttttttttaccagttttgctaagaagcagcaacaacagcagagttgattaagaaaaatgaagaaaaaacgcaaaaagagaacacatgtagaaggtggtggatgctttctagatgtcgatgctgggggcagtgctttccataaccaccactgtgtagttgcagaaagccctagatgtaatgatagtgtaatcattttgaattgtatgcattattatatcaaggagttagatatcttgcatgaatgctctcttctgtgtttaggtattctctgccactcttgctgtgaaattgaagtggatgtagaaaaaaccttttactatatgaaactttacaacacttgtgaaagcaactcaatttggtttatgcacagtgtaatatttctccaagtatcatccaaaattccccacagacaaggctttcgtcctcattaggtgttggcctcagcctaaccctctaggactgttctattaaattgctgccagaattttacatccagttacctccactttctagaacatattctttactaatgttattgaaaccaatttctacttcatactgatgtttttggaaacagcaattaaagtttttcttccatg

SEQ ID NO: 120089 - DNA, 690 bp, Homo sapiens
ctaggaaatgagatagacagcaacacaataatagcaggggacttcagtactccactgacagcactagacaggtcatcaagacagaaactcaacaaagaaacaatggatttaaactatactttggaacaaatggacttagcagatatatacagaacatttcatccaacaactgcagaatatacattctattcaacagcgcatggaactttctccaagatagaccatacgataggccataaaacaagcctcaataaatttaagaaaactgaaattacatcaagcactctctcagatcacagtggaataaaactggaaattgactccaaaaggaaccttcaaaaccatgcaaatacgtggaaattaaataacctgctgaatgagcattgggtcaaaaacaaaaccaagatggaaattaaaacattcttcgaactgaatgacaatgatgccacaacctatcaaaacctctgggatacagcaaaggtggtgctaacaggaaagttcatagccctaaatgcctacatcaaaaggtctgaaagagcacagacagacaatctgaggtcatacctcaaggaactagacaaacaagaacaaaccaaacctaaacccagcggaagaaagaaaacagccgagatcagcacagaactaaatgaaattgaaataacaacaacaacaacaaaatacataagataa

SEQ ID NO: 120090 - DNA, 897 bp, Homo sapiens
atggttgaatctatggatgcagagcctacagatacaagacacgcagcccaaactctctgcttccaaagcctagtggatccacccaatggacctcacctcccgcagtcccagcacacgctgcttaatctgagaggagcctgctccctgcgcggcagcgtgcatgttgacctgggggctttctcgcactgttcccaccacctgagatacctgctcccttctaccccgaacaatgagacaacgcttagaacattcgaccaccagatagacataggagcatttctcagaaggctagacagcagtttcaccgtggagcggggcaaatctgatcagatcaccaggaaaagtcgcacagcacctcattcccagaacagagcacacctgaagcggaggggcctcaaggaaatatcagcctccatggggcctcaaggaaatatcagcctccattcagcccgagctgccttccagctgtgggccacccggcacctcagacagagggagacaccctttaattcaaaatggattaaagacttaaatgttagacctaaaaccataaaaaccctagaagaaaacctagacaataccattcaggacacaggcatgggcaaggacttcatgactacaacaccaaaagcaatggcaacaaaagccaaaatagacaaatgggatctaactaaaccaaagagcttctgcacagcaaaagaaactaccatctgtgagaaaatttttgcaatctacccatctgacaaagggctaatatccagaatctacaaagaacttaaacaaatttacaagaataaagcaaacaaccccatcaaaaagtgggcaaaggatatgaacagacacttctcaaaagaagacatttatgcagccaacagatggatgaaaaaatgctcatga

SEQ ID NO: 120091 - DNA, 1458 bp, Homo sapiens
atgattatctccatagatgcagaaaaggcctttgacaaaattcagcagcccttcatactgaaaactctcaataaactaggtattgatgggatgtatctcaaaataataagtgctatttatgacaaacccacagccaatatcatactgaatgggcaaaaactggaaacattccctttgaaaaccagcacaggacaaggatgccctctctcaccactcctattcaacatagtgttggaagttctggccggggcaatcaggcaagagaaagaaataaagagtattcaatcaggaaaagaggaagtcaaattgtccctgtttgcagatgacatgactgtatacttagaaaaccccatcgtctcagcctcaaatctccttaagctgataagcaacttcagcaaagtctcaggatacataatcaatgtgcaaaaatcacaagcattcctatacaccaattacagacaaacagagagccaaatcatgagtgaactcccattcacaattgcttcaaagagaataaaatacctaggaatccaacttacaagggatgtgaaggacctcttcaaggagaactacaaaccactgctcaaggaaataaaagaggacacaaacaaatggaagaacattccatgctcatggataggaagaatcaatatcgtgaaaatggccatactgcccaaggtaatttatagattcaatgccatccccatcaagctaccaatgacttccttcacagaattggaaaaaactactttaaagttcatatggaaccaagaaagagacagcattgccaagtcaatcctaagcaaaaagaacaaagctggaggcatcatgctacctgacttccaactatactacaacgttatagtaaccaaaatagcatggtactggtaccagtacagatatacagaccaatggaacagaacagagacctcagaaataacaccacacatctacaaccatctgatctttgacaaacctgacaaaaacaagaaatggggaaaggattccctatttaacaaatggtgctgggaaaactggctagatatatgtagaaagctgaaactggatcctttccttacaccttatacaaaaattaattcaagatggattaaagacttaaatgttagacctaaaaccataaaatccctagaagaaaacctaggcaataccattcaggacataggcatgggcaaggacttcatgactaaaacaccaaaagcaatggcaacaaaagccaaaatagacaaatggcatctaattaaactaaagagcttctgcacagcaaaagaaactaccatcagagtgaacaggcaacctgttgggagaaaattcaggcaacctgaatgggagaaaatttttgcaacctactcatctgacaaagggctaatatgcagaatctacaacaaactcaaacaaatttacatgaaaaaacaaacaaccccatcaaaaagtgggtga

SEQ ID NO: 120092 - DNA, 1158 bp, Homo sapiens
atgactgcagatgctgtgctcatcaaaaatggtagtaaagatgctgactgggaatatgaagaaggtgataaattagaagagtttcttagatcgctaaacagcagtaagcctctctacctgggacagactggcctggggaatattgaagagcttggaaagctgggactggagcctggggaaaacttctgtatgggaggacctggcatgatctttagccgagaagttctcaggaggatggtgccacatattggtgaatgccttagagaaatgtacacgactcatgaggatgtggaagtaggaagatgcgttcgccgttttggtgggactcagtgtgtctggtcttacgagggaaggtgttcattcagagtggttcctgacagcgcaatagaattttcaatggactttgaaaaaattctgatgctggaccccacccttcatccgttatgtcaaaatctcttacagaggcttaacaccatgtggaagccaccaaacgtggggcttgtaccctccaaagcaacagcccaagctgtacgttggtcccttttagccatggctagagctggagcagccacaatgccaggagccctgtcccaaggctgcatagaagttagtaggctgctgaagaaattaccagatgatgaaggtatcaccatggacacagtaggctttgctcctttgtgcctgtggcagagactgaccttggctaaccatcagagatattttgcagatgggccccagccagtgtgtaaccacatgcagcctgccccgcaccactttgccagcatgcgttcatctgcagcatcgcccaccagtttgccagcatttgcagaccctgctgctgtacccccactggagcatgtgtatgtgtggaccctgctgttatgccagcgctggtgcacatacatgtacatggactcaactgccaccactctgacaaagcactgttgctgcccaccccccataccccccattggagtgttgttgccagcagactggggacacattggcccctccagtgatagcaggtcagagaacaaagccatggggtctagtcccagcacctagggttagagcatgcagaccaagagtgctaaactgagccttggccccctgaaatcattgagaaatgaagccagttgatggaacccaacttatacc

SEQ ID NO: 120093 - DNA, 1221 bp, Homo sapiens
atggacgactccaagatcttttcgggtaaaaagtatgctctgaagagagcagtagatctcccagcacagcactcgagctctgctaagggacagactgcctcctcaagtggatccctgattcccatgcctcctactgggagacacctcccagcaggggtcaacagacaccccatacaggagaactctggctggcatctggcgggtgaccctctggggcaaagcttccagaggaaggaacaggcagcaatctttgctgttctgcagcctttgctggcgatacccataaagcaaacaggtttgggagtggacctccagcaaactccagcagacctgcagcagagaggcctgactgttagaaggaaaactaacaaaccgaaaggaatagcatcaatatcaacaaaaagcacatccacaccaaaaccccatccaaaggtcaccaacatcaaagagggaagaaccaatgacaaaaaccacatgattatctcaacagatgcagaaaaggccttcaacaaaattcaacaccccttcatgctaaaaactctcaacaaactaggtattgatggaacatatctcaaaataataagagctatttataacaaatccatagctaatatactgaatgggcaaaagctggaagcatttcctttgaaaatgagcacaagacacggatgccttctctcaccactcctattcaacatggtgttggaagttctggccagggcaatcaagcaagagaaagaaataaagagtattcgaataggaagagaagaagtcaaattgtctctgtttgcagatgacatgattgtatatttagaaaaccccatcgtctcagcccaaaatctccttaagctgataagcaacttcagcaaagtctcaggatacaaaatcaatgtgcaaaaatcacaaacattcctatacaccaataatagacaaacagagagccaaatcataagtgaactcctattcacaattgctacaaaaagaataaaatacctaggaatacaacttacaagggatgtgaaggacctcttcaaggagaactacaaaccactgctcaaggaaatcagagaggacacaaacaaatggaaaaacatttcatgctcatggataggaagaatcaatattgtgaaaatggccatactgcccaaagtaatttatagattcaatgctgtccctattaagctaccattgacttacttcacagaattagaaaaattctga

SEQ ID NO: 120094 - DNA, 3509 bp, Homo sapiens
gggaccatcctggctaacacgcggtaaaacatcatctctactaaaaatacaaaaaaattagccaggcgtggtagcaggcacctgttgtcccagctactcgggaggctgaggcaggagaatggcgtgaacccaggaggcggagctggcagtgagctgagatcacaccactgcaatccagcctgggcgacaaagcaagactctgtctcaaaaaaaaaaaatcaattcaggccaagtgtggtggtgcacacctgtagtcccagctactgggaaagctgaagaagtgggaggatagcttgggcccaggagatggatgctgcgggaaggggctgccatttgctgcccctgccagcggcgcgcggacctgcccgcgctcctgcagccgccgccgccgccgccgccagcccgcccggcccctgcagcggcgccgcctgcgctccctccgcggccgccggagcgggcgccatgaaccccagctcctcggcgggagaggagaaaggggcgacgggcggcagcagcagcagcggaagcggcgccgggagctgctgcctgggcgccgagggcggcgcggacccgcggggcgcagggtcagccgcggcggcgggggccgctgccctggacgagcccgcggccgccggccagaaggagaaggacgaagcgctggaggagaagctgaggaacttaactttccggaagcaggtctcgtacaggaaagcaatctcccgggcaggcctccagcatctggctcctgcacatcccctcagccttcctgtggcaaatggtccagccaaggagcccagagcgactttggactggagtgagaatgccgtgaatggagaacacctgtggctggagaccaacgtctcggggagacctctgctaccttggagaggagaactgccaagtcagatttgcaaaatcagctctcaggaggaagtgtgcagtctgtaaaattgtagttccacaaccgcctgcattgaggagctagaaaagattaatttcagatgtaaaccaacatttcgagaagggaggctcaagggtcaacaagagaaaattttgtacgtcatcactgggtgcacaggcgtcggcaggaggggaaatgtaagcagtgtggtaagggcttccagcaaaagttctccttccacagtaaagagattgtggctatcagctgttcctggtgcaagcaggcgtttcacaataaggtgacctgcttcatgctgcatcacattgaagaaccctgctccctgggggctcatgctgctgttattgtcccgcccacttggatcattaaggtgaagaaacctcagaactccctgaaggcttcaaatcggaagaagaagagaacaagctttaaaagaaaagccagtaaaagagggatggaacaggaaaacaaaggtcgtccttttgtgataaaacccatctcttctcctctcatgaaacccttgcttgtatttgtgaatcccaagagtggaggcaaccagggaaccaaagtcctgcagatgttcatgtggtacctgaatccacggcaagtctttgatctttctcaggaagggccaaaagatgcgcttgaattgtataggaaagtaccaaatctgcgaattctggcctgtggtggggatggaacggtgggctggatcctttccatcctggatgaactgcagctgagccctcagcctcctgtgggggtccttcctctggggactgggaatgacctggctcgaactctcaactggggagggggctacactgatgaacctgtttctaagatcctgtgtcaagtggaagatgggacagttgtacagctagatcgctggaacctccatgtggaaagaaaccccgacttgcctccagaagaacttgaagatggcgtatgtaagctccctctgaatgttttcaataactacttcagccttggatttgatgcccatgtcacactggagttccatgaatccagagaagcaaatccagagaaattcaacagtcgttttcgaaataaaatgttctatgcaggggcagctttttctgacttcctacagagaagttctagagatctatccaaacatgttaaagttgtttgtgatggaacagatctcaccccaaagattcaggaactgaagttccagtgtatagtatttttaaatatacccagatattgtgctggcacaatgccctggggaaacccaggtgatcaccatgatttcgaacctcagcgtcatgatgatggttatattgaagtcattggatttaccatggcctctttggcagccctgcaagttgggggccatggagagaggctacaccagtgtcgagaagtcatgcttctaacttacaaatccatccccatgcaagtggatggggagccctgtaggttggccccagctatgattcggatctccctgaggaatcaggccaacatggtacagaagagcaagaggagaacatccatgcctttactcaatgatccccagtctgtcccagatcgtctgaggatccgggtgaacaaaatcagtttacaagactatgaaggattccactatgacaaggagaaactccgagaagcttctatttcagactggttaagaaccattgctggggaactagtgcagtcatttggagcgatacctctgggtattctagttgtgcgtggagactgtgatttggagacttgccgtatgtacatagaccgcctacaggaggacctacagtcagtttcttctggctcccagagagttcattaccaggaccatgaaacctccttccccagggctctctcagcacagaggctctctcctcggtggtgcttcctagatgacagatctcaggaacatttgcactttgtgatggagatttcccaagatgagatttttattctggacccagatatggtggtgtcacagccggcggggacacctccgggcatgcctgacctggtggtggaacaagcctcggggatctcagactggtggaatcctgccctgcggaaacgcatgctgagtgacagtgggctggggatgatagctccctattatgaggactcagatctgaaagatctcagccactcccgcgtgctacagtcaccagtctcttcagaagatcatgcaattttgcaggcagtaatagctggtgatcttatgaagctaatagaaagctataaaaatggaggcagtctgctaattcagggaccagaccactgttcactccttcactacgcagctaaaaccggcaacggggagattgtgaaatatatccttgaccacggaccttccgagttattggatatggcagacagtgaaacgggtgagactgcactgcacaaggctgcctgccagcggaaccgggctgtgtgccagcttctggtggatgcaggagcatctctgagaaagacggactccaagggtaagacacctcaagaaagagcacagcaggctggggacccagacttggctgcttacctagaaagccgtcagaactataaggtcattggccatgaggacctggaaactgctgtttga

SEQ ID NO: 120095 - DNA, 1146 bp, Homo sapiens
atgacgccagatggaaacttggatcaacaggaaggagtgaatagcactggaaagggagacagctggctggccttcagcgacccccaacgccttgcggggctcctaccgcccccaccgccacagtcgcggccggccccaggaactctgtctactaaatcacttctcatccaggaactctatatgccgctcttgggcaattcccacaaagcactacaattcctcctacttccaaatgtttgtaaattttcctttttccagaatgccaagttccattcttcttctcctggtaaaattcagtcagtcacgtcacgcattgccaactgcatgccacaggctccctgttgtggactggccacccacagtggagtgatggatattcaccatttgctgccccagctgcctctccagccttccctgccctcttttctgctctgtgaggctgagctatttggactgcatcagtggctcccatgtcttctggcttccaatcagacttctccagatagacccaccagcagaagatctagaggtcaaggtgaagtgggcagtcgctgtatttatgtccctggcttgctctctgccagtgacagcctgcagcagctgccccctctgacactggatgatgcctgtcagccaagccagttggggaagaatgagcaccaggcagcagcttgtgaaaatgctggttcccatgcatctgtgtgtgtgggtgagaagatgaggcaatcagagcccgacatgcattactggggactttctggccatctgcgtattcagaacagaacaaaacacgctgttcgaagagcatcaagtgagttttcctgcggtactcgagaggcaattccaaccataatagagcatgagactgtcagtgactttcgtaacagactaagaaatccctggaactccatagaacttaatgcagagcgtagtgtcaagcacgaagctagactaggacaggagttattggcaaggagggaggcttttcaggcatccttaaatcacagcctgaagaggaaatccgagagtgataaaagcatctgcaagcagaataaaggaatctcagtcagtggatttcttctacaagtttcatggcagcggtactgcagtgttttaggttctttgttggtggctgataatgtgtaa

SEQ ID NO: 120096 - DNA, 1156 bp, Homo sapiens
atgatgagagtgtattatgtatcaaggaaccgaaagagttggtttgatattcacgatgttccaaacaaccctgtagtctgcagcagcagggccttctttgaggagaatgccgtgaatggagaacacctgtggctggagaccaacgtctcgggagacctctgctaccttggagaggagaactgccaagtcagatttgcaaacagaacaaaacacgctgttcgaagagcatcaagtgagttttcctgcggtactcgagaggcaattccaaccataatagagcatgagactgtcagtgactttcgtaacagactaagaaatccctggaactccatagaacttaatgcagagcgtagtgtcaagcacgaagctagactaggacaggagttattggcaaggagggaggcttttcaggcatccttaaatcacagcctgaagaggaaatccgagagtgataaaagcatctgcaagcagaataaaggaatctcagtcagtggatttcttctacaagtttcatggcagcggtactgcagtgttttagtgcctgcaagggagcgagccacgctggaagccggctctcactctgctggggcagtgctcctcctgttgctgctcaaatgtgtgggtggggctggaagtgacatcccggtggtggtgtgcctccagaatcagtggattcggcaaagtccatttatttgtcatttaggggatgggaaaggctccaatatcataagccataacggactgcactttcccggtctgccccggcacccagagggccccgtgggcgaaaaaaaactgggtttaaggaaaaacaatttgactgctaggagaatgccaatttcagggctttccgagaaactgggggaacacaggctacagagaagagcattgttcctggaagcaacccccagcttcacgtccgtagttactgaccatcaaagggatattttgaaaggagttgatggctgccaaggtaaatgatgagctgaatgaatgcaacttaattgctgcagaatgccactggaagtcaccacgggggtgcctcctctacttggaatgcttgaaaaaaagatgtaaaattacccattcacccctggtcacagacagagaattggggaagatgaaataccttaaaaaactcttaaaagtcctttag

SEQ ID NO: 120097 - DNA, 1250 bp, Homo sapiens
ggccatttcatcacccagttaataagaaatttgttccagattattacaaagtgattgtcaatccaatggatttagagaccatacgtaagaacatctccaagcacaagtatcagagtcgggagagctttctggatgatgtaaaccttattctggccaacagtgttaagtataatggacctgagagtcagtatactaagactgcccaggagattgtgaacgtctgttaccagacattgactgagtatgatgaacatttgactcaacttgagaaggatatttgtactgctaaagaagcagctttggaggaagcagaattagaaagcctggacccaatgaccccagggccctacacgcctcagcctcctgatttgtatgataccaacacatccctcagtatgtctcgagatgcctctgtatttcaagatgagagcaatatgtctgtcttggatatccccagtgccactccagaaaagcaggtaacacaggaaggtgaagatggagatggtgatcttgcagatgaagaggaaggaactgtacaacagcctcaagccagtgtcctgtatgaggatttgcttatgtctgaaggagaagatgatgaggaagatgctgggagtgatgaagaaggagacaatcctttctctgctatccagctgagtgaaagtggaagtgactctgatgtgggatctggtggaataagacccaaacaaccccgcatgcttcaggagaacacaaggatggacatggaaaatgaagaaagcatgatgtcctatgagggagacggtggggaggcttcccatggtttggaggatagcaacatcagttatgggagctatgaggagcctgatcccaagtcgaacacccaagacacaagcttcagcagcatcggtgggtatgaggtatcagaggaggaagaagatgaggaggaggaagagcagcgctctgggccgagcgtactaagccaggtccacctgtcagaggacgaggaggacagtgaggatttccactccattgctggggacagtgacttggactctgatgaatgaggcttcctttgggcctccttggtcagtatctgatcctgaaatcatgaaattaactaacaccttagcctttttaaaagtagtaagtaaatgataataaatcacctctcctaatcttcctggggcaatgtcaccctttgatttaaaacaaagcaaccccctttcccctaccactacggaaaagagcaagctcatttttccgtgtcctcc

SEQ ID NO: 120098 - DNA, 403 bp, Homo sapiens
ggaaaagttggctaatcatacaccttgggggagcggccaaactgtgatggatgccagtgtcctgtatgaggatttgcttatatctgaaggagaagatgatgaggaagatgctgggagtgacgaagaaggagacaatcctttctctgctatccagctgagtgaaagtggaagtgactctgatgttaccgttgccattgctaaggtgggaattaaagtaacaaagtcgaataaatggggttccagtggcgggtacacccagcagcccttacgtaagaagcggaagatcgtatcctccaggaagaggcggagtcgaggtgagggagtgaaatgcttaattcaggaatggattttggagtttctgggtgctgaagaaatagggcctttccgcctgcgggcccagtga

SEQ ID NO: 120099 - DNA, 5775 bp, Homo sapiens
atgggacccggctgcgatttgctgctgcggacagcagctaccatcactgctgccgccatcatgtcagacacggacagcgacgaagattccgctggaggcggcccattttctttagcgggtttccttttcggcaacatcaatggagccgggcagctggagggggaaagcgtcttggatgatgaatgtaagaagcacttggcaggcttgggggctttggggctgggcagcctgatcactgaactcacggcaaatgaagaattgaccgggactgacggtgccttggtaaatgatgaagggtgggttaggagtacagaagatgctgtggactattcagacatcaatgaggtggcagaagatgaaagccgaagataccagcagacgatggggagcttgcagcccctttgccactcagattatgatgaagatgactatgatgctgattgtgaagacattgattgcaagttgatgcctcctccacctccacccccgggaccaatgaagaaggataaggaccaggattctattactggtgtgtctgaaaatggagaaggcatcatcttgccctccatcattgccccttcctctttggcctcagagaaagtggacttcagtagttcctctgactcagaatctgagatgggacctcaggaagcaacacaggcagaatctgaagatggaaagctgacccttccattggctgggattatgcagcatgatgccaccaagctgttgccaagtgtcacagaactttttccagaatttcgacctggaaaggtgttacgttttctacgtctttttggaccagggaagaatgtcccatctgtttggcggagtgctcggagaaagaggaagaagaagcaccgtgagctgatacaggaagagcagatccaggaggtggagtgctcagtagaatcagaagtcagccagaagtctttgtggaactacgactacgctccaccaccacctccagagcagtgtctctctgatgatgaaatcacgatgatggctcctgtggagtccaaattttcccaatcaactggagatatagataaagtgacagataccaaaccaagagtggctgagtggcgttatgggcctgcccgactgtggtatgatatgctgggtgtccctgaagatggcagtgggtttgactatggcttcaaactgagaaagacagaacatgaacctgtgataaaatctagaatgatagaggaatttaggaaacttgaggaaaacaatggcactgatcttctggctgatgaaaacttcctgatggtgacacagctgcattgggaggatgatatcatctgggatggggaggatgtcaaacacaaagggacaaaacctcagcgtgcaagcctggcaggctggcttccttctagcatgactaggaatgcgatggcttacaatgttcagcaaggttttgcagccactcttgatgatgacaaaccttggtactccatttttcccattgacaatgaggatctggtatatggacgctgggaggacaatatcatttgggatgctcaggccatgccccggctgttggaacctcctgttttgacacttgatcccaatgatgagaacctcattttggaaattcctgatgagaaggaagaggccacctctaactccccctccaaggagagtaagaaggaatcatctctgaagaagagtcgaattctcttagggaaaacaggagtcatcaaggaggaaccacagcagaacatgtctcagccagaagtgaaagatccatggaatctctccaatgatgagtattattatcccaagcaacagggtcttcgaggcacctttggagggaatattatccagcattcaattcctgctgtggaattacggcagcccttctttcccacccacatggggcccatcaaactccggcagttccatcgcccacctctgaaaaagtactcatttggtgcactttctcagccaggtccccactcagtccaacctttgctaaagcacatcaaaaaaaaggccaagatgagagaacaagagaggcaagcttcaggtggtggagagatgttttttatgcgcacacctcaggacctcacaggcaaagatggtgatcttattcttgcagaatatagtgaggaaaatggacccttaatgatgcaggttggcatggcaaccaagataaagaactattataaacggaaacctggaaaagatcctggagcaccagattgtaaatatggggaaactgtttactgccatacatctcctttcctgggttctctccatcctggccaattgctgcaagcatttgagaacaacctttttcgtgctccaatttatcttcataagatgccagaaactgatttcttgatcattcggacaagacagggttactatattcgggaattagtggatatttttgtggttggccagcagtgtcccttgtttgaagttcctgggcctaactccaaaagggccaatacgcatattcgagactttctacaggtttttatttaccgccttttctggaaaagtaaagatcggccacggaggatacgaatggaagatataaaaaaagcctttccttcccattcagaaagcagcatccggaagaggctaaagctctgcgctgacttcaaacgcacagggatggactcaaactggtgggtgcttaagtctgattttcgtttaccaacggaagaagagatcagagctatggtgtcaccagagcagtgctgtgcttattatagcatgatagctgcagagcaacgactgaaggatgctggctatggtgagaaatccttttttgctccagaagaagaaaatgaggaagatttccagatgaagattgatgatgaagttcgcactgccccttggaacaccacaagggccttcattgctgccatgaagggcaagtgtctgctagaggtgactggggtggcagatcccacggggtgtggtgaaggattctcctatgtgaagattccaaacaaaccaacacagcagaaggatgataaagaaccgcagccagtgaagaagacagtgacaggaacagatgcagaccttcgtcgcctttccctgaaaaatgccaagcaacttctacgtaaatttggtgtgcctgaggaagagattaaaaagttgtcccgctgggaagtgattgatgtggtgcgcacaatgtcaacagaacaggctcgttctggagaggggcccatgagtaaatttgcccgtggatcaaggttttctgtggctgagcatcaagagcgttacaaagaggaatgtcagcgcatctttgacctacagaacaaggttctgtcatcaactgaagtcttatcaactgacacagacagcagctcagctgaagatagtgactttgaagaaatgggaaagaacattgagaacatgttgcagaacaagaaaaccagctctcagctttcacgtgaacgggaggaacaggagcggaaggaactacagcgaatgctactggcagcaggctcagcagcatccggaaacaatcacagagatgatgacacagcttccgtgactagccttaactcttctgccactggacgctgtctcaagatttatcgcacgtttcgagatgaagaggggaaagagtatgttcgctgtgagacagtccgaaaaccagctgtcattgatgcctatgtgcgcatacggactacaaaagatgaggaattcattcgaaaatttgccctttttgatgaacaacatcgggaagagatgcgaaaagaacggcggaggattcaagagcaactgaggcggcttaagaggaaccaggaaaaggagaagcttaagggtcctcctgagaagaagcccaagaaaatgaaggagcgtcctgacctaaaactgaaatgtggggcatgtggtgccattggacacatgaggactaacaaattctgccccctctattatcaaacaaatgcgccaccttccaaccctgttgccatgacagaagaacaggaggaggagttggaaaagacagtcattcataatgataatgaagaacttatcaaggttgaagggaccaaaattgtcttggggaaacagctaattgagagtgcggatgaggttcgcagaaaatctctggttctcaagtttcctaaacagcagcttcctccaaagaagaaacggcgagttggaaccactgttcactgtgactatttgaatagacctcataagtccatccaccggcgccgcacagaccctatggtgacgctgtcgtccatcttggagtctatcatcaatgacatgagagatcttccaaatacataccctttccacactccagtcaatgcaaaggttgtaaaggactactacaaaatcatcactcggccaatggacctacaaacactccgcgaaaacgtgcgtaaacgcctctacccatctcgggaagagttcagagagcatctggagctaattgtgaaaaatagtgcaacctacaatgggccaaaacactcattgactcagatctctcaatccatgctggatctctgtgatgaaaaactcaaagagaaagaagacaaattagctcgcttagagaaagctatcaaccccttgctggatgatgatgaccaagtggcgttttctttcattctggacaacattgtcacccagaaaatgatggcagttccagattcttggccatttcatcacccagttaataagaaatttgttccagattattacaaagtgattgtcaatccaatggatttagagaccatacgtaagaacatctccaagcacaagtatcagagtcgggagagctttctggatgatgtaaaccttattctggccaacagtgttaagtataatggacctgagagtcagtatactaagactgcccaggagattgtgaacgtctgttaccagacattgactgagtatgatgaacatttgactcaacttgagaaggatatttgtactgctaaagaagcagctttggaggaagcagaattagaaagcctggacccaatgaccccagggccctacacgcctcagcctcctgatttgtatgataccaacacatccctcagtatgtctcgagatgcctctgtatttcaagatgagagcaatatgtctgtcttggatattcccagtgccactccagaaaagcagatgcgccagggccgaggtaggctgggcgaggaagactctgatgtagatattgaagggtatgatgatgaggaggaggatgggaaacctaagactccagccccagaaggtgaagatggagatggtgatcttgcagatgaagaggaaggaactgtacaacagcctcaagccagtgtcctgtatgaggatttgcttatgtctgaaggagaagatgatgaggaagatgctgggagtgatgaagaaggagacaatcctttctctgctatccagctgagtgaaagtggaagtgactctgatgtgggatctggtggaataagacccaaacaaccccgcatgcttcaggagaacacaaggatggacatggaaaatgaagaaagcatgatgtcctatgagggagacggtggggaggcttcccatggtttggaggatagcaacatcagttatgggagctatgaggagcctgatcccaagtcgaacacccaagacacaagcttcagcagcatcggtgggtatgaggtatcagaggaggaagaagatgaggaggaggaagagcagcgctctgggccgagcgtactaagccaggtccacctgtcagaggacgaggaggacagtgaggatttccactccattgctggggacagtgacttggactctgatgaatga

SEQ ID NO: 120100 - DNA, 5947 bp, Homo sapiens
aagggagctcagtaagtcacttctgggcgactgttgttttatttccggtctatgggacccggctgcgatttgctgctgcggacagcagctaccatcactgctgccgccatcatgtcagacacggacagcgacgaagattccgctggaggcggcccattttctttagcgggtttccttttcggcaacatcaatggagccgggcagctggagggggaaagcgtcttggatgatgaatgtaagaagcacttggcaggcttgggggctttggggctgggcagcctgatcactgaactcacggcaaatgaagaattgaccgggactgacggtgccttggtaaatgatgaagggtgggttaggagtacagaagatgctgtggactattcagacatcaatgaggtggcagaagatgaaagccgaagataccagcagacgatggggagcttgcagcccctttgccactcagattatgatgaagatgactatgatgctgattgtgaagacattgattgcaagttgatgcctcctccacctccacccccgggaccaatgaagaaggataaggaccaggattctattactggtgagaaagtggacttcagtagttcctctgactcagaatctgagatgggacctcaggaagcaacacaggcagaatctgaagatggaaagctgacccttccattggctgggattatgcagcatgatgccaccaagctgttgccaagtgtcacagaactttttccagaatttcgacctggaaaggtgttacgttttctacgtctttttggaccagggaagaatgtcccatctgtttggcggagtgctcggagaaagaggaagaagaagcaccgtgagctgatacaggaagagcagatccaggaggtggagtgctcagtagaatcagaagtcagccagaagtctttgtggaactacgactacgctccaccaccacctccagagcagtgtctctctgatgatgaaatcacgatgatggctcctgtggagtccaaattttcccaatcaactggagatatagataaagtgacagataccaaaccaagagtggctgagtggcgttatgggcctgcccgactgtggtatgatatgctgggtgtccctgaagatggcagtgggtttgactatggcttcaaactgagaaagacagaacatgaacctgtgataaaatctagaatgatagaggaatttaggaaacttgaggaaaacaatggcactgatcttctggctgatgaaaacttcctgatggtgacacagctgcattgggaggatgatatcatctgggatggggaggatgtcaaacacaaagggacaaaacctcagcgtgcaagcctggcaggctggcttccttctagcatgactaggaatgcgatggcttacaatgttcagcaaggttttgcagccactcttgatgatgacaaaccttggtactccatttttcccattgacaatgaggatctggtatatggacgctgggaggacaatatcatttgggatgctcaggccatgccccggctgttggaacctcctgttttgacacttgatcccaatgatgagaacctcattttggaaattcctgatgagaaggaagaggccacctctaactccccctccaaggagagtaagaaggaatcatctctgaagaagagtcgaattctcttagggaaaacaggagtcatcaaggaggaaccacagcagaacatgtctcagccagaagtgaaagatccatggaatctctccaatgatgagtattattatcccaagcaacagggtcttcgaggcacctttggagggaatattatccagcattcaattcctgctgtggaattacggcagcccttctttcccacccacatggggcccatcaaactccggcagttccatcgcccacctctgaaaaagtactcatttggtgcactttctcagccaggtccccactcagtccaacctttgctaaagcacatcaaaaaaaaggccaagatgagagaacaagagaggcaagcttcaggtggtggagagatgttttttatgcgcacacctcaggacctcacaggcaaagatggtgatcttattcttgcagaatatagtgaggaaaatggacccttaatgatgcaggttggcatggcaaccaagataaagaactattataaacggaaacctggaaaagatcctggagcaccagattgtaaatatggggaaactgtttactgccatacatctcctttcctgggttctctccatcctggccaattgctgcaagcatttgagaacaacctttttcgtgctccaatttatcttcataagatgccagaaactgatttcttgatcattcggacaagacagggttactatattcgggaattagtggatatttttgtggttggccagcagtgtcccttgtttgaagttcctgggcctaactccaaaagggccaatacgcatattcgagactttctacaggtttttatttaccgccttttctggaaaagtaaagatcggccacggaggatacgaatggaagatataaaaaaagcctttccttcccattcagaaagcagcatccggaagaggctaaagctctgcgctgacttcaaacgcacagggatggactcaaactggtgggtgcttaagtctgattttcgtttaccaacggaagaagagatcagagctatggtgtcaccagagcagtgctgtgcttattatagcatgatagctgcagagcaacgactgaaggatgctggctatggtgagaaatccttttttgctccagaagaagaaaatgaggaagatttccagatgaagattgatgatgaagttcgcactgccccttggaacaccacaagggccttcattgctgccatgaagggcaagtgtctgctagaggtgactggggtggcagatcccacggggtgtggtgaaggattctcctatgtgaagattccaaacaaaccaacacagcagaaggatgataaagaaccgcagccagtgaagaagacagtgacaggaacagatgcagaccttcgtcgcctttccctgaaaaatgccaagcaacttctacgtaaatttggtgtgcctgaggaagagattaaaaagttgtcccgctgggaagtgattgatgtggtgcgcacaatgtcaacagaacaggctcgttctggagaggggcccatgagtaaatttgcccgtggatcaaggttttctgtggctgagcatcaagagcgttacaaagaggaatgtcagcgcatctttgacctacagaacaaggttctgtcatcaactgaagtcttatcaactgacacagacagcagctcagctgaagatagtgactttgaagaaatgggaaagaacattgagaacatgttgcagaacaagaaaaccagctctcagctttcacgtgaacgggaggaacaggagcggaaggaactacagcgaatgctactggcagcaggctcagcagcatccggaaacaatcacagagatgatgacacagcttccgtgactagccttaactcttctgccactggacgctgtctcaagatttatcgcacgtttcgagatgaagaggggaaagagtatgttcgctgtgagacagtccgaaaaccagctgtcattgatgcctatgtgcgcatacggactacaaaagatgaggaattcattcgaaaatttgccctttttgatgaacaacatcgggaagagatgcgaaaagaacggcggaggattcaagagcaactgaggcggcttaagaggaaccaggaaaaggagaagcttaagggtcctcctgagaagaagcccaagaaaatgaaggagcgtcctgacctaaaactgaaatgtggggcatgtggtgccattggacacatgaggactaacaaattctgccccctctattatcaaacaaatgcgccaccttccaaccctgttgccatgacagaagaacaggaggaggagttggaaaagacagtcattcataatgataatgaagaacttatcaaggttgaagggaccaaaattgtcttggggaaacagctaattgagagtgcggatgaggttcgcagaaaatctctggttctcaagtttcctaaacagcagcttcctccaaagaagaaacggcgagttggaaccactgttcactgtgactatttgaatagacctcataagtccatccaccggcgccgcacagaccctatggtgacgctgtcgtccatcttggagtctatcatcaatgacatgagagatcttccaaatacataccctttccacactccagtcaatgcaaaggttgtaaaggactactacaaaatcatcactcggccaatggacctacaaacactccgcgaaaacgtgcgtaaacgcctctacccatctcgggaagagttcagagagcatctggagctaattgtgaaaaatagtgcaacctacaatgggccaaaacactcattgactcagatctctcaatccatgctggatctctgtgatgaaaaactcaaagagaaagaagacaaattagctcgcttagagaaagctatcaaccccttgctggatgatgatgaccaagtggcgttttctttcattctggacaacattgtcacccagaaaatgatggcagttccagattcttggccatttcatcacccagttaataagaaatttgttccagattattacaaagtgattgtcaatccaatggatttagagaccatacgtaagaacatctccaagcacaagtatcagagtcgggagagctttctggatgatgtaaaccttattctggccaacagtgttaagtataatggacctgagagtcagtatactaagactgcccaggagattgtgaacgtctgttaccagacattgactgagtatgatgaacatttgactcaacttgagaaggatatttgtactgctaaagaagcagctttggaggaagcagaattagaaagcctggacccaatgaccccagggccctacacgcctcagcctcctgatttgtatgataccaacacatccctcagtatgtctcgagatgcctctgtatttcaagatgagagcaatatgtctgtcttggatattcccagtgccactccagaaaagcaggtaacacaggaaggtgaagatggagatggtgatcttgcagatgaagaggaaggaactgtacaacagcctcaagccagtgtcctgtatgaggatttgcttatgtctgaaggagaagatgatgagggaagatgctggggagtgatgaagaaggagacaatcctttcttctgctattcccagctgagtgaaagtgggaagtgactcttgatgttgggttcttggtggattaaggacccaaacaaccccgcatgcttcaggagaacacaaggatggacatggaaaatgaagaaagcatgatgtcctatgagggagacggtggggaggcttcccatggtttggaggatagcaacatcagttatgggagctatgaggagcctgatcccaagtcgaacacccaagacacaagcttcagcagcatcggtgggtatgaggtatcagaggaggaagaagatgaggaggaggaagagcagcgctctgggccgagcgtactaagccaggtccacctgtcagaggacgaggaggacagtgaggatttccactccattgctggggacagtgacttggactctgatgaatgaggcttcctttgggcctccttggtcagccttccctgttctccagcctaggtggttcacctttccccaatttgttcatatttgtacagtatctgatcctgaaatcatgaaattaactaacaccttagcctttttaaaagtagtaagtaaatgataataaatcacctctcctaatcttcctggggcaatgtcaccctttgatttaaaacaaagcaaccccctttcccctaccactacggaaaagagcaagctcatttttccgtgtcctcc

SEQ ID NO: 120101 - DNA, 357 bp, Homo sapiens
atggatgccagtgtcctgtatgaggatttgcttatatctgaaggagaagatgatgaggaagatgctgggagtgacgaagaaggagacaatcctttctctgctatccagctgagtgaaagtggaagtgactctgatgttaccgttgccattgctaaggtgggaattaaagtaacaaagtcgaataaatggggttccagtggcgggtacacccagcagcccttacgtaagaagcggaagatcgtatcctccaggaagaggcggagtcgaggtgagggagtgaaatgcttaattcaggaatggattttggagtttctgggtgctgaagaaatagggcctttccgcctgcgggcccagtga

SEQ ID NO: 120102 - DNA, 669 bp, Homo sapiens
atgggcaaggacttcatttctaaaacaccaaaagcaatggcaacaaaagccaaaattgacaaatgggatctaattaaactaaagagcttctgcacagcaaaagaaactaccatcagagtgaacgggcaacctacagaatgggagaaaatttttgcagtctactcatctgacaaagggctaatatccagaatctacaaagaactcaaacaaactcacaagaaaaaaacaaacaaccccatcaaaaagtgggcgaaggatatgaacagacacttctcacaagaagacatttatgcatccaaaagacacatgaaaaaatgctcatcatcactggccatcagagaaatgcaaatcaaaaccacaatgagataccatctcacaccagtcagaatggcaatcattaaaaagtctggaaacagaaatattctgccgtgggtgaaagttcccgaagacctgaaagatccagaggtgttccaggtccagacgcggctgctggaagccatgttcgaatccctttactgtttcactacatgctgccttttggggctttcactcacgtcagccagcacctgtgtctcttggttggctgaacagcagtggcctgctttgcctgtgagcacagagagcttggaaatatttacaatgaaaagaaagcagcatgtaggagcataa

SEQ ID NO: 120103 - DNA, 456 bp, Homo sapiens
atggactcagggtcctggcccgggccgggggcggggcctggccgggggcggggccaccaggcctggtttgcgctggagagtggtcttggttgtgagggtcataagatgggaactctcccggcacgtagacatatcccgccgtgggtgaaagttcccgaagacctgaaagatccagaggtgttccaggtccagacgcggctgctgaaagccattttcggcccggacggatctcgaatcccttacatcgagcaggtgagcaaggccatgctcgagctgaaggctctggagtcttcagacctcaccgaggtcgtggtttacggctcctatttgtacaagctccggaccaagtggatgctccagtccatggctgagtggcaccgccagcgccaggagcgagggatgctcaaacttgccgaagccatgaatgccctcgaactaggcccttggatgaagtga

SEQ ID NO: 120104 - DNA, 1098 bp, Homo sapiens
atggaaaatctaaaacgtgctgtgaaaacaaagaagagaaatgttgcagatttaccaccaattaagaaaaacttttataaagagtccactgccacaagtgccatgtcaaaagtagaagcagatagttggaggaaagaaaattttaatataacgtgggatgacttgaaggatggggagaaacgacctatccccaatcctacctgcacatttgatgacgcctttcaatgttatcctgaggttatggaaaacattaaaaaggcaggttttcaaaagccaacacctattcagccagagcacgagcaggcggttgcacggttcttcatggcctctggcactccgtttaagctgggtctagtctccaacatttcagcctcccagcacagcaccggtgttcatttctcggattcttacatccatgtggctcctaaccagaccggaagctcccggagcccgcctgtctacagagaccgacggccggcattctgggcccccattcccaaaggggtcttgggaaggcccagatccaagggcacccctggtgacgcccaaggtgctggcagcgagcaagagaggagaaagaggagagggctggaggagagggcgaagcggcccccgcgagcctgtgttccgcgtacccagtctctgggcctctcacctcgctcctggcgctgcggtgcactcagccatggactggagcatccacttggtccggagcttgtacaaataggagccgtaaaccacgcctcggtgaggtctgaagactccagaccttcagctcgagcatggccttgctcacctgctcgatgtaagggattcgagatccgtccgggcctgttggggaaaagagatgagatccccgggccggctgagactcccgagccgggcagcccgccagtactgggcacactcaccgaaaatgtttcagcagccgcgtctggacctggaacacctctggatctttcaggtcttcgggaactttcacccacggcgggatatgtctacgtgccgggagagttcccatcttatgaccctcacaaccaagaccactctccagcgcaaaccaggcctaatcacgccggcgaggctcaggggcgataa

SEQ ID NO: 120105 - DNA, 619 bp, Homo sapiens
tttcgtgtgggaggctcactctgcctagaggcttcagattaagactggtctctcccaccacacagaggcctggaggaggcagaggccaggagggagaggtcccaagagcctgtgaaatgggtctggcctggctcccagctgggcaggaacacaggacttcaggacactaaggaccctgtcatgcccatggccagcacccaccagtgctggtgcctgcctgtccagagctgaccagggagatggtgctggcccaggggctgctctccatggccctgctggccctgtgctgggagcgcagcctggcaggggcagaagaaaccatcccgctgcagaccctgcgctgctacaacgactacaccagccacatcacctgcaggtgggcagacacccaggatgcccagcggctcgtcaacgtgaccctcattcgccgggtgaatgaggacctcctggagccagtgtcctgtgacctcagtgatgacatgccctggacagcctgcccccatccccgctgcgtgcccaggagatgtgtcattccctgccagagttttgtcgtcactgacggtgactacttctcattccaaccagacaggcctctgggcacccggctcaccgtcactct

SEQ ID NO: 120106 - DNA, 624 bp, Homo sapiens
atggtgctggcctgggagctgctcctcatggccctgctggccctgtgctggggacttagcctggcaggggcagaagaaaccgtcctgctgcagaccctgcgctgctacagtgactataccagccacatcacctgcgggtgggcagacacccaggatgcccagcggctcgtcaacgtgaccctcattcgccgggtgaatgagtctgtgacgttgggtgcaggggccacggtctgttcacaaccgaggaccctcaggaatcctttcaaagcattcatcaaaatctgcaacgcctttgctcatgactgtttcccactcactagcagtgagatccaatcccgatccaagacccggagcttcttcagtgagcggagatgtgtcattccctaccagagttttgtcatcagtgacattgactacttctcattccagccagacgggcctctgggcacctggctcactgtcactctgacccagcatgacccagagagttgctacctgcgtcactgggtagatgaagttacccctgctcaggacacccagcatgacccatggcccaaatcaccgcatttcaatgctttgggcacactgaccctgcacccgggctgcccagcttctattgattga

SEQ ID NO: 120107 - DNA, 222 bp, Homo sapiens
atgttcccttcccacttttcagcccagcgaggtcatgatgatgatgtttctagcaccagtgaagatgatggctatcctgaggacatggatcaagataagcatgatgacagtactgatgacagtgacaccgacaaatcagatggagaaagtgacggggatgaatttgtgcaccgtgataatggtgagagagacaacaatgaagaaaagaagtcaggttcctga

SEQ ID NO: 120108 - DNA, 956 bp, Homo sapiens
atgcacagcctgtacaagccgcgtccgggccgcgtgaaagactatatcgccattccaaaagcgaacggctatcagtctttgcacacctcgatgatcggcccgcacgcctgcgctgctgctctgatgatccccagcgtgagcccaccgccagccagccctctccccacgctgaacagtgaagattcatcaaatgagaaactaaggttcggagagattgataaactttcccgaggttacacagtcattaggttgaggagctgccatttacatctgcagacagctaaggaagtgaacagcagcggccttgttgctggaggcatcgtggcagtgtcatcatcagccattgtccccagtaacccagaagtcactgtggccttgccggttacaacactacacaacactgtgactagctcagtctctactctcaaggcagaattgccacctacaggaaccagcaacgcaacccgtgtggaaaatgttcattcccctctgcccatttcaccatctccctccgaacagtccagtctcagtactgatgacacaaacatggcagacactttcaccgagattatgaccatgatgtcgccttcacagttcttgagttcatctcctttgagaatgacaaataatgaagacagtctgagtcccaccagcagcactctgtcaaacctggaactggatgcagccgaaaaggatcgcaagcttcaggagaaagagaagcaaatcgaagagctgcagaggaaactggaacaagagcagaagctcgtggaagtgctgaaaatgcaacttgaggttgaaaaacgagggcagcagcagcgggcccctggaagcccagcccagtgccccaggtcattctgtcaagtcagatcagaagcacggcagccttggctcctccatcaaagatgaggcctcactccctgactgctccagctccaggcagcccatcccagtagcca

SEQ ID NO: 120109 - DNA, 858 bp, Homo sapiens
atgtccaaccggcctaataacaatccaggggggtcactgcgacgttcacagaggaacactgccggggcccaaccacaagacgactcaataggaggaagatgtgaagcggtaaacaatattgggccacagattgggagtagagtgggggaaggaagacaggaagacagcagtgagcacataaacagaaccaaagacaaaaaccacatgtttatctcaatagatgcagaaaaggcctctgatgaaattcaacagcccttcatgctaaaaactctcaataaattaggtattgatgggacatatctcaaaataataacagctatttatgacaaacccacagccaatatcatactgaatgggcaaaaactggaagcattccctttggaaactggcacaagacagggatgccctctctcaccactcctattcaacatggtgttggaagttctggccagggcaatcaggcaggggaaagaaataaagtgtattcaattagggaaagaggaagtcaaattgtccctgtttgcagacgacatgattgtatatctagaaaaccccattgtctcagcccaaaatctccttaagctgataagcaacttcagcaaagtctcaggatacaaaatcaatgtgcaaaaatcacaagcattcttatacactaataacagacaaacagagagccaaaccatgggtgaacgcccattcacaattgcttcaaagagaataaaatacctaggaatccaacttacaagggatgtgaaggacctcttcaaggagaactacaaaccactgctcaatgaaataaaagaggataccaacaaatggaagaacattccatgctcatgggtaggaagaatatcgtga

SEQ ID NO: 120110 - DNA, 477 bp, Homo sapiens
atggatcaaggacacaaatctaaaacctgcgactataaaaattctaaaagacgacatcggaaatacccttctagacaatggcttaggcaaagacttcatgaccaagaacccaaaagcaaatgcaacaaaaacaaaagtcgccaaggaaaacaatgcagtgaaacactgggtggaacacacattactcacatacagaagagacagagcaagatcagcttccctagtggacttcagtctcccatgaccagagggtccctcttggcagctgacacagggcagcccggcgttaagcggaacttctctctccagctgtgtctcttagcaactaagcccccggctcctccagaagcccctcttcgcacatgcgcaaactgcggacgggaaactgggctccctagccctggcgtttttggtgttgctgtcccagccagaatcgcgtctggccggtgggaagccgggaactccagccccctgtag

SEQ ID NO: 120111 - DNA, 1662 bp, Homo sapiens
cccttactgattgtttaaaggatgttgatttgatcccaccttttaatcggatgctgctggaagtcacctttggcaagctgtatgcttggactgttcagaacattctaaatgttctgatggatgccagtgccaaatttaaagagcttggtatccagccggttcccctgcagaccatcaccagtgagaacccattgggaccgagcctggggagcatcccgcaagcccgcttcctcctgatgatgctcagcatgctcaccctgcagcacagcgcaaacaacctcgacctcctgctcaattccggcacgctggccctcactcagacggcactgcgcctgattgttcttccagatgtagagttattgatttgagatcatcttctgtgaatgcagacttctatagtataattgcccgtcttagccctgcttttggcgcagcacagaagttttggccccagttgtgacaatgttgaggaagatatgaatgcttctgctcaaggtgcttctgccacagttttggaagcaacaaggaaggaaacggctcctgtgcatctccctgtttcagggccagaactggctgccacgatgaagattggaacgagggtcatgagaggtgtggactggaaatggggcgatcagaagctgaacaaactgaaaggaacattcaccccactacaatgatgtttaccagcactattaacttactgcagactctttgtctgcctgccagagttcatgctgagatcatgcagagcgaagccaccaagactttatgcggactgctgcaaatattagtggaaagcggaacgacggacaagacacgcatggaatgagagattgagggcccagggagtcagcgctgggggccgcacgcttgtcgtgtccgggtgtgcatgtggggtgggtgtggatgtgtgtggattcatttcctgtggctgctgtaacaaagtactacaaacttggggcttacgcagtagaaattctcatgattctggtggttggaagactgagatcaagggtggttccttctggggctgtgagggagaagctgcttcagggctctgccccagcttctggagtttgctggcctctttagcgttcctcggcttgtagaggggtcaccctgatctctgccatcatcttcacatggcattctccctgtgtgtgagtcacctccaaatctccccttttcataaggacatcattcaacctcatcaaactgattacatctgcagcggccctatttccaaacaaggtcacctgccgaggtatggtaggggttagggcttcaacatacaaattttgcaattctgaattcgaattcaacccataacactggcttcaaacaacaaatttgttctctcagagttctggagaccagaagtcccaaatcaggtgcgggcagggcatgctccctccacaggctctaggggaaggtccttccttaccttatccagcttctgggagctccaggcttccctggtgtggggacgcattgtgccagtctcagaggcctgcatcttcacatggcccctgcccctgtgttctgcatgtctttttctgtctctgaaaggactctttcattgagcttctttgactctaatccaacatgatgtcacctaaattcttaccttaaggacgtctacagggacccccgcccgaattc

SEQ ID NO: 120112 - DNA, 6306 bp, Homo sapiens
  misc_feature (1)...(6306): n = a,t,c or g
gcgggatcgcgggcgccggctgagccagcggctcttgggaggctgcgtccgcgcgccggcggggcgaggcggccgggccctgcgcgtcaggcctgagacctgggaggaagctggagaaaagatgccctctgaatctttgtgtttggctgcccaggctcgcctcgactccaaatggttgaaaacagatatacagagtcattttttacaggtcagaactgtagaaataatgagaaagtgacacttgtacgcatagctgatttggagaaccataataacgatggaggcttctggactgtgattgacgggaaagtgtatgatataaaggacttccagacacagtcgttaacagaaaatagtattcttgctcagtttgcaggggaagacccagtggtagctttggaagctgctttgcagtttgaagacacccgggaatccatgcacgcattttgtgttggccagtatttggagcctgaccaagaaggcgtcaccataccagatctggggagtctctcctcacctctgatagacacagagaggaatctgggcctgcttctcggattacacgcttcctatttagcaatgagcacaccgctgtctcctgtcgagattgaatgtgccaaatgggttcagtcatccatcttctctggagggctgcagaccagccagatccactacaggtacaacgaggagaaagacgaggaccactgcagctccccaggggggacacctgccagcaaatctcgactctgctcccacagacgggccctgggggaccattcccaggcatttctgcaagccattgcagacaacaacattcaggatcacaacgtgaaggactttttgtgtcaaatagaaaggtactgtaggcagtgccatttgaccacaccgatcatgtttccccccgagcatcccgtggaagaggtcggtcgcttgctgttatgttgcctcttaaaacaggaagatttaggtcatgtggcattatctttagttcatgcaggtgcacttgatattgagcaagtaaagcacagaacgttgcctaagtcagtggtggatgtttgtagagttgtctaccaagcaaaatgttcgctcattaagactcatcaagaacagggccgttcttacaaggaggtctgcgctcctgtcatcaaacgtttgagattcctcttgaatgaattgagacctgctgtttgtaatgacctctctataatgtctaagtttaaattgttaagttctttgccccattggaggaggatagctcagaagataattcgagaaccaaggaaaaagagagttcctaagaagccagaatctacggatgatgaagaaaaaattggaaacgaagagagtgatttagaagaagcttgcattttgcctcatagtccaataaatgtggacaagagacccattgcaattaaatcacccaaggacaaatggcagccgctgttgagtactgttacaggtgttcacaaatacaagtggttgaagcagaatgtgcagggtctttatccgcagtctccactcctcagtacaattgctgaatttgcccttaaagaagagccagtggatgtggaaaagagaaagtgcctactaaaacagttggagagagcagaggttcgcctggaagggatagatacaattttaaaattgtatctggtgagcaagaatttcttacttccatctgtgccgtatgcgatgttttgtggatggcaaagacttattcctgagggaatcgatataggggaacctcttactgattgtttaaaggatgttgatttgatcccgccttttaatcggatgctgctggaagtcacctttggcaagctgtacgcttgggctgttcagaacattcgaaatgttttggtggatgccagtgccaaatttaaagagcttggtatccagccggttcccctgcaaaccatcaccaatgagaacccatcgggaccgagcttggggaccatcccgcaagcccacttcctcctggtgatgctcagcatgctcaccctgcagcacagcgcaaacaaccttgacctcctgctcaattccggcacgctggccctcgctcagacggcactgcgcctgattggccccagttgtgacagcgttgaggaagatatgaatgcttctgctcaaggtgcttctgccacagttttggaagaaacaaggaaggaaacggctcctgtgcagctccctgtttcagggccagaactggctgccatgatgaagattggaacaagggtcatgagaggtgtggactggaaatggggcgatcaggataggcctcctccaggcctaggccgagtgattggtgagctgggagaggacgggtggataagagtccagtgggacacaggcagcaccaactcctacaggatggggaaagaaggaaattacgacctcaagctggcagagctgccagcccctgcacagccctcagcagaggattcggacacagaggacgactctgaagccgaacaaactgaaaggaacattcaccccactgcaatgatgtttaccagcactattaacttactgcagactctttgtctgtctgctggagttcatgctcacatcatgcagagtgaagccaccaagactttatgcggactgctgcaaatgctggtgtacagggagcaacaccggagctggtgcacgctggggtttgtgcagagactcgctctcacgctgcaggtgtgcggcaccctcagctccctgcagtggatcacgctgctcatggaggtcgtggatgggcacgcacccttcactgccacctcgctgcagaggcagatcttagctgtgcatttgttgcaagcagtccttccgtcatgggacaagaccgaaagggcgagggacatgaaatgcctcatggagaagctgtttgacttcttggggagcttgctcactatgtgctcctctgacgtgccgttactcagaggtgggtggccgtctcccttccctgtaccctggtgaagagcggtgcagtgccgtcactcagaggtgggtggccgtctcccttccctgtgtcctggtgaagagccgtgtagtgccatcactcagaggtgggtggccgtctcccttccctgtaccctggtgaagagcggtgcagtgccgtcactcagaggtgggtggccgtctcccttccctgtgtcctggtgaagagccgtgtagtggccccactcagaggtgggtggccgtctcccttccctgtgtcctggtgaagagcggcgcagtgtcgtcactcagagatgagtgaccatctcccttccctgtgaccctggtgaagagtggtgcagcagcttctcccctggtttcctcctcagagtccacgctgaggcggcgcagggtgtgcccgcaggcctcgctgactgccacccacagcagcacactggcggaggaggtggtggcactgctgcacacgctgcactccctgactcagtggaatgggctcatcaacaagtacatcaactccccatgccgctccatcacccacagctttgcgggaaggccttccaaaggggcccagttagaggactacttccctgattccgagaaccctgaagtggggggcctcatggcggtcctggctgtggttggaggcatcgatggtcgcctgtgcctgggcggccaagttgtgcacgatgactttggagaagtcaccatgactcgcatcaccctgaagggcaaaatcaccgtgcagttctctgacatgcggacgtgtcacgtttgcccattgaatcagctgaaaccactccctgccgtggcctttaatgtgaacaacctgcccttcacagagcccatgctgtctgtctgggctcagttggtgaacctcgctggaagcaagttagaaaagcacaaaataaagaaatcgactaaacaggcctttgcaggacaagtggacctggacctgctgcggtggcagcagttggagctatncatcctgaaagcaggtcggggggtggtcttcccaccaggataaactgcgncagatcctgtctcagccagctgttcaggagactggaactgttcacacagatgatggagcagtggtatcacctgaccttggggacatgtctcctgaagggccgcagccccccatgatcctcttgcagcagctgctggcctcggccacccagccgtctcctgtgaaggccatatttgataaacaggaacttgagactgctgcactggccgttgtggagtccactcacccttcgagcccaggatttgaagactgcagctccagtgaggccaccacgcctgtcaacgtgcagcacatccgccctgccagagtgaagaggcgcaagcagtcgcccgttcccgctctgccgatcgtggtgcagctcatggagatgggatttcccagaaggaacatcgagtttgccctgaagtctctcactggtgcttccgggaatgcgtccggcttgcctggtgtggaagccttggtcgggtggctgctggaccactccgacatacaggtcacggagctctcagatgcagacacggtgtccgacgagtattctgacgaggaggtggtggaggacatggatgatgccgcctactccatgtctactggtgctgttgtgacggagagccagacgtacaaaaaccgagctggtttcttgggtaatgatgattatgctgtatatgtgagagagaatattcaggtgggaatgatggttagatgctgccgaacatacgaagaagtgtgcgaaggtgatgtgatgttggcaaagtcatcaagctggacagagatggattgcatgatctcaatgtgcagtgtgactggcagcagaaagggggcatctactggtttaggtacattcatgtggaacttataggctatcctccaccaagaagttcttctcacatcaagattggtgataaagtgcgggtcaaagcctctgtcactacaccaaaatacaaatggggatctgtgactcatcagagtgtgggggttgtgaaaggtgtgatggatgtcagatgtttcctatcaatggatccagattcaaatgcagaaactgtgatgactttgatttttgtgaaacgtgtttcaagaccaaaaaacacaataccaggcatacatttggcagaataaatgaaccaggcttcagcagaagaaacacttcctataaatctcgcccaaacaggaaagcaaacctgaaaatacactatcctccagctatcagaattatattgagatctactcacatttatgatgatgttcagagattctcattgggaaggaaaaggcacacgctgcggcggtcttgcatgactctgttgttgtggaaattcaatttgttcattgtgttttgggctctctgggtggtcagggctgggctctgggtccttggcaattcctcaggttcccagcactccaaagccaagctcacctcctcatcacacaccctgcaggagaagcattagggtgtccgactacgtgggtttcatagctgtggaaaagccaaaggggagactcctgaagaaaggcggtgaagactgtgaagagcgggtcaggaagatgagcacagcactgctactcctgtgggcacagggacagcatgtctccagccagcgccaccttgtttaatacatgggaactcactgaaattcattctgtattttgcccgcaaagttttaaagatttcatccacagtcaggaattaaacttataccaatgagagcctcacacattcaaggatgtactaagcactacaggcctcacagaaacagagatcccatcttggagttttcagtaccacatgggagataaagggttttgaacatgaaatgacaaaaacaacagcaagaagaaaattcttgtcctttttcattactantagactcaaataaatgtcttggctcttacattacattcattcttcaaccattgtggtctggcttccacttccttcacttcaccaacatggctctgccaaaggaagcccgtggatctctaggccatcactttaattggatctctctacaacatttatcctggttggttaagccctcccttacaacattcttctctctttgttttaatagctccatctctcctgcttctttaacttgataatgcatacttgatttttctatttgttatttcataaaccaattaatacacagataaaatggctgtatatcaaaccatgtttgtatagaaaaaatggattttggatgcctctcatatgtaattagttctattaaacatattaattgtattgtttaatttgtcaggtttttgacagaattttgtttacaagtaataaaaattttatctccaattttccaaaaaaaaaaaaaaaa

SEQ ID NO: 120113 - DNA, 2610 bp, Homo sapiens; identical to SEQ ID NO: 118447

SEQ ID NO: 120114 - DNA, 7297 bp, Homo sapiens
atggttaaagatggagaaattgtatacactggaacagaatcaacccagaacggagagctccctcctagaaaagatgatagtgtcgaaccaagtggaacaaagaaagaagatctgaatgacaaagagaaaaaagatgaagaagaaactcctgcacctatatatagggccaagtcaattctggacagctgggtatggggcaagcaaccagatgtgaatgaactgaaggagtgtctttctgtgctggttaaagagcagcaggccctggccgtccagtcagccaccaccaccctctcagccctgcgactcaagcagaggctggtgatcttggagcgctatttcattgccttgaatagaaccgtttttcaggagaatgtcaaagttaagtggaaaagcagcggtatttctctgcctcctgtggacaaaaaaagttcccggcctgcgggcaaaggtgtggaggggctcgccagagtgggatcccgagcggcgctgtcttttgcctttgccttcctgcgcagggcctggcgatcaggcgaggatgcggacctctgcagtgagctgttgcaggagtccctggacgccctgcgagcacttcccgaggcctcgctctttgacgagagcaccgtgtcctctgtgtggctggaggtggtggagagagcgaccaggttcctcaggtccgtcgtgacgggggatgttcacggaacgccagccaccaaagggccaggaagcatccccctgcaggaccagcacttggccctggccatcctgctggagctggctgtgcagagaggcacgctgagccaaatgttgtctgccatcctgttgttgcttcagctgtgggacagcggggcacaggagactgacaatgagcgttccgcccagggcaccagcgccccacttttgcccttgctgcaaaggttccagagcatcatttgcaggaaggatgcaccccactccgagggcgacatgcaccttttgtctggccctctgagccccaatgagagtttcctgaggtacctcacccttccacaagacaacgagcttgccattgatctgcgacaaacggcggttgttgtcatggcccatttagaccgtctggctacgccctgtatgcctccgctgtgtagctctccgacatctcataagggatcattgcaagaggtcataggttgggggttaataggatggaaatactatgccaatgtgattggtccaatccagtgcgaaggcctggccaacctgggagtcacacagattgcctgtgcagagaagcgtttcctgattctgtcacgcaatggccgcgtgtacacacaggcctataatagtgacacgctggccccacagctggtccaaggccttgcctccagaaacattgtaaaaattgctgcccattctgatggtcaccactacctagccttggctgctactggagaggtgtactcctggggctgtggggacggcggacggctgggccatggggacactgtgtatgtatcgcttattcctggtggagttgagggcatcattgccgacagcatccgctgggaagatcccaaactgggagaaaagcagagtaatgcgtatcgtgtggtacatgtatgccaagctcagaacagcccaaccctgacagtgttgcctttggaggagcctaaggtgatctccgccttctctggaaagcaggccgggaagcacgtggtgcacatcgcttgcgggagcacttacagtgcggccatcactgccgagggggagctgtacacctggggccgcgggaactacggccggctgggccatggctccagtgaggacgaggccattccgatgctggtagccgggcttaaaggactgaaggtcatcgatgtggcgtgtgggagtggggatgctcaaaccctggctgtcactgagaacgggcaagtgtggtcttggggagatggtgactatgggaaattgggcagaggtggtagtgatggctgcaaaaccccaaagctgattgaaaagcttcaagacttggatgtggtcaaagtccgctgtggaagtcagttttccattgctttgacgaaagatggccaagtttattcatggggaaaaggtgacaaccagagacttggacatggaacagaggaacatgttcgttatccaaaactcttagaaggcttgcaagggaagaaggtgattgatgtggctgcaggctccacccactgcctggctctgactgaggacagcgaggtccacagctgggggagcaacgaccagtgccagcactttgacaccttgcgcgtgaccaagccagaacctgcagcattgccaggactggacaccaaacacatagtgggaattgcctgtgggcctgcccagagctttgcttggtcatcatgttctgagtggtccattggcctccgtgtcccttttgtggtggacatctgctcaatgacttttgagcagctggatctcctgcttcggcaggtgagtgaggggatggatggctccgcggactggcccccgccccaggagaaagagtgtgtggccgtggcaacgctgaatcttctacgacttcagttgcatgctgccattagtcaccaggttgacccggaattccttggtttaggtctgggcagcatcctcctgaacagcctgaagcagacggtggtgaccctggccagcagtgcgggcgtgctgagcaccgtgcagtcggccgcccaggccgtgctgcagagtggctggtccgtgctgctgcccaccgcggaggagcgggcccgggcactctctgctctcctgccctgcgcagtttcaggcaatgaagtgaacataagtccaggtcgtcgattcatgattgatcttctggtgggcagcttgatggctgatggagggttggagtcagccttacacgcagccattactgcagagatccaggatattgaagccaaaaaagaagcacagaaggaaaaagaaattgatgaacaggaagcgaatgcctcaacatttcatagaagcaggactccactggataaagaccttattaatacggggatctgtgagtcttctggcaaacagtgtttgcctctggttcagctcatacaacagcttcttagaaacattgcttctcagactgtagccagattgaaagatgttgcccgtcggatttcatcatgtctggactttgagcaacacagtcgtgaaagatctgcttcattggatttgttactgcgttttcaacgtttgcttattagtaaactttatccaggagaaagtattggtcagacctcagatatttctagtccagagctaatgggtgttggttccttgctgaagaagtacacagccctcctgtgcacgcacattggagatatactgcctgtggccgccagcattgcttctaccagctggcggcacttcgcggaggtggcttacattgtggaaggggactttactggtcagaactgtagaaataatgaggaagtgacacttatacgcaaagctgatttggagaaccataataaagatggaggcttctggactgtgattgacgggaaggtgtatgatataaaggacttccagacacagtcgttaacaggaaatagtattcttgctcagtttgcaggggaagacccagtggtagctttggaagctgctttgcagtttgaagacacccgggaatccatgcacgcgttttgtgttggccagtatttggagcctgaccaagaaatcgtcaccataccagatctggggagtctctcttcacctctgatagacacagagaggaatctgggcctgcttctcggattacacgcttcgtatttggcaatgagcacaccgctgtctcctgtcgagattgaatgtgccaaatggcttcagtcatccatcttctctggaggcctgcagaccagccagatccactacagctacaacgaggagaaagacgaggaccactgcagctccccagggggcacacctgccagcaaatctcgactctgctcccacagacgggccctgggggaccattcccaggcatttctgcaagccattgcagacaacaacattcaggatcacaacgtgaagactcatcaagaacagggccgttcttacaaggaggtctgcgctcctgtcatcgaacgtttgagattcctctttaatgaattgagacctgctgtttgtaatgacctctctataatgtctaagtttaaattgttaagttctttgccccgttggaggaggatagctcaaaagataattcgagaacgaaggaaaaagagagttcctaagaagccagaatctacggatgatgaagaaaaaattggaaacgaagagagtgatttagaagaagcttgcattttgcctcatagtccaataaatgtggacaagagacccattgcaattaaatcacccaaggacaaatggcagccgctgttgagtactgttacaggtgttcacaaatacaagtggttgaagcagaatgtgcagggtctttatccgcagtctccactcctcagtacaattgctgaatttgcccttaaagaagagccagtggatgtggaaaaaatgagaaagtgcctactaaaacaggatgttgatttgatcccgccttttaatcggatgctgctggaagtcacctttggcaagctgtacgcttgggctgtacagaacattcgaaatgttttgatggatgccagtgccaaatttaaagagcttggtatccagccggttcccctgcaaaccatcaccaatgagaacccgtcaggaccgagcctggggaccatcccgcaagcccgcttcctcctggtgatgctcagcatgctcaccctgcagcacggcgcaaacaacctcgaccttctgctcaattccggcatgctggccctcacgcagacggcactgcgcctgattggccccagttgtgacaacgttgaggaagatatgaatgcttctgctcaaggtgcttctgccacagttttggaagaaacaaggaaggaaacggctcctgtgcagctccctgtttcagggccagaactggctgccatgatgaagattggaacaagggtcatgagaggtgtggactggaaatggggcgatcaggatgggcctcctccaggcctaggccgcgtgattggtgagctgggagaggacggatggataagagtccagtgggacacaggcagcaccaactcctacaggatggggaaagaaggaaaatacgacctcaagctggcagagctgccggctgctgcacagccctcagcagaggattcggacacagaggatgactctgcttctccaaacaggctggtgtacagggagcaacaccggagctggtgcacgctggggtttgtgcggagcatcgctctcacgccgcaggtatgcggcgccctcagctccccgcagtggatcacgctgctcatgaaggtcgtggaagggcacgcacccttcactgccacctcgctgcagaggcagatcttagctgtgcatttgttgcaagcagtccttccatcatgggacaagaccgaaagggcgagggacatgaaatgcctcgtggagaagctgtttgacttcttgggaagcttgctcactacctgctcctctgacgtgccattactcagagagtccacgctgaggcggcgcagggtgcgcccgcaggcctcgctgactgccacccacagcagcacactggcggaggaggtggtggcactgctgcgcacgctgcactccctgactcagtggaatgggctcatcaacaagtacatcaactcccagctccgctccatcacccacagctttgtgggaaggccttccgaaggggcccagttagaggactacttccccgactccgagaaccctgaagtggggggcctcatggcagtcctggctgtgattggaggcatcgatggtcgcctgcgcctgggcggtcaagttatgcacgatgagtttggagaaggcactgtgactcgcatcaccccaaagggcaaaatcaccgtgcagttctctgacatgcggacgtgtcgcgtttgcccattgaatcagctgaaaccactccctgccgtggcctttaatgtgaacaacctgcccttcacagagcccatgctgtctgtctgggctcagttggtgaacctcgctggaagcaagttagaaaagcacaaaataaagaaatcgactaaacaggcctttgcaggacaagtggacctggacctgctgcggtgccagcagttgaagctatacatcctgaaagcaggtcgggcgctgctctcccaccaggataaactgcggcagatcctgtctcagccagctgttcaggagactggaactgttcacacagggccgcagccccccatgatcctcttgcagcagctgctggcctcggccacccagccgtctcctgtgaaggccatatttgataaacaggaacttgaggctgctgcactggccgtttgccagtgcttggctgtggagtccactcacccttcgagcccaggatttgaagactgcagctccagtgaggccaccacgcctgtcgccgtgcagcacatccgccctgccagagtgaagaggcgcaagcagtcgcccgttcccgctctgccgatcgtggtgcagctcatggagatgggattttccagaaggaacatcgagtttgccctgaagtctctcactggtgcttccgggaatgcatccagcttgcctggtgtggaagccttggtcgggtggctgctggaccactccgacatacaggtcacggagctctcagatgcagacacggtgtccgacgagtattctgacgaggaggtggtggaggacgtggatgatgccgcctactccatgtctactggtgctgttgtgacggagagccagacgtacaaaaaacgagctgatttcttgagtaatgatgattatgctgtatatgtgagagagaatattcagcaaatatttgagtatgtcctatatgccaaacatcagtggacagaggcccctgccctcagggagcctgccttctggtgctggaagacatacctgaccagtgagctcatggtgggaatgatggttagatgctgccgagcgtatgaagaagtgtgcgaaggtgatgttggcaaagtcatcaagctggacagagatggattgcatgatctcaatgtgcagtgtgactggcagcagaaagggggcacctactgggttaggtacattcatgtggaacttataggctatcctccaccaagttcttcttctcacatcaagattggtgataaagtgcgggtcaaagcctctgtcaccacaccaaaatacaaatggggatctgtgactcatcagagtgtgggggttgtgaaag

SEQ ID NO: 120115 - DNA, 478 bp, Homo sapiens
gagctccgggcctgtttgcctgctgaagtagagtcttagggtgaccccagggggacgtaatgtttccgagaagaaggacagaaagaagactgggagacaccggaactcgaaagaaaatcgcatacagaaaggctgtacctggaggaaggaagtgcggagccagcctgagttgggagaagagctccagagagtgtgaatgacagaggtggtgccatccagcgcgctcagcgaggtcagcctgcgcctcctctgccacgatgacatagacactgtgaagcacctgtgtggcgactggttccccatcgagtacccagactcatggtatcgtgatatcacatccaacaagaagttcttttcccttgctgcaacctacagaggtgccattgtgggaatgatagtagctgaaattaagaacaggaccaaaatacataaagaggatggagatattctagcatccaacttctctgttgacacacaa

SEQ ID NO: 120116 - DNA, 437 bp, Homo sapiens
ttcctaagaagccagaatctacggctgatgaagaaaaaattggaaacgaagagagtgatttagaagaagcctgcattttgcctcatagtccaataaatgtggacaagagacccattgcaattaaatcacccaagaccatcaccagtgagaacccattgggaccgagcctggggagcatcccgcaagcccgcttcctcctgatgatgctcagcatgctcaccctgcagcacagcgcaaacaacctcgacctcctgctcaattccggcacgctggccctcactcagacggcactgcgcctgattgttcctaagaagccagaatctacggctgatgaagaaaaaattggaaacgaagagagtgatttagaagaagcctgcattttgcctcatagtccaataaatgtggacaagagacccattgcaattaaatcacccaag

SEQ ID NO: 120117 - DNA, 1158 bp, Homo sapiens
  misc_feature (1)...(1158): n = a,t,c or g
atgacagagctgcccactctgtggaaaccactgaaaaatagtccgatgtttagagtaattgcccgtgctttctgtgttacttttattcttgtatccacgcaccaagaaatgttaaccatcaccagtgagaacccattgggaccgagcctggggagcatcccgcaagcccgcttcctcctgatgatgctcagcatgctcaccttgcagcacagcgcaaacaacctcgacctcctgctcaattccggcacgctggccctcactcagacggcactgcgcctgattggtagnacgccagtagagctgccagccgagcttgctgctcccgccttcagagccgcggcggcggggacaaaaatcctcggcggcgagggcaaaaagtcgcggtggcaaaaagcggcggcgaccggggcaaaaagtcgcggtagcaaaaagccgcggcggcggggacaaaaagccgctgcggcgggggcaaaaggcggcggcaacagcggcaaaaagccgcgggcgcaaaaagcggcggcaacagcggcgtcggcaaaaagccgcggcgaggaaaaagtcgctgcggcgggggggcaaaaagctgtgacagcggggggcaaaaagccgcggcgggtaaaacgccgtggcggaagcaataaagtgctgactaactccacattacttgaagagttcagagtcagggaccgcagaggaaaggtaaagacaggtggcaggttgggtgtgctcaggcgggggctctcactggaggaggaggcaatggaccgagaccgcagggcaattccaccaggcctcggctcactcgctcagatgcaggctcagcaccaaccacatgagactcactggtggtgcagctgccccgacctggccaccacattctcaaagaggggcaggtgcacacgtgagaggaaaatgcagaaagtcagttccagacagatcgccggatcccacagccactccatgcacctgcatcggaaggtgcctgggagcttatttaaatggcaagttccgaggacagagtgccagctgcagtccacacctctcatgaccctcgttccaatcttcatcgtggcagccagttctggccctgaaacagggagatgcacaggagccgtttccttccttgttgcttccaaaactgtggcagaaacaccttga

SEQ ID NO: 120118 - DNA, 14567 bp, Homo sapiens
gaggcgaggcggccgggccctgcgcgtcaggcctgagacctgggaggaagctggagaaaagatgccctctgaatctttctgtttggctgcccaggctcgcctcgactccaaatggttgaaaacagatatacagcttgcattcacaagagatgggctctgtggtctgtggaatgaaatggttaaagatggagaaattgtatacactggaacagaatcaacccagaacggagagctccctcctagaaaagatgatagtgtcgaaccaagtggaacaaagaaagaagatctgaatgacaaagagaaaaaagatgaagaagaaactcctgcacctatatatagggccaagtcaattctggacagctgggtatggggcaagcaaccagatgtgaatgaactgaaggagtgtctttctgtgctggttaaagagcagcaggccctggccgtccagtcagccaccaccaccctctcagccctgcgactcaagcagaggctggtgatcttggagcgctatttcattgccttgaatagaaccgtttttcaggagaatgtcaaagttaagtggaaaagcagcggtatttctctgcctcctgtggacaaaaaaagttcccggcctgcgggcaaaggtgtggaggggctcgccagagtgggatcccgagcggcgctgtcttttgcctttgccttcctgcgcagggcctggcgatcaggcgaggatgcggacctctgcagtgagctgttgcaggagtccctggacgccctgcgagcacttcccgaggcctcgctctttgacgagagcaccgtgtcctctgtgtggctggaggtggtggagagagcgaccaggttcctcaggtccgtcgtgacgggggatgttcacggaacgccagccaccaaagggccaggaagcatccccctgcaggaccagcacttggccctggccatcctgctggagctggctgtgcagagaggcacgctgagccaaatgttgtctgccatcctgttgttgcttcagctgtgggacagcggggcacaggagactgacaatgagcgttccgcccagggcaccagcgccccacttttgcccttgctgcaaaggttccagagcatcatttgcaggaaggatgcaccccactccgagggcgacatgcaccttttgtctggccctctgagccccaatgagagtttcctgaggtacctcacccttccacaagacaacgagcttgccattgatctgcgacaaacggcggttgttgtcatggcccatttagaccgtctggctacgccctgtatgcctccgctgtgtagctctccgacatctcataagggatcattgcaagaggtcataggttgggggttaataggatggaaatactatgccaatgtgattggtccaatccagtgcgaaggcctggccaacctgggagtcacacagattgcctgtgcagagaagcgtttcctgattctgtcacgcaatggccgcgtgtacacacaggcctataatagtgacacgctggccccacagctggtccaaggccttgcctccagaaacattgtaaaaattgctgcccattctgatggtcaccactacctagccttggctgctactggagaggtgtactcctggggctgtggggacggcggacggctgggccatggggacactgtgcctttggaggagcctaaggtgatctccgccttctctggaaagcaggccgggaagcacgtggtgcacatcgcttgcgggagcacttacagtgcggccatcactgccgagggggagctgtacacctggggccgcgggaactacggccggctgggccatggctccagtgaggacgaggccattccgatgctggtagccgggcttaaaggactgaaggtcatcgatgtggcgtgtgggagtggggatgctcaaaccctggctgtcactgagaacgggcaagtgtggtcttggggagatggtgactatgggaaattgggcagaggtggtagtgatggctgcaaaaccccaaagctgattgaaaagcttcaagacttggatgtggtcaaagtccgctgtggaagtcagttttccattgctttgacgaaagatggccaagtttattcatggggaaaaggtgacaaccagagacttggacatggaacagaggaacatgttcgttatccaaaactcttagaaggcttgcaagggaagaaggtgattgatgtggctgcaggctccacccactgcctggctctgactgaggacagcgaggtccacagctgggggagcaacgaccagtgccagcactttgacaccttgcgcgtgaccaagccagaacctgcagcattgccaggactggacaccaaacacatagtgggaattgcctgtgggcctgcccagagctttgcttggtcatcatgttctgagtggtccattggcctccgtgtcccttttgtggtggacatctgctcaatgacttttgagcagctagatctcctgcttcggcaggtgagtgaggggatggatggctccgcggactggcccccgccccaggagaaagagtgtgtggccgtggcaacgctgaatcttctacgacttcagttgcatgctgccattagtcaccaggttgacccggaattccttggtttaggtctgggcagcatcctcctgaacagcctgaagcagacggtggtgaccctggccagcagtgcgggcgtgctgagcaccgtgcagtcggccgcccaggccgtgctgcagagtggctggtccgtgctgctgcccaccgcggaggagcgggcccgggcactctctgctctcctgccctgcgcagtttcaggcaatgaagtgaacataagtccaggtcgtcgattcatgattgatcttctggtgggcagcttgatggctgatggagggttggagtcagccttacacgcagccattactgcagagatccaggatattgaagccaaaaaagaagcacagaaggaaaaagaaattgatgaacaggaagcgaatgcctcaacatttcatagaagcaggactccactggataaagaccttattaatacggggatctgtgagtcttctggcaaacagtgtttgcctctggttcagctcatacaacagcttcttagaaacatcgcttctcagactgtagccagattgaaagatgttgcccgtcggatttcatcatgtctggactttgagcaacacagtcgtgaaagatctgcttcattggattggttactgcgtttccaacgtttgcttattagtaaactttatccaggagaaagtattggtcagacctcagatatttctagtccagagctaatgggtgttggttccttgctgaagaagtacacagccctcctgtgcacgcacattggagatatactgcctgtggccgccagcattgcttctaccagctggcggcacttcgcggaggtggcttacattgtggaaggggactttactggtgttctccttccagaactagtagtttctatagtgcttctgctcagtaaaaatgctgatctcatgcaagaggctggagctgtacctctgctgggtggcctgttggaacatctggatcggttcaaccatctggcaccaggaaaggaacgggatgatcatgaagagttagcctggcctggcataatggagtcattttttacaggtcagaactgtagaaataatgaggaagtgacacttatacgcaaagctgatttggagaaccataataaagatggaggcttctggactgtgattgacgggaaggtgtatgatataaaggacttccagacacagtcgttaacaggaaatagtattcttgctcagtttgcaggggaagacccagtggtagctttggaagctgctttgcagtttgaagacacccgggaatccatgcacgcgttttgtgttggccagtatttggagcctgaccaagaaatcgtcaccataccagatctggggagtctctcttcacctctgatagacacagagaggaatctgggcctgcttctcggattacacgcttcgtatttggcaatgagcacaccgctgtctcctgtcgagattgaatgtgccaaatggcttcagtcatccatcttctctggaggcctgcagaccagccagatccactacaggtacaacgaggagaaagacgaggaccactgcagctccccagggggcacacctgccagcaaatctcgactctgctcccacagacgggccctgggggaccattcccaggcatttctgcaagccattgcagacaacaacattcaggatcacaacgtgaaggactttttgtgtcaaatagaaaggtactgtaggcagtgccatttgaccacaccgatcatgtttccccccgagcatcccgtggaagaggtcggtcgcttgttgttatgttgcctcttaaaacatgaagatttaggtcatgtggcattatctttagttcatgcaggtgcacttggtattgagcaagtaaagcacagaacgttgcctaagtcagtggtggatgtttgtagagttgtctaccaagcaaaatgttcgctcattaagactcatcaagaacagggccgttcttacaaggaggtctgcgctcctgtcatcgaacgtttgagattcctctttaatgaattgagacctgctgtttgtaatgacctctctataatgtctaagtttaaattgttaagttctttgccccgttggaggaggatagctcaaaagataattcgagaacgaaggaaaaagagagttcctaagaagccagaatctatggatgatgaagaaaaaattggaaacgaagagagtgatttagaagaagcttgcattttgcctcatagtccaataaatgtggacaagagacccattgcaattaaatcacccaaggacaaatggcagccgctgttgagtactgttacaggtgttcacaaatacaagtggttgaagcagaatgtgcagggtctttatccgcagtctccactcctcagtacaattgctgaatttgcccttaaagaagagccagtggatgtggaaaaaatgagaaagtgcctactaaaacagttggagagagcagaggttcgcctggaagggatagatacaattttaaaactggcgagcaagaatttcttacttccatctgtgcagtatgcgatgttttgtggatggcaaagacttattcctgagggaatcgatataggggaacctcttactgattgtttaaaggatgttgatttgatcccgccttttaatcggatgctgctggaagtcacctttggcaagctgtacgcttgggctgtacagaacattcgaaatgttttgatggatgccagtgccacatttaaagagcttggtatccaagccggttcccctgcaaaccatcaccaatgagaacccgtcaggaccgagcctggggaccatcccgcaagcccgcttcctcctggtgatgctcagcatgctcaccctgcagcacggcgcaaacaacctcgaccttctgctcaattccggcatgctggccctcacgcagacggcactgcgcctgattggccccagttgtgacaacgttgaggaagatatgaatgcttctgctcaaggtgcttctgccacagttttggaagaaacaaggaaggaaacggctcctgtgcagctccctgtttcagggccagaactggctgccatgatgaagattggaacaagggtcatgagaggtgtggactggaaatggggcgatcaggatgggcctcctccaggcctaggccgcgtgattggtgagctgggagaggacggatggataagagtccagtgggacacaggcagcaccaactcctacaggatggggaaagaaggaaaatacgacctcaagctggcagagctgccggctgctgcacagccctcagcagaggattcggacacagaggatgactctgaagccgaacaaactgaaaggaacattcaccccactgcaatgatgtttaccagcactattaacttactgcagactctttgtctgtctgctggagttcatgctgagatcatgcagagcgaagccaccaagactttatgcggactgctgcgaatgttagtggaaagcggaacgacggacaagacatcttctccaaacaggctggtgtacagggagcaacaccggagctggtgcacgctggggtttgtgcggagcatcgctctcacgccgcaggtatgcggcgccctcagctccccgcagtggatcacgctgctcatgaaggtcgtggaagggcacgcacccttcactgccacctcgctgcagaggcagatcttagctgtgcatttgttgcaagcagtccttccatcatgggacaagaccgaaagggcgagggacatgaaatgcctcgtggagaagctgtttgacttcttgggaagcttgctcactacctgctcctctgacgtgccattactcagagagtccacgctgaggcggcgcagggtgcgcccgcaggcctcgctgactgccacccacagcagcacactggcggaggaggtggtggcactgctgcgcacgctgcactccctgactcagtggaatgggctcatcaacaagtacatcaactcccagctccgctccatcacccacagctttgtgggaaggccttccgaaggggcccagttagaggactacttccccgactccgagaaccctgaagtggggggcctcatggcagtcctggctgtgattggaggcatcgatggtcgcctgcgcctgggcggtcaagttatgcacgatgagtttggagaaggcactgtgactcgcatcaccccaaagggcaaaatcaccgtgcagttctctgacatgcggacgtgtcgcgtttgcccattgaatcagctgaaaccactccctgccgtggcctttaatgtgaacaacctgcccttcacagagcccatgctgtctgtctgggctcagttggtgaacctcgctggaagcaagttagaaaagcacaaaataaagaaatcgactaaacaggcctttgcaggacaagtggacctggacctgctgcggtgccagcagttgaagctatacatcctgaaagcaggtcgggcgctgctctcccaccaggataaactgcggcagatcctgtctcagccagctgttcaggagactggaactgttcacacagatgatggagcagtggtatcacctgaccttggggacatgtctcctgaagggccgcagccccccatgatcctcttgcagcagctgctggcctcggccacccagccgtctcctgtgaaggccatatttgataaacaggaacttgaggctgctgcactggccgtttgccagtgcttggctgtggagtccactcacccttcgagcccaggatttgaagactgcagctccagtgaggccaccacgcctgtcgccgtgcagcacatccaccctgccagagtgaagaggcgcaagcagtcgcccgttcccgctctgccgatcgtggtgcagctcatggagatgggattttccagaaggaacatcgagtttgccctgaagtctctcactggtgcttccgggaatgcatccagcttgcctggtgtggaagccttggtcgggtggctgctggaccactccgacatacaggtcacggagctctcagatgcagacacggtgtccgacgagtattctgacgaggaggtggtggaggacgtggatgatgccgcctactccatgtctactggtgctgttgtgacggagagccagacgtacaaaaaacgagctgatttcttgagtaatgatgattatgctgtatatgtgagagagaatattcaggtgggaatgatggttagatgctgccgagcgtatgaagaagtgtgcgaaggtgatgttggcaaagtcatcaagctggacagagatggattgcatgatctcaatgtgcagtgtgactggcagcagaaagggggcacctactgggttaggtacattcatgtggaacttataggctatcctccaccaagttcttcttctcacatcaagattggtgataaagtgcgggtcaaagcctctgtcaccacaccaaaatacaaatggggatctgtgactcatcagagtgtgggggttgtgaaagctttcagtgccaatggaaaagatatcattgtcgactttccccagcagtctcactggactgggttgctatcagaaatggagttggtacccagtattcatcctggggttacgtgtgatggatgtcagatgtttcctatcaatggatccagattcaaatgcagaaactgtgatgactttgatttttgtgaaacgtgtttcaagaccaaaaaacacaataccaggcatacatttggcagaataaatgaaccaggtcagtctgcggtattttgtggccgttctggaaaacagctgaagcgttgccacagcagccagccaggcatgctgctggacagctggtcccgcatggtgaagagcctgaatgtgtcgtcctccgtgaaccaggcatcccgtctcattgacggcagcgagccctgctggcagtcatcggggtcgcaaggaaagcactggattcgtttggagattttcccagatgttcttgttcatagattaaaaatgatcgtagatcctgctgacagtagctacatgccgtccctggttgtagtgtcaggtggaaattccctgaataaccttattgaactaaagacaatcaatattaacccttctgacaccacagtgccccttctgaatgactacacagagtatcacaggtatattgaaattgctataaagcagtgcaggagctcaggaatcgattgtaaaatccatggtctcatcctgctgggacggatccgtgcagaagaggaagatttggctgcagttcctttcttagcttcggataatgaagaggaggaggatgagaaaggcaacagcggaagcctcattagaaagaaggctgctgggctggaatcagcagctacgataagaaccaaggtgtttgtgtggggcctgaatgacaaggaccagctgggcgggctgaaaggctccaagataaaggttccttcgttctctgagacactgtcagctttgaatgtggtacaggtggctggtggatctaaaagtttgtttgcagtgactgtggaagggaaggtgtatgcctgtggagaagccacgaatggccggctggggctgggcatttccagcgggacggtgcccatcccacggcagatcacagctctcagcagctacgtggtcaagaaggtggctgttcactcaggtggccggcacgcgacggctttaactgtcgatggaaaagtgttttcgtggggcgaaggtgacgatggaaaacttggacacttcagcagaatgaactgtgacaaaccaaggctgatcgaggccctgaaaaccaagcgtatccgggatatcgcctgtgggagctcgcacagcgcagccctcacatccagcggagaactgtacacctggggcctcggcgagtacggccggctgggacatggggataatacgacacagctaaagcccaaaatggtgaaagtccttctcggtcacagagtaatccaggttgcatgtgggagtagagacgcgcagaccctggctctgaccgatgaaggtttggtattttcctggggtgatggtgactttggaaaactgggccggggcggaagtgaaggctgtaacattccccagaacattgagagactaaatggacagggggtgtgccagattgagtgtggagctcagttctccctggcgctcaccaagtctggagtggtgtggacatggggaaagggggattacttcagattgggccacggctctgacgtgcacgtgcggaaaccacaggtggtggaagggctgagagggaagaagatcgtgcatgtggctgtcggggccctgcactgcctggcggtcacggactcggggcaggtgtatgcttggggtgacaacgaccacggccagcagggcaatggcacgaccacggttaacaggaagcccacactcgtgcaaggcttagaaggccagaagatcacacgcgtggcttgtgggtcgtcccacagtgtggcgtggacaactgtggatgtggccacgccctctgtccacgagcccgtcctcttccagactgcaagagacccgttaggtgcttcctacttaggcgtgccctcagatgctgattcttctgctgccagtaataaaataagtggtgcaagtaattctaagccaaatcgcccttctcttgccaagattctcttgtcattggatggaaatctggccaaacagcaggccttatcgcatattcttacagcattgcaaatcatgtatgccagagatgctgttgtcggggccctgatgccggccgccatgatcgccccggtggagtgcccctcgttctcctcggcggccccttccgacgcatctgcgatggctagtcccatgaatggagaagaatgcatgctggctgttgatatcgaagacagactgagtccaaatccatggcaagaaaagagagagattgtttcctctgaggacgcagtgaccccctctgcagtgactccgtcggccccctcagcctccgctcggccttttatcccagtgacggatgacctgggagctgcaagcatcattgcagaaaccatgaccaaaaccaaagaggatgttgaaagccaaaataaagcagcaggtccggagcctcaggccttggatgagttcaccagtctgctgattgcggatgacactcgtgtggtggtagacctgctcaagctgtcagtgtgcagccgggccggggacaggggcagggatgtgctctccgcggtgctttccggcatggggaccgcctacccacaggtggcagatatgctgttggagctctgtgtcaccgagttggaggatgtggccacagactcgcagagcggccgcctctcttctcagcctgtggtggtggagagtagccacccttacaccgacgacacctccaccagtggcacagtgaagataccaggtgcagaaggactcagggtagaatttgaccggcagtgctccacagagaggcgccacgaccctctcacagtcatggacggcgtcaacaggatcgtctccgtgcggtcaggccgagagtggtccgactggtccagcgagctgcgcatcccaggggatgagttaaagtggaagttcatcagcgatgggtctgtgaatggctggggctggcgcttcaccgtctatcccatcatgccagctgctggccctaaagaactcctctctgaccgctgcgtcctctcctgtccatccatggacttggtgacgtgtctgttagacttccgactcaaccttgcctctaacagaagcatcgtccctcgccttgcggcctcgctggcagcttgtgcacagctgagtgccctagctgccagtcacagaatgtgggcccttcagagactgaggaagctgcttacaactgaatttgggcagtcaattaacataaataggctgcttggagaaaatgatggggaaacaagagctttgagttttacaggtagtgctcttgctgctttggtgaaaggtcttccagaagctttgcaaaggcagtttgaatatgaagatcctattgtgaggggtggcaaacagctgctccacagcccattctttaaggtactagtagctcttgcttgtgacctggagctggacactctgccttgctgtgccgagacgcacaagtgggcctggttccggaggtactgcatggcctcccgtgttgctgtggcccttgacaaaagaacaccgttgccccgtctgtttcttgatgaggtggctaagaaaattcgtgaattaatggcagacagcgaaaacatggatgttctgcatgagagccatgacatttttaaaagagagcaagacgaacaacttgtgcagtggatgaacaggcgaccagatgactggactctctctgctggtggcagtggaacaatttatggatggggacataatcacaggggccagctcgggggcattgaaggcgcaaaagtcaaagttcccactccctgtgaagcccttgcaactctcagacccgtgcagttaatcggaggggaacagaccctctttgctgtgacggctgatgggaagctgtatgccactgggtatggtgcaggtggcagactaggcattggagggacagagtcggtgtccaccccaacattgcttgaatccattcagcatgtgtttattaagaaagtagctgtgaactctggaggaaagcactgccttgccctgtcttcagaaggagaagtttactcttggggtgaggcagaagatgggaagttggggcatggcaacagaagtccgtgtgaccgccctcgtgtcatcgagtctctgagaggaattgaagtggtcgatgttgctgctggcggagcccacagcgcctgtgtcacagcagccggggacctctacacatggggcaaaggccgctacggccggctggggcacagcgacagtgaggaccagctgaagccgaagctggtggaggcgctgcagggccaccgtgtggttgacatcgcctgtggcagtggagatgcccagaccctctgcctcacagatgacgacactgtctggtcctggggggacggggactacggcaagctcggccggggaggcagcgatggctgtaaagtgcctatgaagattgattctcttactggtcttggagtagttaaagtggaatgcggatcccagttttctgttgcccttaccaaatctggagctgtttatacctggggcaaaggcgattatcacaggttgggccatggatcagatgaccatgttcgaaggcctcggcaggtccaagggttgcaggggaagaaagtcatcgccatcgccactggctccctgcactgtgtgtgctgcacagaggatggtgaggtttatacatggggcgacaatgatgagggacaactgggagacggaaccaccaatgccatccagaggcctcggttggtagctgcccttcagggtaagaaggtcaaccgtgtggcctgtggctcagcacataccctcgcctggtcgaccagcaagcccgccagtgctggcaaactccctgcacaggtccccatggagtacaatcacctgcaggagatccccatcattgcgctgaggaaccgtctgctgctgctgcaccacctctccgagctcttctgcccctgcatccccatgttcgacctggaaggctcgctcgacgaaactggactcgggccttctgttgggttcgacactctccgaggaattctgatatcccagggaaaggaggcggctttccggaaagtagtacaagcaactatggtacgcgatcgtcagcatggccccgtcgtggagctgaaccgcatccaggtcaaacgatcaaggagcaaaggcgggctggccggccccgacggcaccaagtctgtctttgggcagatgtgtgctaagatgagctcgtttggtcccgacagcctcctccttcctcaccgtgtctggaaagtcaagtttgtgggtgaatctgtggatgactgtgggggcggctacagcgagtccatagctgagatctgtgaggagctgcagaacggactcacgcccctgctgatcgtgacacccaacgggagggatgagtctggggccaaccgagactgctacctgctcagcccggccgccagagcacccgtgcacagcagcatgttccgcttcctgggtgtgttgctgggcattgccatccgaaccgggagtcccctgagcctcaaccttgccgagcctgtctggaagcagctggctgggatgagcctcaccatcgcggacctcagtgaggttgataaggattttattcctggactcatgtacatccgagacaatgaagccacctcagaggagtttgaagccatgagcctgcccttcacagtgccaagtgccagtggccaggacattcagttgagctccaagcacacacacatcaccctggacaaccgcgcggagtacgtgcggctggcgataaactatagactccatgaatttgatgagcaggtggctgctgttcgggaaggaatggcccgcgttgtgcctgttcccctcctctctctgttcaccggctacgaactggagacgatggtgtgtggcagccctgacatcccgctgcaccttctcaagtcggtggccacctataaaggcatcgagccttccgcatcgctgatccagtggttctgggaggtgatggagtccttctccaacacagagcgctctcttttccttcgcttcgtctggggccggacgaggctgcccaggaccatcgccgacttccggggccgagacttcgtcatccaggtgttggataaatacaaccctccagaccacttcctccctgagtcctacacctgtttcttcttgctgaagctgcccaggtattcctgcaagcaggtgctggaggagaagctcaagtacgccatccacttctgcaagtccatagacacagatgactacgctcgcatcgcacttacaggagagccagccgccgacgacagcagcgacgattcagataacgaggatgtcgactcctttgcttcggactctacacaagattatttaacaggacactaa

SEQ ID NO: 120119 - DNA, 687 bp, Homo sapiens
  misc_feature (1)...(687): n = a,t,c or g
ctgcggcccctgccggttacataactcgttgcgggctccgcgcggtcccacttcccggctcccttcgcctccaggatgcgctgagccctacaacacccccagcggccgccggctcccccacgaggtgtgaatgacagaggtggtgccatccagcgcgctcagcgaggtcagcctgcgcctcctctgccacgatgacatagacactgtgaagcacctgtgtggcgactggttccccatcgagtacccagactcatggtatcgtgatatcacatccaactagaagttcttttcccttgctgcaacctacagaggtgccattgtgggaatgatagtagctgaaattaagaacaggaccaaaatacataaagaggatgggagatattctagcagtccaacttctctgttgacacacaagtcgcgtacatcctaagtctggggcgtcgtgaaagagttcagggaaggcacggcataggttccctctttactttgaaagtttaaagggtcacatattcaaccaccgcccaggaccactgcaaagccatttacctgcatgtcctcaccaccaacaacacagcaataaacttctatgaaaacagagacttcaagcagcaccactatctcccctattactactccattcgagngtcctcanagatggcttcacctatgtcctctacatcaatggcg

SEQ ID NO: 120120 - DNA, 6330 bp, Homo sapiens
gaattcggcacgagcctcgggccgcgagaggcgccgggatcgcgggcgccggctgagccagcggctcttgggaggctgcgtccgcgcgccggcggggcgaggcggccgggccctgcgcgtcaggcctgagacctgggaggaagctggagaaaagatgccctctgaatctttgtgtttggctgcccaggctcgcctcgactccaaatggttgaaaacagatatacagcttgcattcacagagaatgggctctgtggtctgtggaatgaaatggttaaagatggagaaattgtatacactggaacagaatcaacccagaacggatagctccctcctggaaaagcttttgtctggtcctctgagccccagtgagagtttcctgaggtacctcacccttccacaagacaacaggcttgccattgatctgcaacaaacgggggttgttgtcatggcccatttagaccgtctggctacaccctgtagatgcctcctctgtgtagctctccgacgtctcataagagtcattttttacaggtcagaactgtagaaataatgagaaagtgacatttgtacgcatagctgatttggagaaccataataacgatggaggcttctggactgtgattgacgggaaagtgtatgatataaaggacttccagacacagtcgttaacagaaaatagtattcttgctcagtttgcaggggaagacccagtggtagctttggaagctgctttgcagtttgaagacacccgggaatccatgcacgcattttgtgttggccagtatttggagcctgaccaagaaggcgtcaccataccagatctggggagtctctcctcacctctgatagacacagagaggaatctgggcctgcttctcggattacacgcttcctatttagcaatgagcacaccgctgtctcctgtcgagattgaatgtgccaaatggcttcagtcatccatcttctctggaggcctgcagaccagccagatccactacagctactacgaggagaaagacgaagaccactgcagctccccagggggcacacctgccagcaaatctcgactctgctcccacagacgggccctgggggaccattcccaggcatttctgcaagccattgcagacaacaacattcaggatcacaacgtgaaggactttttgtgtcaaatagaaaggtactgtaggcagtgccatttgaccacaccgatcatgtttccccccgagcatcccgtggaagaggtcggtcgcttgctgttatgttgcctcttaaaacatgaagatttaggtcatgtggcattatctttagttcatgcaggtgcacttgatattgagcaagtaaagcacagaacgttgcctaagtcagtggtggatgtttgtagagttgtctaccaagcaaaatgttcgctcattaagactcatcaagaacagggccgttcttacaaggaggtctgcgctcctgtcatcaaacgtttgagattcctctttaatgaattgagacctgctgtttgtaatgacctctctataatgtctaagtttaaattgttaagttctttgccccattggaggaggatagctcagaagataattcgagaaccaaggaaaaagagagttcctaagaagccagaatctacggatgatgaagaaaaaattggaaacgaagagagtgatttagaagaagcttgcattttgcctcatagtccaataaatgtggacaagagacccattgcaattaaatcacccaaggacaaatggcagccgctgttgagtactgttacagatgttcacaaatacaagtggttgaagcagaatgtgcagggtctttatccgcagtctccactcctcagtacaattgctgaatttgcccttaaagaagagccagtggatgtggaaaagagaaagtgcctactaaaacagttggagagagcagaggttcgcctggaagggatagatacaattttaaaattgtatctggtgagcaagaatttcttacttccatctgtgccgtatgcgatgttttgtggatggcaaagacttattcctgagggaatcgatataggggaacctcttactgattgtttaaaggatgttgatttgatcccgccttttaatcggatgctgctggaagtcacctttggcaagctgtacgcttgggctgttcagaacattcgaaatgttttggtggatgccagtgccaaatttaaagagcttggtatccagccggttcccctgcaaaccatcaccaatgagaacccatcgggaccgagcctggggaccatcccgcaagcccacttcctcctggtgatgctcagcatgctcaccctgcagcacagcgcaaacaaccttgacctcctgctcaattccggcacgctggccctcgctcagacggcactgcgcctgattggccccagttgtgacagcgttgaggaagatatgaatgcttctgcccaaggtgcttctgccacagttttggaagaaacaaggaaggaaacggctcctgtgcagctccctgtttcagggccagaactggctgccatgatgaagattggaacaagggtcatgagaggtgtggactggaaatggggcgatcaggatgggcctcctccaggcctaggccaagtgattggtgagctgggagaggacgggtggataagagtccagtggggcacgggcagcaccaactcctacaggatggggaaagaaggaaaatacgacctcaagctggcagagctgccggccgcctgcacagccctcagcagaggatttggacacagaggacgactctgaagccgaacaaactgaaaggaacattcaccccactgcaatgatgtttaccagcaactattaccttactgcagactctttgtctgtctgctggagttcatgctgagatcatgcagagtgaagccaccaagactttatgcggactgctgcgaatgttagtggaaagcggaattgacggacaagacatcttctccaaacaggctggtgtacagggagcaacaccggagctggtgcacgctggggtttgtgcagagcatcgctctcacgctgcaggtgtgcggcgccctcagctccccgcagtggatcacgctgctcatgaaggttgtggaagggcacgcacccttcactgccacctcgctgcagaggcagatcttagctgtgcatttgttgcaagcagtccttccgtcatgggacaagaccgaaagggtgagggacatgaaatgcctcatggagaagctgtttgacttcttggggagcttgctcactatgtgctcctctgacgtgccgttactcagaggtgggtggccgtctcccttccctgtaccctggtgaagagcggtgcagtgccgtcactcagaggtgggtggccgtctcccttccctgtgtcctggtgaagagcggtgcagtgccgtcactcagaggtgggtggccgtctcccttccctgtaccctggtgaagagcggtgcagtgccgtcactcagaggtgggtggccgtctcccttccctgtgtcctggtgaagagccgtgtagtgccgtcactcagaggtgagtggccgtctcccttccctgtgccctggtgaagagtggtgcagcagcttctcccctggtttcctcctcagagtccacgctgaggcggcgcagggtgtgcccgcaggcctcgctgactgccacccacagcagcacactggcggaggaggtggtggcactgctgcacacgctgcactccctgactcggtggaatgggttcatcaacaagtacatcaactcccagctccgctccatcacccacagctttgcgggaaggccttccaaaggggcccagttagatgactacttccctgattccgagaaccctgaagtggggggcctcatggcggtcctggctgtggttggaggcatcgatggtcgcctgtgcctgggcggccaagttgtgcacgatgactttggagaagtcaccatgactcgcatcaccctgaagggcaaaatcaccgtgcagttctctgacatgcggacgtgtcgcgtttgcccattgaatcagctgaaaccactccctgccgtggcctttaatgtgaacaacctgcccttcacagagcccatgctgtctgtctgggctcagttggtgaacctcgctggaagcaagttagaaaagcacaaaataaagaaatcgactaaacaggcctttgcaggacaagtggacctggacctgctgcggcgccagcagttgaagctatacatcctgaaagcaggtcgggcgctgttctcccaccaggataaactgcggcagatcctgtctcagccagctgttcaggagactggaactgttcacacagatgatggagcagtggtatcacctgaccttggggacatgtctcctgaagggccgcagccccccatgatcctcttgcagcagctgctggcctcggccacccagccgtctcctgtgaaggccatatttgataaacaggaacttgagactgctgcactggccgttgtggagtccactcacccttcgagcccaggatttgaagactgcagctccagtgaggccaccacgcctgtcaacgtgcagcacatccgccctgccagagtgaagaggcgcaagcagtcacccgttcccgctctgccgatcgtggtgcagctcatggagatgggatttcccagaaggaacatcgagtttgccctgaagtctctcactggtgcttccgggaatgcgtccggcttgcctggtgtggaagccttggtcgggtggctgctggaccactccgacatacaggtcacggagctctcagatgcagacacggtgtccgacgagtattctgacgaggaggtggtggaggacatggatgatgccgcctactccatgtctactggtgctgttgtgacggagagccagacgtacaaaaaccgagctggtttcttgggtaatgatgattatgctgtatatgtgagagagaatattcaggtgggaatgatggttagatgctgccgaacatacgaagaagtgtgcgaaggtgatgtgatgttggcaaagtcatcaagctggacagagatggattgcatgatctcaatgtgcagtgtgactggcagcagaaagggggcatctactggtttaggtacattcatgtggaacttataggctatcctccaccaagaagttcttctcacatcaagattggtgataaagtgcgggtcaaagcctctgtcaccacaccaaaatacaaatggggatctgtgactcatcagagtgtgggggttgtgaaaggtgtgatggatgtcagatgtttcctatcaatggatccagattcaaatgcagaaactgtgatgactttgatttttgtgaaacgtgtttcaagaccaaaaaacacaataccaggcatacatttggcagaataaatgaaccaggcttcagcagaagaaacacttcctataaatctcgcccaaacaggaaaggagaagcattagggtgtccgactacgtgggtttcatagctgtggaaaagccaaaggggagactcctgaagaaaggcggtgaagactgtgaagagcgggtcaggaagatgagcacagcactgctactcctgtgggcacagggacagcatgtctccagccagcgccaccttgtttaatacatgggaactcactgaaattcattctgtattttgcccgcaaagttttaaagctttcatccacagtcaggaattaaacttataccaatgagagcctcacacattcaaggatgtactaagcactacaggcctcacagaaacagagatcccatcttggagttttcagtaccacatgggagataaagggttttgaacatgaaatgacaaaaacaacagcaagaagaaaattcttgtcctttttcattactatcagactcaaataaatgtcttggctcttacattacattcattcttcaaccattgtggtctggcttccacttccttcacttcaccaacatggctctgccaaaggaagcccgtgatctctaggccatcactttaattgatctttctacaacatttatcctggttgttaagccctccttacaacattcttctctctttgtttttatagctccatctctcctgcttctttaacttgataatgcatacttgatttttctatttgttatttcataaaccaattaatacacagataaaatgactgtatatcaaaccatgtttgtatagaaaaaatggattttggatgcctctcatatgtaattagttctattaaacatattaattgtattgtttaatttgtcaggtttttgacagaattttgtttacaagtaataaaaattttatctccaattttc

SEQ ID NO: 120121 - DNA, 1854 bp, Homo sapiens
atgacagagctgcccactctgtggaaaccactgaaaaatagtcagatgtttagagtaattgcccgtgctttctgtgttacttttattcttgtatccacgcacaagaaatgtcagtgggtgtcaatgcttattagtcagatgtttaaagtaatagcccgtgctttctgcgttatgtttattcttgtatccatcacaagaaacaccatcaccagtgagaacccattgggaccgagcctggggagcatcccgcaagcccgcttcctcctgatgatgctcagcatgctcaccctgcagcacagcgcaaacaacctcgacctcctgctcaattccggcacgctggccctcactcagacggcactgcgcctgattggccccagttgtgacaatgttgaggaagatatgaatgcttctgctcaaggtgtttctgccacagttttggaagcaacaaggaaggaaacggctcctgtgcatctccctgtttcagggccagaactggctgccacgatgaagattggaacgagggtcatgagaggtgtggactggaaatggggcgatcaggatgggcctcctccaggcctaggccgagtgattggtgagctgggagaggacgggtggataagagtccagtggggcacgggcagcaccaactcctacaggatggggaaagaaggaaaatacgacctcaagctggcagagctgccggccgctgcacagccctcagcagaggattcggacacagaggacgactctgcttctccaaacaggctggtgtacagggagcaacaccggagctggtgcatgctggggtttgtgcggagcatcgctctcacgccgcaggtgtgcggcgccctcagctccccgcagtggatcacgctgctcatgaaggtcatgaaagggcacgcacccttccctgccgcctcgctgcagaggcagatcttagctgtgcatttgttgcaagcagtccttcggtcatgggacaagaccaaaagggcgagggacatgaaatgcctggtggagaagctgtttgacttcttggggagcttgctcactacctgctcctctgacgtgccattactcagagagtccatgccgaggtggcgcagggtgcgcccgcaggccttgctgactgccacccatagcagcacactggtggaggtggtggtggcactgctgtgcacgctgcactccctgactcagtggaatgggctcatcaacaagtacatcaactcccagctccgctccatcacccacagctttgcgggaaggccttctgaaggggcccagttagaggactacttccccgactccgagaaccctgaagtggggggcctcatggcggtcctggctgtgattggaggcatcgatggtcgcctgtgcctgggcggccaaattgtgcacgatgagtttggagaaggcactgtgactggcatcaccccgaagggcaaaatcaccgtgcagttctctgacatgcggacgtgtcacatttgcccattgaatcagctgaaaccagaaagggaaaggttgtgcagaaacctggacagtggacgccgcgggcacttcccacccatggcagcaggagggcgggagctcaaagagggctgggcctcgcccctgccagtggagtggggactgccagataaaagacgaggtcttttcttgggcagccattcccatctttgcagcacggtcctaagggcccaagaggcccccacccccgccgcccagcttctgcacctgaggctcacgggctctccccaaccctgcaatccgctccacttactcgatggggaaccagtcgccacacaggtgcttcacagtgtctatgtcatcgtggcaaaaggaggcgcaggctga

SEQ ID NO: 120122 - DNA, 423 bp, Homo sapiens
  misc_feature (1)...(423): n = a,t,c or g
ggaagtcccgttgggggtaggcnccgagcgcgcgaaacactgtgcccagntttatcatctcacattattgattcacgggacaaaggtaagtgccacgcggcctggccactgcagtcctggcaagctcccatcctgggtgccaatctcccttcaatgtactccttcttccccggagtgcagaagcgtatgaagacagttatgacatggacacatgcatgagctattatacataattacaaaagctgattctgtcatcaccgcatcttgtctcatcagtaggagcgaatggctggggggacggtggcacagtcagcctcgttcaaaggtttgtcgattacgggtcttcccagtgccaacgtccacataggacagggtgtgcttcctccagtgctcctcaaagggcttcttctgttgcccctggat

SEQ ID NO: 120123 - DNA, 169 bp, Homo sapiens
gaatggtctggaacacggacctggtggagaccctggagctgcagaacctgatgctgtgcggattgatgagtacgattactccaagcccatccaggggcaacagaagaagccctttgaggagcactggaggaagcacaccctgtcctatgtggacgttggcactgggaag

SEQ ID NO: 120124 - DNA, 729 bp, Homo sapiens
atgggacaagtgtgggctttggttcattccaccttggaaacttttcacactaatgatgcagaggaaggagagtataacaaagtaacagaagaagtatcagagcaggacactgggcaaaaagtagttgccccagtgactgttcgagcagcacctcgaatgaccgctctcagttctattcaggcaggaatcccacaagctagaagagaggcagagccaggacagcgcatagcacagctcctgatagtgctgtatgtggaaatggggaaaagtgaaattaaacgagcaggaggatttggaagcacaaataaacaaggcaaagcagcttattgggtaaatcaaattactgataaacatcctacctgtgaaataactattcagggccaaaatcaacagccaatttggataccattgagacacctgaaaccttaccatgaaacagatgctgaggaagagattccaggaggatcccgagctccccccagttgcagccatgtggagaatgactctgaggaggaccccaactgtcacaagcaacacccgttgaacacagccatccacctggggacagatcaagaagctgtcacagatggcggaaaaaacttgaggaaagcgggacaagcagtcacgagtaatttaatggtagctataatagcagttatcaccactgccatgagtattccttcaacaagggctgacacagagaacaattatacttattgggcatattga

SEQ ID NO: 120125 - DNA, 751 bp, Homo sapiens
ccacgtaggaggcattctcgacaccctctgtacacagcatgcgctttatttggcttctcttacgcagcgtagtgactttcagatttattcaagctgctgcgtgcgccaacagtccactccttcctagtgctgaggcccccatcacatgagcacaactgtttcttgtgtgtgatgtgttgtcctctggctgtgcacttcccagtgccgacgtccacataggacagggtgtgcttcctccagtgcacctcaaagggcttcttctgttgcccctggatgggcttggagtgatcgtactcatcaatccgcaccttgtagtcttccccggcgtgcgcgccccgtgactccttccccgcctttgctccattgacggtctgcagcgcacatagcatcaggttctgcagctccagggtctccaccaggtccgtgttccagaccattcctcggtcaaacgtcttcagatgcttcaggtctccatagagctagatgattttcccacaaccttcttgcaacaagcttcccacacggaacacggcagcatgattttgcgttgacttctgcatgctgagtcgcagttccgatgttcttatgcttcttccatcagcaaatctcaatttgtcaagactcgtgacagattcttccccagcatgtggtttaattggagggactttatctccaggcctgcatgaatcttcgatgctcagggcacatgtctgaccaaagacaaccaggcgcaatagcaagggtcctcaac

SEQ ID NO: 120126 - DNA, 2331 bp, Homo sapiens
  misc_feature (1)...(2331): n = a,t,c or g
gccctttttttttttttttggtcatttatattttatttaagagctgtgcccagttttatcatctcacaagaatgaagcaagggacaaaggtaagtgccacgctccctggccactgggttcctggcaagctcccagccactaggtgccaatctcccttcaatgtactccttcttccccagagtgcagaagcgtatgaagacagttatgacatggacacatgcatgagctattatgcataattacaaaagctgaatctgtcatcaaccaacatctttgtctcatcagtaggagcgaaatggctggccgggacggtggcacagtcagcctcgttcaaagttttgtcgattacgggtctatatcccagggtgaccatgaaaagaagagtcttcccagtggccaacgtccacataggacagggtgtgcttcctccagtggctcctcaaaagggcttcttctgttgcccctggatgggcttggagtaatcgtactcatcaatccgcaccttgtagtcttccctggcatgcgcgccccgtgactccttccgcgcctctggctccgtagatggtcttgaagcgcacacagccatcaggttctgcagctccagggtctncacccaggtcccgtgttccagaccattccccggtcgaacgtcttcaggtgctttaggtctccatagagcttgctgattttcccacaaaccttctttggaaacaacgcttccccacacgggaacacggcagcatgattttgcattgacttctgcatgctgagtcgcagttccgatgttcttatgcttccatcagcaaatctcaatttgtcaagattcatgacagattcttccccagcgtttggtttaattggagggactttatctccaggcctgcatgactcttcgatgctcagggcacatgcccgaccaaagacaaccaggtccaagagcgagtttgccccgaggcggttggcaccatgtaccgaggcacaggcggcctccccacaggcgtacaggccgggcacaatctgatcctggccattcacgtgcctcaggacctgccccttgtagttggtgggaatgccgcccatgttataatgcacggtggggaggacagggatcggctccttcgtgacgtccacgccagcgaagatcatggctgtctctgaaatgccaggcaggcgcgtggccagctgctctggaggtaggtggtgcagctgcaggtagacgtgatctttctcagggccacagcctcttccttctcggatctccagagtcatcgaccgagacaccacatctctagacgccaggtccttcgcgacaggggcgtatcgctccataaacctttcgccttgactgttaatgagaatgcctccctctccacgacatccttccgtaatgagacaaccagcaccatatatgcctgtggggtggaactgaacaaactctaggtcctggcaaggaaggcctgccctggtgatcatggccgtgccgtcgccagtgctggtgtgggcagacgtgcagctgaagtaggtgcgcccgtagcctcctgtggcaacaacagtgttctttgctcttatgcgatggatggacccgtcctctatgcacagtgcgatgacaccacggcactccccgttctccatcaggagatccaaggcaaaatactccacaaaatagctggtatcatatcgcagagaccgtccatataaggtgtgcaatagcgagtggccagtccgatcagccacacagcagcaccgatgggcctgcccgccctttccaaacttgaggctctgtccaccaaatgcacgctgataaatcttcccatcttcagttctgctaaacggcatgccataattttctagctcgaccacggcggcgggggcctgctccgtcatgtagtggatggcatcctggtcccccagccagtcggagcccttcacggtgtcgtagaaatgccacctccagttgtcctcctccatgttccccagagcagcattgattcctccctgcgctgcaacagtgtgtgacctggtaggaaacagcttggtaacacatgctgtattaaaccctgcctcagaaaggccaaatgcagctcgcaagcctgcccctccagcgcctaccaccactgcatcaaattcatgatccactactggatactgagcagaaatggaatctgaaactttagcagatgccctcttgttcccatcaacagtgaagtgaaaacctcgggttcctgtttgcaacactgttggccacgccttggccagcgccaggcgccgagcgctcagcagccgcgacaggccccggacccccgacatgtctgctgttgccgccgcgcagtc

SEQ ID NO: 120127 - DNA, 417 bp, Homo sapiens
atggcccaatgggggtccgcgcgggatcagagcccgccctgcctcctggcgccgtcgcgggggtggggactttctaggccacgccccgggggcggagcccgccggcagccgcgccgcagccgcggagggaggggcggggcgggctccggtgtcagcgaccaagccgcaggtggcggcgagcgcggggctcggcccgagctcaggagcccagggggcggtctcatcatcatcgacagcatgccagacatccgcaagaggaaacctatcccactcgtgagcgacttggcttctgatgaagaagggtgtttttggaagttattggatgcatttcctctgcatctggaggagtatggaagagctgaagtgggagggaggaagaccatgtccgtgggacgtcattgcccgtgcatgcagtga

SEQ ID NO: 120128 - DNA, 535 bp, Homo sapiens
cgaggcgtcgagagttcccagcgaaggagcgcgagagcgcgtcgatgtcaagccccgaagagtaaccaacatggccaagggtgccccaccaagccagccgccgccgaacagtgtgcctgcagattgagcagatccgtaaggctgagctcttccaatttcgaggagagtctcaggccgacagaggatgacgagggccaggaggggcaggactccatgtccagggccaaggccaactggctgcgtgccttcaacaaggtgcggatgcagctgcaggaggcccggggagaaggagagatgtctaaatccctatggttcaaaggcggcccagggggcggtctcatcattatcgacagcatgccagacatccgcaagaggaaacctatcccactcgtgagcgacttggccatgtccctggtccagtccaggaaagcggcgatcacctcggccttggcctccagcacgttgaacaacgaggagctgaaaaaccacgtttacaagaagaccctgcaagccttaatctaccccatctcgtgcc

SEQ ID NO: 120129 - DNA, 225 bp, Homo sapiens
atgaaagctactttgcctcttgctatcacttacgagagttatgcagcaccacctgaggtgaagccaagcacttcctgctcggaacccttcagctcgccagacagcagccggctggacatccactgtcagccagatccaaactccagcccaggggagtcacaccgcagtgagcaccacttcaccgccactgccactcctccaatgtggcgcctggctacatcatag

SEQ ID NO: 120130 - DNA, 284 bp, Homo sapiens
gaatgggataccagatttcagcaatacaacccttctgagagggcttcaaatgcctggagcaagaggtccttgctgtgggtcccagagacacatcaaccttctgatggggactggcgtcttcctggtgaagatgaaggcaaagagttctttttcctggacagtgaaaccagattgtgcaaaatagctcctgaaggctggagagagcagcctcagaagacctccatgaataccttcacactcttcctgaggataaagttctttgtcagccactatgggctgctcca

SEQ ID NO: 120131 - DNA, 782 bp, Homo sapiens; identical to SEQ ID NO: 88678

SEQ ID NO: 120132 - DNA, 380 bp, Homo sapiens
atgatgaaaagcagcagctccacagactggaggtcttggagtggggaaggattgctggagagcatgtccagggataatgagctagaaggagaggatagccccatcctggatcaagaggacagctggagggacagtgcctccccagatgcaggggaaggcctgggtctcaggccagagtcttcccaaaaggccatcagagaggcacaatggggccaaaacagagagagaccttgggccagttccttgacacattctcctgagtcccaccctcatttatgcaaacttcaccaagaaagggatgaatcaacattggcgacctctttggaaaaggatgtgaggcaaaactgctattcagtttgtgatatcatgagacttggaag

SEQ ID NO: 120133 - DNA, 1032 bp, Homo sapiens
atgccccgcccagaccttgcccctgctctgttggtggcagttcttgtactcctgtacttgcttgtatctgcagcagctcctgctccttcctcggactccactccagaaaatgtgtgcccagtcgaaaccactaccaatttcatctgggagctttcttcaccccacaacacttccgcagttctgctggttgtcttccacaagggccccagtcctaagtttgaagtcaaactaaaaaagaatgccaatggtttgggattcagtttcgtgcagatggagaaagagagctgcagccatctcaaaagtgatcttgtgaggattaagaggctctttccggggcatccagctgaggagaatggggccattgcagctggtgacattatcctggccgtgaatggaagtccacggaaagcctcatcttccaggtgccgggggtcatgggcaatgcagctctctgtgcaggctggccccagctttgcctcttactatcctgctgccgtggaggtgctgcatttactgagaggggccccacaggaagtcacgctcctcctttgccgaccccctccaggtgcgctgcctgagctggagcaggaatggcagggacaaaaatacaagtgtgcttgggccatcgttaatgaagcagaagtggaggaagttgtggaggtggcagggaccgtggagttctttggggatcagaggagcatgatgccaccatcctgcatgcagtgggaagccactgggctggcacggagggttaagcaggaaatgccctcgtctgttcttcagaggggccactcgggttactggtgcacagggactaaaggaggtcaagcagcagtcattcaggtcaaacatgatgtggcttggactcaggctgtagctgaagtgttaagaagcagccagatttgggatacatctgggaggcggagttcaggagactactttgggattagaaacaggcatgaggaaagagagcaatcaagctttggcatgaggaagccttggggaaatggtggtaccaccaatgcagggtga

SEQ ID NO: 120134 - DNA, 3264 bp, Homo sapiens
atgagggccaaagtggatggagatgtggggacagcagggtggacagcggcaacagtcaatcagagaaggcctctgccatcagagaaggcctccttcttggaccccttctctcttggcataggaacatgtggctcctatgaattgagccagaggatttggtggagaaaagagttgtggaggaaagctcctctgtgcagcagaacagaagctacctgctcaggaagaggctgcgtgggacaagcagcgagagcccagcggcacaggccccggagtgtctgcatccttgcagaggtggaaaatgccaatgctattccattaacagatgaagaagccacatttaagcagatccgaagccaagataatgaggggcctggtggcagctgtgctgtcagggcatcctgtttcctctgggaaccatactcaggccgagtggcggagcaacaacatgcctcaatattgttgccattatccattgccataccatgctgcataacaagcaaccacaaaacacagtggctaaaagcaacaattatgaatttagctcatgattctgtttttgaaaataaagttaattcagagaaggtaaaactttctcttcggaatttcccacataatgattatgaggatgtttttgaagagccttcagaaagtggcagtgatcccagcatgtggacagccagaggccccttcagaagagacaggtggagcagtgaggatgaggaggctgcagggccatcacaggctctctcccctctactttctgatacgcgcaaaattgtttctgaaggagaactagatcagttggctcagattcggccattaatattcaattttcatgagcagacagccatcaaggattgtttgaaaatccttgaggaaaaaacagcagcgtatgatatcatgcaggaatttatggctttagaacttaagaatctgcctggtgagttctactctgggaatcaaccaagcaacagagaaaaaaacagataccgagatattcttccatatgattcaacacgcgttcctcttggaaaaagcaaggactacatcaatgctagttatattagaatagtcaattgtggagaagagtatttttatatcgctactcaaggaccactgctgagcaccatagatgacttttggcaaatggtgttggaaaataattcaaatgttattgccatgataaccagagagatggaaggtggaattatcaaatgctaccattactggcccatttctctgaagaagccattggaattgaaacacttccgtgtattcctggagaactaccagatacttcaatatttcatcattcgaatgtttcaagttgtggagaagtccacgggaactagtcactctgtaaaacagttgcagttcaccaagtggccagaccatggcactcctgcctcagcagatagcttcataaaatatattcgttatgcaaggaagagccaccttacaggacccatggttgttcactgcagtgccggcataggccggacaggggtgttcctatgtgtggatgtcgtgttctgtgccatcgtaaaggactgttcattcaacatcatggatatagtggcccaaatgagagaacaacgttctggcatggttcaaacgaaggagcagtatcacttttgttacgatattgtgcttgaagttcttcggaaacttctgactttggattaagaaagacttctgttgcctctcacttgaaattaccaagtgggtttgcacctcctcataaagaacatgtttgcactgtgctgaagggctttgctatgcatacaatctgctttcttggtttatcagtttattttctttctaaaagctccctgaagggcaatatcatttggcttggggtgatcagtgtttacttattgatcttgctagacaatatcaaaataacttcccacattttccagtgaaacagatgttacataaaacgattgcagcttggctatttggttgaagggattacagagcccaataaaggatttaaaatatattcattaagattttatttggaaaggtggctggagagagctgaggatttccaggactttgtaagttcttattctgggagaacataaggccaataatcatgacctcttccaggcatttttaagacagatgtctattcatgttctttagctagagcctgtactttttgctggcatttgaataacccagtttaaaaagagtccagttagggtggactaactttggacacaaattggcttccatttcctacattttcatactgctgccttcctacagctgctagaccaagacctgttggtctgggaagcatttcatggatagggagagctcctctcggtgaacagtccaaaactaaaatagatgtttatatagaaagcccaagaggagatttttgccatgcctgagttctttcctatcccaccctaacacttaacatattacttagtctgctttgttaaaagcaagtattacctttaacttgcctcttactctttgccctttagctaactaataaagtttgatatgggcattattatataattctgagtcattcatggtatctctcatgtttgatgtatttttcaaactaagatctatgatagtttttttttccagagttccatcaaatcatttatttcctttactttctcacctctgttgaaacatttagaaactggatttgggaacccaattttggaaaaccagattcatagtcatgaaaatggaaacttccatattctgtttttgaaaagatgtggccattattacagtaattttattataggactttgcctcgtacaattaatagtgatattttggacaaggagttctggtgacaagctatacctaattataagctataaaacaatagatatgagtgtttgtacagtttaactcaatggagatcagaatattctatgtattgagaaaatgtttaatatcaatctataaatcttgaatttctaagaggcttattttgttcttttggctgaatgagtatatttgaattggttgaataattaataattctcattgtaaaaataattatatgccaaaaatatatttgatgttaaatcaaatagatgattctgtttacattgttcatatgaataataatctgtgttaatttcattttgataattggcctttaatatttgtatctctaattttattttctctctgttactgtaaaataatagctataatgtataacaattttcttcagaagaattctatgctattattaaaataaaatatttactg

SEQ ID NO: 120135 - DNA, 1214 bp, Homo sapiens
catccccattttccagcgtggactgtggagtctgcagatttgagtaccatgataagtttgtgcaaatggccaatttgagtcctgcacaccaggcccggtctaagcctctcatttggattcagagattgtcatgctcagaaaacgagttgtttgtatccaggcttcagggtgctgcaggaggcctgctgagtacatcaatggataacttcaacgtggacggcagcaaggaggctggagcagaaggcatcgggcgcagcccctgcactggccgggagcagctgaagagtgcctgtgtgatccagaagccaatgacctgggactctctctctggaccacctgttcagagcatgcatgcaggctcaaagaataataggaggaagagctttatagctgaaccgggccgagaaattgtacgtgtgacactgaaacgtgacccacatcgtggttttgggtttgtcattaatgagggagagtattcaggccaagctgaccctggcatttttatatcttctattatacctggaggaccagcagaaaaagcaaaaacgatcaaaccaggagggcagatactagccctgaatcacatcagtctggagggcttcacattcaacatggctgttaggatgatccagaattcccctgacaacatagaattaattatttctcagtcaaaaggtgttggtggaaataacccagatgaagaaaagaatagcacagccaattctggggtctcctctacagacatcctgagcttcgggtaccagggaagtttgttgtcacacacacaagaccaggacagaaatactgaagaactagacatggctggggtgcagagcttagtgcccaggctgagacatcagctttcctttctgccgttaaagggtgctggttcttcttgtcctccatcacctccagaaatcagtgctggtgaaatctactttgtggaactggttaaagaagatgggacacttggattcagtgtaactgtaagagtttttaggagagctgtcttcaggcttgggctggaagggttggcaaaacctggtgttagagatgtgggatccaaaaatgacaagccttttcccataccagcgaccgcagaacacgtgcagtgcccactggagcccattgtgctctctgcttccaggaatcatctttctgctggtgctaagttctgtcttggatttgagcaccctcattttggcttgctttga

SEQ ID NO: 120136 - DNA, 5697 bp, Homo sapiens
atgccccgcccagaccttgcccctgctctgttggtggcagttcttgtactcctgtacttgcttgtatctgcagcagctcctgctccttcctcggactccactccagaaaatgtgtgcccagtcgaaaccactaccaatttcatctgggagctttcttcaccccacaacacttccgcagttctgctggttgtcttccacaagggccccagctgcagaaactcagggttcaaaccattaaatgatgagaaagctagaagtgttttctatttgatcagtttttccccccgcctttgttcagtaaacgattatgagggaaatgactctgaagcagaagacctgaatttcagggaggctttgccttcatcaagtcaggaaaacacacctagatcaaaggtttttgaaaataaagttaattcagagaaggtaaaactttctcttcggaatttcccacataatgattatgaggatgtttttgaagagccttcagaaagtctaggtaaaggaggggagaaggtaaataagtggatggatctgaggcgactagtttgcaaggtaaaagtagtaggaggagatggagtttgtgatcagacattgggatttgggaattatttcacaagtgggccagtttcagggggctactccttgaacaccttcatgtgcagcaatgatgccaaagctaagacctccttgagtcccccggccagtgtctggattgtgcccttcccttctacatcttacttccagcaggtggagagtaagccatactttcacgttgaagattacatcccagcgagtctgatcgagaggatgaccgctctacgggtccaggttgaagtctcagagatgcaccggctcagctctgcactgtggggagaggatgctgagctgaagttcttgagggctggccactggatatttcagcaccagcgctcaataaatattgatttgtatgatgataaggatattgatgatgatgatgatgataatgatgatgatgacgatgatgacagggtctctccaaagttaaacgaaggaggcttagggaatgggataccagatttcagcaatacaacccttctgagagggcttcaaatgcctggagcaagaggtccttgctgtgggtcccagagacacatcaaccttctgatggggactggcgtcttcctggtgaagatgaaggtcactcagcagctcccagaatacggtgtgctggttcaccaagtattctcagagaagaggaggccagaagaggagatggccctggggatctgtgccaagggtgtcatagtctatgaagtgaaaaacaacagcagaattgcaatgttacggtttcagtggagagaaaccgggaagatttctacttatcaaaaaaagttcaccatcacaagcagtgtcactgggaagaagcacacatttgtcacagattcagccaagaccagtaaatacttactggacctctgctcagcccagcatgggtttaatgcacagatgggctctgggcagccttcccatgttttatttgcatccccattttccagcgtggactgtggagtctgcagatttgagtaccatgataagtttgtgcaaatggccaatttgagtcctgcacaccaggcccggtctaagcctctcatttggattcagagattgtcatgctcagaaaacgagttgtttgtatccaggcttcagggtgctgcaggaggcctgctgagtacatcaatggataacttcaacgtggacggcagcaaggaggctggagcagaaggcatcgggcgcagcccctgcactggccgggagcagctgaagagtgcctgtgtgatccagaagccaatgacctgggactctctctctggaccacctgttcagagcatgcatgcaggctcaaagaataataggaggaagagctttatagctgaaccgggccgagaaattgtacgtgtgacactgaaacgtgacccacatcgtggttttgggtttgtcattaatgagggagagtattcaggccaagctgaccctggcatttttatatcttctattatacctggaggaccagcagaaaaagcaaaaacgatcaaaccaggagggcagatactagccctgaatcacatcagtctggagggcttcacattcaacatggctgttaggatgatccagaattcccctgacaacatagaattaattatttctcagtcaaaaggtgttggtggaaataacccagatgaagaaaagaatagcacagccaattctggggtctcctctacagacatcctgagcttcgggtaccagggaagtttgttgtcacacacacaagaccaggacagaaatactgaagaactagacatggctggggtgcagagcttagtgcccaggctgagacatcagctttcctttctgccgttaaagttaatactcagccacaggccagtgtcaaaaggcttctccctggctttgcagtgtgggttgcacgtgctctgcaaactagcaggcatgagcctgtcctctgtgacgctggccagcgccctacaggtcaggggtgaagctctgtctgaggaggaaatctggtccctcctgttcctggccgctgagcagctcctggaagacctccgcaatgatctgtgggaggagctgtgcttgcagcccatgatgatggtagaatttgctggtgtgccctgccagaggtggtctgcagtcatggcccaggcaatagccaccggtggccaggtagggagcacgcactgcaggtcacacatgcttgggggcttcagtgcatacagcagaggctcctggagtgacaccttacacatgttctgtgagggcgatgggtcccagcatgggcctatggaggaggctgtgcacctgtgccttcagcgtcatcttctccctcttccccaccctggaggttctgatgaacagctacggagctcccagaagaccagctgccttggatcctggtctgtctctagagaactcaggcttgtgctaaattccagccccatcactggcttggtttcagattcctcggactatgtggtctgcccctggtcagccctgctttctgcagctggaagcctttctttccaaggccgtgtttctcatatagaggctgctcctttcaaggcccctgaactgctacagggacagagtgaggatgagcagcctgatgcatctcagcccctgcagctctgcgagcccctgcactccatcctgctgaccatgtgtgaagaccagcctcacaggcggtgcacgttgcagtcggttctggaagcttgtcgggttcatgagaaagaagtgtctgtctacccagcccctgctggtctccacatcagaaggctggttggcttggttctgggtaccatttctgagggacaagttggagagctgagagcaggattaatgagggccaaagtggatggagatgtggggacagcagggtggacagcggcaacagtcaatcagagaaggcctctgccatcagagaaggcctccttcttggaccccttctctcttggcataggaacatgtggctcctatgaattgagccagaggatttggtggagaaaagagttgtggaggaaagctcctctgtgcagcagaacagaagctacctgctcaggaagaggctgcgtgggacaagcagcgagagcccagcggcacaggccccggagtgtctgcatccttgcagaggtggaaaatgccaatgctattccattaacagatgaagaagccacatttaagcagatccgaagccaagataatgaggggcctggtggcagctgtgctgtcagggcatcctgtttcctctgggaaccatactcaggccgagtggcggagcaacaacatgcctcaatattgttgccattatccattgccataccatgctgcataacaagcaaccacaaaacacagtggctaaaagcaacaattatgaatttagctcatgattcttgcttcaccccttctcaacccctggccagcgctcttccaggagcagatccccaggaccagcaggcgggccggaggctcagctctggatctgtgcactcggcagcagacagctcatggccaacaactccttctcagaggggttttctgcaaagaaggagcaagggatattcacaaggtgaacagagacccttgcaggtacctgggaccctgctctgtgactttgccacaccagttgctggatccatgcaccatgccccacgcagggtgaaaaagcccaagctcccttcccatgactctgctgtcccagcccagacaatcagtggtcccccaaggggttacaccctttgcatggagatgcgtttggtacctggcttgggagctgggtggaccaaaaaagggaaatcctatttggctctcagggacctctgtgtggtcctgctgaacgggcagcacctggaggtaaaatgtgatgttgaatcaacagtgggagctgtcttcaatgccgtgacatcctttgccaacctcgaggaactcacctactttggcttggcgtatatgaaaagcaaagagttctttttcctggacagtgaaaccagattgtgcaaaatagctcctgaaggctggagagagcagcctcagaagacctccatgaataccttcacactcttcctgaggataaagttctttgtcagccactatgggctgctccactcattatccctggacatgctctccagcaatccttccccactccaagacctccagtctgtggagctgctgcttttcatcattacccccactccccttccctgtcacacatgtcctcgtccctgtgcaccagtaacccgagtggcccctctgaagaacggaggagggcatttcctgcttaaccctccgtgccagcccagtggcttcccactgcatgcaggatggtggcatcatgctcctctgatccccaaggccctccagggtccctgccacctccacaacttcctccacttctgcttcattaacgatggcccaagcacacttgtatttttgtccctcaaacatccaaaggctatgtcaaatgacctcttggagtctaagcatcaacaggatctgggacatcaagtcctttatgttgtcctagtgatggtgtcaccctcaggcacaataagtgatcacttttatccacatcctagagatgaggaatcatggggcctagagaggacaggcaactgcccaaggcccatgcagcacagcaggcttccctctctgatgcctgagcttccagagagcctggccctaaaagtttcacagccaaagtctaaacatgtaaacatctacaagaagacccaaatgtcagaagaggcagaatcagggagaggaaggagacctactgagagaactccggagaaccctgctgtgggcctgacttttcaaagtgcaaggaaccaaggtcagtggcctgcagcttccacaaagttgatgcaagatgctgggctgtgcatcacctttgtgcagcttgggttctgggaacctctcatctgtaatattgcagtaacctcctctccgctccctgccttcaccagtgtcacccacctgcctccttccacattgctcaagggaatggcaatatctgccaataccaatgccttttcttcagagagagaaagaatgactccaacaaatagctgttcatctcaattgccctttcctcccaacctgccctcatcttgggccagcaattttgcagcctccaccatctga

SEQ ID NO: 120137 - DNA, 483 bp, Homo sapiens
tttcgtcgctgaccagcagcatggaggaccccgccgctcctgggaccgggggcccgcccgcaaatggcaatggcaacgtgtggcggcaaagggaagcaggcggcgcccaagggccgcgaagcgttccgaagccagcggcgggagtcagagggctctgtggactgtcccactctggagtttgagtatggagatgcagatgggcatgcagccgagttgtcagaattgtatagttacactgagaacctggaattcaccaataacaggaggtgctttgaagaagatttcaagactcaagtgcagggcaaggaatggctggagttggaagaagatgcccaaaaggcctatataatgggactcttggaccggctagaggtggtcagtagggaacggcggctgaaggcggcccgggctgttctctacctggcccaaggtacttttggggaatgtgattcagaggtcgatgtgctacactggtccaggtac

SEQ ID NO: 120138 - DNA, 2649 bp, Homo sapiens
atggaggaccccgccgcgcctgggaccgggggcccgcccgcaaatggcaatggcaacggcggcggcaaagggaagcaggcggcgcccaagggccgcgaagcgttccgaagccagcggcgggagtcagaggtgaggagcccggaaagcttcggctggggcccggagacgcccgccggcgggaagcggcggctgaggactccttttacctgccagtacatcccctattaccacagtacccagggctctgtggactgtcccactctggagtttgagtatggagatgcagatgggcatgcagccgagttgtcagaattgtatagttacactgagaacctggaattcaccaataacaggaggtgctttgaagaagatttcaagactcaagtgcagggcaaggaatggctggagttggaagaagatgcccaaaaggcctatataatgggactcttggaccggctagaggtggtcagtagggaacggcggctgaaggtggcccgggctgttctctacctggcccaaggtacttttggggaatgtgattcagaggtcgatgtgctacactggtccaggtacaactgcttcctgctgtatcagatggggaccttctccaccttcctggagctactccacatggaaattgacaacagccaggcctgtagcagtgcccttcggaaaccagctgtctccatagctgatagcacagagctcagggtgctgctgagtgttatgtacctaatggtggaaaatattcgcctggagcgagagacagacccctgtgggtggagaacagcccgggagaccttccgcactgaattaagcttctccatgcataatgaggagccttttgcccttttactcttctccatggttaccaagttctgcagtggcctggctcctcacttccccataaagaaggtcctgctcctgctctggaaggtggtcatgtttaccctcggtggatttgagcatctgcagactctcaaagtacagaagcgggcagaattgggcctgcctccactggctgaagacagtatccaggtggtgaagagcatgcgtgctgcctccccgccctcttacactcttgacctgggagagtctcagctggcacccccaccctccaagctgcgaggccgccgtggctctcgaaggcaactcctcactaagcaggacagcctggacatctacaatgaaagggatctcttcaagactgaggagcccgccacagaggaggaagaggagtctgctggtgatggagaacgaaccttggatggagagctagacctgctagagcaggaccctctggtgccacctccaccctcacaggcacccctctctgctgagcgggtggcttttcccaagggcctgccctgggccccaaaggtcagacagaaggacattgagcacttcttggagatgagcaggaacaagttcatcggattcaccctggggcaggacacagatacattggttggattacccaggcccatccatgagagtgtgaagaccctaaagcagcacaagtatatctccatcgcagatgtgcagatcaagaatgaagaggagctggagaagtgccctatgtctttgggggaagaggtggtaccagagacgccatgtgaaatcctctaccagggaatgctgtacagccttccgcagtatatgctcagaactctggatctggagggtgacaccagtgccagcgactggctgcccagcatcactgttctccagagcatgaagctgggcatcgatgtgaacaggcacaaggagattattgtaaagagtatctctaccctgcttctgctactcctcaaacacttcaaactcaaccatatctaccagaagtcagaatcaagcttgctggtagaagagcaggtcctcagagtacagagaggcttctgtagggtctatgtccatggccctatcaaccagggtatttttccactttcatacattcgaagacatctttggatacagccaattcctgctgttgccatttacctaaagcctgtccttatctctgcatcttacagcatctcagtcctggattatccttgctgtaccatccaggatttgccggagcttactactgaaagtctggaagctggagacaacagccagttctgctggaggaacctcttttcctgcatcaacctcctgaggctgctcaataaactgaccaaatggaaacattcccggaccatgagtcatggagccttggagattaccctccagccctcagagcagtgtgcagccaaagttggtccctggaagctcgcacacaggcccaacccagaccccgggtcctgcctctatggctgcaggcagatctttgcattttacccagagccctccattcatgggctctactgcagtctctgtctccccagtgccgggggcgtcctgcgcgtcacctgtctgcctcttacattaggactatttatagtttggaatggtagtgagagtaacagtatgatgacccaggacaatgacaacactgatcaaattgacagagcatgtgacatgggctggttctttcatcgcagagtagccgcacaggtgaatttggttgcagcaggagaggcagcaatgaagaagaaaagctggatggaagggaatactggagaaagggctgtggcctggctgtga

SEQ ID NO: 120139 - DNA, 1319 bp, Homo sapiens
gacccctgccagctgccgcgagtctccgctgctggaatcttgttagcggctgtctttttggagggttctggtttcccgacatttttgtttccagcccaggagaggatatcgtgattttccccccttgagcccaggctctgctctctgggggggtggggggcgctccaagccggggagccgtgccagccgagtcgtgcgggctgtggcagggaaggggccaccatgggatgtactctgagcgcagaggagagagccgccctcgagcggagcaaggcgattgagaaaaacctcaaagaggatggcatcagcgccgccaaagacgtgaaattactcctgctcggggctggagaatcaggaaaaagcaccattgtgaagcagatgaagatcatccattgaagatggcttctccggagaagacgtgaaacagtacaagcctgttgtcttacagcaacactatccagtccctgggcagccatcgtccgggccatggacactttgggcatcgaatatggtgataaggagagaaaggctgacgccaagatggtgtgtgatgtggtgagtcggatggaagacaccgagcccttctctgcagagctgctttctgccatgatgcggctctggggcgactcaggaatccaagagtgcttcaaccggtcccgggagtatcaactcaacgactctgccaaatactacctggacagcctggatcggattggggccgccgactaccagcccactgagcaggacatcctccgaaccagggtcaaaaccactggcatcgtagaaacccacttcacattcaagaacctccacttcaggctgtttgacgtcggaggccagcgatctgaacgcaagaagtggatccattgcttcgaggacgtcacggccatcattttctgtgtcgcgctcagcggctatgaccaggtgctccacgaagacgaaaccacgaaccgcatgcacgagtctctcatgctcttcgactccatctgtaacaacaagttcttcatcgatacctccatcattctcttcctcaacaagaaagatctctttggcgagaagatcaagaagtcacctttgaccatctgctttcctgaatacacaggccccaatacctatgaagacgcagccgcctacatccaagcacaatttgaaagcaaaaaccgctcacccaacaaagaaatatattgtcacatgacttgtgccacagacacgaataacatccaggtggtgttcgacgccgtcaccgacatcatcattgccaacaacctccggggctgcggcttgtactgacctcttgtcctgtatagcaacctattttg

SEQ ID NO: 120140 - DNA, 1056 bp, Homo sapiens
atgggatgtactctgagcgcagaggagagagccgccctcgagcggagcaaggcgattgagaaaaacctcaaagaggatggcatcagcgccgccaaagacgtgaaattactcctgctcgctgacactcaccagtttttccccactgtctgtgtcccaacaggggctggagaatcaggaaaaagcaccattgtgaagcagatgaaggagacaggtctctgctgcctcacagtgaccccacaggcccctgtacgagctcctgctgctacagtgcctcttgtattgttttacggccactcgcttacatgtccgttttccccacttatgatccaggaacacctagtgccacagagcattggctgccagtatcaattctcaccaaagaaagtgcccacttgcaccctgaaggtcatgaaagataccaggaaatcaagctgcacgggtatgtttgctgattgggtgctcaataaatgtggacataggaaacgaaaagtccgaatctgtccttacgcccccaaggcgaattctggggcgcgcgggtttattccgacccactaccacatcgcgtttcctgagcggctggagagccacggagaaggcgggctacgggcgacaagatggagagccggcccgagagggacagaggccgcgctggcagcgagctggggggcccacctgaccgtcctgcgggcagcccggccccgcgctcccattgacaaggagccatttggatggggggagcatgggaaaggagtgggagaaaacaaggatgaaacctgcatttcatggcagctgacagatcgtgatgccatttcccgagtcagggaacatgagaagaggagtgggcttgggggacttgccacatccaaggtgcctggagacacccaagtgtcaatgcaagggacctgccaaggctccagacagcatccctatctgccactgacacctcaagcaccatggaatctgctggatcatgtggcccaagaagcagagcagcttgtgcagcagcctggatctgttgcagagccttcccctgttctgggccccacgcaaaactag

SEQ ID NO: 120141 - DNA, 395 bp, Homo sapiens
catctatgatggctttgacggcttcgccaagggccagatcaaagaaatcggctggacagatgtcgggggctggaccggccaaggaggctccattcttgggacaaaacgcgttctcccggggaagtaatggaagagatcgccacacagatgcgcacgcacagcatcaacgcgctgctgatcatcggtggattcgaggcctacctgggactcctggagctgtctgtttttgtaacacttaagttattttatcagcactttatgcacgtattattaacattaatacctaatcggcgagtgcccatctgccccaccagccccagtgcgtgctgtctgtggagtgtgtctcatgctttcagatgtgcatatgagcagaattaaacatttgcctacaactc

SEQ ID NO: 120142 - DNA, 594 bp, Homo sapiens
atggcggtgctggaagggacaggattaagcctcatgctcttggtccaagcaggtctatgcccctcatcccagagcgttctcccggggaagtacttggaagagatcgccacacagatgcgcacgcacagcatcaacgcgctgctgatcatcggtggattcgagccccgtggtgaagacctgggcaacgtcaggatcttggtcaagttctttctcgctctgaacttcaatttcctcatctgtaagatgagaaaaatactcctacttccagctatctctaaggttattcaagcatgtcagaccctcaggaagacgcctgacaaacagcaggtgcacagtagtggtccctcagctttaaaaacaaagccacacaagggtggtttcaagacagcaagaccgtcttcaccacgggctgaagacggcgtagctcggccgtcagtaaacagggctctggagaagccagctgccatgttcacatatcggtccctctcccttcagggtccacagagggaccgtcagcggctttctcttctctgtcccagctccccagcagccacagcattcgccagggtgacctcgataatagaggaggaatga

SEQ ID NO: 120143 - DNA, 2593 bp, Homo sapiens
cccggacgtgcggctcccctcggcctcctcgccatggacgcggacgactcccgggcccccaagggctccttgcggaagttcctggagcacctctccggggccggcaaggccatcggcgtgctgaccagcggcggggatgctcaaggtatgaacgctgccgtccgtgccgtggtgcgcatgggtatctacgtgggggccaaggtgtacttcatctacgagggctaccagggcatggtggacggaggctcaaacatcgcagaggccgactgggagagtgtctccagcatcctgcaagtgggcgggacgatcattggcagtgcgcggtgccaggccttccgcacgcgggaaggccgcctgaaggctgcttgcaacctgctgcagcgcggcatcaccaacctgtgtgtgatcggcggggacgggagcctcaccggggccaacctcttccggaaggagtggagtgggctgctggaggagctggccaggaacggccagatcgataaggaggccgtgcagaagtacgcctacctcaacgtggtgggcatggtgggctccatcgacaatgatttctgcggcaccgacatgaccatcggcacggactccgccctgcacaggatcatcgaggtcgtcgacgccatcatgaccacggcccagagccaccagaggaccttcgttctggaggtgatgggacgacactgtgggtacctggccctggtgagtgccttggcctgcggtgcggactgggtgttccttccagaatctccaccagaggaaggctgggaggagcagatgtgtgtcaaactctcggagaaccgtgcccggaaaaaaaggctgaatattattattgtggctgaaggagcaattgatacccaaaataaacccatcacctctgagaaaatcaaagagcttgtcgtcacgcagctgggctatgacacacgtgtgaccatcctcgggcacgtgcagagaggagggaccccttcggcattcgacaggatcttggccagccgcatgggagtggaggcagtcatcgccttgctagaggccaccccggacaccccagcttgcgtcgtgtcactgaacgggaaccacgccgtgcgcctgccgctgatggagtgcgtgcagatgactcaggatgtgcagaaggcgatggacgagaggagatttcaagatgcggttcgactccgagggaggagctttgcgggcaacctgaacacctacaagcgacttgccatcaagctgccggatgatcagatcccaaagaccaattgcaacgtagctgtcatcaacgtgggggcacccgcggctgggatgaacgcggccgtacgctcagctgtgcgcgtgggcattgccgacggccacaggatgctcgccatctatgatggctttgacggcttcgccaagggccagatcaaagaaatcggctggacagatgtcgggggctggaccggccaaggaggctccattcttgggacaaaacgcgttctcccggggaagtacttggaagagatcgccacacagatgcgcacgcacagcattcaacgcgctgctgatcatcggtgggtttcgaggcctacctgggactcctggagctgtcagccgcccgggagaagcacgaggagttctgtgtccccatggtcatggttcccgctactgtgtccaacaatgtgccgggttccgatttcagcatcggggcagacaccgccctgaacactatcaccgacacctgcgaccgcatcaagcagtccgccagcggaaccaagcggcgcgtgttcatcatcgagaccatgggcggctactgtggctacctggccaacatgggggggctcgcggccggagctgatgccgcatacattttcgaagagcccttcgacatcagggatctgcagtccaacgtggagcacctgacggagaaaatgaagaccaccatccagagaggccttgtgctcagaaatgagagctgcagtgaaaactacaccaccgacttcatttaccagctgtattcagaagagggcaaaggcgtgtttgactgcaggaagaacgtgctgggtcacatgcagcagggtggggcaccctctccatttgatagaaactttggaaccaaaatctctgccagagctatggagtggatcactgcaaaactcaaggaggcccggggcagaggaaaaaaatttaccaccgatgattccatttgtgtgctgggaataagcaaaagaaacgttatttttcaacctgtggcagagctgaagaagcaaacggattttgagcacaggattcccaaagaacagtggtggctcaagctacggcccctcatgaaaatcctggccaagtacaaggccagctatgacgtgtcggactcaggccagctggaacatgtgcagccctggagtgtctgacccagtcccgcctgcatgtgcctgcagccaccgtggactgtctgtttttgtaacacttaagttattttatcagcactttatgcacgtattattgacattaatacctaatcggcgagtgcccatctgccccaccagctccagtgcgtgctgtctgtggagtgtgtctcatgctttcagatgtgcatatgagcagaattaattaa

SEQ ID NO: 120144 - DNA, 462 bp, Homo sapiens
atgcagccgttagaagactctctggccgctagagtgctgcagtcggtaggactgggacgatgtgggccatcgcatggagggaagttctgtgagggctccactcgcactctgaagctctgcaacagtcagaaatgtccccgggacagtgttgacttccgtgctgctcagtgtgccgagcacaacagcagacgattcagagggcggcactacaagtggaagccttacactcaagtagaagcaatctgtaggccggataagatgcgtcagcatcgcatccggcagggtttattattgttttttcgctctagaaggcaaaaaaccttccagcacaatcagtgccgcaccgacacagatggcagtatcggcaaggttgaaggtgcatgccctgaggtgggcagatcacgacgaggtcaagagatcgagaccatcctggccaacacggtgaaaccctgtctctactaa

SEQ ID NO: 120145 - DNA, 5976 bp, Homo sapiens; identical to SEQ ID NO: 119514
  misc_feature (1)...(5976): n = a,t,c or g

SEQ ID NO: 120146 - DNA, 3657 bp, Homo sapiens
atggataaattcctcgacacatacactctcccaagactaaaccaggaagaagttgaatctctgaatagaccaataacaggagctgaaattgtggcaataatcaatagcttaccaactaaaaagagtccaggaccagatggattcacagccaaattctaccagagtaaaatactggcaaaccaaatccagcagcacatcaaaaagcttacccaccaggatcaagtggacttcatccctgggatgcaaggctggttcaatatacgcaaatcaataaatgtaatccagcatataaacagaagcaaagacaaaaaccacatgattatctcaatagatgcagaaaaggcctttgacaaaattcaacaacacttcatgctaaaaactctcaataaattacgtattgatgggacgtatctcaaaataataagagctatctatgacaaacccacagccaatatcatactgaatgggcaaaaactggaagcattccctttgaaaactggcacaagacagggatgctctctctcaccactcctattcaacatagtgttggaagttctggccagggcaattaggcaggagaaggaaataaagggtattcaattaggaaaagaggaagtcaaattgtccctgtttgcagatgacatgattgtatatctagaaaaccccattgtctcagcccaaaatctccttaagctgataagcaacttcagcaaagtctcaggatacaaaatcaatgtacaaaaatcacaagcattcttatacaccaacaacagacaaacagagagccaaatcatgagtgaactcccattcacaattgcttcaaagagaataaaatacctaggaatccaacttacaagggatgtgaaggacctcttcaaggagaactacaaaccactgctcaaggaaataaaagaggatacaaacaaatggaagaacatcccatgctcatgggtaggaagaatcaatatcgtgaaaatggccatactgcccaagataatttacagattcaatgccatccccatcaaactaccaatgactttcttcacagaattggaaaaaactactttaaagttcatatggaaccaaaaaagagcccgcattgccaaggcaatcctaagccaaaagaacaaagctggaggcatcacgctacctgacttcaaactatactacaaggctacagtaaccaaaacagcatggtactggtaccaaaacagagatatagatcaatggaacagaacagagccctcagaaataacgctgcatatctacaactttctgatctttgacaaacctgagaaaaacgagcaatggggaaaggattccctatttaataaatggtgctgggaaaactggctagccatatgtagaaagctgaaactggatcccttccttacaccttatacaaaaatcaattcaagatggattaaagacttaaacgttagacctaaaaccataaaaaccctagaagaaaacctaggcattaccattcaggacataggcatgggcaaggacttcatgtctaaaacaccaaaagcaatggcaacaaaagccaaaattgacaaatgggatctaattaaactaaagaacttctgcacagcaaaagaaactaccatcagagtgaacaggcaacctacaaaatgggagaaaattttcacaacctactcatctgacaaagggctaatatccagaatctacaatgaactccaacaaatttacaagaaaaaaacaaacaaccccatcaaaaagtgggcaaaggacatgaacagacacttctcaaaagaagacatttatgcagccaaaaaacacatgaaaaaatgctcaccatcactggccatcagagaaatgcaaatcaaaaccacaatgagataccatgtcacaccagttagaatggcaaccattaaaaagtcaggaaacaacagctggaggtcatgcctgcaaccatgggcagcacattcaacaacttaccggcacccaggaaccatggagaaaaaaaccagcagcggggacacccccactgtcttcccatccaccctgggtcgcaagaaaagcacaagtgctcaactaactgaactgacagctcttacacttgagttaagcaagggaaaggtaagaaacgccccttcaaagttagatctaagcccttttgagatgctgtatggatggccttttctcaccaatgatttcttattagaccaagagacctctgaattgggcaagcatgtaaactctctggctcgttttcaacaggaattaactcaagtagcagaagcccaaccccaagaagtaggaccacctttatttaacccaggatatttggtattgcccaagcagggagggccttacaccattctcctttcaatgccctcagcagtaaaagttacaggtattgattcctggatacatcatgctcaagttaaagcctggaaaactgagagagcaatccccggcagcccagcggaatgtcttggataccaatgtgaggaaataagagacctgaagctgaaaatcaaaagagataagaaaatgagcaagggctactcatcctactcagttccagtcatccattcagtcatccagtcatccagtctttgtacaactggtacacagaagtcaagaattgaggtttgggaacctctgcctagatttccgaagatgtatggatatgcctggattcctagacaaaagtttgctgcaggggcagggccctcatggagaacctctgttaaggcagtgcagaagggaaatgtggggtcgaagccccaccacagagaccctactggggcactgcctagtggagctgtgagaagaggaccaccatcctccagacctcagaatggtagatccactggcagcttgcaccgtgtgcctggaaaagccagacctcaacaccagcctgtgaaagcagccaggagggaggccgtgccctacaaagccacaggggtagagctgcccaagaccatgggaacccacctattgcatcagtgtgacctggatctacctgccaccttctctctcagccttcacatcaagtacctcaaacatcgacattcttattccccacatctccacctcctattcaccgtcatgggcccccatgccaggcaaatgattcgcatctctggcatagatgttgacaccaggaacctgtataagctgaatttgaaagtaaagtggctggaggttttggatcaagaggaacctgaatacagtagaacaacctccaggaagaagcagggattccctaacagcgatgaagaagatgtattgtggatggagaagcagctgtcctgcttctgtgacaagtaccaaaaatggataccaaccagacagctgaagggacagctcagttacgttaaggaagcagatctgattccagatgtaatgcccccacaagctttgttccatgatgatgatgagatggaaggcaatggagccatagacgcagggatggagtatgtctacaacattgacacgttgcttagatggtctgatggtgaggaggaaggagaaggaggagaagaaggaagaggaggaggaagaggaggagaaggaggaggaaagagggaggagggagaaggaaaaaaagaagaagaacaaggaggatggggaggaggacaggaagtggaagaagaaggaggaggaggagggggaaattaa

SEQ ID NO: 120147 - DNA, 5130 bp, Homo sapiens; identical to SEQ ID NO: 116418

SEQ ID NO: 120148 - DNA, 3666 bp, Homo sapiens; identical to SEQ ID NO: 116259

SEQ ID NO: 120149 - DNA, 3213 bp, Homo sapiens; identical to SEQ ID NO: 116408

SEQ ID NO: 120150 - DNA, 5076 bp, Homo sapiens; identical to SEQ ID NO: 118069

SEQ ID NO: 120151 - DNA, 3492 bp, Homo sapiens
atgggagactttaacaccccactgtcaacattagacagatcaacgagacagaaagtcaacaaggatacccaggaattgaactcagctctgcaccaagcggacctaacagacatctacagaactctccaccccaaatcaacagaatatacatttttttcagcaccacaccacacctattccaaaattgaccacatagttggaagtaaagctctcctcagcaaatggaaaagaacagaaattataacaaactatctctcagaccacagtgcaatcaaactagaactcaggattaagaatcccactcaaagccgctccactacatggaaactgaacaacctgctcctgaatgactactgggtacataataaaatgaaggcagaaataaagatgttctttgaaaccaacgagaacaaagacacaacataccagaatctctgggatgcattcaaagcagtgtgtagagggaaatttataccactaaatgcccacaagagaaagcaggaaagatccaaaattgacaccctaacatcacaattaaaagaactagaaaagcaagagcaaacacattcaaaagctagcagaaggcaagaaataactaaaatcagagcagaactgaaggaaatagagacacaaaaaacccttcaaaaaatcaatgaatccaggagctggttttttgaaaggatcaacaaaactgatagaccgctagcaagactaataaagaaaaaaagagagaagaatcaaatagacacaataaaaaatgataaaggggatatcaccaccgatcccacagaaatacaaactaccatcagagaatactacaaacacctctacgcaaataaactagaaaatctagaagaaatggataaattcctggacacatacactctcccaagactaaaccaggaagaagttgaatctctgaatagaccaataacaggagctgaaattgtggcaataatcaatagcttaccaaccaaaaagggtccaggaccagatggattcacagccgaattctaccagaggtacaaggaggaactgcatataaacagagccaaagacaaaaaccacatgattatctcaatagatgcagaaaaagcctttgacaaaattcaacaacccttcatgctaaaaactctccataaattaggtattgatgggacatatttcaaaataataagacctatctatcacaaacccacagccaatatcatactgaatgggcaaaaactggaagcattccctttgaaaactggcacaagacagggatgccctctctcaccactcctattcaacatagtgttggaagttctggccagggcaattaggcaggagaaggaaataaagggtattcagtcaggaaaagaggaagtcaaattgtccctgtttgcagatgacgtgattgtatatctagaaaaccccattgtctcagcccaaaatctccttaagctgataagcaacttcagcaaagtctcaggatataaaatcaatgtacaaaaatcacaagcattcttatacaccaacaacagacaaacagagagccaaatcaggagtgaactcccattcacaattgcttcaaagagaataaaatacctaggaatccaacttacaagggatgtgaaggacctctacaaggagaacgacaaaccactgctcaaggaaataaaagaggatacaaacaaatggaagaacattccatgttcatgggtaggaagaatcaatatcgtgaaaatggccatactgcccaaggtcatttacagattcaatgccatccccatcaagctaccaatgactttcttcacagaattggaaaaaactactttaaagttcatatggaaccaaaaaagagcccgcatcaccaaggcaatcctaagccaaaagaacaaagctggaggcatcacactacctgactacaaactatactacaaggctacagtaaccaaaacagcatggtactggtaccaaaacagagatatagatcaatggaacagaatagagccctcagaaaaaacgccgcatacctacaactatctgaactttgacaaacctgagaaaaacaagcaatggggaaaggattccctatttaataaatggtgctgggaaaactggctagccatatgtaggaagctgaaactggatcccttccttacatcttatacaaaaatcaattcaagatggattaaagatttaaacgttagacctaaaaccataaaaaccctagaagaaaacctaggcattaccattcaggacataggcatgggcaaggacttcatgtccaaaacaccaaaagcaatggcaacaaaagacaaaattgacaaatgggatctaattaaactgaagagcttctgcacagcaaaagaaactaccatcagagtgaacaggcaacctacaaaatgggagaacattttcgcaacctactcatctgacaaagggctaatatccagaatctacaatgaactcaaacaaatttacaagaaaaaaacaaacaaccccatcaaaaagtgggcgaaggacatgaacagacacttctcaaaagaagacatttatgcagccaaaaaacacatgaaaacatgctcatcatcactggccatcagagaaatgcaaatcaaaaccactatgagataccatctcacaccagttagaatggcaatcattaaaaagtcaggaaacaacagagctggctctcaactcactcgccaatttcagagtacagcggtggggtgtggtgtatgcatcggtgcacggacagacagaaccatgagcagcaactaccatgggtcatcggggaagggaaaagtgtgctcccaggtaagcagggtcaaaccacccccaagagcctcacttgtccctggtggctctgccactgaactgactcttaaaaccggaaacgggccagggggccagcacgacggtggcagtgatctcctggccatcaatttgtcctccatccatgtgcttcagcgccttctcagcttcatctggattctcaaactctacgcacgcatagcctttggacagatggggatgcatcctttccacgggcatgtcaatcattttaattttcccataggtggaaaatatctccatgatgtgatcctttgtcacattcctggtggtttggatttggagcgggagcgcctcctgttgtcgtgtctgcgccgagaaggacttggagagccagaagagctgctagagctggagctgcgggaggtgctggagcttcctgagcggctggaggctgaggaagagctggagccactgcttgagccagtgctggtgctggagcctgagctggaagtcgagctggaccgagacctggtactgctgctaccactggaagcgctgtgcctctttcgcgttttgtcccggccgcgatccttctcactcgactccttggtggcccctttatcttttgagcgatccttggacttctcatctgagcggtctttgcgtttggatcacctgcagcagcactgtccagtagaaaccgtgtga

SEQ ID NO: 120152 - DNA, 3235 bp, Homo sapiens; identical to SEQ ID NO: 116409

SEQ ID NO: 120153 - DNA, 3834 bp, Homo sapiens
atggctactctgatccccctactgtttcacaagcatcctcatctcacacaaagatatcaattcaacgtcagaggtggctgcccgacgagcaccagtgccattgctactctggatcctagaactgcagtgtttccactcatgtctgtttttcagacctcagctccatggccattttggggtttcactcatcagacaccagtgccacagccactgaaagtgaaaatccacagttctgcagacaccgctgctgatatccaggcaaacagggtctggagtggacctccagcaaactccaagagacctgcagctgaggaaggaaaactaacaaacagaaaggacatccacaccaaaaacccatctgtacgtcaccatcatcaaagaccaaaagtagataaaaccacaaagacggggaaaaaacagaggagaaaaactggaaactctaaaaagcagagcgcctgtcctcctccaaaggaacgcagttcctcaacagcaacggaacaaagctggacggagaatgactttgacaagttgagagaaggcttcagacgatcaaactactccaagctacaggacgaaattcaaaccaaaggcaaagaagttgaaaacttggaaaaaagtttagacgaatgtataactagaataaccaatacagagaagggcttaaagaagctcgagaactacgtgaagaatgaagaaacctcaggagccaatgcgatcaactggaagaaagggatcaacaaaattgatagaccactagcaagactaataaagagaaaaagagagaagaatcaaatagacgcaataaaaattgataaaggggatatcaccaccgatcccacagaaatacaaactaccatcagagaatactacaaacacctctatgcaaataaactagaaaatctagaagaaatggataaattcctcgacacatacactctcccaagactaaaccaggaagaagttgaatctctgaatagaccaataacaggagctgaaattgtggcaataatcaatagcttaccaaccaaaaagagtccaggaccagatggattcacagctgaattctaccagaggtacaaggaggaactggtaccattccttctgaaactattccaatcaatagaaaaagagggaatcctccctaactcattttatgaggccagcatcatcctgataccaaagctgggcagagacacaaccaaaaaagagaattttagaccaatatccttgaggaacattgatgcaaaaatcctcaataaaatactggcaaaccgaatccagcagcacatcaaaaagcttatccatcatgatcgagtgggcttcatccctgggatgcaaggctggttcaacatacgcaaatcaataaatgtaatccagcatataaacagaaccaaagacaaaaaccacatgattatctcaatagatgcagaaaaggcctttgacaacattcaacaacccttcatgctaaaaactctcaataaattaggaatggatgggacatatctcaaaataagaagagctatctatgacaaacccacagccaatatcatactgaatgggcaaaaactggaagcattccctttgataactggcacaagacagggatgccctctctcaccactgctatacaacatagtgttggaagttctggccagggcaattaggcagaagaaggaaataaagggtattcaattaggaaaagaggaagtcaaattgtccctgtttgcagacgacatgactgtatatctagaaaaccccatcatatcagcccaaaatctccttcagctgataagcaacttcagcaaagtctcaggatataaaatcaatgtacaaaaatcacaagcattcttatacaccaataacagacaaacagagagccaaatcaagagggaactcccattcacaattgcttcaaagagaataaaatacttaggaatccaacttacaagggatgtgaaggacctcttcaaggaaaactacaaaccactgctcaatgaaataaaagaggatacaaacaaatggaagaacattccatgctcatgggtaggaagaatcaatattgtgaaaatggccatactgcccaaggtaatttatagattcaatgccatccccatcaagctaccaatgactttcttcacagaattggaaaaaactactttaacgctcatatggaaccaaaaaagagcccacatcgtcaagtcaatcctaagccaaaagaacaaagctggaggcatcacgctaccagacttcaaactatactacaaggctacagtaaccaaaacagcatggtactggtaccaaaacagagatatagatcagtggaacagaacagagccctcagaaataatgccacatatctacaactatctgatctttgacaaacctgagaaaaacgagcaatggggaaaagattccctatttaataaatggtgctgggaaaactggctagccatatgtagaaagctcaaactggatcccttccttacaccttatacaaaaattaattcaagatggattaaaggcttaaatgttagacctgaaaccataaaaaccctagaagaaaacctaggcattaccattcaggacataggcatgggcaaggacttcatgtctaaaacaccaaaaacaatggcaacaaaagccaaaattgacagatgggatctcattaaactaaagaacttctgcacagcaaaagaaactaccatcagagtgaacaggcaaactacaaaatgggagaaaattttcacaacctactcatctgaaaaagggctaatatccagaatctacaatgaactcaaacaaatttacaagaagaaacaaacaaccccaacaaaaagaggtattccaaaagaaagcattattgtaataggagatgacagctccatgcatgttaatgcccctgaaggccttccagtgggacaagatttggaggttgaagatggtgatattgattatcctgattctgatggcagctcctcaccagctatggaacaaagctggacagagaaggactttgatgaattgacagaagtaggcttcagaagaataaacagtgtggagaagatgttaaatgacctgatggagctgaaaaccatggcacaagaactttgtgacacatgcacaagtttcagtagcagatttgatcaagtggaagaaaggatatcagtgattgaatatcaaattaatgaaataaagcaagaggaggagtttagagaaaaaagagtaaagagagacaaacaaagcctccaagaaatatgggacaatgtgaaaagaccaaatctatgtttgattggtatacctgaaagtgatggggagaatggaaccaagttggaaaacacttttcaggatattatccaggagaacttccccaacctagcaaggcaggccaacattcaaattcaggaaatacagaaaataccacaaagatactccttgagaagagcaaccccaagacacataattgtcagattcactaaggttgaaatgaaggaaaaaatgttaaaagcagccagagagaaaggtcaggttacccacaaagggaatcccatcagactaacagtggatctctcagcagaaaccttagaagccagaagagagtggggaccaatattcaacattcttaaagaaaagaattttccacccggaatctcatatccagccaaactaagcttcataagcaaaggagaaataaaatactttacagacaagcaaatactgagagattttgtcaccaccaggcctgccttacaagacctcctgaaggaagcactaaacacggaaagtaacaactggtaccagccactgcaaagcatgccaaattgtaaagacctttga

SEQ ID NO: 120154 - DNA, 3300 bp, Homo sapiens; identical to SEQ ID NO: 118070

SEQ ID NO: 120155 - DNA, 4989 bp, Homo sapiens
atgaaggcagaaataaagatgttctttgaaaccaacgagaacaaagacacaacaaaccagaatctctgggacgcattcaaagcagaagaagttgaatctctgaatagaccaataacaggagctgaaattggggcaataatcaatagtttaccaaccaaaaagagtccaggaccagatggattcacagccgaattctaccagaggtacaaggaggaactggtaccattccttctgaaactattccaatcaatagaaaaagaggaaatcctccctaactcattttatgaggccagcatcattctgataccaaagccgggcagagacacaaccaaaaaagagaattttagaccaatatccttgatgaacatcgatgcaaaaatcctcaataaaatactggcaaaccgaatccagcagcacatcaaaaagcttatccaccatgatcaagtgggcttcttccctgggatgcaaggctggttcaatatacgcaaatcaataaatgtaatccagcatataaacagagccaaagacaaaaaccacatgattatctcaatagatgcagaaaaagcctttgacaaaattcaacaacccttcatgctaaaaactctcaataaattaggtattgatgggacgtatttcaaaataataagagctatctatgacaaacccacagccaatatcatactgaatgggcaaaaactggaagcattccctttgaaaactggcacaagacagggatgccctctctcaccgctcctattcaacatattgttggaagttctggccagggcaatcaggcaggagaaggaaataaagggtattcaattaggaaaagaggaagtcaaattgtccctgtttgcagacgacatgattgtttatctagaaaaccccatcgtctcagcccaaaatctccttaagctgataagcaacttcagcaaagtctcaggatacaaaatcaatgtacaaaaatcacaagcattcttatacaccagcaacagacaaacagagagccaaatcatgagtgaactcccattcacaattgcttcaaagagaataaaatacctaggaatccaacttacaagggatgtgaaggacctcttcaaggagaactacaaaccactgctcaaggaaataaaagaggatacaaacaaatggaagaacattccatgctcatgggtaggaagaatcaatatcgtgaaaatggccatactgcccaaggtaatttacagattcaatgccatccccatcaagctaccaatgactttcttcacagaattggaaaaaactactttaaagttcatatggaaccaaaaaagagcccacatcaccaagtcaatcctaagccaaaagaacaaagctggaggcatcacactacctgacttcaaactatactacaaggctacagtaaccaaaacagcatggtactgctaccaaaacagagatatagatcaatggaacagaacagagccctcagaaataacaccgcatacctacaactatctgatctttgacaaacctgagaaaaacaagcaatggggaaaggattccctatttaataaatggtgctgggaaaactggctagccatatggagaaagctgaaactggatcccttccttacaccttatacaaaaatcaattcaagatggattaaagatttaaacgttagacctaaaaccataaaaaccctagaagaaaacctaggcattaccattcaggacataggcatgggcaaggacttcatgtccagaacaccaaaagcaatggcaaccaaagccaaaattgacaaatgggatctaattaaactaaagagcttctgcacagcaaaagaaactaccatcagagtgaacaggcaacctacaacatgggagaaaattttcgcaacctactcatctgacaaagggctaatatccagaatctacaatgaactcaaacaaatttacaagaaaaaaacaaacaaccccatcaaaaagtgggagaaggacatgaacagacacttctcaaaagaagacatttatgcagccaaaaaacacatgaaaaaatgctcatcatcactggccatcagagaaatgcaaatcaaaaccactatgagatatcatctcacaccagttagaatggcaatcattaaaaagtcaggaaacaacagacttcttggaagtgccctagaatcagcaggtccaaatcaaactcagctggccgtgggtcagccattgcagccccacctgccacgggctccaggaagagcagtcatcagtatggagaaggccggactctgctcagaagccactgagcaggtgctccatagactcaccagctggagcggggtcacatctcggaggcaccgtcagcaccaggagggcagccaagcaagggtatggcatttccgagcctctgcggtcaagggtatcgcatttccgagcctctgcggtcaagggtatggcgtttccgagcctctgcggtcaagggtatggcgtttccgagcctctgcagtcaagagcccagagatgggttgtcggggcagctgtgggggcatcccagatgtgggtgccaacatgcgtgatgacctgacaccagtgtgtgatgacctggcaccagtgcttgatgacctgacaccagtgcatcatgacctgacaccagcgcgcaatgacctgacaccagtgcacgatgacctggcaccagtgcgtgatgacctgacaccagtgcgtcatgacctgacaccagtgcgtgatgacctggcaccagtgcgcgatgacctgacaccagtgtgcgatgacctggcaccagtgtgcgatgacgtggccccagtgtgccatgacctggcaccagtgcgcgatgacctgacaccagtgtgcgatgacctggcaccagtgcacaatgaccttgcagcaatccaaacctacctgcaagctgcaagcgatgtgcctgtgggacacagcctggaccccgctgcgaactacaactccccgaaattccgctcccggaaccagagctacatgagggccgtcagcaccctgagccaggccagctgcgtgagccaggtgagcgaggcggagatcaatgggcaattcgagtccgtgtgcgagtccgtcttcagtgaagttgaatctcaggccatggatgccctcgacctcccgggatgtttccgaacaaggagtcacagctaccttcgagccattcaagccggctactcccaagatgacgaatgtattcccatgatgacaccctctgacatcacctccaccatcaggtcaacagcagaaggcgagcgtgatgcagataaatcgtgcatctgtatcaggaactgcatatactggaattacaacatgaatgctgggatgatctcccaggtgatgtttgccattggtggtggaggccgaataatgccgcacagttctctgtatgatagtgtgacggtggagttcatgtggcaacttgactgggccatggagtgcccaaatatctggttaaacattattgtggggtgccctgagcccaaccgaatgaagcgctggccccgtcagcagccatggtcacgtccacttggaagttccaaatcccgaggttcctgcagagagcagctctctgctgtggcaccagctgctgtgttcttcagaaaatacaagttctcgccgtgtgatgtgatgttcaaaccttttcaatggaaacaggaagtgtctcgaacagcagagcagctgacatcacttcattttactgtctacatgttaaatgctgctgtacagccggtggtacagaatgccccatgcaactcgagttcgggaggagactggctggtgacggccacagctgtctcatatacaaattacaagaaaacgcccccaccggtgccccctcggaccacctccaagcctctgatctcggtgacggcgcagagcagcaccgaatccacccaggacgcctaccaggacagccgcgcacagaggatgtccccgtggccccaggacagccgcggcctctacaactccacggacagcctggacagcaacaaggccatgaacctcgcgctggagacggccgctgcccagcgccacctgccagagagccagagcagctctgtgcggaccagcgacaaggccatcctggtgtccaaggcggaggaactcctcaagagccgctgctcctccatcgggattcagatgaagacaaggggctcaccggggtccctaacctgcctgcagccctgggcctcgctgggctccggcgccgaattacacccggtgaaagtggacgtctctgtccgttcccctggatccacggcggcggccgagagctccagggttttctcgcgctctgtcttctgtgcggcacccggctctggggtggaaacggccacagattctgacacggagagccgcggtctgcgggaataccactctgtcggggtgcaagtggaagatgagaagcgacacggacgttttaaacgttctaacagcgtcacggccgccgtccaagctgacctggagctggaggggttcccaggccacatcaccacggaggacaaaggccttcagttcggctcatccttccagcggcactccgagcccagcacccccacccagtacagcgcggtgagaactgtacggacccaggggctcttcagctatagagaaaactatcggacccaagtggacacctccaccctgccccctccagacccctggctggagcccgccatcgacacggtagagactgggaggatgtctccgtgccgcagggatggctcgtggtttttgaagctgctgcacgcagagacaaagaggatggaaggctggtgcaaagagatggagagagaggcggaggagaacgacctctcggaggaaagaggtgacattggacgccgaatgttggggagatgctgccttccacgtgacccacagtccccgcagcacggctgcatggggctggtgcaagtcagcacagccgtgttccgatcgttcacatggcgtttgcatttctcatggttagggtacatttaa

SEQ ID NO: 120156 - DNA, 3420 bp, Homo sapiens
  misc_feature (1)...(3420): n = a,t,c or g
atggggaaaaaacagaacagaaaaactggaaactctaaaacgcagagcgcctctcctcctccaaaggaacgcagttcctcaccagcaacagaacaaagctggatggagaatgattttgacgagctgagagaagaaggcttcagacgatcaaattactctgagctacgggaggacattcaaaccaaaggcaaagaagttgaaaactttgaaaaaaatttagaagaatgtataactagaataaccaatacagagaagtgcttaaaggagctgatggagctgaaaaccaaggctcgaaaactacgtgaagaatgcagaagcctcaggagccgatgcgatcaactggaagaaagggtatcagcaatggaagatgaaatgaatgaaatgaagcgagaagggaagtttagagaaaaaagaataaaaagaaatgagcaaagcctccaagaaatatgggactatgtgaaaagaccaaatctacgtctgattggtgtacctgaaagtgatgtggagaatggaaccaagttggaaaacactctgcaggatattatccaggagaacttccccaatctagcaaggcaggccaacgttcagattcaggaaatacagagaacaccacaaagatactcctcgagaagagcaactccaagacacataattgtcagattcaccaaagttgaaatgaaggaaaaaatgttaagggcagccagagagaaagacagatcaacgagacagaaagtcaacaaggatacccaggaattgaactcagctctgcaccaagcagacctaatagacatctacagaactctccaccccaaatcaacagaatatacatttttttcagcaccacaccacacctattccaaaattgaccacatagttggaagtaaagctctcctcagcaaatgtaaaagaacagaaattataacaaactatctctcagaccacagtgcaatcaaactagaactcaggattaagaatctcactcaaagccgctcaactacatggaaactgaacaacctgctcctgaatgactactgggtacataacgaaatgaaggcagaaataaagatgttctttgaaaccaatgagaacaaagacacaacataccagaatctctgggacgcactcaaagcagtgtgtagagggaaatttatagcactaaatgcccacaagggaaagcaggaaagatctgaaattgacaccctaacatcacaattaaaagaactagaaaagcaagagcaaacacattcaaaagctagcagaaggcaagaaataactaaaatcagagcagaactgaaggaaatagagacacaaaaaacccttcaaaaaatcaatgaatccaggagctggttttttgaaaggatcaacaaaattgatagaccgctagcaagactaataaagaaaaaaagagagaagaatcaaatagacacaataaaaaatgataaaggggatatcaccaccgatcccacagaaatacaaactaccatcagagaatactacaaacacctctacgcaaataaactagaaaatctagaagaaatggatacattccttgacacatacactctcccaagactaaaccaggaagaagttgaatctctgaatcgaccaataacaggctctgaaantgtggcaataatcaatagtttaccaaccaaaaagagtccaggaccagatggattcacagccgaattctaccagaggtacaaggaggaactggtaccattccttctgaaactattccaatcaatagaaaaagagggaatcctccctaactcattttatgaggccagcatcatactgataccaaagccgggcagagacacaaccaaaaaagagaattttagaccaatatccttgatgaacattgatgcaaaaatcctcaataaaatactggcaaaccgaatccagcagcacatcaaaaagcttatccaccatgatcaagtgggcttcatccctgggatgcaaggctggttcaatatacgcaaatcaataaatgtaatccagcatataaacagagccaaagacaaaaaccacatgattatctcaatagatgcagaaaaagcctttgacaaaattcaacaacccttcatgctaaaaactctcaataaattaggtattgatgggacgtatttcaaaataataagagctatctatgacaaacccacagccaatatcatactgaatgggcaaaaactggaagcattccctttgaaaaccggcacaagacagggatgccctctctcaccgctcctattcaacatagtgttggaagttctggccagggcaatcaggcaggagaaggaaataaaggctattcaattaggaaaagaggaagtcaaattgtccctgtttgcagacgacatgattgtttatctagaaaaccccatcgtctcagcccaaaatctccttaagctgataagcaacttcagcnaactctcaggatacaaaatcaatgtacaaaaatcacaagcattcttatacaccaacaacagacaaacagagagccaaatcatgggtgaactcccattcacaattgcttcaaagagaataaaatacctaggaatccaacttacaagggatgtgaaggacctcttcaaggagaactacaaaccactgctcaaggaaataaaagaggagacaaacaaatggaagaacattccatgctcatgggtaggaagaatcaatatcgtgaaaatggccatactgcccaaggtaatttacagattcaatgccatccccatcaagctaccaatgactttcttcacagaattggaaaaaactactttaaagttcatatggaaccaaaaaagagcccgcattgccaagtcaatcctaagccaaaagaacaaagctggaggcatcacactacctgacttcaaactatactacaaggctacagtaaccaaaacagcatgtgggtaccagaagcagggagcagacacctcggagcctgcaggggcagtgaggggaaaccttccgaacttcccaagcccccaagagtgcagagatgccaggtccacagccatggcttggctggctgcagctgtgcctaagaagggaaagactcacattctcttgcctaatagtacaaggctagcctcagacattctgggagctggactggagaagcgatgttggggattcaccattcaatatgaactttgtgttcagtacagtctctctccttctttgtgtctggtgtctcagtgtcagactgctgttgtccaagcccccaagcaccgtggacatgttcagtggtgtctgatcccatcggcacagagcttggcttctcaggaggctcctcagagtcgcgtaaatagggtttccgatgcccggcctcaccagcttacagacgtgtctgaatctccttttcactcaggccacacttatattcactcttccctcctgaacattcgttag

SEQ ID NO: 120157 - DNA, 3579 bp, Homo sapiens
atgcctggccacaacctgaaatggaaactcaacagaggaactgtcctgattgaaaccggcatccagctcagcacctccaccatcctggggtcagcctctgagccaccttctgctccaatccctaaagcacaggttagttccactgagaagctacggaactgcatagatgatctgaaaccctttccagctctggcatctgagctgtcaaggagagctaaagcgctccagattgcaggattcccaccaatgaaagtgcccagagataccatcagcaaagtatgtttggacaagacggtgggaaaactttgccactcaggagaagaatctagaaagtgcacccttatctgtaataacaagcactatccaatccaggataatctacaggggtacaaaacccaaaacaaatttctaaataaggagattttggaactctcagctctacgaagaaatgcagaaaggagagagagggatctgatggcaaagtattctagcctggaagccaagctctgccagatagaaagtaaatacctgatattgctccaagaaatgaagacaccagtgtgctcagaagaccaggggcccacccgggaggtcatagcccagttgctggaggatgctctgcaggttgagagccaagagcagccggagcaagcatttgttaaacctcatcttgtcagtgaatatgatatttatgggttcaggactgtacctgaggatgatgaggaagagaaattggttgccaaggtccgcgcgttggatctgaagactctctacctcacagaaaaccaggaagtctccactggggtcaagtgggaaaactattttgcaagtacagtgaacagggagatgatgtgctctccagagttaaaaaacctcatccgtgcgggcattccccacgagcaccgttccaaggtgtggaagtggtgtgtggaccgtcacaccaggaagttcaaggacaacactgagcctggccacttccagaccttgctgcagaaggcgctggagaaacagaacccagcctccaagcagattgagctggacttgctgcgaactctgcccaacaacaaacattactcctgccccacctcagaaggcatacagaagttacgcaatgtcctcctcgccttctcctggcggaatccagatatcggctactgtcaaggcctaaacagtgcaatcaaactagaactcagaattaagaaactcactcaaaactgctcaactacatggaaactgaacaacctgctcctgaatgactactgggtacataacgaaacaaaggcagaaataaagatgttctttgaaaccaacgagaacaaagacacaacataccagaatctctgggacacattcaaagcagtgtgtagagggaaatttatagcactaaatgcccacaagagaaagcaggaaagatccagaattgacaccctaacatcacaattaaaagaactagaaaagcaagagcaaacacattcaaaagctagcagaaggcaagaaataactaaaatcaaagcagaactgaatgaaatagagacacaaaaaacccttcaaaaaattaatgaatccaggagctggttttttgaaaggatcaacaaaattgatagaccgctagcaagactaataaagaagaaaagagagaagaatcaaatagacacaataaaaaatgataaaggggatatcaccaccaatcccacagaaatacaaactaccatcagagaatactacaaacacctctactcaaataaactagaaaatctacaagaaatggatactttccttgacacatacaccctcccaagactaaaccaggaagaagttgactctctgaatagaccaataacaggctctgaaattgtggcaataatcaatagcttaccaaccaaaaagagtccaggaccagatggattcacagccgaattctatcagaggtacaaggaggagctgataccattccttctgaaactattccaatcaacagaaaaagagggaatcctccctaactcattttatgaggccagcatcatcctgataccaaagcctggcagagacacaaccaaaaaagagaattttagaccaatatccttgatgaacattgatgcaaaaatcctcaataaaatactggcaaaccaaatccagcagcacatcaaaaagcttatccaccatgatcaagtgggcttcatccctggaatgcaaggctggttcaatatatgcaaatcaataaatgtaatccagcatataaacagaaccaaagacaaaaaccacatgattatctcaatagatgcagaaaaggcctttgacaaaattcaacaacccttcatgataaaaactctcaataaattaggtattgatgggatgtatctcaaaataataagagctatctatgacaaacccacagccaatatcatgctgaatgggcaaaaactggaagcattccctttgaaaactggcacaagacagggatgccctctctcaccactcctattcaacattgtgttggaagttctggccagggcaattaggcaggagaaggaaataaagggtattcaattagggaaagaggaagtcaaattgtccctgtttgcagatgacatgattgtatatctagaaaaccccattgtctcagcccaaaatctccttaagctgataagcaacttcagcaaagtctcaggatacaaaatcaatgtacaaaaatcacaagcattcttataccccaataacagacaaacagagagtcaaatcatgcgtgaactcccattcacaattgcttcaaagagaataaaatacctaggaattcaacttacaagggacgtgaaggacctcttcaaggagaagtacaaaccactgctcaaggaaataaaagaggatacaaacaaatggaagaacattccatgctcatgggtaggaagaatcaatatcatgaaaatggccatactgcccaagctaccaatgactttcttcacagaattggaaaaaactactttaaagttcatatggaaccaaaaaagagcctgcatcgccaagtcaatcctaagccaaaagaacaaagctggaggcatcacactacctgacttcaaactacactacaaggctacagtaaccaaaacagcatggtactggtaccaaaacagagatatagatcaatggaacagaacagagccctcagaaataacaccgcatatctacaactatctgatctttgacaaacctgagaaaaacaagcaatggggaaaggattccctatttaataaatggtgctgggaaaactggctagccatatgtagaaagctgaaactggatcccttccttacaccttatacaaaaattaattcaagatggattaaagacttaaacgttagacctaaaaccataaaaaccctagaagaaaacctaggcattaccattcaggacataggcatgggcaaggacttcatgtctaaaacaccaaaagcaatggcaacaaaagccaaaattgacaaatgggatctaattaaagagcttctgcacagcaaaagaaactaccatcagagtgaacaggcaacctacaaaatgggagaaaattttcgcaacctactcatctga

SEQ ID NO: 120158 - DNA, 4374 bp, Homo sapiens; identical to SEQ ID NO: 116411

SEQ ID NO: 120159 - DNA, 4830 bp, Homo sapiens
atggtaaagggatcaattcaacaagaagagctaactatcctaaatacatatgcagcccatacaggagcaccaagactcataaagcaagtcctgagtgacctacaaagagacttagactcccacacaataataatgggagactttaacaccccactgtcaacattagacagatcaacgagacagaaagttaacaaggatacccaggaattgaagtcagctctgcaccaagcggacctaacagacatctacagaactctccaccacaaatcaacagaatatacatttttttcagcaccacaccacatctattccaaaattgaccacatactgggaagtaaagctctcctcagcaaatgtaaaagaacagaaattataacaaactatctctcagaccacagtgcaatcaaactagaactctggattaagaatctcactcaaaaccactcaactacatgggaactgaacaacctgctcctgaatgactactgggtacataacgaaatgaaggcagaaataaagatgttctttgaaaccaatgagaacaaagacacaacataccataatctttgggacacattcaaagcagtgtgtagagggaaatttataccactaaatgcccacaagagaaagcaggaaagatccaaaattgacaccctaacatcacaattaaaagaactagaaaagcaagagcaaacacattcaaaagctagcagaaggcaagaaataactaaaatcagagcagaactgaaggaaatagagacacaaaaaacccttcaaaaaattaatgaatccaggagctggttttttgaaaggatcaacaaaattgatagactgctagcaagactaataaagaaaaaaagagagaagaatcaaatagatgcaataaaaaatgataaaggagatatcaccaccgatcccacagaaatacaaactaccatcagagaatactgcaaacacctctatgcaaataaactagaaaatctagaagaaatggataaattcctggacacatacactctcccaagactaaaccaggaagaagttgaatctctgaatagaccaataacaggagctgaaattgtggcaataatcaatagcttaccaaccaaaaagagtccaggaccagatggattcacagccaaattctaccagaggtacaaggaggaactggtaccattccttctgaaactattccaatcaatagaaaaagagggaatcctccctaactcattttatgaggccagcatcattctgataccaaagccaggaagagacacaacaaaaaaagagaattttagaccaatatccttgatgaacattgatgcaaaaatcctcaataaaaaactggcaaaacgaatccagcaacacatcaaaaagcttatccaccatgatcaagtgggcttcatccctggaatgcaaggctggttcaatatacgcaaatcaataaatgtaatccagcatataaacagagccaaagacaaaaaccatatgattatctcaatagatgcagaaaaagcctttgacaaaattcaacaacccttcatgctaaaaactctcaataaattagagaataaaatacctaggaatccaccttacaagggatgtgaaggacctcttcaaggagaactacaaaccactgctcaaggaaataaaagaggacagaaacaaatggaagaacattccatgctcatgggtaggaagaatcaatatcgtgaaaatggccatactgcccaagaacattttgatcacccttcagcttcttttagttctcccagaactctccacattgatcccactctggctaccagcactagctggacagtaatgactctcagaggtgaacacaatatgcctcaacatgcctttctggaagttcacataggaactgcacagcacctgaattccagttctgcaaagctcttctctgaatactggagtatatccctttggagtgccccggggaaagccagggctgcaggcatttccagcaccaactcagaccgcatctgcccactgcctagcggggcacttctctaccaatccgaagggctgctcgcccggcctcacgggaaaggtagtttccaggtagggcgccaacagcatcaagctgtgcgcgtgggctctgcgcatgcctcgtccgccggctacgtctgcgtttccgcctttccttttgtttttctcaggttttgcgtgggaggcggtcccgggatttcaagggtctacgcgcttttctatggcgaatgcaacccgacaagggagtgggctgtatcttcagagttgtctccgtctttccaagaacagaacaaaatgaacaaggtagaacagaagtcccaggagtcagtatcatttaaagatgtgactgtgggcttcacccaggaggagtggcagcacctggaccctagtcagagggctctgtatagagatgtgatgctggagaactacagcaaccttgtctcagtggggtattgtgttcacaaaccagaggtgatcttcaggctgcaacaaggagaaaagccatggaaacaggaggaagaattcccaagccaaagctttccagactatatgttcatgtctccccagaattcatatgttggagccctcaccccaagtgtggtggtgtttggagatatgcagcccttggcagaagtctggacagctgatcacctgaaagagaggagccaagaaaaccaatctaaacatttgtgggaagttgtattcatcaataatgaaatgctgactaaggaacaaggtgatgtaataggaataccatttaatgtggatgtaagttcttttccttccagaaaaatgttctgtcagtgtgattcatgtggaatgagtttcaacactgtttcagaattggttatcagtaagataaactatttaggaaaaaagtctgatgaatttaatgcctgtgggaaattgttactcaatattaagcatgatgaaactcatactcaagagaaaaatgaagttttgaaaaataggaacacactgagtcatcatgaggagactttgcagcatgagaagattcaaactttagagcacaattttgaatacagtatatgtcaggaaaccctccttgaaaaggcagtattcaatacacagaagagagagaacgcagaagagaataactgtgattataatgaatttgggagaactttgtgtgatagttcatccctcttgttccatcagatatctccgtcaagggacaatcactatgaatttagtgattgtgagaagttcttatgtgtgaagtccaccctttctaaacctcatggggtatctatgaaacactatgattgtggtgaaagtgggaataatttcaggaggaaattgtgtctgtcacaccttcagaaaggtgataaaggagagaaacactttgaatgtaatgaatgtgggaaagctttctgggagaagtcacatctcactcgacatcagagggtgcacacaggacagaaaccctttcaatgtaatgaatgtgaaaaagctttctgggataagtcaaacctcactaaacatcaaagatcacacacaggggagaaaccttttgaatgcaatgaatgtgggaaagcctttagccataagtcagccctcacattacaccagagaacacatacaggggagaaaccctatcaatgtaatgcgtgtgggaaaactttttgccagaaatctgacctcactaaacatcagagaacacacacagggctgaaaccctatgaatgttatgaatgtggaaaatccttccgtgtgacttcgcaccttaaagtacaccagagaactcacacaggtgagaaaccttttgaatgtcttgagtgtgggaaatcctttagtgaaaagtcaaatcttacacagcatcagagaattcacataggagataaatcttatgaatgtaatgcatgtgggaaaactttctaccacaagtcattactcaccaggcatcagataattcatacagggtggaaaccttatgaatgttatgaatgtgggaaaaccttctgcttgaagtcagacctcacagtacatcagagaacacacacagggcagaaaccctttgcatgtcccgaatgtgggaaattctttagccataagtcaaccctctctcaacattatagaacacacacaggggagaaaccctacgaatgtcatgaatgtggaaaaatcttttacaataaatcatacctaactaaacataatagaacacatacaggggagaaaccctatgaatgtaatgaatgtggaaaagccttctaccagaagtcacaactcactcagcatcagagaattcacataggggagaaaccctataaatgtaatgagtgtggaaaagctttctgccataagtcagctctaattgtacatcagagaacccatacacaagaaaagccctataaatgtaatgaatgtggaaaatctttctgtgtaaaatcaggacttattttccatgagagaaagcacacgggggagaaaccctatgaatgcaatgaatgtgggaaattcttcaggcacaaatcatcactcacagtacatcacagggctcacacaggagagaaatcttgtcaatgtaatgaatgtggaaaaatcttttaccgtaaatcggaacttgctcaacatcagagatcacatacaggggaaaagccctatgaatgtaacacatgcaggaaaactttctctcaaaagtcaaatctcattgtacatcagagaagacatataggagaaaaccttatgaatgaaatggatattagaaatttccagccacaagtcagcctccataatgcctcagagtattcacactgtggagaaagccctgatgacatcctgaatgttcagtaa

SEQ ID NO: 120160 - DNA, 4452 bp, Homo sapiens
atggggaaagaggaatgtcttgagaaaatgccagtcaaaaatcagaacaaatcatccagtcaggctgaaggaacttaccgcagagggttcagcaccaagtggacagagggtatatccataaaaagtgaaattgacacgtcactgaataggcaaatgttcagcttttacagatacccatccttcagcttactgcaaagccttcctcctccagaaagtaccctcatcaaccgctcatcccctttgagcagcaccaagcctgaggtttattccactgacttagcacaaaagcacaaaatcatatccttctttgcatggctacttttgccacaaacacatttttatctagacacgccctcccaggtgaggtccgcactggtactctatgcagggccagcccagggattacgtaaagaacctaaggtgggcctggcacagagcaagtacttcatgggtatgcagttactgagttcaatcggatttcccagtgtggagactaacattaaaagcaacaatgcagccaaggtgaggccattggaagcttttgatccagaatgggacatgatgaaagcagcatcgtatggacgtggattggtgaatcctatatgggctgctgtggcatggaacagctgtttgtctctgttctttgaacaaagtggagaccactcctttggtgcacggatgtccttttgcaaaagcactcctgtgacacctcttgtgtctgagcgtatacctgctgatgtgaagttctgtccttcctgtgctcttgtacaaggttctcaggggcttgagagactgtgccatacagggagcataaatcctattgtctgtcaacctgcacgtccacctcacagctggggagagggcaagctctgtgttctaaaaaaagcaacaactccctgtacaaattcacacccagtggctaaccaacaggatgctggagtgcaaaggaacctgctgctgtggtccagtccaggtagccttccagggccagagcaagatatcgggaagggtggggagagaacttggggagcaaatgaaagatttccagcacagatggctccacctctgggggcagggcacagacaaacaaaagacagcaataacctctgcagacttaaatgtccctgtctgacagctttgaagagaatagtggttctcccagcacgcagcttgagatctgagaacgggcagactgcctcttcaagtgggtccctgacccccaagtaccctaactgggaggcaccccccactaggggccaactgacacctcacacggccaggtactcctctgagacaaaacttccagagaaacgatcaggcagcagcatttgcggttcaccaatatccactgttctgcagccaccactgctgatacccaggaaaacagggtctggagtggacctccagcaaactccaacagacgtgcagctgagggtcctgactgttagaaggaaaactaacaaacagaaaggacatccacaccaaaaacccctctgtacatcaccatcatcaaagaccaaagagaagtccttcaaggacctgatggagctgaaaaccacagcacaagaactacatgatgaatgcacaagcctcagtaaccgatgcaatcaactggaagaaattgtatcagcaatggaagacgaaatgaatgaaatgaagcgtgaagaaaagtttagagaaaaaagaatgaaaaggaacaaacaaagcctccaagaaatatgggactatgtgaaaagaccaaatctacgtctgattggtgtacctgaaagtgatggggagaatgaaaccaacttggaaaacactctgcaggatattatccaggagaacttccccaatctagcaaggcaggccaacattcaaattcaggaaatacagagaatgccacaaagatactcctcgagaagagcaactccaagacacataattgtcagattcaccaaagttgaaatgaaggaaaaaatattaagggcagacagagagaaaggtcaggttacccacaaagggaagcccatcagactaccagcggatctctcagcagaaactctacaagccagaagagagtgggggccaatattcaacattcttaaagaaaagaattttcaacccagaatttcatatccagccaaattaagcttcataagtgaaggagaaataaaatactttacagacaagcaaatgctgagagattttgtcaccaccaggcctgccctacgagagctcctgaagcacagactggcaaattggataaagagtcaagacccatcagtgtgctgtattcaggaaacccatctcacgtgcagagacacacataggctcaaaataaagggatggaggaagatctaccaagcaaatggaaaacataaaaaggcaggggttgcaatcctagtctcggataaaacagactttaaaccaacaaagatcaaaagagacaaagaaggccattacataatggtaaagggatcaattcaacaagaagaactaactatcctaaatatatatgcacccaatacaggagcacgcagattcgtaaagcaagtccttagtgacctacaaagagacttagactcccacacaataataatgggagactttaataccccactgtcaacattacacagatcaacgagacagaacgttaacaaggatatccaggaattgaactcggctctgcaccaagcagacctaatagacatttacagaactgtccaccccaaatcaacagaatctacattcttttcagcaccacaccacacctattccaaaattgaccacataattggaagtaaagcactcctcagcaaatgtaaaagaacagaaattataacaaactgtctctcagaccacagtgcaatcaaactagaactcaggattaagaaactcactcaaaaccgctcaactacatggaaactgaacaacctgctcctgaatgactactgggtacctaacgaaatgaaggcagaaataaagatgttctttgaaaccaacgagaacaaagacacaacataccagaatctctgggacacaatcaaagcagcgtgtagagggaaatttatagcactaagtgcccacaagagaaagcaggaaagatctaaaattgacatcctaacatcacaattaaaagaactagagaagcaagagcaaacacattcaaaagctagcagaaggcaagaaataactaagatcagagcagaactgaaggagacagagacacaaaaaacctttcaaaaaatcaatgaatccaggagctggttttttgaaaagatcatcaaaattgatagactgctagcaagactaataaagaagaaaagagagaagaatcaaatagatgcaataaaaaatgacaaaggggatatcaccaccgatcccacagaaatacaaactaccatcagagaatactataaacatctctacgcaaataaactagaaaatctagaagaaatggataaattccttgacacatacaccctcccaagactaaacaaggaagaaactgaatctctgaatagaccaataacaggctctgaaattgaggcaataattaatagcttagcaaccaaaaaaagtccaggaccagatggattcacagccgaattctaccagaggtacaaggaggaactggtaccattccttctgaaactattccaatcaatagaaaaacagggaatcctccctaactcattttatgaggccagcatcatcctgataccaaagcctggcagagacacgacaaaaaaagagaattttagaccaatatctttgatgaacattgatgcaaaaatcctcaataaaatattggcaagccgaatccagcaacccatcaaaaagcttatccaccatgatcaagtgggcttcatccctgggatgcatggctggttcaacatacgcaaatcaataaacgtaatccagcctataaacagaaccaaagacaaaaaccacatgattatctcaatagatgcagaaaaggcctttaacaaaattcaacaacacttcatgctaaaaactctcaataaattaggtattgatgggacgtatctcaaaataataagagctatctatgacaaacccacagccaatatcatactgaatggacaaaaactggaagcattccctttgaaaactggcacaagacagggatgccctctctcaccactcctattcaacatagtgttggaagttctggccagggcaatcaggcaggagaaggaaataaagggcattcaattagaaaaagaggaagtcaaattgtccctgtttgcagatgacatgattgtatatctagaaaaccccattgtctcagcccaaaatctccttaagctgataagcaacttcagcaaagtctcaggatacaaaatcaatgtacaaaaatcacaagcattcttatacaccaataacagacaaacagagagccaaatcatgagggaactcccattcacaattgcttcaaaggaataa

SEQ ID NO: 120161 - DNA, 3693 bp, Homo sapiens; identical to SEQ ID NO: 118073

SEQ ID NO: 120162 - DNA, 3300 bp, Homo sapiens; identical to SEQ ID NO: 118076

SEQ ID NO: 120163 - DNA, 3357 bp, Homo sapiens
atgtaccaagcaaatggaaaacaaaaaaaggcaggggttgcaatcctagtctctgataaaacagactttaaaccaacaaagatcaaaagagacaaagaaggccattacataatggtaaagggatcaattcaacaagaagagctaactatcctaaatatatatgcacccaatacaggagcacccacattcatacagcaagtcctgagtgatctacaaagagacttagactcccacacattaataataggagactttaacaccccactgtcaacatcagacagatcaacgagacagaaagtcaacaaggatacccaggaattgaactcagctctgcaccaagcagacctaatagacatctacagaaccctccaccccaaatcaacagaatatacatttttttcagcaccacaccacacctattccaaaattgaccacatacttggaagtaaagcactcctcagcaaatgtaaaagaacagaaattataacaaactatctctcagaccacagtgcaatcaaactagaactcatgattaagaatctcactcaaaaccactcaaccatatggaaactgaacaacctgctcctgaatgactactgggtacataaggaaatgaaggcagaaataaagatgttctttgaaaccaacgagaacaaagacacaacataccagaatctctgggacacattcaaagcagtgtgtagagggaaatttatagcactaaatgcccacaagagaaagcaggaaagatccaaaattgacaccctaacatcacaattaaaagaactagaaaagcaagagcaaacactttcaaaagctagcagaaggcaagaaataactaaaatcagagcagaactgaaggaaatagagacacaaaaaacccttcaaaaaattaacgaatccaggagcaggttttttgaaaggatcaacaaaattgatagcctgctagcaagactaataaagaaaaaaagagagaagaatcaaatagatgcaataaaaaatgataaaggggatatcaccaccaatcccacagaaatacaaactaccatcagagaatactacaaacacctctacgcaaataaactagaaaatctagaagaaatggataaattcctcgacacatacactctcccaagactaaaccaggaagaagttgaatctctgaatagaccaataacgggagctgaaattgtggcaataatcaatagcttaccaaccaaaaagagtccaggaccagatggattcacagccgaattctaccagaggtacaaggaggaacaggtaccattccttctgaaactattccaatcaatagaaaaagagggaatcctccctaactcattttatgtgtccagcatcatcctgataccaaagccgggcagagacacaaccaaaagagagaattttagaccaatatccttgatgaacattgatgcaaaaatcctcaataaaatactggcaaaccgaatccagcagcacatcaaaaagcttatccaccatgatcaagtgggcttcatccctgggatgcaaggctggttcaatatatgcaaatcaataaatgtaatccagcatataaacagaaccaaagacaaaaaccacatgattatctcaatagatgcagaaaaggcctttgacaaaattcaacaacctttcatgctaaaaactctcaataaattagtgttggaagttctggccagggcaattaggcaggagaaggaaataaagggtattcaattaggaaaagaggaagtcaaattgtccctgtttgcagacgacatgattgtatatctagaaaaccccattgtctcagcccaaaatctccttaagctgataagcaacttcagcaaagtctcaggatacaaaatcaatgtacaaaaatcacaagcattcttatacaccaacaacagacaaacagagagccaaatcatgagtgaactcccattcacaattgcttcaaagagaataaaatacctaggaatccaacttacaagggatgtgaaggacctcttcaaggagaactacaaaccactgctcaaggaaataaaagaggatacaaacaaatggaagaacattccatgctcatgggtaggaagaatcaatatcgtgaaaatggccatactgcccaaggtaatttatagattcaatgccatccccatcaagctaccaatgactttcttcacagaattgggaaaaactgctttaaagttcatatggaaccaaaaaagagcccgcatcaccaagtcaatcctgagccaaaagaacaaagctggaggcatcacactacctgacttccaactatactgcaaggctacagtaaccaagacagcatggttccctagtggggatgtgggtttggaggcagacttttctccctctcacacattgaaaactcagtttttcagctgccttgcagagtttgcagcggcaagctgcttctttcaaaggatgaatgggtttggcatggccatgactactacgtacagcacgggggctgctgagtctcctctaccaagctgttccattgaccagggagatgacaccaagctccaccgagcacgcagccctggccgcaccttccctgctgcagctggcatccccgcagcagctgctccagatgggccaccactatcacttctgcataaactatggttcccagtggaattaggaggaagagctcttccccgagcagaggaatcacatggtgaggtcgcagctttaggggtgatggttgtagctcagggtgggaaaaaccagggagaagaggccaggtccactccatggctccgaccaacctcacatctgcccccgtgttcctcctcctcggcctggtggacggaacagacagacgcccacccgctgctgttcctgctctgccttggcatctatctgctcaacgccctgagcaacctgagcatggtggcgctggtgagatctgacggggccctccgctcccccatgtattacttcttgggtcacctgagcctcgtggacgtctgctttaccaccgtcacggtccccaggctgctggccggcctgctccacccgggccaggccatatccttccaggcgtgctttgccgagatgtacttcttcgtggctctgggcatcaccgagagctacctcccggcggccatgtcctacgaccgcgcgacggcggcgtgccggcccctgcgctacggcgcgctggtgacgccatgggcgctgcgcctcgctgcccgctacgaccgcctggccagcgtggtctacgctgtcatcacgccgaccttgaaccctttcatcaacagccttcgcaacaaagaggtcaagggcgccctgaaaagggggctcagatggagggctgcaccccaagaggcgtga

SEQ ID NO: 120164 - DNA, 3316 bp, Homo sapiens
gatcaaattcacacataacaatattaaccttaaatgtaaatgggctaaatgctccaattaaaagacacagactggcaaattggataaagagtcaagacccatcagtgtgctgtattcaggagacccatctcacgtgcagagacacacacaggatcaaaataaagggatggagggagatctaccaagcaaatggaaaacaaaaaaaggcaggggttgcaatcctagtctctgataaaacggactttaaaccaacaaagatcaaaagagacaaagaaggccattacatgatggtaaagggatcaattcaacaagaagagctaactaccctaaatatatatgcacccaatacaggagcacccagattcataaagcaagtccttagagacctacaaagagacttagactcccacacattaataatgggagactttaacaccccactgtcaacattagacagatcaacgagacagaaagttaacaaggatatccaggatttgaactcagctctgcaccaagtggacctaatagacatctacagaactctccaccccaaatcaacagaatatacattcttctcagcactacaccacatttattccaaaattgaccacatagttggaagtaaagcactcctcagcaaatataaaacaacagaaattataacaaactgtctctcagaccacagtgcaatcaaactcgaactcaggattaagaaactcactcaaaaccgctcaactacatggaaactgaacaacctgctcctgaatgactactgggtacataacaaaatgaaggcagaaataaatacattatttgaaaccaacgagaacaaagacacaacataccagaatctctgggacacattcaaagcagtgtgtagagggaaattcatagcactaaatgcccacaagagaaagcaggaaagatctaaaattgacaccctaacatcacaattaaaagaactagagaagcaagaacaaacacattcaaaagctagcagaaggcaagaaataactaagatcagagcaaaactgaaggaaatagagacacaaaaaatccttcaaaaaatcaatgaatccaggagctggttttttgaaaagatcaacaaaattgatagaccactagcaagaccaataaagaagaaaagagagaagaatcaaatagatgcaataaaaaatgataaaggggatatcaccactgatcccacagaaatacaaactaccatcagagaatactataaacacctctatgcaaataaactagaaaatctagaagaaatggataaattcctcaacacatacaccctcccaagactaaaccaggaagaagttgaatctctgaataaaccaataacaggctctgaaattgaggcaataattaatagcttaccaatcaaaaaaagtccaggaccagatggattcatagccaaattccaccagaggtacaaggaggagctggaggccagcatcatcctgataccaaagcctggcagagacacaaccaaaaaagagaattttagaccaatacccctgatgaatattgatgcaaaaatcctcaataaaatactggcaaaccgaatccagcagcacatcaagaagcttatccaccatgatcaagtgggcttcatccctgggatgcaaggctcgttcaacatatgcaaatcaataaacgtaatccaggatataaacagaacgaatgacaaaaaccatatgattatctcaatagatgcagaaaaggcctttgacaaaattcaacaacccttcattctaaaaactctcaataaattaggtattgatgggacgtatctcaaaataataagagctatctatgacaaacccacagccaatatcatactgaatgggcaaaaactggaagcattccctttgaaaactggcacaagacaggggtgccctctctcaccactcctattcaacatagtgttggaagttctggccagggcaatcaggcaggagaaggaaataaagggcattcaattaggacaagaggaagtcaaattgtccctgtttgcagatgacatgattgtatatcgagaaaaccccatcgtctcaacccaaaatctccataagctgataagcaacttcagcaaagtctcaggatacaaaatcaatgtgcaaaaatcacaagcatttttatacaccaataacagacaaacagagagccaaatcatgagtgaactcccattcacaattgcttcaaagagaataaaatacctaggaatccaacttacaagggatgtgaaggatctcttcaaggagaactacaaaccactgctcaaggaaataaaagaggatacaaacaaatggaagaacattccatgctcatgggtaggaagaatcaatatcgtgaaaatggccatactgcccaaggtaatttatagatttaatgccatccccatcaagctaccaatgactttcttcacagaattggaaaaaactactttaaagttcatatggaaccaaaaaagagcccgcattgccaagtcaatcctaagccaaaggaacaaagctggaggcatcacactacctgacttcaaactatactacaaggctacagtaaccaaaacagcatggtactggtaccaaaacagagatatagaccaatggaacagaacggagccctcagaaataatgccacatatctacaaccatctgatctttgacaaacctgacaaaaacaagaaatggggaaatgattccctatttaataaatggtgctgggaaaactggctagccatatgtaggagaaagctgaaactggatcccttccttacaccttatacaaaaattaattcaagatggattaaagacttaaatgttagacctaaaaccataaaaaccctagaagaaaacctaggcaataccattcaggacataggcatgggcaaggacttcatgtctacaacaccaaaagcaatggcaacaaaagccaaaattgacaaatgggatctaattaaactaaagagcttctgcacagcaaaagaaactaccatcacagtgaacaggcaacctacagaatgggagaaaatttttacaatctacccatctgacaaagggctaatatccagaatctacaaagaactcaaacaaatttacaagaaaagaacaaacaaccccatcaacaagtgggtgaaggatatgaacagacacttctcaaaagaagacatttatacagccaaaaggcacatgaaaaaatgctcatcatcactggccatcagagaaatgcaaatcaaaaccacattgagataccatctcataccagttagaatggcgatcattaaaaagtcaggaaacaacag

SEQ ID NO: 120165 - DNA, 3457 bp, Homo sapiens
atggtaaagggatcaattcaacaagaggagctaactatcctaaatatttatgcacccaatacaggagcacccagattcataaagcaagtcctcagtgacctacaaagagacttagactcccacacattaataatgggagactttaacaccccactgtcaacattagacagatcaacgagacagaaagtcaacaaggatacccaggaattgaactcagctctgcaccaagcagacctaatagacatctacagaactctccaccccaaatcaacagaatatacatttttttcagcaccacaccacacctattccaaaattgaccacatacttggaagtaaagctctcctcagcaaatgtaaaagaacagaaattataacaaactatctctcagaccacagtgcaatcaaactagaactcaggattaagaatctcactcaaagccgctcaactacatggaaactgaacaacctgctcctgaatgactactgggtacataacgaaatgaaggcagaaataaagatgttctttgaaaccaacgagaacaaagacaccacataccagaatctctgggacgcattcaaagcagtgtgtagagggaaatttatagcactaaatgcctacaagagaaagcaggaaagatccaaaattgacaccctaacatcacaattaaaagaactagaaaagcaagagcaaacacattcaaaagctagcagaaggcaagaaataactaaaatcagagcagaactgaaggaaatagagacacaaaaaacccttcaaaaaatcaatgaatccaggagctggttttttgaaaggatcaacaaaattgatagaccgctagcaagactaataaagaaaaaaagagagaagaatcaaatagacacaataaaaaatgataaaggggatatcaccaccgatcccacagaaatacaaactaccatcagagaatactacaaacacctctacgcaaataaactagaaaatctagaagaaatggatacattcctcgacacatacactctcccaagactaaaccaggaagaagttgaatctctgaatagaccaataacaggctctgaaattgtggcaataatcaatagtttaccaaccaaaaagagtccaggaccagatggattcacagccgaattctaccagaggtacatggaggaactggtaccattccttctgaaactattccaatcaatagaaaaagagggaatcctccctaactcattttatgaggccagcatcattctgatgccaaagccgggcagagacacaaccaaaaaagagaattttagaccaatatccttgatgaacattgatgcaaaaatcctcaataaaatactggcaaaccgaatccagcagcacatcaaaaagcttatccaccatgatcaagtgggcttcatccctgggatgcaaggctggttcaatatacgcaaatcaataaatgtaatccagcatataaacagagccaaagacaaaaaccacatgattatctcaatagatgcagaaaaagcctttgacaaaattcaacaacccttcatgctaaaaactctcaataaattaggtattgatgggacgtatttcaaaataataagagctatctatgacaaacccacagccaatatcatactgaatgggcaaaaactggaagcattccctttgaaaaccggcacaagacagggatgccctctctcaccgctcctattcaacatagtgttggaagttctggacagggcaatcaggcaggagaaggaaataaagggtattcaattaggaaaagaggaagtcaaattgtccctgtttgcagacgacatgattgtttatctagaaaaccccatcgtctcagcccaaaatctccttaagctgataagcaacttcagcaaagtctcaggatacaaaatcaatgtacaaaaatcacaagcattcttatacaccaacaacagacaaacagagagccaaatcatgggtgaactcccattcacaattgcttcaaagagaataaaatacctaggaatccaacttacaagggatgtgaaggacctcttcaaggagaactacaaaccgctgctcaaggaaataaaagaggagacaaacaaatggaagaacattccatgctcatgggtaggaagaatcaatatcgtgaaaatggccatactgcccaaggtaatttacagattcaatgccatccccatcaagctaccaatgactttcttcacagaattggaaaaaactactttaaagttcatatggaaccaaaaaagaacccgcattgccaagtcaatcctaagccaaaagaacaaagctggaggcatcacactacctgacttcaaactatactacaaggctacagtaaccaaaacagcatggtactggtaccaaaacagagatatagatcaatggaacagaacagagccctcagaaataatgccgcatatctacaactatctgatctttgacaaacctgagaaaaacaagcaatggggaaaggattccctatttaataaatggtgctgggaaaactggctagccatatgtagaaagctgaaactggatcccttccttacaccttatacaaaaatcaattcaagatggattaaagatttaaacgttaaacctaaaaccataaaaaccctagaagaaaacctaggcattaccattcaggacataggcatgggcaaggacttcatgtccaaaacaccaaaagcaatggcaacaaaagccaaaattgacaaatgggatctaattaaactaaagagcttctgcacagcaaaagaaactaccatcagagtgaacaggcaacctacaacatgggagaaaattttcgcaacctactcatctgacaaagggctaatatccagaatctacaatgaactcaaacaaatttacaagaaaaaaacaaacaaccccatcaaaaagtgggcgaaggacatgaacagacacttctcaaaagaagacatttatgcagccaaaaaacacatgaagaaatgctcatcatcactggccatcagagaaatgcaaatcaaaaccactatgagatatcatctcacaccagttagaatggcaatcattaaaaagtcaggaaacaacaggtgctggagaggatgcggagaaataggaacacttttacactgttggtgggactgtaaactagttcaaccattgtggaagtcagtgtggcgattcctcagggatctagaactagaaataccatttgacccagccatcccattactggatatatacccaaatgagtataaatcatgctgctataaagacacatgcacacagaataaaatacctaggaatccaacttacaagggatgtgaaggacctcttcaaggagaactacaaactactgctcaacaaaataaaagaggacacaaacaaatggaagaacattccatgctcatgggtaggaagaatcaacatcgtgaaaatggccatactgcccaag

SEQ ID NO: 120166 - DNA, 5175 bp, Homo sapiens; identical to SEQ ID NO: 118077

SEQ ID NO: 120167 - DNA, 4797 bp, Homo sapiens
atggtaaagggatcaattcaacaagaggagctaactatcctaaatatttatgcacccaatacaggagcacccagattcataaagcaagtcctcagtgacctacaaagagacttagactcccacacattaataatgggagactttaacaccccactgtcaacattagacagatcaacgagacagaaagtcaacaaggatacccaggaattgaactcagctctgcaccaagcagacctaatagacatctacagaactctccaccccaaatcaacagaatatacatttttttcagcaccacaccacacctattccaaaattgaccacatagttggaagtaaagctctcctcagcaaatgtaaaagaacagaaattataacaaactatctctcagaccacagtgcaatcaaactagaactcaggattaagaatctcactcaaagccgctcaactacatggaaactgaacaacctgctcctgaatgactactgggtacataacgaaatgaaggcagaaataaagatgttctttgaaaccaacgagaacaaagacaccacataccagaatctctgggacgcattcaaagcagtgtgtagagggaaatttatagcactaaatgcctaccagagaaagcaggaaagatccaaaattgacaccctaacatcacaattaaaagaactagaaaagcaagagcaaacacattcaaaagctagcagaaggcaagaaataactaaaatcagagcagaactgaaggaaatagagacacaaaaaacccttcaaaaaatcaatgaatccaggagctggttttttgaaaggatcaacaaaattgatagaccgctagcaagactaataaagaaaaaaagagagaagaatcaaatagacacaataaaaaatgataaaggggatatcaccaccgatcccacagaaatacaaactaccatcagagaatactacaaacacctctacgcaaataaactagaaaatctggaagaaatggatacattcctcgacacatacactctcccaagactaaaccaggaagaagttgaatctctgaatcgaccaataacaggctctgaaattgtggcaataatcaatagtttaccaaccaaaaagagtccaggaccagatggattcacagccgaattctaccagaggtacaaggaggaactggtaccattccttctgaaactattccaatcaatagaaaaagagggaatcctccctaactcattttatgagaccagcatcattctgataccaaagccgggcagagacacaaccaaaaaagagaattttagaccaatatccttgatgaacattgatgcaaaaatcctcaataaaatactggcaaaccgaatccagcagcacatcaaaaagcttatccaccatgatcaagtgggcttcatccctgggatgcaaggctggttcaatatacgcaaatcaataaatgtaatccagcatataaacagagccaaagacaaaaaccacatgattatctcaatagatgcagaaaaagcctttgacaaaattcaacaacccttcatgctaaaaactctcaataaattaggtattgatgggacgtatttcaaaataataagagctatctatgacaaacccacagccaatatcatactgaatggacaaaaactggaagcattccctttgaaaactggcacaagacagggatgccctctctcaccgctcctattcaacatagtgttggaagttctggccagggcaatcaggcaggagaaggaaataaagggtattcaattaggaaaagaggaagtcaaattgtccctgtttgcagacgacatgattgtttatctagaaaaccccatcgtctcagcccaaaatctccttaagctgataagcaacttcagcaaagtctcaggatacaaaatcaatgtacaaaaatcacaagcattcttatacaccaacaacagacaaacagagagccaaatcatgagtgaactcccattcacaattgcttcaaagagaataaaatacctaggaatccaacttacaagggatgtgaaggacctcttcaaggagaactacaaaccactgctcaaggaaataaaagaggagacaaacaaatggaagaacattccatgctcatgggtaggaagaatcaatatcgtgaaaatggccatactgcccaaggtaatttacagattcaatgccatccccatcaagctaccaatgactttcttcacagaattggaaaaaactactttaaagttcatatggaaccaaaaaagagcccgcattgccaagtcaatcctaagccaaaagaacaaagctggaggcatcacactacctgacttcaaactatactacaaggctacagtaaccaaaacagcatggtactggtaccaaaacagagatatagatcaatggaacagaacagagccctcagaaataatgccgcatatctacaactatctgatctttgacaaacctgagaaaaacaagcaatggggaaaggattccctgtttaataaatggtgctgggaaaactggctagccatatgtagaaagctgaaactggatcccttccttacaccttatacaaaaatcaattcaagatggattaaagatttaaacgttaaacctaaaaccataaaaaccctagaagaaaacctaggcattaccattcaggacataggcgtgggcaaggacttcatgtccaaaacaccaaaagcaatggcaacaaaagacaaaattgacaaatgggatctaattaaactaaagagcttctgcacagcaaaagaaactaccatcagagtgaacaggcaacctacaacatgggagaaaatttttgcaacctactcatctgacaaagggctaatatccagaatctacaatgaactcaaacaaatttacaagaaaaaaacaaacaaccccatcaaaaagtgggcgaaggacatgaacagacacttctcaaaagaagacatttatgcagccaaaaaacacatgaagaaatgctcatcatcactggccatcagagaaatgcaaatcaaaaccactatgagatatcatctcacaccagttagaatggcaatcattaaaaagtcaggaaacaacaggccagaaaagaccaaaagttttttacctcctttgccaacacaaagttcaattcacagtggtttcctagagcattgtgttgaacaggattctgaggctctgtctggagaggctggtaaaagtctgatgtttgccatgggtgtaggaagtgaacgagcaaagcatagcctcagtgacgatggccagctccgtggtgccaaggtggctacagcactgacaccctctccaacgccgcattctgatgcagatgataacacccacctcgccctccgccacgatgagcaaatgagcgcgagcgagggcatgaaatttaaattccactcaggggagaaagtgctgtgcttcgagcctgaccccaccaaggcgcgagtgctgtacgatgccaagattgttgatgttattgttgggaaagacgaaaaaggcagaaagatcccagaatatctgatccattttaatggttggaacagaagctgggatagatgggcagcagaagatcatgtgcttcgtgataccgatgaaaatcgtagattacagcgtaaattggcaagaaaagctgtagctcgcctgaggagcacaggaagaaagaagaagcgctgcaggttgcctggtgtggactctgtcttaaaaggcctccccactgaagaaaaagatgaaaatgatgaaaactcattaagcagttcctctgactgtagtgaaaacaaggatgaagaaataagtgaagaaagtgatattgaagaaaagactgaagtgaaagaagaaccagagcttcaaacaagaagggaaatggaagaaagaacaataactatagaaatccctgaagttctgaagaagcagctggaggatgattgttactacattaacaggaggaaacggttagtgaaacttccatgccagaccaacatcataacgattttggaatcctatgtgaagcattttgctatcaatgcagccttttcagccaatgagaggcctcgtcaccatcacgttatgccacatgccaacatgaacgtgcattatatcccagcagaaaagaatgttgacctttgtaaggagatggtggatggattaagaataacctttgattacactctcccgttggttttactctatccatatgaacaagctcagtataaaaaggtgacttcgtctaaattttttcttccaattaaggaaagtgccacaagcactaacaggagccaggaggaactctctcccagtccgcctttgttgaatccatccacgccacagtccacagagagtcagccgaccaccggtgaaccagccacccccaaaaggcgcaaagctgagccagaagcattgcagtctctgaggcggtccacgcgccacagtgccaactgtgacaggctttctgagagcagcgcttcacctcagcccaagcgccggcagcaggacacatccgccagcatgcccaagctcttcctgcacctggaaaagacctcgcctgctgtgctgactccttcaggggtccttctaagcatcatcctgttggaactcccaaaagtcatcccagtgccattctgtgttcaggtgcccatttccttgtgtacatcctgtccctgccacatccataagctcctgagagaaaggtttttagcagaataccacgatgacttcttcccagagtcggcttatgtcgctgcctgtgaggcacattacagcaccaagaacccccgggcaatttattaa

SEQ ID NO: 120168 - DNA, 3384 bp, Homo sapiens
atggtaaagggatcaattcaacaagaggagctaactatcctaaatatttatgcacccaatacaggagcacccagattcataaagcaagtcctcagtgacctacaaagagacttagactcccacacattaataatgggagactttaacaccccactgtcaacattagacagatcaacgagacagaaagtcaacaaggatacccaggaattgaactcagctctgcaccaagcagacctaatagacatctacagaactctccaccccaaatcaacagaatatacatttttttcagcaccacaccacacctattccaaaattgaccacatactgggaagtaaagctctcctcagcaaatgtaaaagaacagaaactataacaaactatctctcagaccacagtgcaatcaaactagaactcaggattaagaatctcactcaaagccgctcaactacatggaaactgaacaacctgctcctgaatgactactgggtacataacgaaatgaaggcagaaataaagatgttctttgaaaccaacgagaacaaagacaccacataccagaatctctgggacgcattcaaagcagcgtgtagagggaaatttatagcactaaatgcctacaagagaaagcaggaaagatccaaaattgacaccctaacatcacaattaaaagaactagaaaagcaagagcaaacacattcaaaagctagcagaaggcaagaaataactaaaatcagagcagaactgaaggaaatagagacacaaaaaacccttcaaaaaatcaatgaatccaggagctggttttttgaaaggatcaacaaaattgatagaccgctagcaagactaataaagaaaaaaagagagaagaatcaaatagacacaataaaaaatgataaaggggatatcaccaccgatcccacagaaatacaaactaccatcagagaatactacaaacacctctacgcaaataaactagaaaatctagaagaaatggatacattcctcgacacatacactctcccaagactaaaccaggaagaagttgaatctctgaatcgaccaataacaggctctgaaattgtggcaataatcaatagtttaccaaccaaaaagagtccaggaccagatggattcacagccgaattctaccagaggtacaaggaggaactggtaccattccttctgaaactattccaatcaatagaaaaagagggaatcctccctaactcattttatgaggccagcatcattctgataccaaagcctggcagagacacaaccaaaaaagagaattttagaccaatatccttgatgaacattgatgcaaaaatcctcaataaaatactggcaaaccgaatccagcagcacatcaaaaagcttatccaccatgatcaagtgggcttcatccctgggatgcaaggctggttcaatatacgcaaatcaataaatgtaatccagcatataaacagagccaaagacaaaaaccacatgattatctcaatagatgcagaaaaagcctttgacaaaattcaacaacccttcatgctaaaaactctcaataaattaggtattgatgggacgtatttcaaaataataagagctatctatgacaaacccacagccaatatcatactgaatgggcaaaaactggaagcattccctttgaaaaccggcacaagacagggatgccctctctcaccgctcctattcaacatagtgttggaagttctggccagggcaatcaggcaggagaaggaaataaagggtattcaattaggaaaagaggaagtcaaattgtccctgtttgcagacgacatgattgtttatctagaaaaccccatcgtctcagcccaaaatctccttaagctgataagcaacttcagcaaagtctcaggatacaaaatcaatgtacaaaaatcacaagcattcttatacaccaacaacagacaaacagagagccaaatcatgggtgaactcccattcacaattgcttcaaagagaataaaatacctaggaatccaacttacaagggatgtgaaggacctcttcaaggagaactacaaaccactgctcaaggaaataaaagaggacacaaacaaatggaagaacattccatgctcatgggtaggaagaatcaatatcgtgaaaatggccatactgcccaaggtaatttacagattcaatgccatccccatcaagctaccaatgactttcttcacagaattggaaaaaactactttaaagttcatatggaaccaaaaaagagcccgcattgccaagtcaatcctaagccaaaagaacaaagctggaggcatcacactacctgacttcaaactatactacaaggctacagtaaccaaaacagcatggtactggtaccaaaacagagatatagatcaatggaacagaacagagccctcagaaataatgccgcatatctacaactatctgatctttgacaaacctgagaaaaacaagcaatggggaaaggattccctatttaataaatggtgctgggaaaactggctagccatatgtagaaagctgaaactggatcccttccttacaccttatacaaaaatcaattcaagatggattaaagatttaaacgttaaacctaaaaccataaaaaccctagaagaaaacctaggcattaccattcaggacataggcgtgggcaaggacttcatgtccaaaacaccaaaagcaatggcaacaaaagacaaaattgacaaatgggatctaattaaactaaagagcttctgcacagcaaaagaaactaccatcagagtgaacaggcaacctacaacatgggagaaaatttttgcaacctactcatctgacaaagggctaatatccagaatctacaatgaactcaaacaaatttacaagaaaaaaacaaacaaccccatcaaaaagtgggcgaaggacatgaacagacacttctcaaaagaagacatttatgcagccaaaaaacacatgaagaaatgctcatcatcactggccatcagagaaatgcaaatcaaaaccactatgagatatcatctcacaccagttagaatggcaatcattaaaaagtcaggaaacaacagactacagaatggtagctccattgacagcttgtaccatgagcctggaaaagctgcagacactcaatgccagcctgtgaaagctgccagaaggggtgctgtaccctgcaaagccacaggggcagagctgcccaaggccatgggaacccacctcttgcatcagcatgacctcgattgcttggagtggcagagacgcagctcagtgctgctcaacagccttgttgtccatgagcccgaagctctggttgcaagccctactgagttcactcctgaaaccgaacctctcccagcatag

SEQ ID NO: 120169 - DNA, 3348 bp, Homo sapiens
atggtaaagggatcaattcaacaagaggagctaactatcctaaatatttatgcacccaatacaggagcacccagattcataaagcaagtcctgagtgacctacaaagagacttagactcccacacattaataatgggagactttaacatcccactgtcaacattagacagatcaacgagacagaaagtcaacaaggatacccaggaattgaactcagctctgcaccaagcggacctaatagacatctacagaactctccaccccaaatcaacagaatatacatttttttcagcaccacaccacacctattccaaaattgaccacatagttggaagtaaagctctcctcagcaaatgtaaaagaacagaaattataacaaactatctctcagaccacagtgcaatcaaactagaactcaggattaagaatctcactcaaagccgctcaactacatggaaactgaacaatctgctcctgaatgactactgggtacataacgaaatgaaggcagaaataaagatgttctttgaaaccaacgagaacaaagacaccacataccagaatctctgggacgcattcaaagcagtgtgtagagggaaatttatagcagtaaatgcccacaagagaaagcaggaaagatccaaaattgacaccctaacatcacaattaaaagaactagaaaagcaagagcaaacacattcaaaagctagcagaaggcaagaaataactaaaatcagagcagaactgaaggaaatagagacacaaaaaacccttcaaaaaatcaatgaatccaggagctggttttttgaaaggatcaacaaaattgatagaccgctagcaagactaataaagaaaaaaagagagaagaatcaaatagacacaataaaaaatggtaaaggggatatcaccaccgatcccacagaaatacaaactaccatcagagaatactacaaacacctctatgcaaataaactagaaaatctagaagaaatggatacattcctcgacacatacactctcccaagactaaaccaggaagaagttgaatctctgaatagaccaataacaggctctgaaattgtggcaataatcaatagtttaccaaccaaaaagagtccaggaccagatggattcacagccgaattctaccagaggtacaaggaggaactggtaccattccttctgaaactattccaatcaatagaaaaagagggaatcctccctaactcattttatgaggccagcatcattctgataccaaagccgggcagagacacaaccaaaaaagagaattttagaccaatatccttgatgaacattgatgcaaaaatcctcaataaaatactggcaaaccaaatccagcagcacatcaaaaagcttatccaccatgatcaagtgggcttcatccctgggatgcaaggctggttcaatatacgcaaatcaataaatgtaatccagcatatcaacagagccaaagacaaaaaccacatgattatctcaatagatgcagaaaaagcctttgacaaaattcaacaacccttcatgctaaaaactctcaataaattaggtattgatgggacgtatttcaaaataataagagctatctatgacaaacccacagccaatatcatactgaatgggcaaaaactggaagcattccctttgaaaaatggcacaagacagggatgccctctctcaccactcctattcaacatagtgttggaagttctggccagggcaatcaggcaggagaaggaaataaagggtattcaattaggaaaagaggaagtcaaattgtccctgtttgcagacgacatgattgtttatctagaaaaccccatcgtctcagcccaaaatctccttaagctgataagcaacttcagcaaagtctcaggatacaaaatcaatgtacaaaaatcacaagcattcttatacaccaacaacagacaaacagagaggcaaatcacgagtgaactcccattcacaattgcttcaaagagaataaaatacctaggaatccaacttacaagggatgtgaaggacctcttcaaggagaactacaaaccactgctcaaggaaataaaagaggacacaaacaaatggaagaacattccatgctcatgggtaggaagaatcaatatcgtgaaaatggccatactgcccaaggtaatttacagattcaatgccatccccatcaagctaccaatgactttcttcacagaattggaaaaaactactttaaagttcatatggaaccaaaaaagagcccgcatcgccaagtcaatcctaagccaaaagaacaaagctggaggcatcacactacctgacttcaaactatactacaaggctacagtaaccaaaacagcatggtactggtaccaaaacagagatatacatcaatggaacagaacagagccctcagaaataatgccgcatatctacaactatctgatctttgacaaacctgagaaaaacaagcaatggggaaaggattccctatttaataaatggtgctgggaaaactggctagccatatgtagaaagctgaaactggatcccttccttacaccttatacaaaaatcaattcaagatggattaaagatttaaacgttagacctaaaaccataaaaaccctagaagaaaacctaggcattaccattcaggacataggcgtgggcaaggacttcatgtccaaaacaccaaaagcaatggcaacaaaagccaaaattgacaaatgggatctaattaaactaaagagcttctgcacagcaaaagaaactaccatcagagtgaacaggcaacctacaacatgggagaaaatttttgcaacctactcatctgacaaagggctaatatccagaatctacaatgaactcaaacaaatttacaagaaaaaaacaaacaaccccatcaaaaagtgggcgaaggacatgaacagacgcttctcaaaagaagacatttatgcagccaaaaaacacatgaaaaaatgctcatcatcactggccatcagagaaatgcaaatcaaaaccactatgagatatcatctcacaccagttagaatggcaatcattaaaaagtcaggaaacaacaggcaaacagggtctggagtggacctccagcatactccagcagacctgcagcagaggggcctgactgttagaaggaaaatgaacaaacacaaaggaatagcatcaacatcaacaaaaaggacatccactcaaaagccccatctgaaggtcaccaaaatcaaagaccagaggcctacgttacaagagctcctgaaggaagcactaaatatggaaaggaacaaccagtaccagccattgcaaaaacataccaaattctaa

SEQ ID NO: 120170 - DNA, 3783 bp, Homo sapiens
atgggagactttaacaccccactgtcaacattagacagatcaacgagacagaaagtcaacaaggatacccaggaattgaacttagctctgcaccaagcggacctaatagacatctacagaactctccaccccaaatcaacagaatatacatttttttcagcaccacaccacacctattccaaaattgaccgcatagttggaagtaaagctctcctcagcaaatgtaaaagaacagaaattataacaaactatctctcacaccacagtgcaatcaaactagaactcaggattaagaatctcactcaaaaccgctcaactacatggaaactgaacaacctgctcctgaatgactactgggtacatagcgaaatgaaggcagaaataaagatgttctttgaaaccaacgagaacaaagacacaacataccagaatctctgggacacattcgaagcagtgtgtagagggaaatttatagcactaaatggccacaagagaaagcaggaaagatccaaaattgacaccctaacatcacaattaaaagaactagaaaagcaagagcaaacacattcaaaagctagcagaaggcaagaaataactaaaatcagagcagaactgaaggaaatagagatacaaaaaacccttcaaaaaattaatgaatccaggagctggttttttgaaaggatcaacaaaattgatagaccactagcaagactaataaagaaaaaaagagagaagaatctaatagacgcaataaaaactgataaaggggatatcaccaccaatcccacagaaatacaaactaccatcagagaatactacaaacacctctacgcaaataaactagaaaatcgagaagaaatggataaattcctcgacacatacactctcccaagactaaaccaggaagaagttgaatctctgaatagaacaataacaggatctgaaattgtggcaagaatcaatagcttaccaaccaaaaagagtccaggaccagatggattcacagctgaattctaccagaggtacaaggaggaactggtaccattccttctgaaactattccaatcaatagaaaaagagggaatcctccctaactcattttatgaggccagcatcattctgataccaaagccaggcagagacacaaccaaaaaagagaattttagaccaatatcgttgatgaacattgatgcaaaaatcctcaataaaatactggcaaaaggaatccagcagcacatcaaaaagcttatccaccatgatcaagtgggcttcatccctgggatgcaaggctggttcaatatacacaaatcaataaatgtaatccagcatataaacagagccaaagacaaaaaccacatgattatctcaatagatgcagaaaaagcctttgacaaaattcaacaaccctttatgctaaaaactctcaataaattaggtattgatgggacgtatttcaaaataataagagctatctatgacaaacccacagccagtatcatactgaatgggcaaaaactagaagcattccgtttgaaaactggcacaagacagggatgccctctctcaccactcctattcaacatagtgtttgaaattctggcccgggcaattaggcaggagaaggaaataaagggtattcaattaggaaaagaggaagtcaaattgtccctgtttgcaggcgacatgattgtatatctagaaaaccccattgtctcagcccaaaatctccttaagctgataagcaacttcagcaaagtctcaggatacaaaatcaatgtgcaaaaatcacaagcattcttatacaccaataacagacaaacagagagccaaatcatgagtgaactcccattcacaattgcttcaaagagaataaaatacctaggaatccaacttacaagggatgtgaaggacctcttcaaggagaactacaaaccactgctcaaggaaataaaagaggatacaaacaaatggaagaacattccatgctcatgggtaggaagaatcaatatcgtgaaaatggccatactgcccaaggtaatttatagaatcaatgccatccccatcaagctaccaatgcctttcttcacagaattggaaaaatctactttaaagttcatatggaaccaaaaaagagcccgcatcgccaagtcaatcctaagccaaaagaacaaagctggaagcatcacactacctgacttcaaactatactacaaggctacagtaaccaaaacagcatggtactggtaccaaaacagagatatagatcaatggaacagaacagagccctcagaaataacaccgcatatctacaactatctgatctttgacaaacctgagaaaaacaagcaatggggaaaggattccctatttaataaatggtgctgggaaaactggctagccatatgtagaaagctgaaactggatcccttccttacaccttatacaaaaatcaattcaagatggattaaagacttaaacgttagacctaaaaccataaaaaccctagaagaaaacctagggattaccattcaggacataggcataggcgacgacttcatgtctaaaacaccaaaaacaatggcagcaaaagacaaaatcgacaaatgggatctaattaaactaaagagcttctgcacagcaaaagaaactaccatcagagtgaacaggcaacctacaaaatgggagaaaattttcgcaacctactcttctgacaaagggctaatatccagaatctacaatgaactcaaacaaatttttaagaaaaaaacaaacaaccccatcaaaaagtgggtgaaggacatgaacagacacttctcaaaaggagacatttatgctgccaaaaaacacatgaaaaaatgctcatcatcactggccatcagagaaatgcaaatcaaaaccacaatgagataccatctcacaccagttagaatggcaatcattaaaaagtcaggaaacaacaggtgctggaggggatgtggagaaataggaacacttttacactgttggtgggactgtaaactagttcaaccattgtggaagtcagtgtggcgattcctcagggatctagaactggaaataccatttgacccagccatcccattactgggtatatacccaaaggactataaatcatgctgctataaagacacatgcacactaacttggatggagctagaagccattattctaagtgaagtactcaggaatggaaaaaccaaaaaccgtatgttctcacttataagtgggaaccaagatacgggtatgcaaaggcatacagaattctatgatggactttggcgactcagaagagggagggttgagggggcatgctatgatatcatttggccttcatttggtacagatgtatcatttgagaaacagatccacctctggctttttctcacccctcagcctgctacaattaaaatagcactacttggctatggactgttgggaaagatcctgatggctatccgagatgcaggttttgaaatctcagctatgcagatgttcaatatggatcgggttaatgttgaggaattctatgaagtttataaaggagtagtgaccgaatatcatgacatggtgacagaaatgtattctggcccttgtgtagcaatggagattcaacagaataatgctacaaagacatttcgagaattttgtggacctgctgatccttgtattgagaatagtctaaagacaagagtggaagttataatccaggtacaagatgatggtgagttggaccaggatggtggtaatagacatggtgagaaatag

SEQ ID NO: 120171 - DNA, 3723 bp, Homo sapiens
atgggagactttaacaccccactgtcaacattagacagatcaacgagacagaaagtcaacaaggatacccaggaattgaactcagctctgcaccaagcagacctaatagacatctacagaactctccaccccaaatcaacagaatatacatttttttcagcaccacaccacacctattccaaaattgaccacatagttggaagtaaagctctcctcagcaaatgtaaaagaacagaaattataacaaactatctctcagaccacagtgcaatcaaactagaactcaggattaaaaatctcactcaaagccgctcaactacatggaaactgaacaacctgctcctgaatgactactgggtacataacgaaatgaaggcagaaataaagatgttctttgaaaccaacgagaacaaagacaccacataccagaatctctgggacgcattcaaagcagtgtgtagagggaaatttatagcactaaatgcctacaagagaaagcaggaaagatccaaaattgacaccctaacatcacaattaaaagaactagaaaagcaagagcaaacacattcaaaagctagcagaaggcaagaaataactaaaatcagagcagaactgaaggaaatagagacacaaaaaacccttcaaaaaatcaatgaatccaggagctggttttttgaaaggatcaacaaaattgatagaccactagcaagactaataaagaaaaaaagagagaagaatcaaatagacacaataaaaaatgataaaggggatatcaccaccgatcccacagaaatacaaactaccatcagagaatactacaaacacctctacgcaaataaactagaaaatctagaagaaatggatacattcctcgacacatacactctcccaagactaaaccaggaagaagttgaatctctgaatagaccaataacaggttctgaaattggggcaataatcaatagtttaccaaccaaaaagagtccaggaccagatggattcacagccgaattctaccagaggtacaaggaggaactggtaccattccttctgaaactattccaatcaatagaaaaagagggaatcctccctaactcattttatgaggccagcatcattctgataccaaagccgggcagagacacaacaaaaaaagagaattttagaccaatatccttgatgaacattgatgcaaaaatcctcaataaaatactggcaaaccaaatccagcagcacatcaaaaagcttatccaccatgatcaagtgggcttcatccctgggatgcaaggctggttcaatatacgcaaatcaataaatgtaatccagcatataaacagagccaaagacaaaaaccacatgattatctcaatagatgcagaaaaagcctttgacaaaattcaacaacccttcatgctaaaaactctcaataaattaggtattgatgggacgtatttcaaaataataagagctatctatgacaaacccacagccaatatcatactgaatgggcaaaaactggaagcattccctttgaaaactggcacaagacagggatgccctctctcaccgctcctattcaacatagtgttggaagttctggccagggcaatcaggcaggagaaggaaataaagggtattcaattaggaaaagaggaagtcaaattgtccctgtttgcagacgacatgattgtttatctagaaaaccccatcgtctcagcccaaaatctccttaagctgataagcaacttcagcaaagtctcaggatacaaaatcaatgtacaaaaatcacaagcattcttatacaccaacaacagacaaacagagagccaaatcatgggtgaactcccattcacaattgcttcaaagagaataaaatacctaggaatccaacttacaagggatgtgaaggacctcttcaaggagaactacaaaccactgctcaaggaaataaaagaggacacaaacaaatggaagaacattccatgctcatgggtaggaagaatcaatatcgtgaaaatggccatactgcccaaggtaatttacagattcaatgccatccccatcaagctaccaatgactttcttcactgaattggaaaaaactactttaaagttcatatggaaccaaaaaagagcccgcatcgccaagtcaatcctaagccaaaagaacaaagctggaggcatcacactacctgacttcaaactatactacaaggctacagtaaccaaaacagcatggtactggtaccaaaacagagatatagatcaatggaacagaacagagccctcagaaataatgccgcatatctacaactatctgatctttgacaaacctgagaaaaacaagcaatggggaaaggattccctatttaataaatggtgctgggaaaactggctagccatatgtagaaagctgaaactggatcccttccttacaccttatacaaaaatcaattcaaaatggattaaagatttaaacgtcagacctaaaaccataaaaaccctagaagaaaacctaggcattaccattcaggacataggcgtgggcaaggacttcatgtccaaaacaccaaaagcaatggcaacaaaagccaaaattgacaaatgggatctaattaaactaaagagcttctgcacagcaaaagaaactaccatcagagtgaacaggcaacctaccacatgggagaaaattttcgcaacctactcatctgacaaagggctaatatccagaatctacaatgaactcaaacaaatttacaagaaaaaaacaaacaaccccatcaaaaagtgggcgaaggacatgaacagacacttctcaaaagaagacatttatgcagccaaaaaacacatgaagaaatgctcatcatcactggccatcagagaaatgcaaatcaaaaccactatgagatatcatctcacaccaactgcttgtttggaaacagcggaggaacaacaactaaataacatggagtgcgcaggcaccgaagctataaacagcctcatcagcattgccctcctgcccaagggtggaatgagccgtatcttgattgagactcaaggggacaggaccctgaagtggcacaaagagcgagcagtgtgcggagcccatatgcaggcccgagcggggcagacgacgcacagcgcaggaggatttctgctcccgcctggaattcatttgcagtcattaccttgtgggtgcgaagagttgcccagaaaacagaggatggaaagaaatcagcctccaggagtaagaactggtacaactcccttccccaagatgaaacccgaggacacagtgatagtcacaactgggtcagcccaaaagcttgcatgtggtctgccacacacacactgggagaaagcgaatgctgcctcctttaaggacacctcaggggcatccaaggtcatccacgacagcctgatatgggcctttcagctcatgactttcacctgggattggttctcatttctaagtggcacttcctcccccgtggagctttctggggacacttcatggaagtggcaaaatggtcagtggaagttccaggctttcatcaccccttcagcctccagcacacccagaaaaaccagggtgcccactctttcccccacatccgtgggcatctcccggaaggtctttgatgaaccccagttaggtctgaatcttgtgctggatgagtcacagggacactatccagccacagtggctggtcccagtagttga

SEQ ID NO: 120172 - DNA, 3897 bp, Homo sapiens
atggtaaagggatcaattcaacgagaggagctaactatcctaaatatttatgcacccaatacaggagcacccagattcataaagcaagtcctcagtgacctaaaaagagacttagactcccacacattaataatgggagactttaacaccccactgtcaacattagacagatcaacgagacagaaagtcaacaaggatacccaggaattgaactcagctctgcaccaagcagacctaatagacatctacagaactctccaccccaaatcaacagaatatacatttttttcagcaccacaccacacctattccaaaattgaccacatagttggaagtaaagctctccttagcaaatgtaaaagaacagaaattataacaaactatctctcagaccacagtgcaatcaaactagaactcaggattaagaatctcactcaaagccgctcaactacatggaaactgaacaacctgctcctgaatgactactgggtacataacgaaatgaaggcagaaataaagatgttctttgaaaccaacgagaacaaagacaccacataccagaatctctgggacgcattcaaagcagtgtgtagagggaaatttatagcactaaatgcctacaagagaaagcaggaaagatccaaaattgacaccctaacatcacaattaaaagaactagaaaagcaagagcaaacacattcaaaagctagcagaaggcaagaaataactaaaatcagagcagaactgaaggaaatagtgacacaaaaaacccttcaaaaaatcaatgaatccaggagctggttttttgaaaggatcaacaaaattgatagaccgctagcaagactaataaagaaaaaaagagagaagaatcaaatagacacaataaaaaatgataaaggggatatcaccaccgatcccacagaaatacaaactaccatcagagaatactacaaacacctctacgcaaataaactagaaaatctagaagaaatggatacattcctcgacacatacactctcccaagactaaaccaggaagaagttgaatctctgaatagaccaataacaggctctgaaattgtggcaataatcaatagtttaccaaccaaaaagagtccaggaccagatagattcacagccgaattctaccagaggtacaaggaggaactggtaccattccttctgaaactattccaatcaatagaaaaagagggaatcctccctaactcattttatgaggccagcatcattctgataccaaagccgggcagagacacaaccaaaaaagagaattttagaccaatatccttgatgaacattgatgcaaaaatcctcaataaaatactggcaaaccgaattcagcagcacatcaaaaagcttatccaccatgatcaagtgggcttcatccctgggatgcaaggctggttcaatatacgcaaatcaataaatgtaatccagcatataaacagagccaaagacaaaaaccacatgattatctcaatagatgcagaaaaagcctttgacaaaattcaacaacccttcatgctaaaaactctcaataaattaggtattgatgggacgtatttcaaaataataagagctatctatgacaaacccacagccaatatcatactgaatgggcaaaaactggaagcattccctttgaaaactggcacaagacagggatgccctctctcaccactcctattcaacatagtgttggaagttctggccagggcaatcaggcaggagaaggaaataaagggtattcaattaggaaaagaggaagtcaaattgtccctgtttgcagatgacatgattgtttatctagaaaaccccatcgtctcagcccaaaatctccttaagctgataagcaacttcagcaaagtctcaggatacaaaatcaatgtacaaaaatcacaagcattcttatacaccaacaacagacaaacagagagccaaatcatgggtgaactcccattcacaattgcttcaaagagaataaaatacctaggaatccaacttacaagggatgtgaaggacctcttcaaggagaactacaaaccactgctcaaggaaataaaagaggacacaaacaaatggaagaacattccatgctcatgggtaggaagaatcaatatcgtgaaaatggccatactgcccaaggtaatttacagattcaatgccatccccatcaagctaccaatgactttcttcacagaattggaaaaaactactttaaagttcatatggaaccaaaaaagagcccgcatcgccaagtcaatcctaagccaaaagaacaaagctggaggcatcacactacctgacttcaaactatactacaaggctacagtaaccaaaacagcatggtactggtaccaaaacagagatatagatcaatggaacagaacagagccctcagaaataatgccgcatatctacaactatctgatctttgacaaacctgagaaaaacaagcaatggggaaaggattccctatttaataaatggtgctgggaaaactggctagccatatgtagaaagctgaaactggatcccttccttacaccttatacaaaaatcaattcaagatggattaaagatttaaacattagacctaaaaccataaaaaccctagaagaaaacctaggcattaccattcaggacataggcgtgggcaaggacttcatgacagcaaaagaaactaccatcagagtgaacaggcaacctacaacatgggagaaaattttcgcaacctactcatctgacaaagggctaatatccagaatctacaatgaactcaaacaaatttacaagaaaaaaacaaacaaccccatcaaaaagtgggcgaaggacatgaacagacacttctcaaaagaagacatttatgcagccaaaaaacacatgaagaaatgctcatcctcactggccatcagagaaatgcaaatcaaaaccactatgagatatcatctcacaccagttagaatggcaatcattaaaaagtcaggaaacaacagcttcctaacattccttgggaatccacgtctgcccagctttcaggctgcaggtccacaagtccaggtgaattttctcccttgccagcgcccaggattccatggggtacagtcctgtccaatcagaacattgcattctcttggccactatgattggctcagagatgaccatgtgactcgatcaaatctgaccctaagaattttgctagaaagaccaagaagaaaagcaccattttaccctctagattttccaagaagttatgatgcaggcctagagctgttggtgccatcatgtcaccacaagggacagcctgcttggaaatggagccaacgcagaggagaatctaatactgttgctgatctgacaggaggcagtgctcaggcagtcacgttcgctcacccaccactcacttcctgccatgtggcccagttcctaacaggctacgaaccagtactagtccacggcctgggggtctgggattcctgctatatacaatatattactacaactgaagttagatgtggccacgtggcagagttccacccaatggcatgtggaggaagtgacctaactctaaaggagcagctgttctttttccatattctttcccattcagcggacaggaaaaaaatgatgatgagaccccgggcttacagacatgcctgctggaaacgctttggtacattttggatgttccagggatcatatccaaatgctgaaaatggtctccaaagctctacgggtaagtcaagctatggcgaaaatggagaaatctacaaaggtaaaacattttattcttacaagtcacgtcacctatggatgagttcctatgcatgtatgaaaacacacatggatggtgaagatttggattttttcacataa

SEQ ID NO: 120173 - DNA, 3726 bp, Homo sapiens
atggtaaagggatcaattcaacaagaggagctaactatcctaaatatttatgcacccaatacaggagcacccagattcataaagcaagtcctcagtgacctacaaagagacttagactcccacacattaataatgggagactttaacaccccactgtcaacattagacagatcaacgagacagaaagtcaacaaggatacccaggaattgaactcagctctgcaccaagcagacctaatagacatctacagaactcttcaccccaaatcaacagaatatacatttttttcagcaccacaccacacctattccaaaattgaccacatagttggaagtaaagctctcctcagcaaatgtaaaagaacagaaattataacaaactatctctcagaccacagtgcaatcaaactagaactcaggattaagaatctcactcaaagccgctcaactacatggaaactgaacaacctgctcctgaatgactactgggtacataacgaaatgaaggcagaaataaagatgttctttgaaaccaacgagaacaaagacaccacataccagaatctctgggacgcattcaaagcagtgtgtagagggaaatttatagcactaaacgtctacaagagaaagcaggaaagatccaaaattgacaccctaacatcacaattaaaagaactagaaaagcaagagcaaacacattcaaaagctagcagaaggcaagaaataactaaaatcagagcagaactgaaggaaatagagacacaaaaaacccttcaaaaaatcaatgaatccaggagctggttttttgaaaggatcaacaaaattgatagaccactagcaagactaataaagaaaaaaagagagaagaatcaaatagacacaataaaaaatgataaaggggatatcaccaccgatcccacagaaatacaaactaccatcagagaatactacaaacacctctatgcaaataaactagaaaatctagaagaaatggatacattcctcgacacatacactctcccaagactaaaccaggaagaagttgaatctctgaatagaccaataacaggctctgaaattgtggcaataatcaatagtttactaaccaaaaagagtccaggaccagatggattcacagccgaattctaccagaggtacaaggaggaactggtaccattccttctgaaactattccaatcaatagaaaaagagggaatcctccctaactcattttatgaggccagcatcattctgataccaaagccgggcagagacacaaccaaaaaagagaattttagaccaatatccttgatgaacattgatgcaaaaatcctcaataaaatactggcaaaccgaatccagcagcacatcaaaaagcttatccaccatgatcaagtgggcttcatccctgggatgcaaggctggttcaatatacgcaaatcgataaatgtaatccagcatataaacagagccaaagacaaaagccacatgattatctcaatagatgcagaaaaagcctttgacaaaattcaacaacccttcatgctaaaaactctcaataaattaggtattgatgggacgtatttcaaaataataagagctatctatgacaaacccacagccaatatcatactgaatgggcaaaaactggaagcattccctttgaaaactggcacaagacagggatgccctctctcaccgctcctattcaacatagtgttggaagttctggccagggcaatcaggcaggagaaggaaataaagggtattcaattaggaaaagaggaagtcaaattgtccctgtttgcagacgacatgattgtttatctagaaaaccccatcgtctcagcccaaaatctccttaagctgataagcaacttcagcaaagtctcaggatacaaaatcaatgtacaaaagtcacaagcattcttatacaccaacaacagacaaacagagagccaaatcatgggtgaactcccattcataattgcttcaaagagaataaaatacctaggaatccaacttacaagggatgtgaaggacctcttcaaggagaactacaaaccactgctcaaggaaataaaagaggagacaaacaaatggaagaacattccatgctcatgggtaggaagaatcaatatcgtgaaaatggccatactgcccaaggtaatttacagattcaatgccatccccatcaagctaccaatgactttcttcacagaattggaaaaaactactttaaagttcatatggaaccaaaaaagagcccgcatcgccaagtcaatcctaagccaaaagaacaaagctggaggcatcacactacctgacttcaaactatactacaaggctacagtaaccaaaacagcatggtactggtaccaaaacagagatatagatcaatggaacagaacagagccctcagaaataacgccgcatatctacaactatctgatctttgacaaacctgagaaaaacaagcaatggggaaaggattccctatttaataaatggtgctgggaaaactggctagccatatgtagaaagctgaaactggatcccttccttacaccttatacaaaaatcaattcaagatggattaaagatttaaacgttagacctaaaaccataaaaaccctagaagaaaacctaggcattaccattcaggacataggcgtgggcaaggacttcatgtccaaaacaccaaaaacaatggcaacaaaagccaaaattgacaaatgggatctaattaaactaaagagcttctgcacagcaaaagaaactaccatcagagtgaacaggcaacgtacaacatgggagaaaattttcgcaacctactcatctgacaaagggctaatatccagaatctacaatgaactcaaacaaatttacaagaaaaaaacaaacaaccccatcaaaaagtgggtgaaggacatgaacagacacttctcaaaagaagacatttatgcagccaaaaaacacatgaagaaatgctcatcatcactggccatcagagaaatgcaaatcaaaaccactatgagatatcatctcacaccagttagaatggcaatcattaaaaagtcaggaaacaacaggtgctggagaggatgtggagaaataggaacacttttacactgttggtgggactgtaaactagttcaaccattgtggaagtcagtgtggcgattcctcagggatctagaactagaaataccatttgacccagacatcccattactggctgcagggccaggttctgcagggttgcggctcagtatggtgggtgcatcaccaccatcagtgacaactggtccaggccatttgctccttatgcatgattatcttgataattggactgctgagaggacagaaagcatttccatgctgctggatcataggctctgctgtaagggaacaagtaattatgcaggcactcaccatgcacacttgaccagcacagcgttgaagaacaggtctcacatttccaccttgttgatgaaagcagcttggagacatgctgtcaatgaacaagctgtaaataatgtaatgttcttaataaataagtgtggacaaatcatgttgcaaaacaaggaacttagtgtcttatggggtgaaaatgtcattgaagagcacacagtaatatgttggggtcagcttgatgactcacaagaactgattaaccttccaaaaggtgccaatccagagtatgttagttctttcttcatgtaa

SEQ ID NO: 120174 - DNA, 3783 bp, Homo sapiens
atggtaaagggatcaattcaacaagaggagctaactatcctaaatatttatgcacccaatacaggagcacccagattcataaagcaagtcctgagtgacatacaaagagacttagactcccacacattaataatgggagactttaacaccccactgtcaacattagacagatcaacgagacagaaagtcaacaaggatacccaggaattgaactcagctctgcaccaagcggacctaatagacatctacagaactctccaccccaaatcaacagaatatacatttttttcagcaccacaccacacctattccaaaattgaccacatagttggaagtaaagctctcctcagcaaatgtaaaagaacagaaattataacaaactgtctctcagaccacggtgcaatcaaactagaactcaggattaagaatctcactcaaagccgctcaactacatggaaactgaacaacctgctcctgaatgactactgggtacataacgaaatgaaggcagaaataaagatgttctttgaaaccaacgagaacaaagacaccacataccagaatctctgggacgcattcaaagcagtgtgtagagggaaatttatagcactaaatgcctacaagagaaagcaggaaagatccaaaatcgacaccctaacatcacaattaaaagaactagaaaagcaagagcaaacacattcaaatgctagcagaaggcaagaaataactaaaatcagagcagaactgaaggaaatagagacacaaaaaacccttcaaaaaatcaatgaatccaggagctggttttttgaaaggatcaacaaaattgatagaccgctagcaagactaataaagaaaaaaagagagaagaatcaaatagacacaataaaaaatgataaaggggatatcaccaccgatcccacagaaatacaaactaccatcagagaatactacaaacacctctacgcaaataaactagaaaatctagaagaaatggatacattcctcgacacatacactctcccaagactagaccaggaagaagttgaatctctgaatagaccaataacaggctctgaaattgtggcaataatcaatagtttaccaaccaaaaagagtccaggaccagatggattcacagccgaattctaccagaggtacaaggaggaactggtaccattccttctgaaactattccaatcaatagaaaaagagggaatcctccctaactcattttatgaggccagcatcattctgataccaaagccgggcagagacacaaccaaaaaagagaattttagaccaatatccttgatgaacattgatgcaaaaatcctcaataaaatactggcaaaacgaatccagcagcacatcaaaaagcttatccaccatgatcaagtgggcttcatccctgggatgcaaggctggttcaatatatgcaaatcaataaatgtaatccagcatataaacagagccaaagacaaaaaccacatgattatctcaatagatgcagaaaaagcctttgacaaaattcaacaacccttcatgctaaaaactctcaataaattaggtattgatgggacgtatttcaaaataataagagctatctatgacaaacccacagccaatatcatactgaatgggcaaaaactggaagcattccctttgaaaactggcacaagacagggatgccctctctcaccgctcctattcaacatagtgttggaagttctggccagggcaatcaggcaggagaaggaaataaagggtattcaattaggaaaagaggaagtcaaattgtccctgtttgcagacgacatgattgtttatctagaaaaccccatcgtctcagcccaaaatctccttaagctgataagcaacttcagcaaagtctcaggatacaaaatcaatgtacaaaaatcacaagcattcttatacaccaacaacagacaaacagagagccaaatcatgagtgaactcccattcacaattgcttcaaagagaataaaatacctaggaatccaacttacaagggatgtgaaggacctcttcaaggagaactacaaaccactgctcaaggaaataaaagaggacacaaacaaatggaagaacattccatgctcatgggtaggaagaatcaatattgtgaaaatggccatactgcccaaggtaatttacagattcaatgccatccccatcaagctaccaatgactttcttcacagaattggaaaaaactactttaaagttcatatggaaccaaaaaagagcccgcatcgccaagtcaatcctaagccaaaagaacaaagctggaggcatcacactacctgacttcaaactatattacaaggctacagtaaccaaaacagcatggtactggtaccaaaacagagatatagatgaatggaacagaacagagccctcagaaataatgccgcatatctacaactatctgatctttgacaaacctgagaaaaacaagcaatggggaaaggattccctatttaataaatggtgctgggaaaactggctagccatatgtagaaagctgaaactggatccctttcttacaccttatacaaaaatcaattcaagatggattaaagatttaaacgttagacctaaaaccataaaaaccctagaagaaaacctagacattaccattcaggacataggcgtgggcaaggacttcatgtccaaaacaccaaaagcaatggcaacaaaagacaaaattgacaaatgggatctaattaaactaaagagcttctgcacagcaaaagaaactaccatcagagtgaacaggcaacctacaacatgggagaaaattttcgcaacctactcatctgacaaagggctaatatccagaatctacaatgaactcaaacaaatttacaagaaaaaaacaaacaaccccatcaaaaagtgggtgaaggacatgaacagacacttctcaagagaagacatttatgcagccaaaaaacacatgaaaaaatgctcatcatcactggccatcagagaaatgcaaatcaaaaccactatgaggttttactgggatttaataatgcttataatgatggttggaaatctagtcatcataccagttggaatcacattctttacagagcaaacaacaacaccatggattattttcaatgtggcatcagatacagttttcctattggacctgatcatgaattttaggactgggactgtcaatgaagacagttctgaaatcatcctggaccccaaagtgatcaagatgaattatttaaaaagctggtttgtggttgacttcatctcatccatcccagtggattatatctttcttattgtagaaaaaggaatggattctgaagtttacaagacagccagggcacttcgcattgtgaggtttacaaaaattctcagtctcttgcgtttattacgactttcaaggttaattagatacatacatcaatgggaagaggaacgcagctcctcaccagcaacagaacaaagctggacggagaatgactttgataagttgagagaaggcttcagacgatcaaactactctgagctaaaggaggaagttcgaacccttggcaaagaagttaaaaaccttgaaaaaaaattagacgaatggctaactagaataatcaatgcagagaagtccttaaaggacctgatggagctgaaaaccatggcacgagaactacatgaccaatgcacaagcctcagtagccgatttgatgaactggaagaaagagtatcagtgatggaagatcaaatgaatgaaatgaagtga

SEQ ID NO: 120175 - DNA, 3855 bp, Homo sapiens
atggctgcctggaacctgctacttaaatcatatgcatattggggaggtctaaggaaggaagatttccactgtttagaccggaagaccctgaggacagtatcctttctggctgccctgctgtcatatgagtccatagggggcaaaggaaaactaacaaccagaaaggacatctacaccgaaaacccatctgtacatcaccatcatcaaagaccaaaagtagataaaaccacaaagatggggaaaaaacagaacagaaaaactggaaactctaaaatgcagagcgcctctcctcctccaaaggaacgcagttcctcaccagcaacagaacaaagctggatggagaatgattttgaagagctgagagaagaaggcttcagacgatcaaattactctgagctacgggaggacattcaaaccaaaggcaaagaagttgaaaactttgaaaaaaatttagaagaatgtataactagaataaccaatacagagaagtgcttaaaggagctgatggagctgaaaaccaaggctcgagaactacgtgaagaatgcagaagcctcaggagccgatgcgatcaactggaagaaagggtatcagcaatggaagatgaaatgaatgaaatgaagcgagaagggaagtttagagacaaaagaataaaaagaaatgagcaaagcctccaagaaatatgggactatgtgaaaagaccaaatctacgtctgattggtgtacctgaaagtgatgtggagaatggaaccaagttggaaaacactctgcaggatattatccaggagaacttccccagtctagcaaggcaggccaacgttcagattcaggaaatacagagaacgccacaaagatactcctcgagaagagcaactccaagacacataattgtcagattcaccaaagttgaaatgaaggaaaaaatgttaagggcagccagagagaaaggtcgggttaccctcaaaggaaagcccatcagactaacagcggatctctcggcagaaaccctacaagccagaagagagtgggggccaatattcaacattcttaaagaaaagaattttcaacccagaatttcatatccagccaaactaagcttcataagtgaaggagaaataaaatactttatagacaagcaaatgctgagagattttgtcaccaccaggcctgccctaaaagagctcctgaaggaagcgctaaacatggaaaggaacaaccggagaaagcaggaaagatccaaaattgacaccctaacatcacaattaaaagaactagaaaagcaagagcaaacacattcaaaagctagcagaaggcaagaaataactaaaatcagagcagaactgaaggaaatagagacacaaaaaacccttcaaaaaatcaatgaatccaggagctggttttttgaaaggatcaacaaaattgatagaccgctagcaagactaataaagaaaaaaagagagaagaatcaaatagacacaataaaaaatgataaaggggatatcaccactgatcccacagaaatacaaactaccatcagagaatactacaaacacctctacgcaaataaactagaaaatctagaagaaatggatacattcctcgacacatacactctcccaagactaaaccaggaagaagttgaatctctgaatagaccaataacaggctctgaaattgtggcaataatcaatagtttaccaaccaaaaagagtccaggaccagatggattcacagccgaattctaccagaggtacaaggaggaactggtaccattccttctgaaactattccaatcaatagaaaaagagggaatcctccctaactcattttatgaggccagcatcattctgataccaaagccgggcagagacacaaccaaaaaagagaattttagaccaatatccttgatgaacattgatgcaaaaatcctcaataaaatactggcaaaccgaatccagcagcacatcaaaaagcttatccaccatgatcaagtgggcttcatccctgggatgcaaggctggttcaatatacgcaaatcaataaatgtaatccagcatataaacagagccaaagacaaaaaccacatgattatctcaatagatgcagaaaaagcctttgacaaaattcaacaacccttcatgctaaaaactctcaataaattaggtattgatgggaagtatttcaaaataataagagctatctatgacaaacccacagccaatatcatactgaatgggcaaaaactggaagcattccctttgaaaactggcacaagacagggatgccctctctcaccgctcctattcaacatagtgttggaagttctggccagggcaatcaagcaggagaaggaaataaagggtattcagttaggaaaagaggaagtcaaattgtccgtgtttgcagacgacatgattgtttatctagaaaaccccatcgtctcagcccaaaatctccttaagctgataagcaacttcagcaaagtctcaggatacaaaatcaatgtacaaaaatcacaagcattcttatacaccaacaaccgacaaacagagagccaaatcatgagtgaactcccattcacaattgcttcaaagagaataaaatacctaggaatccaacttacaagggatgtgaaggacctcttcaaggagaactacaaaccactgctcaaggaaataaaagaggacacaaacaaatggaagaacattccatgctcatgggtaggaagaatcaatatcgtgaaaatggccatactgcccaaggtaatttacagattcaatgccatccccatcaagctaccaatgactttcttcacagaattggaaaaaactactttaaagttcatatggaaccaaaaaagagcccgcatcgccaagtcaatcctaagccaaaagaacaaagctggaggcatcacactacctgacttcaaactatactacaaggctacagtaaccaaaacagcatggtactggtaccaaaacagagatatagatcaatggaacagaacagagccctcagaaataatgccgcatatctacaactatctgatctttgacaaacctgagaaaaacaagcaatggggaaaggattccctatttaataaatggtgctgggaaaactggctagccatatgtagaaagctgaaactggatcccttccttacaccttatacaaaaatcaattcaagatggattaaagatttaaacgttagacttaaaaccataaaaaccctagaagaaaacctaggcattaccattcaggacataggcgtaggcaaggacttcatgtccaaaacaccaaaagcaatggcaacaaaagccaaaattgacaaatgggatctaattaaactaaagagcttctgcacagcaaaagaaactaccatcagagtgaacaggcaacctacaacatgggagaaaattttcgcaacctactcatctgacaaagggctaatatccagaatctacaatgaactcaaacaaatttacaagaaaaaaacaaacaaccccatcaaaaagtgggcaaaggacatgaacagacacttctcaaaagaagacatttatgcagccaaaaaacacatgaagaaatgctcatcatcactggccatcagagaaatgcaaatcaaaaccactatgagatatcatctcacaccagttagaatggcaatcattaaaaagtcaggaaacaacagcagccagatgccactgactagctcagataacactgctgtcaactgtaaaaaattaagatccaaaccagatgaaattgccaaagagtcagaagctcctccaggcttagccagctttcacctttgctcatcatacatctatggggctcctcttaactcacagatgggctag

SEQ ID NO: 120176 - DNA, 3348 bp, Homo sapiens
atgggagactttaacatcccactgtcaacattagacagatcaacgagacagaaagtcaacaaggatacccaggaattgaactcagctctgcaccaagcggacctcatagatagctacagaactctccaccccaaatcaacagaatatacatttttttcagcaccacaccacacctattccaaaattgaccacatacttggaagtaaagctctcctcagcaaatgtaaaagaacagaaattataacaaactatctctcagaccacagtgcaatcaaactagaactcaggattaagaatctcactcaaaactgctcaactacatggaaactgaacaacctgctcctgaatgactactgggtacataacgaaatgaaggcagaaataaagatgttctttgaaaccaatgagaacaaagacacaacataccacaatctctgggatgcattcaaagcagtgtgtagagggaaatttatagcactaaatgcccacaagagaaagcaggaaagatccaaaattgacaccctaacatcacaattaaaagaactagaaaagcaagagcaaacacattcaaaagctagcagaaggcaagaaataactaaaatcagagcagaactgaaggaaatagagacacaaaaaacccttcaaaaaattaacgaatccaggagctgggtttttgaaaggatcaacaaaattgatagaccgctagcaagactaacaaagaaaaaaagcgagaagaatcaaatagatgcaataaaaaatgataaaggggatatcaccaccgatcctacagaaatacaaactaccatcagagaatactacaaacacctctacgcaaataaactagaaaatctagaagaaacggataaattcctcgacacatacactctcccaagacgaaaccaggaagaagttgaatctctgaatagaccaataacaggagctgaaattgtggcaataatcaataacttaccaaccaaaaagagtccaggatcagatggattcacagccgaattctaccagaggtacaaggaggaactggtaccattccttctgaaactattccaatcaatagaaaaagagggaatcctccctaactcattttatgaggccagcatcatcctgataccaaagccgggcagagacacaaccaaaaaagagaattttagaccaatatccttgatgaacattgatgcaaaaatcctcaataaaatactggcaaaccaaatccagcagcacatcaaaaagcttatccaccatgatcaagtgggcttcatccctgggatgcaaggctggttcaatatatgcaaatcaataaatgtaatccagcatataaacagaaccaaagacaaaaaccacatgattatctcaatagatgcagaaaaggcctttgacaaaattcaacaacccttcatgctaaaaactctcaataaattaggtattgatgggacttatctcaaaataataagagctatctatgacgaacccacagccaatatcatactgaatgggcaaaaactggaagcattccctttgaaaactggcacaagacagggatgccctctctcaccactcctattcaacatagtgttggaagttctggccagggcaattaggcaggagagggaaataaagggtattcaattaggaaaagaggaagtcaaattgtccctgtttgcagatgacatgattgtatatctagaaaaccccattgtctcagcccaaaatctccttaagctgataagcaacttcggcaaagtctcaggatacaaaatcaatgtacaaaaatcacaagcattcttaaacaccaacaacagacaaacagagagccaaatcatgagtgaactcccattcacaattgcttcaaagagaataaaatacctaggaatccaacttacaagggatgtgaaggacctcttcaaggagaactacaaaccactgctcaaggaaataaaagaggatacaaacaaatggaagaacattccatgctcatgggtaggaagaatcaatatcatgaaaatggccatactgcccaaggtaatttacagattcaatgccatccccatcaagctaccaatgactttcttcacagaattggaaaaaactactttaaagttcatatggaaccaaaatagagcctgcatcgccaagtcaatcctaagccaaaagaacaaagctggaggcatcacactacctgacctcaaactatactacaaggctacagtaaccaaaacagcatggtactggtaccaaaacagagatatagatcaatggaacagaacagagccctcagaaataacgctgcatatctacaactatctgatctttgacaaacctgagaaaaacaagcaatggggaaaggattccctatttaataaatggtgctgggaaaactggctagccatatgtagaaagctgaaactggatcccttccttacaccttatacaaaaatcaattcaagatggattaaagacttaaacattagacctaaaaccataaaaaccctagaagaaaacctaggcattaccattcaggacataggcatgggcaaggacttcatgtctaaaacaccaaaagcaatggcaaccaaagccaaaattgacaaatgggatctaattaaactaaagagcttctgcacagcaaaagaaactaccatcagagtgaacaggcaacctacaaaatgggggaaaattttcgcaacctactcatctgacaaagggctaatatccagaatctacaatgaactcaaacaaatttacaagaaaaaaacaaacaaccccatcaaaaagtttgcaaaggatatgaacagacacttctcaaaaaaagacatctatgcagccaaaaaacacatgaaaaaatgctcaccatcactggccatcagagaaatgcaaatcaaaaccacaatgagataccatctcacaccagttagaatggcaatcattaaaaagtcaggaaacaacagaactggccgtggtttacatccaggaagggattggtcagtcacctgtgccaggtccccgggggatcctgagcccagcggtataaagggtggctgtgggagtggcacaccctctcccagccccagcaagcaaaccgtcaggcggccgtggactcagatcccggagatgaagcccctgctcctggccgtcagcctcggcctcattgctgccctgcaggcccaccacctcctggcctcagacgaggagattcaggatgtgtcagggacgtggtatctgaaggccatgacggtggacagggagttccctgagatgaatctggaatcggtgacacccatgaccctcacgaccctggaagggggcaacctggaagccaaggtcaccatgctgtga

SEQ ID NO: 120177 - DNA, 6136 bp, Homo sapiens
atggggaaaaaacagaacagaaaaactggaaactctaaaacgcagagtgcctctcctcctccaaaggaacgcagttcctcaccagcaacggaaaaaagctggatggagaatgactttgacgagctgagagaagaaggtttcagacgatcaaattactctgagctacgggaggacattcaaaccaaaggcaaagaagttgaaaactttgaaaaaaatttagaagaatgtataactagaataaccaatacagagaagtgcttaaaggagctgatggagctgaaaaccaaggctcgagaactacgtgaagaatgcagaagcctcaggagccgatgtgatcaactggaagaaagggtatcagcaatggaagatgaaatgaatgaaatgaagcgagaagggaagtttagagaaaaaagaataaaaagaaatgagcaaagcctccaagaaatatgggactatgtgaaaagaccaaatctacgtctgactggtgtacctgaaagtgacggggagaatggaaccaagttggaaaacactctgcaggatattatccaggagaacttccccaatctagcaaggcaggtcaatgttcagattcaggaaatacagagaacgccacaaagatactcctcgagaagagcaactccaagacacataattgtcagattcaccaaagttgaagtgaaggaaaaaatgttaagggcagccagagagaaaggtcgggttaccctcaaagggaagcccatcagactaacagcggatctctcggcagaaaccctacaagccagaagagagtgggggccaatattcaacattcttaaagaaaagaattttcaacccagaatttcatatccagccaaactaagcttcataagtgaaggagaaataaaacactttacagacaagcaaatgctgagagattttgtcaccaccaggcctgccctaaaagagctcctgaaggaagtgctaaacatggaaaggaacaaccagtaccagccgctgcaaaatcatgccaaaatacagatcaacgagacagaaagtcaacaaggatacccaggaattgaactcagctctgcaccaagcggacctaatagacatctacagaactctccacaccaaatcaacagaatatacatttttttcagcaccacaccacacctattccaaaattgaccacatagttggaagtaaagctctcctcagcaaatgtgaaagaacagaaattataacaaactatctctcagaccacagtgcaatgaaactagaactcaggattaagaatctcactcaaaactgctcaactacatggaaactaaacaacctgctcctgaatgactactgggtacataacgaaatgaaggcagaaataaagatgttctttgaaaccaacgagaacaaagacacaacaaaccagaatctctgggacgcattcaaagcagtgtgtagagggaaatttatagcactgaatgcccacaagagaaagcaggaaagatccaaaattgacaccctaacatcacaattaaaagaactagaaaagcaagagcaaacacattcaaaagctagcagaaggcaagaaataactaaaatcagagcagaactgaaggaaatagagacacaaaaaacccttcaaaaaatcaatgaatccaggagctggttttttgaaaggatcaacaaaattgatagaccgctagcaagactaataaagaaaaaaagagagaagaatcaaatagacacaataaaaaatgataaaggggatatcaccaccgatcccacagaaatacaaactaccatcagagaatactacaaacacctctacgcaaataaactagaaaatctagaagaaattaataaattgctcgacacatacactctcccaagactaaaccaggaagaagttgaatctctgaatagaccaataacaggagctgaaattggggcaataatcaatagtttaccaaccaaaaagagtccaggaccagatggattcacagccgaattctaccagaggtacaaggaggaactggtaccattccttctgaaactattccaatcaatagaaaaagaggaaatcctccctaactcattttatgaggccagcatcattctgataccaaagccgggcagagacacaaccaaaaaagagaattttagaccaatatccttgatgaacatcgatgcaaaaatcctcaataaaatactggcaaaccgaatccagcagcacatcaaaaagcttatccaccatgatcaagtgggcttcttccctgggatgcaaggctggttcaatatacgcaaatcaataaatgtaatccagcatataaacagagccaaagacaaaaaccacatgattatctcaatagatgcagaaaaagcctttgacaaaattcaacaacccttcatgctaaaaactctcaataaattaggtattgatgggacgtatttcaaaataataagagctatctatgacaaacccacagccaatatcatactgaatgggcaaaaactggaagcattccctttgaaaactggcacaagacagggatgccctctctcaccgctcctattcaacatagtgttggaagttctggccagggcaatcaggcaggagaaggaaataaagggtattcaattaggaaaagaggaagtcaaattgtccctgtttgcagacgacatgattgtttatctagaaaaccccatcgtctcagcccaaaatctccttaagctgataagcaacttcagcaaagtctcaggatacaaaatcaatgtacaaaaatcacaagcattcttatacaccagcaacagacaaacagagagccaaatcatgagtgaactcccattcacaattgcttcaaagagaataaaatacctaggaatccaacttacaagggatgtgaaggacctcttcaaggagaattacaaaccactgctcaaggaaataaaagaggatacaaacaaatggaagaacattccatgctcatgggtaggaagaatcaatatcgtgaaaatggccatactgcccaaggtaatttacagattcaatgccatccccatcaagctaccaatgactttcttcacagaattggaaaaaactactttaaagttcatatggaaccaaaaaagagcccgcatcgccaagtcaatcctaagccaaaagaacaaagctggaggcatcacactacctgacttcaaactatactacaaggctacagtaaccaaaacagcatggtactggtaccaaaacagagctatagatcaatggaacagaacagagccctcagaaataacaccgcatacctacaactatctgatctttgacaaacctgagaaaaacaagcaatggggaaaggattccctatttaataaatggtgctgggaaaactggctagccatatgtagaaagctgaaactggatcccttccttacaccttatacaaaaatcaattcaagatggattaaagatttaaacgttagacctaaaaccataaaaaccctagaagaaaacctaggcattaccattcaggacataggcatgggcaaggacttcatgtccagaacaccaaaagcaatggcaaccaaagccaaaattgacaaatgggatctaattaaactaaagagcttctgcacagcaaaagaaactaccatcagagtgaacaggcaacctacaacatgggagaaaattttcgcaacctactcatctgacaaagggctaatatccagaatctacaatgaactcaaacaaatttacaagaaaaaaacaaacaaccccatcaaaaagtgggagaaggacatgaacagacacttctcaaaagaagacatttatgcagccaaaaaacacatgaaaaaatgctcatcatcactggccatcagagaaatgcaaatcaaaaccactatgagatatcatctcacaccagttagaatggcaatcattaaaaagtcaggaaacaacagacttcttggaagtgccctagaatcagcaggtccaaatcaaactcagctggccgtgggtcagccattgcagccccacctgccacgggctccaggaagagcagtcatcagtatggagaaggccggactatgctcagaagccactgagcaggtgctccatagactcaccagctggagcggggtcacatctcggaggcaccgtcagcaccaggagggcagccaagcaagggtatggcatttccgagcctctgcggtcaagggtatcgcatttccgagcctctgcggtcaagggtatggcgtttccgagcctctgcggtcaagggtatggcgtttccgagcctctgcagtcaagagcccagagatgggttgtcggggcagctgtgggggcatcccagatgtgggtgccaacatgcttgatgacctgacaccagtgcatcatgacctgacaccagcgcgcaatgacctgacaccagtgcacgatgacctggcaccagtgcgtgatgacctgacaccagtgcgtcatgacctgacaccagtgcgtgatgacctggcaccagtgcgtgatgacctgacaccagtgtgtgatgacctggcaccagtgtgcgatgacgtggccccagtgtgccatgacctggcaccagtgtgtgatgacctgacaccagtgtgtgatgacctggcaccagtgcacaatgaccttgcagcaatccagacctacctgcaagctgcaagcgatgtgcctgtgggacacagcctggaccccgctgcgaactacaactccccgaaattccgctcccggaaccagagatacatgagggccgtcagcaccctgagccaggccagctgcgtgagccaggtgagcgaggcggagatcaatgggcaattcgagtccgtgtgcgagtccgtcttcagtgaagttgaatctcaggccatggatgccctcgacctcccgggatgtttccgaacaaggagtcacagctaccttcgagccattcaagccggctactcccaagatgacgaatgtattcccatgatgacaccctctgacatcacctccaccatcaggtcaacagcagaaggcgagcgtgatgcagataaatcgtgcatctgtatcaggaactgcatatgtaagccagaattgctcgggttttcagatattgtggagatggaagtactgttgaatctgcctcccatacccctcgaacccgccggtcctcacctgtgtcaccctccaacccgccggccctcacctgtgtcaccctcgaccccgccggtcctcacctgtgtcaccctccaacccgccggccctcacctgtgtcaccctcgaccccgccggccctcacctgtgtcaccctcgaccccgccggccctcacctgtgtcaccctcgaccccgccggtcctcacctgtgtcaccctcgaccccgccggtcctcacctgtgtcaccctccaacccgccggccctcacctgtgtcaccctcgaccccgccggtcctcacctgtgtcaccctccaacccgccggccctcacctgtgtcaccctcgaacccgccggccctcacctgtgtcaccctcgaccccgccggtcctcacctgtgtcaccctccaacccgccggtcctcacctgtgtcaccctccaacccgccggccctcacctgtgtcaccctccaacccgccggccctcacctgtgtcaccctccaacccgccggcccccacctgtgtcaccctccaacccgccggccctcacctgtgtcaccctcgaccccgccggtcctcacctgtgtcaccctccaacccgccggtcctcacctgtgtcaccctcgaccccgccggtcctcacctgtgtcaccctcacaaccatccggccctcacatgtgtcacccacgaccccgccggtcctcacctgtgtcaccctcgaccccgccggtcctcacctgtgtcaccctccaacccgccggccctcacctgtgtcaccctcgaccccgccggccctcacctgtgtcaccctccaacccgccggccctcacctgtgtcaccctccaacccgccggccctcacctgtgtcaccctccaacccgccggccctcacatgtgtcaccctcgaccccgccggtcctcacctgtgtcaccctcgaccccgccggtcctcacctgtgtcaccctccaacccgccggtcctcacctgtgtcacccctcggggctga

SEQ ID NO: 120178 - DNA, 3924 bp, Homo sapiens
atggggaaaaaacagaacagaaaaactggaaactctaaaacgcagagcgcctctcctcctccaaaggaacgcagttcctcaccagcaacagaacaaagctggatggagaatgattttgacgagctgagagaagaaggcttcagacgatcaaattactctgagctatgggaggacattcaaaccaaaggcaaagaagttgaaaactttgaaaaaaatttagaagaatgtataactagaataaccaatacagagaagtgcttaaaggagctgatggagctgaaaaccaaggctcgagaactacatgaagaatgcagaagcctcaggagccgatgcgatcaactggaagaaagggtatcagcaatggaagatgaaatgaatgaaatgaagcgagaagggaagtttagagaaaaaagaataaaaagaaatgagcaaagcctccaagaaatatgggactatgtgaaaagaccaaatctacgtctgattggtgtacctgaaagtgatgtggagaatggaaccaagttggaaaacactctgcaggatattatccaggagaacttccccaatctagcaaggcaggccaacgttcagattcaggaaatacagagaatgccacaaagatactcctcgagaagagcaactccaagacacataattgtcagattcaccaaagttgaaatgaaggaaaaaatgttaagggcagccagacagaaagcaccacaccacacctattccaaaattgaccacatagttggaagtaaagctctcctcagcaaatgtaaaagaacagaaattataacaaactatctctcagaccacagtgcaatcaaactagaactcaggattaagaatctcactcaaagccgctcaactacatggaaactgaacaacctgctcctgaatgactactgggtacataacgaaatgaaggcagaaataaagatgttctttgaaaccaacgagaacaaagacaccacataccagaatctctgggacacattcaaagcagtgtgtagagggaaatttatagcactaaatgcctacaagagaaagcaggaaacatccaaaattgacaccataacatcacaattaaaagaactagaaaagcaagagcaaacacattcaaaagctagcagaaggcaagaaataactaaaatcagagcagaactgaaggaaatagagacacaaaaaacccttcaaaaaatcaatgaatccaggagctggttttttgaaaggatcaacaaaattgatagaccgctagcaagactaataaagaaaaaaagagagaagaatcaaatagacacaataaaaaatgataaaggggatatcaccaccgatcccacagaaatacaaactaccatcagagaatactacaaacacctctacgcaaataaactagaaaatctagaagaaatggatacattcctcgacacatacactctcccaagactaaaccaggaagaagttgaatctctgaatagaccaataacaggctctgaaattgtggcaataatcaatagtttaccaaccaaaaagagtccaggaccagatggattcacagccgaattctaccagaggtacaaggaggaactggtaccattccttctgcaactattccaatcaatagaaaaagagggaatcctccctaactcattttatgaggccagcatcattctgataccaaagccgggcagagacacaaccaaaaaagagaattttagaccaatatccttgatgaacattgatgcaaaaatcctcaataaaatactggcaaaccgaatccagcagcacatcaaaaagcttatccaccatgatcaagtgggcttcatccctgggacgcaaggctggttcaatatacgcaaatcaataaatgtaatccagcatataaacagagccaaagacaaaaaccacatgattatctcaatagatgcagaaaaagcctttgacaaaattcaacaacccttcatgctaaaaactctcaataaattaggtattgatgggacatatttcaaaataataagagctatctatgacaaacccacagccaatatcatactgaatgggcaaaaactggaagcattccctttgaaaactggcacaagacagggatgccctctctcaccgctcctattcaacatagtgttggaagttctggccagggcaatcaggcaggagaaggaaataaagggtattcaattaggaaaagaggaagtcaaattgtccctgtttgcagacgacatgattgtttatctagaaaaccccatcgtctcagcccaaaatctccttaagctgataagcaacttcagcaaagtctcaggatacaaaatcaatgtacaaaaatcacaagcattcttatacaccaataacagacaaacagagagccaaatcatgagtgaactcccattcacaattgcttcaaagagaataaaatacctaggaatccaacttacaagggatgtgaaggacctcttcaaggagaactacaaaccactgctcaaggaaataaaagaggacacaaacaaatggaagaacattccatgctcatgggtaggaagaatcaatatcgtgaaaatggccatactgcccaaggtaatttacagattcaatgccatccccatcaagctaccaatgactttcttcacagaattggaaaaaactactttaaagttcatatggaaccaaaaaagagcctgcatctccaagtcaatcctaagccaaaagaacaaagctggaggcatcacactacctgacttcaaactatactacaaggctacagtaaccaaaacagcatggtactggtaccaaaacagagatatagatcaatggaacagaacagagccctcagaaataatgccacatatctacaactatctgatctttgacaaacctgagaaaaacaagcaatggggaaaggattccctatttaataaatggtgctgggaaaactggctagccatatgtagaaagctgaaactggatcccttccttacaccttatacaaaaatcaattcaagatggattaaagatttaaacgttagacctaaaaccataaaaaccctagaagaaaacctaggcattaccattcaggacataggcgtgggcaaggacttcatgtccaaaacaccaaaagcaatggcaacaaaagccaaaattgacaaatgggatctaattaaactaaagagcttctgcacagcaaaagaaactaccatcagagtgaacaggcaacctacaacatgggagaaaattttcacaacctactcatctgacaaagggctaatatccagaatctacaatgaactcaaacaaatttacaagaaaaaaacaaacaaccccatcaaaaagtgggcgaaggacatgaacagacacttctcaaaagaagacatttatgcagccaaaaaacacatgaagaaatgctcatcatcactggccatcagagaaatgcaaatcaaaaccactatgagatatcatctcgcaccagttagaatggcaatcattaaaaagtcaggaaacaacagcaaaatggtggaagcagatgggcctggcaatcttttcactggtgtcctccatttagaaaccaatgaaaagtcgcttaaagcagtatttgggaaatatggtcccatattggaagacaactttttggatggaaaagcaatgaaagtagaacaagttaacaaaccgtcttttcaaagtggtggtaatgtggagatcaccatcttcttggagaaacaggagcccttcaggaagtctgagacaggaaaaaaattttttaagttgttcctgctgacattagcaaacttttttaaatttagtgaccatgatgactatagtgggggccttggtagagatcattctgaacatccaaatgggagttcttacagagatgcatatcagagttatgggaccttctatggtgcaccacctgcatga

SEQ ID NO: 120179 - DNA, 4354 bp, Homo sapiens
atgacaggatcaaattcacacataacaatattaactttaaatataaatggactaaattctgcaattaaaagacacagactggcaagttggataaagagtcaagacccatcagtgtgctgtattcaggaaacccatctcatgtgcagagacacacataggctcaaaataaaaggatggaggaagatctaccaagcaaatggaaaacaaaaaaaggcaggggttgcaatcctagtctctgataaaacagactttaaaccaacaaagatcaaaagagacaaagaaggccattacataatggtaaagggatcaattcaacaagaggagctaactatcctaaatatttatgcacccaatacaggagcacccagattcataaagcaagtcctgagtgacctacaaagagacttagactcccacacattaataatgggagactttaacaccccactgtcaatattagacagatcaacgagacagaaagtcaacaaggatacccaggaattgaactcagctctgcaccaagcagacctaatagacatctacagaactctccaccccaaatcaacagaatatacatttttttcagcaccacaccacacctattccaaaatcgaccacatagttggaagtaaagctctcctcagcaaatgtaaaagaacagaaattataacaaactatctctcagaccacagtgcaatcaaactagaactcaggattaagaatctcactcaaagccgctcaactacatggaaactgaacaacctgctcctgaatgactactgggtacataacgaaatgaaggcagaaataaagatgttctttgaaaccaacgagaacaaagacaccacataccagaatctctgggacgcattcaaagcagtgtgtagagggaaatttatagcactaaatgcctacaagagaaagcaggaaagatccaaaattgacaccctaacatcacaattaaaagaactagaaaagcaagagcaaacacattcaaaagctagcagaaggcaagaaataactaaaatcagagcagaactgaaggaaatagagacacaaaaaacccttcaaaaaatcaatgaatccaggagctggttttttgaaaggatcaacaaaattgatagaccgctagcaagactaataaagaaaaaaagagagaagaatcaaatagacacaataaaaaatgataaaggggatatcaccaccgatcccacagaaatacaaactaccatcagagaatactacaaacacctctacgcaaataaactagaaaatctagaagaaatggatacattcctcgacacatacactctcccaagactaaaacaggaagaagttgaatctctgaatggaccaataacaggctctgaaattgtggcaataatcaatagtttaccaaccaaaaagagtccaggaccagatggattcacagccgaattctaccagaggtacaaggaggaactggtaccattccttctgaaactattccaatcaatagaaaaagagggaatcctccctaactcattttatgaggccagcatcattctgataccaaagccgggcagagacacaaccaaaaaagagaattttagaccaatatccttgatgaacattgatgcaaaaatcctcaataaaatactggcaaaccgaatccagcagcacatcaaaaagcttatccaccatgatcaagtgggcttcatccctgggatgcaaggctggttcaatatacgcaaatcaataaatgtaatccagcatataaacagagccaaagacaaaaaccacatgattatctcaatagatgcagaaaaagcctttgacaaaattcaacaacccttcatgctaaaaactctcaataaattaggtattgatgggacgtatttcaaaataataagagctatctatgacaaacccacagccaatatcatactgaatgggcaaaaactggaagcattccctttgaaaactggcacaagacagggatgccctctctcaccgctcctattcaacatagtgttggaagttctggccagggcaatcaggcaggagaaggaaataaagggtattcaattaggaaaagaggaagtcaaattgtccctgtttgcagacgacatgattgtttatctagaaaaccccattgtctcagcccaaaatctccttaagctgataagcaacttcagcaaagtctcaggatacaaaatcaatgtacaaaaatcacaagcattcttatacaccaacaacagacaaacagagagccaaatcatgggtgaactcccattcacaattgcttcaaagaggataaaatacctaggaatccaacttacaagggatgtgaaggacctcttcaaggagaactacaaaccactgctcaaggaaataaaagaggacacaaacaaatggaagaacattccatgctcatgggtaggaagaatcaatatcgtgaaaatggccatactgcccaaggtaatttacagattcaatgccatccccatcaagctaccaatgactttcttcacagaattggaaaaaactactttaaagttcatatggaaccaaaaaagagcccgcattgccaagtcaatcctaagccaaaagaacaaagctggaggcatcacactaccttacttcaaactatactacaaggctacagtaaccaaaacagcatggtactggtaccaaaacagagatatagatcaatggaacagaacagagccctcagaaataatgccacatatctacaactatctgatctttgacaaacctgagaaaaacaagcaatggggaaaggattccctatttaataaatggtgctgggaaaactggctagccatatgtagaaagctgaaactggatctcttccttacaccttatacaaaaatcaattcaagatggattaaagatttaaacgttaaacctaaaaccataaaaaccctagaagaaaacctaggcattaccattcaggacataggcgtgggcaaggacttcatgtccaaaacaccaaaagcaatggcaacaaaagacaaaattgacaaatgggatctaattaaactaaagagcttctgcacagcaaaagaaactaccatcagagtgaacaggcaacctacaacatgggagaaaattttcgcaacctactcatctgacaaagggctaatatccagaatctacaatgaactcaaacaaatttacaagaaaaaaacaaacaaccccatcaaaaagtgggcgaaggacatgaacagacacttctcaaaagaagacatttatgcagccaaaaaacacatgaagaaatgctcatcatcactggccatcagagaaatgcaaatcaaaaccactatgagatatcatctcacaccagttagaatggcaatcatgaaaaaagtcaggaaacaacagctcgagggaagcagccccgaagcctccgcggcggcggcggcggcggtcgcggatcctctccaggctgctcgcaaagtccggccggccggaggcagccgccaactcctctcaacttctgccgatccgctgggcgaagcaacacgcttcctgcgcgtctctcctaggggctgagccggtctccgagggtctcggccgcctccactccctggcgctgcacacaacttacgtggaggccaggcccgcgcggggggcccagagaaagccggcgccgggcgaggctcttgcaggttctcagacccgaacacagacctgggttagagttggggacttgcctgtaataagtgacttacccattgccctcaacctaaggaagccttgccatttaaaacctcccaatggagcctatcaaagcgtgcttcaaagtgtgagggaggctgagagaggaattacagaaccgcctgacattggctgcaacctgatggggagatctgactcaaggaacagtacgatggccattgatgtccccgcccacgcactctgtagaagccttgggaatcttttcaaagcactgcccccacccgagagcatcatgacttctgttgctgggacaaaggtaagaatcattaggaaacacgatcacagtagtgcacctgcttacgcacgatatccagcccagagaaggtcccgcttcctaagccctcctgagactcaccagccacaagcccacatctatactaagttctttcgaaggccctctttactgctggacattcttcctttgtgcaacacgttaataaacccaacttggttcagccacagcgctgcaatgaacattcacggcataaaaaggaatgagagcatgtcttttgcaggagcatggatggagctggaggttatcatccttagcaaactaacacaagaacagaaaaccaaataccgcaagttctcacttataagtgggcactaa

SEQ ID NO: 120180 - DNA, 405 bp, Homo sapiens
atggtggtgaccacctctgcccgaggcggcggcggggaccgcacaccctcccggcggctgggctgcgggctcgcgccggccggggccgcggcgctgctggccggggcaagctgcctgtgctacggccgctccctgcagggcgagttcgtgcacgacgacgtgtgggcgatcgtgaacaaccccgacgtgcggcccggcgccccgctccgctggggcatcttcaccaacgacttctggggcaagggcatggccgagaacaccagccacaagtcctaccggccgctctgcgtcctcaccttcaaaaatgttggtgaacatgctgttggtttgcagcagcacccaggccctcagctcctccagtgctctccagatctcgtctttcagctacttggaatcatggtgcag

SEQ ID NO: 120181 - DNA, 1062 bp, Homo sapiens
atggtggtgaccacctctgcccgaggcggcggcggggaccgcacaccctcccggcggcggggctgcgggctagcgccggccggggccgcggcgctgctggccggggcaagctgcctgtgctacggccgctccctgcagggcgagttcgtgcacgacgacgtgtgggcgatcgtgaacaaccccgacgtgcggcccggcgccccgctccgctggggcatcttcaccaacgacttctggggcaagggcatggccgagaacaccagccacaagtcctaccggccgctctgcgtcctcaccttcaagatgtgcatggcactttgctccgggatccactgcccggctaatctgggctctcggggcggttcgggaggcgccggctggggagttgggatcgagtttctcaactgtctgccctctcagcgggcttctctctcgaggcagggctgggagcgggctggtgaaaccgcctccgcaccccttcgcctgccggatcgtgaccaagtgggactagcgcggacccagagggttccggagggaaatgttggtgaacatgctgttggtttgcagcagcacccaggccctcagctcctccagtgctctccagatctcgtctttcagctacttggaatcatggtgcagagagggccagatgactttcccttttttgaggcattgagaattacattggtgaaggagcacctgcaacttcgagaagctctttggtggatctcttctgtaggccaggtagaatacctccctcttccccatgtctgcacctggctaaacatatttttgactggtatgaacccattctactttcatgcagtaaatataattttacactgcttagtgactcttgtgctgatgtacacctgtgataaaactgtcttcaagaatcgtggacttgcttttgtaacggcattgctttttgctgtacatcctattcatactgaggcgtgggtagaagccaaagatgttgcagaagagacattctgcaatgcacaggacagtccctacaacaaagaattatctggcagaaaatgccagtggggctatgattga

SEQ ID NO: 120182 - DNA, 518 bp, Homo sapiens
tgagaaggctacatgtgacgagaatgattctgtttcaaatatagccacagaaataaaggagggacaacaatctgtttcatgtgtctcctcagaaacaatcagcctggaaggttatatttaaaaagaaagtttctcttttgaatattgccacaagaataacgggcggtgggaaatctggaacagtgtcttctcagaaacaaccaccctcaaaggctacaagtgacaagacagattctgctttgaatatagctacagaaataaaggatggactacaatgtgggacagtgtcttctcagaaacaaccagccttgaaggctacaactgacgaggaagattctgtttcgaatatagccacagaaataaaggatggagaaaaatctgggacagtgtcttctcagaaacaaccagccttgaaggctacaactgatgagaaagattctgtttcgaacatagccacagaaataaaggatggagaaaaatctgtgacagtgtcttctcagaaacaaccagcctcaaag

SEQ ID NO: 120183 - DNA, 846 bp, Homo sapiens
atggagcagggatacacatccggtgcgaggtatggttggattgacagaaaccagcaaaggttacacgttcagccgccgtggtgcgtaaggagtacgaggctagcgcaagggaccgtggatctcacagcggcagcggacagcagcacaacggggacaattgaggcatcaaaccaaacaatgcgcggaaggccggctaccgctaagggtccaacggcgaaccgaaaaacagcgcgcgcaagcgctctcaaggcgccaacagggctgtcggacgagaggctaacgcacagccgcgagaccagacgcgcggctacaagtgacgacaaagattctgtttcaaatatagccacagaaataaaggagggaccaatatctgggacagttattgggcaagttaaagggcatgatgaatgtttgaagtataatggtgtaaatccttctgatttcttgcaagaaagacatgagggatcatataccacctgctttgacattgattctcaggtgttgtcttctcagaaacaaccagctgagaaggttatatttaaaaagaaagtttctcttttgaatattgccacaagaataatgggtggtgggaaatctggaacagtgtcttctcagaaacaaccagcctcaaaggctacaagtgacaagacagattctgctttgaatatagctacagaaataaaggatggactacagtgtgggacaggcccgagattcttcatttgtaataagttctcgggtgatgctgatgctgctggtcttggacctgatcttcgcagtaagattatagacttccccacattgaaattgggaagaagaaacattggagagcagatcaagacataa

SEQ ID NO: 120184 - DNA, 435 bp, Homo sapiens
atggccttctgtaagagtaacctgaatgaacgctggtttgttccagagccgtatcgggagaaaatcacagaatatgcttctctgggatcactctatgattacattaacagtaacagaagtgaggagatggatatggatcacattatgacctgggccactgatgtagccaaagttgttatagctgctgatggagtattgaagatctgtgactttggtgcctctcggttccataaccatacaacacacatgtccttggttggaactttcccatggatggctccagaagttatccagagtctccctgtgtcagaaacttgtgacacatattcctatggtgtgaacctgtccaccccatcatgtgatgtggaatatcaattctgcattcatgctagagccttcccttacctggtggaaacagaaatgccatttcagtga

SEQ ID NO: 120185 - DNA, 1320 bp, Homo sapiens
atgtggatctgcccaggcggccgcggcggcggcggcggaggaggcgaccgagaagatacccgccctgcgccccgctctgctgtgggcgctgctggcgctctggctgtgctgcgcgacccccgcgcatggagggaggccggcagcaagtctcagaaactcctttttcgtagtgccagggtgcaccggaggtgggcagttttgcccttcaggtaccgcgtttcctgggaaaatgaaagtgatgatgaggaagaggaagaaaaagggccagtgtctcccaggaatctgcaggagtctgaagaggaggaagtcccccaggagtcctgggatgaaggttattcgactctctcaattcctcctgaaatgttggcctcgtaccagtcttacagcagcacatttcactcattagaggaacagcaagtctgcatggctgttgacataggcagatgccgggagcagacaagcccgtcagggcgtgtcagcgggtgttggcgggtgtctgggctggatttactatgcggcatcagagcagattgtactgagagtgctccatatgcggtgtcatattccggcacagatgcgttgcgcacctgttgggaagggcgatcggtgcgggcctcttcgttattacgccagctggcgaaagggggatgtgttgcaaggcgattaagttgggtaacgccagggttttcccagtcacgacgttgtaaaacgacggccagtgccaagcttgcatgcatgcaggtcgactctagaggatcccggcaaaaactatatatcatcatcaccatcgtcatcatcatcatcatctccatcctcacccagagtaccgagctaaagaaattaacccaattggagaaaagagaaatgtttgccaggctaataaagttgggtaacgacaggtttttccccattaacaacgttgtaaaagaacggcccagtccaaagctggaatgcttcaagaacaagcgcgacaccccgatgcctgtagcaatggcaacatttgggcgcaaattattaactggcgaactacttactctagcttcccggcaacaattaatagactggatggaggcggataaagttgcaggaccacttctgcgctcggcccttccggatggctggttaattgctgataaatctggagccgttaagcttggttctcgcggtatcattgcagcactggggccaaatgtggcgataagtcgtgtcttaccgggttggagtcaagacgatagttaccggataaggcgcagcggtcgggctgaacggggggttcgtgcacacagcccagcttggagcgaacgacctacaccgaactga

SEQ ID NO: 120186 - DNA, 1353 bp, Homo sapiens
  misc_feature (1)...(1353): n = a,t,c or g
tcatgcagcagaagaggaagagtgtgcaagcagaaaatggaagtcctgtgatactgaggagtcagaggtatctggagctgtcacagcagctagaatatgaggagaaaaattcttgcagtatcctgtgccattgtggtaggtaacacacattccttcatttacacagggttcatagccatctcgacactgcaatgctgtaaacccgacttgacaggtgcactcataggtatcccggctgagcatatggcatgtgccgccattcaggcagggtcgagacacaaagcatggatgagatgttgagtactggcagtcctctcctgtaaaccctgaggcacatcggcacgtggctttccccagcatggcctgggccacacaagtcccaccattctggcagcggttcttctcacaggggtctcgatgttgacaatattcccccaagaagccttctggacatcttatcagaatccctgggtgctgagtccaagatccaccccaacagattttgatgtagccaggacacagagttttttctaccataatgggagaggtagggaggaggatcacatgcgcgggggccgcccagcacagccangacggccagcagcgcccacagcagagcgggacgcagggggggcatcttctcggtcgcctcctcctcctccgccgccgccgccgccgccgccgccgcctgggcagatccacatggggagggggtcccgatagaggagccccactctctcctcccctcctcctgcttcaaaggctcaggccctggcgctacgctccgaagcccaggcgcaaatgcctcgactccccgcgccccgagtccgccgctcctcggccgccgcctcagccgccgcccgaagtttggctgaaactttctcgggtaaggagtgccaatggacggatgcctgcctgtctcatccctgtgcaaatggaagtacctgtaccactgtggccaaccagttctcctgcaaatgcctcacaggcttcacagggcagaaatgtgagactgatgtcaatgagtgtgacattccaggacactgccagcatggtggcacctgcctcaacctgcctggttcctaccagtgccagtgccttcagggcttcacaggccagtactgtgacagcctgtatgtgccctgtgcaccctcgccttgtgtcaatggaggcacctgtcggcagactggtgacttcacttttgagtgcaactgccttccagaaacagtgagaagaggaacagagctctgggaaagagacagggaagtctggaatggaaaagaacccgatgagaattagaccctggaaaatatgtatgtgtggttaataaagtgctttaaactgaattgaaaa

SEQ ID NO: 120187 - DNA, 446 bp, Homo sapiens
gcattgtgcggtggaatttcccataacggaaataaagaacggaagcgtacctgggagagctggctgaaaccacgacttggtttgaccattggaaaggactctaaaccacagcagcagaaggagagctagacttgcagggacccaggctccacactagggacctcgaccttgtcctgcagggagtggagacccatgaatggatgttagcccacagtgccttgcatacaggagatcatcattcttctggtcctatgccatgtgattgttactgaggaggatggagatgacatcatctaccacgcctcctccccagatgaagctgctttggtggaaggtgctaaaaagctgggctttgtacagtgagaacaccatattcggtcatcatagaagcaatagagctttggagccaaacccttctgatgatccaagggcaagcacagtcttcc

SEQ ID NO: 120188 - DNA, 1155 bp, Homo sapiens
atggggggcccccggggaaagggccgcagacacctgtgggccggctccgtgggtgtccttgaacttggatggtggtcccgcagctctgggcgccacgcagactgctgtgcccactggggctgggctcaccaggaagtaggatcagcagaaacgcgggcgctcacaactggtgccaggttcggtttccttaggcctctacccgcagggccccgtccctaccgtgcctggtgggtgcttcctcacctgctgctctccccacaacggggctgctcttttgcccaggggctctggggcggtcccggccacccagagcgcgaggtcgcaggtcccagtactcatgccggaggccctgacgtgctgggggtgcccacgcgggcctgtggtccccacgccggcttgtggtccccacgcctggctcgggcacctgcagagggagggcgccctcttgagtcggcgccctctgccgcgctgttgccgcccccgcggctggagctgtgcccgcacagtgaggccctacccgcgggccgcctcctcccgctgctgccccagcgctgtcctacccccggtcgcgtcgccgaggcagccgccacagccccctccaccgtggcagccgctgccaccgcccagcccacagtgccttgcatacaggagatcatcattcttctggtcctatgccatgtgattgttactgaggaggatggagatgacatcatctaccacgcctcctccccaggaagtggatatgttatagcaagcagtgttaccccagaccgtgcagggggcattatgataaatggtctagaatgcgcatataactatataaaattggaaaatcctgaattcagaggcataactagccccaagatttctgatggacccatgcagctttgtgttctttatcttcatttcttggagtggctgatttgcaggcttgtgcactctgtggcttacgctgttctctctgaggatgattatgaggagtggctgaaaggctatcaagaagccagcaacacattgaaaaatggagctcagtggttggaagagtgtggtcagatcattgagaagttaaccacacatgatagtctttacagatccaagaaggacttaagcagctaccgaacaaaatctttgaacaggcatccttctactatatag

SEQ ID NO: 120189 - DNA, 642 bp, Homo sapiens; identical to SEQ ID NO: 116498

SEQ ID NO: 120190 - DNA, 1536 bp, Homo sapiens
tgaattcgtgagatggcgagctccacggcaccatggccccgaagctgctgctcctcctctgcctgttctcgggcttgcacgcgcggtccagaaaggtggaagaggatgaatatgaagattcatcatcaaaccaaaagtgggtcttggctccaaaatcccaagacaccgacgtgactcttattctcaacaagttgctaagagagtatgataaaaagctgaggccagatattggaataaaaccgaccgtaattgacgttgacatttatgttaacagcattggtcctgtgtcatcaataaacatggaataccaaattgacatattttttgctcagacctggacagatagtcgccttcgattcaacagcacaatgaaaattcttactctgaacagcaacatggtggggttaatctggatcccagacaccatcttccgcaattctaaaaccgcagaggctcactggatcaccacacccaatcagctcctccggatttggaatgacgggaaaatcctttacactttgaggctcaccatcaatgctgagtgccagctgcagctgcacaacttccccatggacgaacactcctgcccgctgattttctccagctatggctatcccaaagaagaaatgatttatagatggagaaaaaattcagtggaggcagctgaccagaaatcatggcggctttatcagtttgacttcatgggcctcagaaacaccacagaaatcgtgacaacgtctgcaggtgattatgttgtcatgactatatattttgaattgagtagaagaatgggatacttcaccattcagacatacattccctgtatactgactgtggttttatcctgggtgtcattttggatcaaaaaagatgctacgccagcaagaacagcattaggcatcaccacggtgctgaccatgaccaccctgagcaccatcgccaggaagtccttgccacgcgtgtcctacgtgaccgccatggacctttttgtgactgtgtgcttcctgtttgtcttcgccgcgctgatggagtatgccaccctcaactactattccagctgtagaaaaccaaccaccacgaaaaagacaacatcgttactacatccagattcctcaagatggattcctgagcgaataagcctacaagccccttccaactattccctcctggacatgaggccaccaccacctgcgatgatcactttaaacaattccgtttactggcaggaatttgaagatacctgtgtctatgagtgtctggatggcaaagactgtcagagcttcttctgctgctatgaagaatgtaaatcaggatcctggaggaaagggcgtattcacatagacatcttggagctggactcgtactcccgggtctttttccccacgtccttcctgctctttaacctggtctactgggttggatacctgtatctctaagtgttgctcagagtgaagagtgaagagcatttggtacacacttgaccttctgtcgtccccagaccagtagtgaccaatcgggagtagcaaggaaggacac

SEQ ID NO: 120191 - DNA, 1059 bp, Homo sapiens
  misc_feature (1)...(1059): n = a,t,c or g
atggcagctttgaacaacatacgaacagtgtctgtgattgtacaccccacaacaggccggggagggccctttgtgaggtttgaagatggactggaatcaccactccagggagagtttagtatggcccccggttgttgttcaggcacatcggcttccccctctactttcctctctctccacattctggcaactcttaaccggtaccactcacctctcatggaaaaatacatggactttagaagtcctcaggcacttggcataatgcagggcttctgggtggtgaaaaccttaaagataaagaaaatccatccaccttcttcttttcttacgcaaggaagccgcccggaacagcgggacgattcanccacaaaagacagcgaaaaatcgggcgccgacaagggaaccaccacagcacaaccaccgacatggagcaaacaggataaggaaagcggcaccgaaggaaaacggaggggcgagacaacgccaagagacgaccacgacgtaacattacatgaggtatgcagcatcagggattcctgtaaggcagccgtgctggggtggagtgatgtgggtgaccgtctgggattcctgttgcgtgttgcacccttttacaacatgctacccgtcccctgttcaggcatcaccacggtgctgaccatgaccaccctgagcaccatcgccaggaagtccttgccacgcgtgtcctacgtgaccgccatggacctttttgtgactgtgtgcttcctctcccagttccatccacatagcaagggactacacagaggcatgaagcaacgagtggatgaatgtctggctgatcactgtcaaagcacacgtgtaggaaacctttattgcaattgttcgttaataaaggcagatctttcaaccggaggttgtcaaaaggaggcagatcccttcaatgcagtggggattgtggaggaggaggagggtgggcagccgcaccgtgaggccccaatggtagcagagggagatggccacacgtgtgaggagcaagcaacaccctgtgaacatgtggtccaggccatcctgctaatttag

SEQ ID NO: 120192 - DNA, 1171 bp, Homo sapiens
tttgatttctagatctttatttacagggtttttgtttcatttgccagtgatatagttcgaatttttttaaaaaggcttgtagtatattatgacccattgagatgcatttgctcttccaaaaagcacgtgtacaggtctcttctgagcacatctgctcctctttatgcacaccaggaaaagattaactcagctgttctgttttccagatttgactgaagaacgacttggagacggcaagtcggcagacaatacagaggtcttcagtgacaaagacactgaccagaggagttccccagatgtggcaaagagtaagggctgcttcacccctgagagccctgagatagtgtccgtggaggaagggggatacgctgtccagaaaaacggaggcaaccccgagagccgccctgacagccccaagtgtcacgcggagcagaatcacctcctgattgagggcccctcggggactgtttctctgcccttcagcttgaaagccaacagaccgccgcttgaagtgttaaaaaagatattccccaaccagaagccaacggtgcttgagctcatcctcaagggctgtggcggggacctggtgagcgccgtggaagtccttctgtccagccgatcctcagtcacgggagcagagcgaacttccgcagaacctgagagtctagcgttgccctccaatgggcacatctttgaacacaccttgagctcctaccccatctcgtcttccaaatggtctgtgggatcagcctttcgagtcccagacacgttgaggttttctgccgactctagcaacgttgtccccagtcccttggctgggcctctgcagccccctttcccccagccaccccggtacccgctgatgctgaggaatactttggcgagaagccagtcgagcccctttttgcccaatgatgtcaccctgtggaacaccatgacgctgcagcagcagtatcagctgaggtcccagtatgtcagtcctttccccagtaactctaccagcgtcttcagaagctcgcccgtccttcctgcccgcgccacggaagaccctcggatttccatccctgatgatgggtgtccatttgtgtcaaagcagtccatttacaccgaggacgactatgacgagaggtctgactcctcagactctagaacactcaacacatcatcttaa

SEQ ID NO: 120193 - DNA, 7680 bp, Homo sapiens
gcggacactcctctcggctcctccccggcagcggcggcggctcggagcgggctccggggctcgggtgcagcggccagcgggcctggcggcgaggattacccggggaagtggttgtctcctggctggagccgcgagacgggcgctcagggcgcggggccggcggcggcgaacgagaggacggactctggcggccgggtcgttggccgggggagcgcgggcaccgggcgagcaggccgcgtcgcgctcaccatggtcagctactgggacaccggggtcctgctgtgcgcgctgctcagctgtctgcttctcacaggatctagttcaggttcaaaattaaaagatcctgaactgagtttaaaaggcacccagcacatcatgcaagcaggccagacactgcatctccaatgcaggggggaagcagcccataaatggtctttgcctgaaatggtgagtaaggaaagcgaaaggctgagcataactaaatctgcctgtggaagaaatggcaaacaattctgcagtactttaaccttgaacacagctcaagcaaaccacactggcttctacagctgcaaatatctagctgtacctacttcaaagaagaaggaaacagaatctgcaatctatatatttattagtgatacaggtagacctttcgtagagatgtacagtgaaatccccgaaattatacacatgactgaaggaagggagctcgtcattccctgccgggttacgtcacctaacatcactgttactttaaaaaagtttccacttgacactttgatccctgatggaaaacgcataatctgggacagtagaaagggcttcatcatatcaaatgcaacgtacaaagaaatagggcttctgacctgtgaagcaacagtcaatgggcatttgtataagacaaactatctcacacatcgacaaaccaatacaatcatagatgtccaaataagcacaccacgcccagtcaaattacttagaggccatactcttgtcctcaattgtactgctaccactcccttgaacacgagagttcaaatgacctggagttaccctgatgaaaaaaataagagagcttccgtaaggcgacgaattgaccaaagcaattcccatgccaacatattctacagtgttcttactattgacaaaatgcagaacaaagacaaaggactttatacttgtcgtgtaaggagtggaccatcattcaaatctgttaacacctcagtgcatatatatgataaagcattcatcactgtgaaacatcgaaaacagcaggtgcttgaaaccgtagctggcaagcggtcttaccggctctctatgaaagtgaaggcatttccctcgccggaagttgtatggttaaaagatgggttacctgcgactgagaaatctgctcgctatttgactcgtggctactcgttaattatcaaggacgtaactgaagaggatgcagggaattatacaatcttgctgagcataaaacagtcaaatgtgtttaaaaacctcactgccactctaattgtcaatgtgaaaccccagatttacgaaaaggccgtgtcatcgtttccagacccggctctctacccactgggcagcagacaaatcctgacttgtaccgcatatggtatccctcaacctacaatcaagtggttctggcacccctgtaaccataatcattccgaagcaaggtgtgacttttgttccaataatgaagagtcctttatcctggatgctgacagcaacatgggaaacagaattgagagcatcactcagcgcatggcaataatagaaggaaagaataagatggctagcaccttggttgtggctgactctagaatttctggaatctacatttgcatagcttccaataaagttgggactgtgggaagaaacataagcttttatatcacagatgtgccaaatgggtttcatgttaacttggaaaaaatgccgacggaaggagaggacctgaaactgtcttgcacagttaacaagttcttatacagagacgttacttggattttactgcggacagttaataacagaacaatgcactacagtattagcaagcaaaaaatggccatcactaaggagcactccatcactcttaatcttaccatcatgaatgtttccctgcaagattcaggcacctatgcctgcagagccaggaatgtatacacaggggaagaaatcctccagaagaaagaaattacaatcagagatcaggaagcaccatacctcctgcgaaacctcagtgatcacacagtggccatcagcagttccaccactttagactgtcatgctaatggtgtccccgagcctcagatcacttggtttaaaaacaaccacaaaatacaacaagagcctggaattattttaggaccaggaagcagcacgctgtttattgaaagagtcacagaagaggatgaaggtgtctatcactgcaaagccaccaaccagaagggctctgtggaaagttcagcatacctcactgttcaaggaacctcggacaagtctaatctggagctgatcactctaacatgcacctgtgtggctgcgactctcttctggctcctattaaccctccttatccgaaaaatgaaaaggtcttcttctgaaataaagactgactacctatcaattataatggacccagatgaagttcctttggatgagcagtgtgagcggctcccttatgatgccagcaagtgggagtttgcccgggagagacttaaactgggcaaatcacttggaagaggggcttttggaaaagtggttcaagcatcagcatttggcattaagaaatcacctacgtgccggactgtggctgtgaaaatgctgaaagagggggccacggccagcgagtacaaagctctgatgactgagctaaaaatcttgacccacattggccaccatctgaacgtggttaacctgctgggagcctgcaccaagcaaggagggcctctgatggtgattgttgaatactgcaaatatggaaatctctccaactacctcaagagcaaacgtgacttattttttctcaacaaggatgcagcactacacatggagcctaagaaagaaaaaatggagccaggcctggaacaaggcaagaaaccaagactagatagcgtcaccagcagcgaaagctttgcgagctccggctttcaggaagataaaagtctgagtgatgttgaggaagaggaggattctgacggtttctacaaggagcccatcactatggaagatctgatttcttacagttttcaagtggccagaggcatggagttcctgtcttccagaaagtgcattcatcgggacctggcagcgagaaacattcttttatctgagaacaacgtggtgaagatttgtgattttggccttgcccgggatatttataagaaccccgattatgtgagaaaaggagatactcgacttcctctgaaatggatggctcccgaatctatctttgacaaaatctacagcaccaagagcgacgtgtggtcttacggagtattgctgtgggaaatcttctccttaggtgggtctccatacccaggagtacaaatggatgaggacttttgcagtcgcctgagggaaggcatgaggatgagagctcctgagtactctactcctgaaatctatcagatcatgctggactgctggcacagagacccaaaagaaaggccaagatttgcagaacttgtggaaaaactaggtgatttgcttcaagcaaatgtacaacaggatggtaaagactacatcccaatcaatgccatactgacaggaaatagtgggtttacatactcaactcctgccttctctgaggacttcttcaaggaaagtatttcagctccgaagtttaattcaggaagctctgatgatgtcagatatgtaaatgctttcaagttcatgagcctggaaagaatcaaaacctttgaagaacttttaccgaatgccacctccatgtttgatgactaccagggcgacagcagcactctgttggcctctcccatgctgaagcgcttcacctggactgacagcaaacccaaggcctcgctcaagattgacttgagagtaaccagtaaaagtaaggagtcggggctgtctgatgtcagcaggcccagtttctgccattccagctgtgggcacgtcagcgaaggcaagcgcaggttcacctacgaccacgctgagctggaaaggaaaatcgcgtgctgctccccgcccccagactacaactcggtggtcctgtactccaccccacccatctagagtttgacacgaagccttatttctagaagcacatgtgtatttatacccccaggaaactagcttttgccagtattatgcatatataagtttacacctttatctttccatgggagccagctgctttttgtgatttttttaatagtgctttttttttttgactaacaagaatgtaactccagatagagaaatagtgacaagtgaagaacactactgctaaatcctcatgttactcagtgttagagaaatccttcctaaacccaatgacttccctgctccaacccccgccacctcagggcacgcaggaccagtttgattgaggagctgcactgatcacccaatgcatcacgtaccccactgggccagccctgcagcccaaaacccagggcaacaagcccgttagccccaggggatcactggctggcctgagcaacatctcgggagtcctctagcaggcctaagacatgtgaggaggaaaaggaaaaaaagcaaaaagcaagggagaaaagagaaaccgggagaaggcatgagaaagaatttgagacgcaccatgtgggcacggagggggacggggctcagcaatgccatttcagtggcttcccagctctgacccttctacatttgagggcccagccaggagcagatggacagcgatgaggggacattttctggattctgggaggcaagaaaaggacaaatatcttttttggaactaaagcaaattttagacctttacctatggaagtggttctatgtccattctcattcgtggcatgttttgatttgtagcactgagggtggcactcaactctgagcccatacttttggctcctctagtaagatgcactgaaaacttagccagagttaggttgtctccaggccatgatggccttacactgaaaatgtcacattctattttgggtattaatatatagtccagacacttaactcaatttcttggtattattctgttttgcacagttagttgtgaaagaaagctgagaagaatgaaaatgcagtcctgaggagagttttctccatatcaaaacgagggctgatggaggaaaaaggtcaataaggtcaagggaagaccccgtctctataccaaccaaaccaattcaccaacacagttgggacccaaaacacaggaagtcagtcacgtttccttttcatttaatggggattccactatctcacactaatctgaaaggatgtggaagagcattagctggcgcatattaagcactttaagctccttgagtaaaaaggtggtatgtaatttatgcaaggtatttctccagttgggactcaggatattagttaatgagccatcactagaagaaaagcccattttcaactgctttgaaacttgcctggggtctgagcatgatgggaatagggagacagggtaggaaagggcgcctactcttcagggtctaaagatcaagtgggccttggatcgctaagctggctctgtttgatgctatttatgcaagttagggtctatgtatttaggatgcgcctactcttcagggtctaaagatcaagtgggccttggatcgctaagctggctctgtttgatgctatttatgcaagttagggtctatgtatttaggatgtctgcaccttctgcagccagtcagaagctggagaggcaacagtggattgctgcttcttggggagaagagtatgcttccttttatccatgtaatttaactgtagaacctgagctctaagtaaccgaagaatgtatgcctctgttcttatgtgccacatccttgtttaaaggctctctgtatgaagagatgggaccgtcatcagcacattccctagtgagcctactggctcctggcagcggcttttgtggaagactcactagccagaagagaggagtgggacagtcctctccaccaagatctaaatccaaacaaaagcaggctagagccagaagagaggacaaatctttgttgttcctcttctttacacatacgcaaaccacctgtgacagctggcaattttataaatcaggtaactggaaggaggttaaactcagaaaaaagaagacctcagtcaattctctacttttttttttttttttccaaatcagataatagcccagcaaatagtgataacaaataaaaccttagctgttcatgtcttgatttcaataattaattcttaatcattaagagaccataataaatactccttttcaagagaaaagcaaaaccattagaattgttactcagctccttcaaactcaggtttgtagcatacatgagtccatccatcagtcaaagaatggttccatctggagtcttaatgtagaaagaaaaatggagacttgtaataatgagctagttacaaagtgcttgttcattaaaatagcactgaaaattgaaacatgaattaactgataatattccaatcatttgccatttatgacaaaaatggttggcactaacaaagaacgagcacttcctttcagagtttctgagataatgtacgtggaacagtctgggtggaatggggctgaaaccatgtgcaagtctgtgtcttgtcagtccaagaagtgacaccgagatgttaattttagggacccgtgccttgtttcctagcccacaagaatgcaaacatcaaacagatactcgctagcctcatttaaattgattaaaggaggagtgcatctttggccgacagtggtgtaactgtgtgtgtgtgtgtgtgtgtgtgtgtgtgtgtgtgtgtgtgggtgtgggtgtatgtgtgttttgtgcataactatttaaggaaactggaattttaaagttacttttatacaaaccaagaatatatgctacagatataagacagacatggtttggtcctatatttctagtcatgatgaatgtattttgtataccatcttcatataatatacttaaaaatatttcttaattgggatttgtaatcgtaccaacttaattgataaacttggcaactgcttttatgttctgtctccttccataaatttttcaaaatactaattcaacaaagaaaaagctcttttttttcctaaaataaactcaaatttatccttgtttagagcagagaaaaattaagaaaaactttgaaatggtctcaaaaaattgctaaatattttcaatggaaaactaaatgttagtttagctgattgtatggggttttcgaacctttcactttttgtttgttttacctatttcacaactgtgtaaattgccaataattcctgtccatgaaaatgcaaattatccagtgtagatatatttgaccatcaccctatggatattggctagttttgcctttattaagcaaattcatttcagcctgaatgtctgcctatatattctctgctctttgtattctcctttgaacccgttaaaacatcctgtggcactc

SEQ ID NO: 120194 - DNA, 1314 bp, Homo sapiens
atgcaatataaccagacagagtttcccaaggagttaaggaaacaccccaagcaaaagaccagagcaccttgtcccagggcctgccttgacttagggaccgaacacgggtttcatcgggaaagggcagattctgacggtttctacaaggagcccatcactatggaagatctgatttcttacagttttcaagtggccagaggcatggagttcctgtcttccagaaagggacttgggtcctggagtgagtgcatggaactctactttcaaattagttctgcacagctaggtctagttgtcagtcctccccacactgtcatttcagccactcctgaatccagaccctcactgaccaagaactactacattactggcgttggtgtttggaagggatctgaagaaggggtctatcggggtgcactaggtaccttaacttcacgacttacatcaaacatggaggatgcagcactacacatggagcctaagaaagaaaaaatggagccaggcctggaacaaggcaagaaaccaagactagatagcgtcaccagcagcgaaagctttgcgagctccggctttcaggaagataaaagtctgagtgatgttgaggaaaagagagtgccatacatcagggctggtgtgatgccgccagaccatgcagccaaggctgtgtttccaaactatcatatttatcctccaactgcacctcacgttgcttatatgcaaccgaaagcaaacgcaccttccttcttcatggctgatgaactccgacagcacaagaaagataaagcaaatgctgctgaagagagggcaaagaggtttctatcggtcctagaaaatggctgtgctaaacaatcagaacactgcaaccaacccttgcgagtagagcggcttctggttactgtcacaccagtcctggaactattaagcagctcctccctccctaccacgacagagacggctacctggccgtctctcgccagcagtgtctgcgcgatttgccttggggcttgccagaggatctacagtagggatcggcaaactcttcttgtaaaggtccagctagtgtttccaaactatcatatttatcctccaactgcacctcacgttgcttatatgcaaccgaaagcaaacgcaccttccttcttcatggctgatgaactccgacaggaatcccgacaagaaatcaacacaatactcgacctgctttggaaaaactcttcagacaccttgctgaagcaaacaccaaactattttgatgaacacttccacaaaaatgacaacatacaagaaccttccacagaaaataatcgcacttaa

SEQ ID NO: 120195 - DNA, 1448 bp, Homo sapiens
gtgctcgtcatgtgcagccacgtcctttggtagttaatcctcctcctccaccacagtttcagaacgtctggcggaatccaaacactgaaacctacctgcagccccaaatcacgccgaatcctgtaactcagcacgttcaggaatatcctacttatcccgattcagcatttcaggtcaccactggatatcagttgcctgtatataattatcagagaaagcaggaaagatccaaaattgacaccgtaacatcacaattaaaagaactagaaaagcaagagcaaacacagtcaaaagctagcagaaggcaagaaataactaagatcagagcagaactgaaggaaatagagacacaaaaaacccttcaaaaaattaatgaatccaggagctggttttttgaaaggatcaacaaaagtgacagaccgctagcaagactaataaagaaaaaaagagagaagaatccaatagacgcaataaaaaatgataaaggggatatcgccactgatcacacagaaatacaaactaccatcagagaatactacaaacacctctacgcaaataaactagaaaatctagaagaaatggataaactcctcgacacatacactctcccaagactaaaccaggaagaagttgaatctctgaatagaccaataacaggagctgaaattgtggcaataatcaatagctcaccaaccaaaaagagtccaggaccagatggattcacagccgaattctaccagaggtacaaggaggaactggtaccattccttctgaaactattccaatcaacagaaaaagacagaatcctccctaactcattttatgaggccagcatcattctgataccaaagccaggcagagacacaaccaaaaaagagaattttagaccaatatccttgatgaacattgatgcaaaaatcctcaataaaatactggcaaaacgaatccagcggcacatcaaaaagcttatccaccatgatcaagtgggcttcatcgctgggatgcaaggctggttcaatatacgcaaatcaataaatgtaatccagcatataaacagaaccaaagacaaaaaacacatgattatctcaatagatgcagaaaaagcccttgacaaaattcaacaacccttcatgctaaaaactctcaataaattaggtattgatgggacgtatttcaaaataagtcactactactgccactacaacaactattactactacaactacaacaactacaacaactactactactactacagctacaacaactactactactactactactactactaccaccactactactactacaatgggacccacattgccactgatacctattggcttgggttcctgaattgcagcactaccctgctccctaggcccaaacatccagagcaccccttcttctccagagttggtccagtgctgctccctggccactag

SEQ ID NO: 120196 - DNA, 702 bp, Homo sapiens
atgcaccataagtgcagtgccaaggcagtagaaagaagtcatatcacttatgtgatggacctagaaaaaagccacagtgctgtctgcaggcagggctcaggccaagattttacatcagctgaatgctggtttcagtgtcatgtaaaagtgccccctgtcacgttgctaaagaaaggagatcagtggttgcctgagaagagggtacatggagagagacaggaaggagagattacaaaggagcacaaggataccttttgggatgatgtttatgttcactatattgatcggcttcatgggtatatacctagacctacggctggagtgtgtcgtgctcagggttcaagtaggcacaggtccccttcatccctgaggctaaactgccaccaaaacacccccagcctagtgactgaacatccccaagggcccaaaggacagctgtgctccactattcagggtacttgctactgctacacctggcctcacagaatctggaatactgctgactccaccatcacaaggtctagagtcactactactgccactacaacaactattactactacaactacaacaactacaacaactactactactactacagctacaacaactactactactactactactactactaccaccactactactactacaatgggacccacattgccactgatacctattggcttgggttcctga

SEQ ID NO: 120197 - DNA, 492 bp, Homo sapiens
atgtctcctgcagatgtacaggcagcatgtgactttccgggtctcctttcgactccagagtcattccctctcagctggtatatttttgatttccatagaaatctttcagtttccctaaaaaggaaggatcagaatgttctctctccagtcaactgctggaatctcctcttaaaccaggtgaagcgggaaagcagggaccataccaccctgagtgacatctacctgaataatatcattcctcgatttgtacaagtcagcgaggactcaggaagactctttaaaaagcctgatcaaataactgatttggaatcttccatctacctaattgcatccgtgaaggtgctttccctgtgtcttagagacagaatattgagggtacaatcatctgacgacgaaaagaaggcagagaaagataactcctcccagagctcactggctattattagtagcccggctgtgctgtggttggggccacacctcattttggagtga

SEQ ID NO: 120198 - DNA, 1642 bp, Homo sapiens
ctgagcactcggaggcactcctatgcttggaaagctcgctatgctgctgtgggtccagcaggcgctgctcgccttgctcctccccacactcctggcacagggagaagccaggaggagccgaaacaccaccaggcccgctctgctgaggctgtcggattaccttttgaccaactacaggaagggtgtgcgccccgtgagggactggaggaagccaaccaccgtatccattgacgtcattgtctatgccatcctcaacgtggatgagaagaatcaggtgctgaccacctacatctggtaccggcagtactggactgatgagtttctccagtggaaccctgaggactttgacaacatcaccaagttgtccatccccacggacagcatctgggtcccggacattctcatcaatgagttcgtggatgtggggaagtctccaaatatcccgtacgtgtatattcggcatcaaggcgaagttcagaactacaagccccttcaggtggtgactgcctgtagcctcgacatctacaacttccccttcgatgtccagaactgctcgctgaccttcaccagttggctgcacaccatccaggacatcaacatctctttgtggcgcttgccagaaaaggtgaaatccgacaggagtgtcttcatgaaccagggagagtgggagttgctgggggtgctgccctactttcgggagttcagcatggaaagcagtaactactatgcagaaatgaagttctatgtggtcatccgccggcggcccctcttctatgtggtcagcctgctactgcccagcatcttcctcatggtcatggacatcgtgggcttctacctgccccccaacagtggcgagagggtctctttcaaaattacactcctcctgggctactcggtcttcctgatcatcgtttctgacacgctgccggccactgccatcggcactcctctcattggtaaggcccctcctggcagcagagctcagtctggtgagaaacccgccccctcccacctcctgcatgtgtctcttgcctctgccctgggctgcacaggtgtctactttgtggtgtgcatggctctgctggtgataagtttggccgagaccatcttcattgtgcggctggtgcacaagcaagacctgcagcagcccgtgcctgcttggctgcgtcacctggttctggagagaatcgcctggctactttgcctgagggagcagtcaacttcccagaggcccccagccacctcccaagccaccaagactgatgactgctcagccatgggaaaccactgcagccacatgggaggaccccaggacttcgagaagagcccgagggacagatgtagccctcccccaccacctcgggaggcctcgctggcggtgtgtgggctgctgcaggagctgtcctccatccggcaattcctggaaaagcgggatgagatccgagaggtggcccgagactggctgcgcgtgggctccgtgctggacaagctgctattccacatttacctgctagcggtgctggcctacagcatcaccctggttatgctctggtccatctggcagtacgcttgagtgggtacagcccagtggaggagggggtacagtcctggttaggtggggacagaggatttctgcttaggc

SEQ ID NO: 120199 - DNA, 1385 bp, Homo sapiens
ctgagcactcggaggcactcctatgcttggaaagctcgctatgctgctgtgggtccagcaggcgctgctcgccttgctcctccccacactcctggcacagggagaagccaggaggagccgaaacaccaccaggcccgctctgctgaggctgtcggattaccttttgaccaactacaggaagggtgtgcgccccgtgagggactggaggaagccaaccaccgtatccattgacgtcattgtctatgccatcctcaacgtggatgagaagaatcaggtgctgaccacctacatctggtaccggcagtactggactgatgagtttctccagtggaaccctgaggactttgacaacatcaccaagttgtccatccccacggacagcatctgggtcccggacattctcatcaatgagttcgtggatgtggggaagtctccaaatatcccgtacgtgtatattcggcatcaaggcgaagttcagaactacaagccccttcaggtggtgactgcctgtagcctcgacatctacaacttccccttcgatgtccagaactgctcgctgaccttcaccagttggctgcacaccagtggtcatccgccggcggcccctcttctatgtggtcagcctgctactgcccagcatcttcctcatggtcatggacatcgtgggcttctacctgccccccaacagtggcgagagggtctctttcaagattacactcctcctgggctactcggtcttcctgatcatcgtttctgacacgctgccggccactgccatcggcactcctctcattggtgtctactttgtggtgtgcatggctctgctggtgataagtttggccgagaccatcttcattgtgcggctggtgcacaagcaagacctgcagcagcccgtgcctgcttggctgcgtcacctggttctggagagaatcgcctggctactttgcctgagggagcagtcaacttcccagaggcccccagccacctcccaagccaccaagactgatgactgctcagccatgggaaaccactgcagccacatgggaggaccccaggacttcgagaagagcccgagggacagatgtagccctcccccaccacctcgggaggcctcgctggcggtgtgtgggctgctgcaggagctgtcctccatccggcaattcctggaaaagcgggatgagatccgagaggtggcccgagactggctgcgcgtgggctccgtgctggacaagctgctattccacatttacctgctagcggtgctggcctacagcatcaccctggttatgctctggtccatctggcagtacgcttgagtgggtacagcccagtggaggagggggtacagtcctggttaggtggggacagaggatttctgcttaggc

SEQ ID NO: 120200 - DNA, 504 bp, Homo sapiens
atgctgctgtgggtccagcaggcgctgctcgccttgctcctccccacactcctggcacagggagaaggaggtttctctccctacagagctggggtggagcatactggggcacaattagaggaagccatccaggggttggacagacgtgaagagctctggggattcctgctgctgggagtggtgggtgagcatagaccccgctctccaagaccttctgtcttcttgtccttcaatgaaggagaccctgtaggactggagaagtatgctcaggtctgctacgagcatctcccaggaatgagggtcttgctgaaggggaacttggaagtctcaggagagtggtatcttttgtggccctctcgggtaaagaaaagcaaccaggaaccaggacctgatgagagccagaaaaacaattacttcccaccatacccagttctcatagcacacagccgaaataattcacatccggaaagatgatacatctatctggtcaactttggggagcgg

SEQ ID NO: 120201 - DNA, 2202 bp, Homo sapiens
ggaaacatgatccagctgaaggactgattgcaggaaaacttggcagctccccaaccttggtggcccagggagtgtgaggctgcagcctcagaaggtgtgagcagtggccacgagaggcaggctggctgggacatgaggttggcagagggcaggcaagctggcccttggtgggcctcgccctgagcactcggaggcactcctatgcttggaaagctcgctatgctgctgtgggtccagcaggcgctgctcgccttgctcctccccacactcctggcacagggagaagccaggaggagccgaaacaccaccaggcccgctctgctgaggctgtcggattaccttttgaccaactacaggaagggtgtgcgccccgtgagggactggaggaagccaaccaccgtatccattgacgtcattgtctatgccatcctcaacgtggatgagaagaatcaggtgctgaccacctacatctggtaccggcagtactggactgatgagtttctccagtggaaccctgaggactttgacaacatcaccaagttgtccatccccacggacagcatctgggtcccggacattctcatcaatgagttcgtggatgtggggaagtctccaaatatcccgtacgtgtatattcggcatcaaggcgaagttcagaactacaagccccttcaggtggtgactgcctgtagcctcgacatctacaacttccccttcgatgtccagaactgctcgctgaccttcaccagttggctgcacaccatccaggacatcaacatctctttgtggcgcttgccagaaaaggtgaaatccgacaggagtgtcttcatgaaccagggagagtgggagttgctgggggtgctgccctactttcgggagttcagcatggaaagcagtaactactatgcagaaatgaagttctatgtggtcatccgccggcggcccctcttctatgtggtcagcctgctactgcccagcatcttcctcatggtcatggacatcgtgggcttctacctgccccccaacagtggcgagagggtctctttcaagattacactcctcctgggctactcggtcttcctgatcatcgtttctgacacgctgccggccactgccatcggcactcctctcattggtgtctactttgtggtgtgcatggctctgctggtgataagtttggccgagaccatcttcattgtgcggctggtgcacaagcaagacctgcagcagcccgtgcctgcttggctgcgtcacctggttctggagagaatcgcctggctactttgcctgagggagcagtcaacttcccagaggcccccagccacctcccaagccaccaagactgatgactgctcagccatgggaaaccactgcagccacatgggaggaccccaggacttcgagaagagcccgagggacagatgtagccctcccccaccacctcgggaggcctcgctggcggtgtgtgggctgctgcaggagctgtcctccatccggcaattcctggaaaagcgggatgagatccgagaggtggcccgagactggctgcgcgtgggctccgtgctggacaagctgctattccacatttacctgctagcggtgctggcctacagcatcaccctggttatgctctggtccatctggcagtacgcttgagtgggtacagcccagtggaggagggggtacagtcctggttaggtggggacagaggatttctgcttaggcccctcaggacccagggaatgccagggacattttcaagacacagacaaagtcccgtgccctgtttccaatgccaattcatctcagcaatcacaagccaaggtctgaacccttccaccaaaaactgggtgttcaaggcccttacacccttgtcccacccccagcagctcaccatggctttaaaacatgctctcttagatcaggagaaactcgggcactccctaagtccactctagttgtggacttttccccattgaccctcacctgaataagggactttggaattctgcttctctttcacaactttgcttttaggttgaaggcaaaaccaactctctactacacaggcctgataactctgtacgaggcttctctaacccctagtgtcttttttttcttcacctcacttgtggcagcttccctgaacactcatcccccatcagatgatgggagtgggaagaataaaatgcagtgaaaccc

SEQ ID NO: 120202 - DNA, 672 bp, Homo sapiens
gtcttcagacacgggccaaccagcagagtaaagcggcacaccagcaggaggaggccatccatggtcacttccagacgcacacggcgaggagcagagccgtcacgaacgccggcgcgggagggagacagccagcaagccaacggggagagaagccaccgcagcaggagcagtgggatgaaaaggttccaactgcaggatttcaactaagtcacattcctatgaaggctgagagaagtgaggaagttacagaagaaagggtggaagctagcagaggtcagttcatcaggtttaaggaaagaagccgtctccatagcataaaagtacaaggtgaggcagcaagtgctgatggagaagctgtagcaagttctccagaagatctagccaagataactgacgaaggtggctactctaaacaacagattttccatgtagatgaaacagccttctactggaagaagacaccatctacaactttcatggctagagaggaggagtcaatgcctcacttcaaagcttcgaaggaccagctgactctcttgttagaggctaatgccacagccaccccaacttcggcaaccaccaccctgatcagtctgcagctgtcaagacgagaaaacaccctccgctgggaaaaagattacaacttgctgaaggctcagatgatcattcgca

SEQ ID NO: 120203 - DNA, 398 bp, Homo sapiens
acttgaggaaaattaaaatagacctaggtaaattctcagataaccctgatggctatattgatgttttacaagggttaagacaatcctttgatctgacatggagagatataatgttactgctagatcagtcactaaccccaaatgagaaaagtgccgccaaaactgcagcccgagagtttggcgatctctggtttgtctattccagaattgaagctgtaaaactacaaatcgttcttcaaatggagccccagatgcagtccatgactaagatctactgcggacccctggaccggcccactagcccatgctttgatgttgatgacattgaaggcacccctcacgaggaaatctcaactgcacgacccctactatgccccaattcagcaggaagcagttaa

SEQ ID NO: 120204 - DNA, 423 bp, Homo sapiens
atgcccggcccacggggccttcttataaagacaccagtcattggatacttgaagcgaattaaaatagacctaggtaaattctcagataaccctgatggctatattgatattttacaagggttaggaaaatcctttgatctgacatggagagatataatgttactactagatcagacactaaccccaaatgagagaagtgccgccataactgcagcccgagagtttgacgatctctggtatctcggagtgaagctgcagaccttcgcagtgagtgttacagctcataaagacactgtggacccaaacaacgagcagcagcaagatttactacaaagagctaaaaaacaaagcttccacccagttttccgcactaagcaggaggacccgagcctgcaacgggccatgagaagcaaagacagctga

SEQ ID NO: 120205 - DNA, 1781 bp, Homo sapiens
actttgttacccccacgacctggtgttggatctgattaccccaacattcctggctgcccgatgtggggcaacaaagaccctggtgaaggaacactagagcgtgggaaagtggaggatgcatcgcaaaggacatcgaggactctaaaagaaaccagcgggaaagctgagcatcggaagaaacaggatgggaaatgttccccccaaggcaaaaacgcccttaagatgtattctggagaattcgacccagtcagagtgtgtgtacctttttccctctcagatttgaagcaacttaaaatagacctaggtagattctcagataaccctgatggctatattgatgttttacaagggttaggacaatcctttgatctgacatggagagatataatgttactgctagatcagacactaaccccaaatgagagaaatgccaccataactgcagcccgagagtttggtgatctctggtgtctcagtcaggtcaatgataggatgacaacagaggaaagagaacgattccctacaggccagcaggcagttcccagtgcagaccctcattgagacacagaatcagaacatggagattggtgctgcagacatttactaacttgcgtgctggaaggactaaggaaaaccaggaagaaggctgtgaatttttcagtgatgtccactgtaacacagggaaaggaagaaaatcctactgcctttctggagagactaagggaggcactgaggaagcatacctccctgtcacctgactctattgaaggccaactaatcttaaagattaagtttatcactcggtcagctgcagacattagaaaacaaacttcaaaagtccaccttaggcctggagcaaaacttaagacaccctattgaacttggcaacctcggttttttataatagagatcaggaggagcagtcggaatgggacaaacgggatttaaaaaaggctaccgctttagttatggccctcaggcaagcagactttggaggctctggaacacggaaaggctgggcaaatccaatgcctaatagggcttgcttccagtgtggtctacaaggacactttaaaaagattgtccaaatacaaataagccaccccctcatccatgccccttatgtcaaaggaatcaatggaaggcccactgccccaggggacaaaggtttccaaaccaaagctcaactctgctcagaacaggctaaatacttagggctaaaattatccaaaggcaccagggccctcagtgaggaacgtatccagcccatactggcttatcctcatcccaaaaccctaaagcaactaagagggttctttggcataccaggcttctgccgaatatggattcccagaatcaaagctgtaaaactacacatcgttcttcaaatggatccccagaggcagtccatgactaagatctaccatggacccctggactggcctgctagcccatgctctgatgttaatgacaccaaaggcaaccctcctgaggaaatctcaactgcaccacccctactatgccccaattcagcaggaagcagttggagcggggataacacagaaagaaggcctttaccagatgcaggccccttgaccttggacttcctaggctccaaacctagagtacaaaacaacagtgatgccagcagagaaaaacacagccatgaaacaaaacacccagaccagagacacagaactgcttcatatagccattttcaggcaaagcagggagccagtgttttgccatgcatattagagaaaagggaagcctcctactga

SEQ ID NO: 120206 - DNA, 420 bp, Homo sapiens
atggctggagatgtagtctacgctgacatcaaaactgttcggacttccccgttagaactcgcgtttccacttcagagatctgtttctttcaacttttctactgtccataaatcatgtcctgccaaagactggaaggtgcataagggaaaatgttactggattgctgaaactaagaaatcttggaacaaaagtcaaaatgactgtgccataaacaattcatatctcatggtgattcaagacattactgctatgcttgagcaagaggaatgggacaagttcgtggcagccaccagccgccaggagatggctgaagtagacaatcaatttccaggttattgggaaattcaagaccaatcaatagaattatctggagataaactctctgggacagtgttcatcaagttgcagtgccctgtttga

SEQ ID NO: 120207 - DNA, 550 bp, Homo sapiens
atggaggaagtccaccacccacttggggagcagaaggaaatttgccatctcaatttacttaacttatcagaagtttctttgcagaaatatgattgtcccttcagagggacatcatttgggggcttctctctctttttgatctgggcaatggctggagatgtaatctacgctgacatcaaaactgttcggacttccccgttagaactcgcgtttccacttcagagaactggttctttcaacttttctactggccataaatcatgtcctgcccaagactggaaggtgcataagggaaaatgttactggattgctgaaactaaaaaatcttggaacaaaaggcaaaatgactgtgccataaacaattcatatctcatggtgattcaagacattactgctatggtgagatttaacatttagaggtgacagcctcccccacactggcagtgaattttttgtgctacaaacttggcaaaagtctgtgaaaagaagtttcaacttcatgtgttattaactatacaaatattagttgaatgaaaagttgaattacatg

SEQ ID NO: 120208 - DNA, 237 bp, Homo sapiens
atggagatgcaggagtacgttgaaacccaatccaaggaagctaagaatcgcaataaaatgatgcaggaactgagagataaaatagccagtataggaaagaccataactgacctcatagagctgaaaaacacactacaagaatttaataatgtaatcacaagtattaatagcagaatagaccaagcagaggaaagaatctcagagcttgaagactggctttctgatataagacagtaa

SEQ ID NO: 120209 - DNA, 335 bp, Homo sapiens
acgtgtcccattgtccctggaaggaaatgattatagaaatatccaagggacgttcagggcttggtctcagcattgtgtgaggaaaagacacacccttgaatgctatagttatccatgaagtctatgaagaaggggcagcagcagtagatggaagactttgggctggtgaccagatattagaggttaatggggttgacctgaggaactccagccacgaagaagccatcacagccctgatgcagaccccccagaaggtgcggctggtggtgtatagagatgaggcacactaccgggatgaggagaacttggagattttccctgtggatctgcagaag

SEQ ID NO: 120210 - DNA, 5350 bp, Homo sapiens
ctcacttccgcccaggtgaggcagggccgacaccgagcccgcccgacccgggctcccacctgctcctccagcgcaccaggtgtctttaagagtgattgaagagaataattcaaaatgcctgaaaatcctgctacagataaactgcaggtgctgcaggtacttgatcgcctgaaaatgaaattgcaggagaagggtgacacgtcgcagaatgagaagttatctatgttttatgagacactaaagagtcctctcttcaaccagatactcacacttcagcagtccatcaagcaactgaagggtcaactcaaccatataccctcagattgttcagccaactttgatttttctaggaaaggtttgttagtgttcacagatggttccattactaatggaaatgtccacaggccctctaataactcgactgtatctgggttatttccgtggaccccgaagttgggaaatgaagactttaactcagtcattcaacagatggctcagggccggcaaattgaatatatagatatagaacggccttcaactggaggccttggattcagtgtggtggccctcagaagtcaaaatctcggaaaagttgatatcttcgtgaaggatgtccagccagggagtgtagcagacagggatcaaagattaaaggaaaatgatcaaatattggccattaatcacacgccattggatcagaacatttcccatcagcaagcaattgcattattacaacaaaccactggatctttgagactgattgtggccagggaaccagtccacacaaaaagcagtacttctagcagcctaaatgatacaactctgcctgaaacagtttgttggggccatgttgaagaggttgagctcattaatgatggctctggactaggttttggaatagttggaggaaaaacaagtggcgtggttgtgaggactatagttcctggaggattagcagatcgagatggaagactccagacaggggaccacatcttgaagattggtggcacaaacgtgcagggaatgaccagtgagcaagttgcacaagttctaaggaactgtgggaattcagtcaggatgctcgttgctagagatccagctggtgacatttcagtcaccccccctgcccctgcagccttacctgttgccctgcctactgtagccagcaagggccctggttctgacagttctctttttgaaacttataatgttgagcttgtgagaaaagatgggcagagtcttggaattagaattgttggctatgttggaacatctcatacaggggaagcttcagggatttatgtgaaaagtataatacctggcagtgctgcgtaccacaatggccacattcaagtgaatgacaaaatagttgctgtcgatggcgtgaacattcagggttttgccaaccatgatgttgttgaagtattacgaaatgcagggcaggtggtacacctaaccctagttcgaaggaagacatcctcatctacttctccacttgaaccaccttcagacagaggaactgttgtagaaccactgaaaccaccagctctctttctaactggagcagtggaaactgaaactaatgtggatggtgaagatgaggaaattaaagaaagaattgatactttaaaaaatgacaacatacaagccttagaaaaattggaaaaagtcccagactctccagaaaatgagctgaaatccagatgggaaaacctgttgggtcctgattatgaagtaatggttgctactttggacacacagattgcagatgatgctgagttacagaaatattcaaagctgctgcctattcacactctgaggcttggtgtggaagtggattcctttgatgggcaccattatatttcttcaattgtttctggtggtcctgttgatacattgggtctcctacagccagaagatgagctgcttgaggtcaatggcatgcagctttatggaaaatctcgccgagaagcagtctcctttcttaaagaagtgccacccccttttactttggtttgctgtcggaggttgtttgatgatgaagcttctgtagatgaaccaaggcgcactgaaacctctcttcctgagacagaggttgaccacaatatggatgtcaatactgaagaagatgatgatggggaattagcactgtggtcccctgaagtcaagattgttgaactagtaaaagattgtaaaggtttgggattcagcattttggattaccaggaccctttagatcctacaagatcagtgattgtgatccgctccctggtagcagatggtgtagcagaaagaagtgggggactattacctggagaccgcctggtctcagtcaatgaataccgtttggacaacacctcacttgctgaagctgtggaaatattgaaagctgtgccaccaggcctagtacaccttggcatctgtaagcctttggtggaagataatgaagaagaaagttgttatattttacattcaagcagtaatgaagacaagactgaattttcaggaacaattcatgatataaattcatctttaatactcgaagcacccaagggatttagagatgaaccatattttaaagaagaacttgtggatgaaccatttctagatctgggaaagtctttccattcccaacaaaaagagatagagcaaagcaaggaggcctgggagatgcatgaatttctgactcctagattgcaggaaatggatgaagaaagagaaatgcttgttgatgaagaatatgagttatatcaagatccctcaccatccatggagttgtatcccttgtcgcacattcaagaggccactcctgtgccctctgtgaatgaacttcactttggtacacagtggttgcatgataatgaaccatccgagtctcaagaggcaagaaccgggaggactgtctattcccaggaggcacagccgtatggctattgccctgaaaatgtgatgaaagaaaattttgtcatggagtccctaccatctgtaccatcaactgaaggaaacagtcaacaaggcagatttgacgacctggaaaatcttaattcattagcaaaaactagtctggatttaggcatgatcccgaatgatgtccaaggtcctagcttgctcattgaccttcctgttgtggctcaaaggagggagcaagaagatttgcctttatatcaacaccaagcgacacgagttatttccaaggcctcagcatacacaggaatgttgtcttctagatatgccactgatacatgtgagttacctgagagagaagaaggcgaaggagaagaaactccaaattttagccactggggtccaccgagaattgttgagatttttagagaacccaatgtgtctcttgggatcagtattgttggtggacaaactgttataaaacgtctaaagaatggagaggagcttaaaggtatattcatcaaacaagttttagaagacagtccagcagggaagacgaacgcacttaaaactggagataaaatacttgaggtgtctggagtagatttgcagaatgcctcacacagcgaagcagttgaggccattaagaatgcaggaaaccctgtggtgttcattgttcagagtttgtcatccactccacgagtcattcctaacgtacataacaaggccaacaaaatcaccggtaaccagaaccaggacacccaagaaaagaaagaaaagaggcaaggaactgctccaccgccaatgaaacttcctcctccttataaagctctgactgatgacagtgatgaaaatgaagaagaagatgcctttaccgaccaaaaaatcagacaaagatatgcagatctgcctggagaactgcacattattgaacttgaaaaagataagaatggacttggactcagccttgctggtaataaagaccgatcacgcatgagcatatttgtggtgggaattaacccggaaggacctgctgccgcagatggacgaatgcatattggagatgaactcttagagataaacaatcagattctgtatggaagaagtcaccaaaatgcatctgccattattaagactgccccatcaaaggtcaagctggttttcatcagaaacgaggatgcagtcaatcagatggccgttactccctttccagtgccatcaagttctccatcttctattgaggatcagagcggcaccgaacctattagtagtgaggaagatggcagcctcgaagttggtattaaacaattgcctgaaagtgaaagcttcaaactggctgtcagccagatgaaacagcaaaaatatccaacaaaagtctccttcagttcacaagagataccattagcaccagcttcatcataccattcaacagatgcagacttcacaggctatggtggtttccaggctcctctgtcagtggaccccgcaacgtgtcccattgtccctggacaggaaatgattatagaaatatccaagagacgttcagggcttggtctcagcattgtgggaggaaaagacacacccttggttaatggggttgacctgaggaactccagccacgaagaagccatcacagccctgaggcagaccccccagaaggtgcggctggtggtgtatagagatgaggcacactaccgggatgaggagaacttggagattttccctgtggatctgcagaagaaagctggccggggcctgggcctgagcatcgttgggaaacggtaaagacgtgctgtgggagttgggatctgcctttttcatccagagctctgatgcctgtgaacactgaaagagaaagcctaatgtaaagtagtgatgggatttctaaaaataagatatttatgaaaatttgacaacatgggtcatatttctgagcaaggtcttaccagaaaaaattgtcatatcaagatagaactccaagtccaatcaatccagactgatatatttctgtacagagtaagaacaactagcaaggttctttcacttggaattactaagatcggagttttgcagaggttgattaaagcaaccatacccaagaaatagctagcatcaagaatgagatttatccaatgttgggtcaagaacattgcttcgacatggaaattaacatggaacattgcttttcgtgatactgttaatttcatactatgttgaaactagttgagtagacatagttaagagataaacataattcttcacgatagtagttttctattaagaaaaatgtcctgctgggcacagtggcatgtacctgttgtctcagctatgtgggaagatcacttgaggccaggagttcaaggctatagtgtgctatgatcatgcctgtgaatagccactgcacttgagcctcttgggaaacataacaagaccccatctgtaaatt

SEQ ID NO: 120211 - DNA, 4991 bp, Homo sapiens
ctcacttccgcccaggtgaggcagggccgacaccgagcccgcccgacccgggctcccacctgctcctccagcgcaccaggtgtctttaagagtgattgaagagaataattcaaaatgcctgaaaatcctgctacagataaactgcaggtgctgcaggtacttgatcgcctgaaaatgaaattgcaggagaagggtgacacgtcgcagaatgagaagttatctatgttttatgagacactaaagagtcctctcttcaaccagatactcacacttcagcagtccatcaagcaactgaagggtcaactcaaccatataccctcagattgttcagccaactttgatttttctaggaaaggtttgttagtgttcacagatggttccattactaatggaaatgtccacaggccctctaataactcgactgtatctgggttatttccgtggaccccgaagttgggaaatgaagactttaactcagtcattcaacagatggctcagggccggcaaattgaatatatagatatagaacggccttcaactggaggccttggattcagtgtggtggccctcagaagtcaaaatctcggaaaagttgatatcttcgtgaaggatgtccagccagggagtgtagcagacagggatcaaagattaaaggaaaatgatcaaatattggccattaatcacacgccattggatcagaacatttcccatcagcaagcaattgcattattacaacaaaccactggatctttgagactgattgtggccagggaaccagtccacacaaaaagcagtacttctagcagcctaaatgatacaactctgcctgaaacagtttgttggggccatgttgaagaggttgagctcattaatgatggctctggactaggttttggaatagttggaggaaaaacaagtggcgtggttgtgaggactatagttcctggaggattagcagatcgagatggaagactccagacaggggaccacatcttgaagattggtggcacaaacgtgcagggaatgaccagtgagcaagttgcacaagttctaaggaactgtgggaattcagtcaggatgctcgttgctagagatccagctggtgacatttcagtcaccccccctgcccctgcagccttacctgttgccctgcctactgtagccagcaagggccctggttctgacagttctctttttgaaacttataatgttgagcttgtgagaaaagatgggcagagtcttggaattagaattgttggctatgttggaacatctcatacaggggaagcttcagggatttatgtgaaaagtataatacctggcagtgctgcgtaccacaatggccacattcaagtgaatgacaaaatagttgctgtcgatggcgtgaacattcagggttttgccaaccatgatgttgttgaagtattacgaaatgcagggcaggtggtacacctaaccctagttcgaaggaagacatcctcatctacttctccacttgaaccaccttcagacagaggaactgttgtagaaccactgaaaccaccagctctctttctaactggagcagtggaaactgaaactaatgtggatggtgaagatgaggaaattaaagaaagaattgatactttaaaaaatgacaacatacaagccttagaaaaattggaaaaagtcccagactctccagaaaatgagctgaaatccagatgggaaaacctgttgggtcctgattatgaagtaatggttgctactttggacacacagattgcagatgatgctgagttacagaaatattcaaagctgctgcctattcacactctgaggcttggtgtggaagtggattcctttgatgggcaccattatatttcttcaattgtttctggtggtcctgttgatacattgggtctcctacagccagaagatgagctgcttgaggtcaatggcatgcagctttatggaaaatctcgccgagaagcagtctcctttcttaaagaagtgccacccccttttactttggtttgctgtcggaggttgtttgatgatgaagcttctgtagatgaaccaaggcgcactgaaacctctcttcctgagacagaggttgaccacaatatggatgtcaatactgaagaagatgatgatggggaattagcactgtggtcccctgaagtcaagattgttgaactagtaaaagattgtaaaggtttgggattcagcattttggattaccaggaccctttagatcctacaagatcagtgattgtgatccgctccctggtagcagatggtgtagcagaaagaagtgggggactattacctggagaccgcctggtctcagtcaatgaataccgtttggacaacacctcacttgctgaagctgtggaaatattgaaagctgtgccaccaggcctagtacaccttggcatctgtaagcctttggtggaagataatgaagaagaaagttgttatattttacattcaagcagtaatgaagacaagactgaattttcaggaacaattcatgatataaattcatctttaatactcgaagcacccaagggatttagagatgaaccatattttaaagaagaacttgtggatgaaccatttctagatctgggaaagtctttccattcccaacaaaaagagatagagcaaagcaaggaggcctgggagatgcatgaatttctgactcctagattgcaggaaatggatgaagaaagagaaatgcttgttgatgaagaatatgagttatatcaagatccctcaccatccatggagttgtatcccttgtcgcacattcaagaggccactcctgtgccctctgtgaatgaacttcactttggtacacagtggttgcatgataatgaaccatccgagtctcaagaggcaagaaccgggaggactgtctattcccaggaggcacagccgtatggctattgccctgaaaatgtgatgaaagaaaattttgtcatggagtccctaccatctgtaccatcaactgaaggaaacagtcaacaaggcagatttgacgacctggaaaatcttaattcattagcaaaaactagtctggatttaggcatgatcccgaatgatgtccaaggtcctagcttgctcattgaccttcctgttgtggctcaaaggagggagcaagaagatttgcctttatatcaacaccaagcgacacgagttatttccaaggcctcagcatacacaggaatgttgtcttctagatatgccactgatacatgtgagttacctgagagagaagaaggcgaaggagaagaaactccaaattttagccactggggtccaccgagaattgttgagatttttagagaacccaatgtgtctcttgggatcagtattgttggtggacaaactgttataaaacgtctaaagaatggagaggagcttaaaggtatattcatcaaacaagttttagaagacagtccagcagggaagacgaacgcacttaaaactggagataaaatacttgaggtgtctggagtagatttgcagaatgcctcacacagcgaagcagttgaggccattaagaatgcaggaaaccctgtggtgttcattgttcagagtttgtcatccactccacgagtcattcctaacgtacataacaaggccaacaaaatcaccggtaaccagaaccaggacacccaagaaaagaaagaaaagaggcaaggaactgctccaccgccaatgaaacttcctcctccttataaagctctgactgatgacagtgatgaaaatgaagaagaagatgcctttaccgaccaaaaaatcagacaaagatatgcagatctgcctggagaactgcacattattgaacttgaaaaagataagaatggacttggactcagccttgctggtaataaagaccgatcacgcatgagcatatttgtggtgggaattaacccggaaggacctgctgccgcagatggacgaatgcgtattggagatgaactcttagagataaacaatcagattctgtatggaagaagtcaccaaaatgcatctgccattattaagactgccccatcaaaggtcaagctggttttcatcagaaacgaggatgcagtcaatcagatggccgttactccctttccagtgccatcaagttctccatcttctattgaggatcagagcggcaccgaacctattagtagtgaggaagatggcagcctcgaagttggtattaaacaattgcctgaaagtgaaagcttcaaactggctgtcagccagatgaaacagcaaaaatatccaacaaaagtctccttcagttcacaagagataccattagcaccagcttcatcataccattcaacagatgcagacttcacaggctatggtggtttccaggctcctctgtcagtggaccccgcaacgtgtcccattgtccctggacaggaaatgattatagaaatatccaagggacgttcagggcttggtctcagcattgtgggaggaaaagacacacccttgttctggaggctgggaagtccaagagcatggagccagcatctggtgagggccttcatgctgcatcatcctgtgacagaagttgaagggcaaaatgctatagttatccatgaagtctatgaagaaggggcagcagccagagatggaagactttgggctggtgaccagatattagaggttaatggggttgacctgaggaactccagccacgaagaagccatcacagccctgaggcagaccccccagaaggtgcggctggtggtgtatagagatgaggcacactaccgggatgaggagaacttggagattttccctgtggatctgcagaagaaagctggccggggcctgggcctgagcatcgttgggaaacgaaatggaagcggagtgtttatttctgacatcgtgaaaggcggagccgcagacctggatgggagattgattcagggagatcagatcttatctgtgaatggggaggacatgagaaatgcctcacaggagacagg

SEQ ID NO: 120212 - DNA, 863 bp, Homo sapiens
gatattttaagggccatctcctttatattcaaagcagctcatactgcttgtggtcactacctgtttgccttgagattggctggaaatttctagagattctttactggttagatcaaggagattcagcagacagagaaggcagagacctctgccatcagcagcccagctcaggatgcccattgttccaggttaatggggttgacctgaggaactccagccacgaagaagccatcacagccctgaggcagaccccccagaaggtgcggctggtggtgtatagagatgaggcacactaccgggatgaggagaacttggagattttccctgtggatctgcagaagaaagctggccggggcctgggcctgagcatcgttgggaaacgaaatggaagcggagtgtttatttctgacatcgtgaaaggcggagccgcagacctggatgggagattgattcagggagatcagatcttatctgtgaatggggaggacatgagaaatgcctcacaggagacagtggccaccatcctcaagggtagtcagcagagtgcacacagcagctgtcatccctccttcgctcctgtcatcactggcctgcaaaacctggttggcacaaaaagagtttcagatccttcccagaaaaattcaggcacagatatggaaccaaggactgttgagataaacaggaagaaagccaaatcttttttttgttctagctcagaacaatacttccaaggacaccttctaaagagtggcactgctccttatgctgtgttgctgaaagaagacactctaaaaatctgtgagcatctgcttctgtcacagaatccaaaggagactgcacttcttgtgactccgccattgtaa

SEQ ID NO: 120213 - DNA, 1860 bp, Homo sapiens
atgtggccacaacatgggttgtggtacctggtggtagccatgctgcaaggatgggccctagcggaaacctgggtggtggtcgatgggtcacccatgagtgtggaaaatgcgctgaagcagctggaagcacagagcactgagaaggagcgaacctttgccagcagagttggatgggcatttttcactgtgttacgagaagtgcatacccagtccctgagggataaagctcaggtaagggacctccaggcacaggcggggtgcatggagtccccgctacagagcttggagaaaaaattagagtctgacatgaatgcaagcctgggtccgccgtcttggctggaggtccgcactcaatctgatactgaggaggaagaacccctgttgcaggctcacccagtggtttgtcagaaagtagaccatgaacagcctgtgggatcccaagggcgggctcaaggaccccccatcgtaacaaaacacacttcatatattgcctataccccaactgagttgcggaaattaggcaagcagtgccgccagcgtctaggggaacccctgcccgcctggatgctttgtctgtgggacgagggagtagatagtatctcctgttctgcctctgagatggaaaagctggcctctatcatgactcattcctccctcagtcagcggttgcaagtgagcaggcagttagcagcagggcaaggtgaccacatcctgattcaggctgctatgagcagccatatggactgtgtggaacaatgccagggaaatacccaaaattatttagaagcagtggcacccctcttgcagcaacatttggcagcatgtagttgggctgtcaacaaatccaaggtccaagaaatccaaggtccaaggtccaagggcctagattatctgccaaattcttgggagctatctggtcagacaaaagccatcgcagaggctatcattgttaaaattcaggcgtatcctcatcccaccacagtgaacaagttacaaatgtctgtgggccttctgggatattggcgggcatttgtcccccatttagctcaaatgacaaaaccgttgtatcgattaacaaagaagggaactacctgggattgggatgatgcaactgagaccacctttctgacagccaagtgggctattcagctggcacaaaccctacgggtagttgaccaggggcatctgtttgagctggatgtgcatgtggccacagatggtttctgctggggcttatggcagtgcacggggcacttgagaatgtcagtaggcttttggtctccactatgcaaagcagctgagctctggtattccttaatagagaaacagctagcagctgtatatgcagctcttcaagcttgtgagaatgtgacaggacaggcttcagtcatcatgcgtacgacttaccccatagtgggatggctgcccagtgttacacaacaagtgacaatagggtcagtgtccttgacaaggtggcaagtagactacattgggttgctgctgaagttgcaagggtatacgcatgcactaacagctgtggacatggccacaggactgttcttcacctacccttggaggatggctgatcaacagcacaccatctgggccctgcaacacttatgtgccctgtatggttgccctctggctgttgagagtgatagtgttgagacatttcactgtataacaggtacaacaatgggcataacaaatggacataaagtgggaattctatttgccatacaacctgcaagctgcgcgtatgattgggctcttgaagaacgggttacacttgcatgtcacacccccatctttgcaaggctagagttcaagtctggacctgatgctccaaaccttgaatga

SEQ ID NO: 120214 - DNA, 101 bp, Homo sapiens
cctctagttctgttgcaggggctgttggcatgaccacctctggggagagtgaatcagatgattccgagatgggacgtttgcaaggtaaaaacagttattga

SEQ ID NO: 120215 - DNA, 540 bp, Homo sapiens
atgggagaaggggtttggaggacaattaatgatgcctttctgatcttgaatcttcccactcatactcctccaaaagtcataaatccaacaaggagaacaaataaaaacagacaactcataccttcaagagcattaagagacagcaacaagcctgtgatagcaaagagtgacacaggggaagctgatagaggcttaagaagctgtgaaaaacagtacaggggtgtggaggacttaatcaaatcacaagcaaaattattccagaaagacaaaactgggatgctgtgtagttcattcacagcactggatgcaataaaggaggctgaaagtgactggaattggcagctgttggaaagcattgcctctaggggagagtcaaacggtgcttctcttttaaaaggactaaaacatgctaacatagtgctacttcatgacatcatccataccaaggagacgctgacacttgtgtttgaatatgtggggaggttgtcattcagaaccaagtacagaatgcgaacagatgtaaacattgtggatgactga

SEQ ID NO: 120216 - DNA, 1186 bp, Homo sapiens
ttttcattttcagtactgacaaggggttttattttatatggttgtcataataaggcaaattcattttgtacactttatattttcaaaccccagcaaactctaaaagggacataaaataacttaaaaattgggaaaagatgggcatgtgtatgatcatgatattcatcccctgccccagaacaaaatgggaggaacacattgccccaaaacctcacggtctggagctctttcaacatgtctccccctggatggaccctgggacagcatcatggaaggtggtcccttcagccaccagggcagccatccaagttggacaggtcaggtggtaaaagggaaggtaattggtttgccaattaactggggtcacccaactaacatggtgttccatcttcccctaattccagtaccctggactcattacctgaaagcagtgttcaaccttagcaaaatctccaaccagcgcatgaacaattttctacatcacaacgacctggttttcaaattcagctctcaaggccaaatcttttctaaatttaaccaagaacttcatcagttcacagagaaagtaatccaggaccggaaggagtctcttaaggataagctaaaacaagatactactcagaaaaggcgctgggattttctggacatacttttgagtgccaaaagcgaaaacaccaaagatttctctgaagcagatctccaggctgaagtgaaaacgttcatgtttgcaggacatgacaccacatccagtgctatctcctggatcctttactgcttggcaaagtaccctgagcatcagcagagatgccgagatgaaatcagggaactcctaggggatgggtcttctattacctgggaacacctgagccagatgccttacaccacgatgtgcatcaaggaatgcctccgcctctacgcaccggtagtaaacatatcccggttactcgacaaacccatcacctttccagatggacgctccttacctgcagactctgtggaacctagggccattcttatttcccagagagggagaaagaggatagagctctcaggactatccaaacaggcacaggattatcaaggtgcaaagctgctgcgggtaactttctgggcttcagacaatgctgttgagatccgcatggatgttggtggaagagctggctccacccggctgactcagttttag

SEQ ID NO: 120217 - DNA, 1506 bp, Homo sapiens
atgcaggcaggtgtggacgtttggctcctcagaatagggagtccccagacagcgatgccggctcagcctgctcatcctggaaactggcggcccttgcgagggcggcgacagtggaatgcgttgaggactgccctgctaatgagattagttcgtctgaaacgtggaaatggtgcagatcacatcatatatcgtttaggaaccgttctgattactactaacaggacgcacgatggctgcgggatcccagtcatcatgttcacattccaggagtgcagaaaagaaaaaactgcaaacacagccggacatcagaaggaacaaacgggggacacgctgcctttaagaaacataacaggcaccgtgagggtccacggcttcattcttgaagttagtgagaccaagaacccacctaatcccgggcacaaaaccacctcaatctcccaaagaccgaaagccctggtgtcgctgggaccagaggtgagacgtggaacacgtggggaagatgagaaggcgctggagaaggagggtggtggtcgcagatgggaatgtggtgaagccaatgagctgtgcgggagacctccagccttcaccagggtaactgtgcattggggaaagggaaatgatcagacatttcaggacctattggacactggctctgagctgacattgattccaggggacccaaaacgtcattgtggtcctccagttaaaataggggcttatggaggtcagataattaatggagttttagctcaggtccaacttacagtggatgcagtgggtccctggactcatcctgtggtttttcccagtgccagaatgcataattggaatagacatactcagcagctggcagaatcccacattggctccctgactgtccatttatctagtgacccaaaaggctgccattctgagtggggtccagaacaggagaaggctctgcaagaggtccaggctgctgtgcaagctgctctgatacttgagccatatgacccagcaggtccagtggtgcttgaggtgtcactggcagatagggatgctgtttggagcctttggcaggcccccataggtgaatcacagcaaaggcctctaggattttggagcaaggccctgccatcttctgcagccataaagcgtgtcatgcacagcagcattccatcatcaaatggaagtggtatatacatgatcgggctcgagcaggtccggaaggcacaaatagttctgcacgatatgcagccaccatgtgaaaatgggacagcttcagcactacagcctctttctaggaaatccttgaaggacagcagtgaagggaaatcttcccagtgggcagaacttcgagccgtgcacctggctgtgcacgttgcatggaaggagaaatggccagatgtgcgattagatactgattcatgggccgtagcaatggtttggccagatggtcagggacttggaaggagcatgataggaaaattggtgacaaagaagtctggggaagaggtacgcggatag

SEQ ID NO: 120218 - DNA, 1569 bp, Homo sapiens; identical to SEQ ID NO: 119655

SEQ ID NO: 120219 - DNA, 1101 bp, Homo sapiens; identical to SEQ ID NO: 119748

SEQ ID NO: 120220 - DNA, 538 bp, Homo sapiens
ggtttctggagttggctgcttaatatgattagacccaaaaatgctaaggactctacttctaatagtatggagaacactgatagtacttggagtaaactgtttggagagttatgcaaaataaatgaatttgatactcctgattcaccactcctgagaggcaaggagtttaatgactctatacttaatacttttgaccatatgtggagaaccagggaacacaatgaagctgtttggttgcttctaagttcagtggacaaagtgatgaaagaaaatgatgaactcagggattctgtgtcccagcttcagaggcagatacctgcgcagaagatagatggatcttggcgaatgacagtgaattattgtaatcttaaccaagtggtgactccaatttcagctgctgtaccagatgcagtttcattgcttgagcaaatgaacacatctcctcgtatctggtatgcagccattgacttggcaaatgccttttattccattcctgtccataaggcccaccagaagcaatttgccttcagctggcaag

SEQ ID NO: 120221 - DNA, 1026 bp, Homo sapiens
tcagggaagggatgttgccgctactggggatggggaagctgttccttctggcaaaaaaggttcatcagagtttacaaactcagtgttcccagttccatcagggtcctcccacatgtccccagtccaagttgcagggtcccgttcttttccaatcaatgccctcaccctgccctcactaagcttaacaataaatgctggtatattcagtgcgttagtggcaccatgggaccggaaggcagtgatcccccagacccagctttcactatcttttgtgtgtctattatttctcgacctgccgatccgccttgcttccctgtgttcctgggtattttcctggactcttcccatcttgagttctttctcctccaaacctccttgctgcaggtggatgtcggactggttttggtaactgacgctggttccattttcatttagtgtagtgctaaccccattacccaaaggtaatactattaggtactgaactggcatcttatgaggatggaacttgtcctggaagggaaccttgggtttctctgttacagcccagccctcctccggtactcccagaacagctcttgggtctaggacaacaaagcccttattggtctcattgttgcaagtgtagttggaaacatctgagataaagctgggatggaaaaccgagcaaactgttaaaatccactttttctttctttctctttctttttctttccttttaaaactcacttctttacttcctgctccagccctggaatcagccatttctctgaaaaactgtggttctacagaagttggtttttcaatatgaacaagactagttaccagcttaatgctcttgcctgcagtggttgaacccatctcagtgtgcttggaactaagcatgtaaaaaattcttctgaagctcctcttggttggaagtattggctttaccttcatccagatcctcgtccttatgtgaccccacaataccttgttttgctggtggtagccaaagaggagaagggagcttctgtggctttccttcat

SEQ ID NO: 120222 - DNA, 1428 bp, Homo sapiens
gtctctagtcatttgtcacctaggccagcagtatctgttggaaatgttggccagcttgcaatggatctgattatttctacactgaatatgtctaagattggttacttctataccgattgtcttgtgccaatggttggaaacaatccatatgcgaccacagaaggaaattcaacagaacttagcataaatgctgaaggtattactcccttccggtacctacttacaccttccatgcaaaaaagtgttcaaaataaaataaagagccttaactgggaagaaatggaaaaaagccggtgcattcctgaaatagatgattccgagttttgtatccgcattccgggaggaggtatcacaaaaacactctatgatgaaagaatagggagtccccagacagcgatgccggctcagcctgctcatcctggaaactggcggcccttgcgagggcggcgacagtggaatgcgttgaggactgccctgctaatgagattagttcgtctgaaacgtggaaatggttcctgtttcctagtacttttttcttctgatgtgatacattacgaaagcaacaacaccttttctgtattctgccccaaaacattaaccttttatctaatcaagcctttagagctaactccagttacagaaaacacaggggctagaacaacaagccaagtgacaagaggacgtaatcagacaaatcagaagaaacgatggaaagaactttctaaggaagacttatctcctgcctttgatcattcaccaaacaaaataatgactgaaaaatacaatgggaacagaataggtctagaagaagaaaaactgacaggtgaccgatgtacaggactttcctctaaaatgcaagatacaatggaggagaacagtgagaggagacctccagccttcaccagggtaactgtgcattggggaaagggaaatgatcagacatttcagggactattggacactggctctgagctgacattgattccaggggacccaaaacgtcattgtggtcctccagttaaaataggggcttatggaggtcagataattaatggagttttagctcaggtccaacttacagtggatgcagtgggtccctggactcatcctgtggtttttcccagtgccagaatgcataattggaatagacatactcagcagctggcagaatcccacattggctccctgactggtagggtgagggctactatggtgggaaaggccaaatggaagccattagagctgcctctacctagaaaaatagtaaatcaaaaacaatatcacatccctggagggattgcggagattggtgccaccatcaaggacttgaaggacacgggtggtgattcccacatccccattcaactctcccatttgacctatgcagaagacagatggatcttggagaatgacagtggattatcttaa

SEQ ID NO: 120223 - DNA, 850 bp, Homo sapiens
aaagaaaaaactgcaaacacagccggacatcagaaggaacaaacgggggacacgctgcctttaagaaacataacaggcaccgtgagggtccacggcttcattcttgaagttagtgagaccaagaacccacctaatcccgggcacaaaaccacctcaatctcccaaagaccgaaagccctggtgtcgctgggaccagaggtgagacgtggaacacgtggggaagatgagaaggcgctggagaaggagggtggtggtcgcagatgggaatgtggtgaagccaatgagctgtgcgggagacctccagccttcaccagggtaactgtgcattggggaaagggaaatgatcagacatttcaggacctattggacactggctctgagctgacattgattccaggggacccaaaacgtcattgtggtcctccagttaaaataggggcttatggaggtcagataattaatggagttttagctcaggtccaacttacagtggatgcagtgggtccctggactcatcctgtggtttttcccagtgccagaatgcataattggaatagacatactcagcagctggcagaatcccacattggctccctgactgtccatttatctagtgacccaaaaggctgccattctgagtggggtccagaacaggagaaggctctgcaagaggtccaggctgctgtgcaagctgctctgatacttgagccatatgacccagcaggtccagtggtgcttgaggtgtcactggcagatagggatgctgtttggagcctttggcaggcccccataggtgaatcacagcaaaggcctctaggattttggagcaaggccctgccatcttctgcag

SEQ ID NO: 120224 - DNA, 864 bp, Homo sapiens
ttcagtaccagagatggttctctgacagtgtggagcaccagaaaccatgagaaggaggcacagcaatctctcctgagcatggagcctgctcttggtgttgttttgctgcagctgctgtttgccattgatgatcgttctcttctttcaggagatatggagaacactgagagtccttggcatgaactgttcagagacttatgcaaaataaatgcatttgacactcctgattcatcactcatgagaggcaaggagtttagtgactctatacataatacctttgaccatatgtggagaaccaaggaacataatgaagctggttggttgttcctaagttcagtggacaaagtgatgacagaaaatgatgaactcaggaattctatcttccggcttcagaagcagatactaagcctcaaatctgctaagattgccctgagtgagagttttatctcctatagagaaagaactgaaattgtggaaaaacagacagaagctcttatcatgcgaatggctgacccgcaaggaaaggtgcatgcgcagcctcaacaggtgtctactgttaaagggaggacattgattggaaaagaatgggaccccgcaacttggaatggggacgtgtgggaggaccctgatgaagctggggacactgagtttgtaaactctgatgaaccttttttgccagaagtaacagcttccccatccccaagagacctctggccttttaccagggtaactttgcactggggaaagggaaatgatcagacattttggggactactggacactggctctgagctggtgatgattccaggggacccaaaatgtcattgtggtcctccagttaaaataggggtttatggtggtcag

SEQ ID NO: 120225 - DNA, 446 bp, Homo sapiens
gtccctgacttcccggcaaaaccaatccaaggccctcactttaacagtagatacttggcgaggctgtgcatggtgaggctgtgcatgcacctttcattgcaggtcagccactaacatgataagagcttatgtctatttttccacaatttcagttctttctctacaggagattagactctcactcagggcaatcttggcagatttgaggctcagtatctgcttctgaagctgggagatagaatccccgagttcatcattttctttcatcactttatccactgaacttaggagcaaccaaccagcttcattatgttccttagttctccacatatggtcaaaggtatgatgtatagggtcactaaactccttgcctctcatgagcaatgaatcaggagtgtcaaatgcatttattttgtataactctttaaacagttcacaccaagggc

SEQ ID NO: 120226 - DNA, 3042 bp, Homo sapiens
atgtttcctactacggacaaccacgctactggtcactacgctgtttcctacttacgggacaccacggctactgagtcaatacgcttggtttcctactacgggacaaccacgctactagagtccactacgtcgtgtttcccatactacgggacacaccacgctactgagtcactacggcttgttatcctactacggacacaccacggctactggagtcactacggctgttttcctactacgggacacaccacggcttacatgagggccacatacagacgaggagtaaccgaggttaaccaaggggaccacgacggactccatgagcaccactaccggagtggatactcccgtaccgggacacaccacctggcaacctggggcaactacggacaggataaatcccgtaacggggacagcaaccaccgggacaacttggagtacacctcacgaggaaagttgaggaccgccaatagttatggaatccaaggagtaagtaccagcctcgtcttctgctacaccatcattgagaggaacaatcgccagatgctgccagtcattaggagtaccactggaggagactcagtgcagacctgcacaaacccactggacaccttcttcccctttgatccctgtgtgctgaagagaacacaaggcgacttcaacacagagaacactccgccaactaacaaaacacaccccatcaaccaagaaccacattcaaaaaccacgaacatgtacaccaaaaaaggggacaagccgccgttccggcagaggtcccagatcacgtcccactctactggacaccccaacaccttcatgtcccgacagagcaccacagcggctccctcccgggaaggagcacaccggcattcgtgccagaccagcaagggtgtcctggacactgcccagatgctgaccccgtcatcaaagcagacactggacactgcccaggtgccgaccccaccatcgaagcagacactaccttgtcccctcccgccccccagcaagaagacgccaagccctgagagatttgcctgtgctcagcactgtgtggaggagcggcatgttttcgtgggcacagagacagctctgaagcagatactgagcctcagatctgctaagattgccctgagtgagagtcttatcagctgtagagaaagagttgaaattgtggaaaaacagacacaagctcttatcatgcgagtggctgacctgcaacaaaaggtgcatgcacagcctcaccaggtgtctactgttaaaatgagggcattgattggaaaagaatgggaccctgcaacttggaatgcagacgtgtggggggaccctgatgaagctggggacactgagtttgtaaactctgatgaatcttttttgccagaagaaaaagcttccccatccccagtagtgacaacatccactccccaacccatgctgccatcagcctttccacctttgtctgaggagataaaccctgcactgcctgaggcaacagtgatggcctcccctgaggcagttgccaggcaagataatgttgattctcctcaggagccacccccaacacccctgtttgcttctagacctacaactagactaaagtcctggcaggcccctagagggccagaatgcataattggcatagacatacttagcagcggacagaacccccacattggctccctgactggtagggtgagggctattatggtgggaaaggccaaacggaagccattagagctgcctctacctagaaaaatattaaatcaaaaacaatatcgcatagctggagggattgaggagattagtgccaccatcaaggacctgaaagacgcaggggtggtgattcctaccacatccctgttcgactctcccatttggcctgtgcagaagacagatggatcttggagaatgacagtggattatcgtcagattaatcaagtggcaactccaattgcagctgctataccagatgtggcttcattgcttaagcaaattaacacatctcctgacacctggccatacgaccccccatatccaatggtgattgaggtgtcagtggcagataggcatgctgtttggagcctttggcaggcccccataggtgaatcacatcagaggcctctaggattttggaacaaggccctgccatcttctgcagataactactctccttttgagagacagctcttggcctgttactgggctttggtggaaattgaacgtttgattatacccaatggtttggctggatggtcagggacttggaagaagcatgactggaaaattggtgacaaagaaatttggggaagaggtgtatggatgaaactctctgagtggtcaacaactgtgaagatatttgtattccatgtgagtgctcaccaatgggtgacctcagcagaggaggattttaataatcaagtggataggatgacctgttctgtggacaccattcagcctctttccccagccacccctgtcatcgcccagtgggcccacgaacaaaggggccatagtggcacagatggaggttatggatgggctcagcaacatggacttccactcaccaaggctgacctggctatggccactgctaagtgcccaatttgccagcacttatgggggaatggccttttgaagtcacaattacaacgtaaacaaggtaacaatagtttgcagggctggggcaaagttctccagacggccgtgaatgctctgaatcagcatgcaatatatggtactctttctcccatagccagaattcatgggtccaggcatcaagggttggatgtagaagtggctccactcaccatcatccctagtgatccactagcaaaatttttgcttcctgttcctgcaacattacgttctgttgacctagaggtcttagttccagagacaggaatgctgccaccaggagacacaacaatgattccattaaactggaagttaaggttgctacctggacactttgggctccttctacctttaactcaacaggctaagaagggagttacagtgttggctggggtgattgacccagactaa

SEQ ID NO: 120227 - DNA, 2259 bp, Homo sapiens
atgattatctcaatagatgcagaaaaggccttcgataaaattcaacagcctttcatgctaaaaacactcagtaaactagaagaaacagcatccccatccccagtagtggcaacatacactccgcaacctatgctaccatcagcctttccacctttgtctgaggagataaatcctgtgctgcctgagacaacagtgatggcctcccctgaggcagttaccaggcaagataatgttgattctcctcagaagccaccccctacacccatgtttgcttctagacctataactagactaaagccccggagagcccctagtgaggaagggatccaaaggcttaaaaagattgggatggtggagtggattagtcactttagacctactcctctcagcatggaaggtccagaacatatactcttgaccaacaccttgttaaatagatatgtgaaggcagcacctgcatctttgaagagccctttaactgctcttctctttatgtcagatctaactgtgggaaccacattctctcaactacaaaatttaaatacaatgggaatatttgggtcctcatgtgacaggagccaagtggcagcactcaaccatcaaaggcaagtgccagaattaataattggcatagacatacttagcagctggcagaacccccacattggctccctgaatggtaggggatatatcaactctctggctttgtgtcataatcttattcggcgagatcttgatcgctttttgcttccacaagatatcacactagtccattacattgatcacattatgcgattggattcagtgaaggataagtggctgcatttggcccctcctacaaccaagaaagaggcacaatgcctagtgggcctattggattttggaggcaacacatttctcatttggagacagcccttggcctgttactgggctttggtggaaactgaacatttgactatgggccatcaagtcaccatgcaacctgaattgcctatcatgaactggctgctttctgatccatctagttataaacctgcaccaatggcctcatggggagttccctatggtcaacttacagaggaagagaagactagggcctggttcacagatggttctgcaagatacacagaaaccacccgaaagtggacagctgtagcaatacagcccctctctaggacatccttgaaagacagcaatgaagggaaatcttcccatcaacaggctaagaatggaattacagtgttggctggggtgattgacccggactatcaagatgaaattagtctactactccacaatggaggtgtcatcctgggagcagtgtgtggagggcttcttcgcttggcatctcccatccaccctgatgtggttatgttaatagccttcccaggggatatactcatgaggatgctaagaatgctcattctccctctaatcatctccagcttaatcacaggtgctgatgctactaaggatgacggtgtctactcaaggtatttcacaacttatgacacgaatggtagatacagtgtaaaagtgcgggctctgggaggagttaacgcagccagacggagagtgataccccagcagagtggagcactgtacatacctggctggattgagaatgatgaaatacaatggaatccaccaagacctgaaattaataaggatgatgttcaacacaagcaagtgtgtttcagcagaacatcctcgggaggctcatttgtggcttctgatgtcccaaatgctcccatacctgatctcttcccacctggccaaatcaccgacctgaaggcggaaattcacgggggcagtctcattaatctgacttggacagctcctggggatgattatgaccatggaacagctcacaagtatatcattcgaataagtacaagtattcttgatctcagagacaagttcaatgaatctcttcaagtgaatactactgctctcatcccaaaggaagccaactctgaggaagtctttttgtttaaaccagaaaacattacttttgaaaatggcacagatcttttcattgctattcaggctgttgataaggtcgatctgaaatcagaaatatccaacattgcacgagtatctttgtttattcctccacagactccgccagagacacctagtcctgatgaaacgtctgctccttgtcctaatattcatatcaacagcaccattcctggcattcacattttaaaaattatgtggaagtggataggagaactgcagctgtcaatagcctag

SEQ ID NO: 120228 - DNA, 2093 bp, Homo sapiens
tccaagtcccaaaactgaagaaccctgactaatacagattttggtattgggagtggttctagaggaacagaatattaaggatggagttcttttgttggttttggggtttctgaagttggctgcttaatatgattagaccccaaaatgctaaggactctacttttaatagtatggagaacactgatagtccttggtgtgaactgtttagagagttatgcaaaataaatgcatttgacactcctgattcatcactcctgagaggcaaggagtttagtgactctatatataatacctttgatcatgtgtggagaaccaaggaacataatgaagctggttgtttgctcctaagttcagtggacaaagtgatgaaagaaaatgatgaactcagggattctgtctcccagcttcagaagcagatactgaccctcaaatattctaagattgccctgagtgagagtcttatctcctgtagagaaagagctgaaattgtggaaaaacagacacaagctcgtatcatgcaagtggctgacctgcaaggaaaggtgcatgcacagcctcaccaggtgtctactgttaaagtgagggcactgattggaaaagaatgggaccctgcaacttggaatggggatgtgtgggaggaccctgatgaagctggggatactgagtttgtaaactctgatgaactttttttgccagaagagacagcttccccatccccagtagtggcaacatcacctccccaacccatgctgccatcagcctttcaacctttgtctgaggagataaaccctacgctgcctgaagcaacagtgatggcctcccctgaggcagttgccaggcaagataatgttgattctcctcaggagccacccctaacacccatgtttgcttctagatctataactagactaaagttcctgcagacccctagaggtgtggttgagagtgtgacccatgaggtgggaaatgatcagacatttgggggactactggacactggctctgagctgacgttgataccagcggaccctaaacgttattgtggtcctccagttaaagtagaagcttatggaggtcaggggaggcctctaggattttggaacaaggccctgccatcttctgcagataactactctccttttgagagacaactcttggcctgttactgggctttggtggaaactgaacatttgactacgggtcatcaagtcaccatgcgacctgaactgcctaccacgaactgggtgttttctgacccatctaaccataaagtaggtcatgcacagcagtattccatcatcgaatggaagtggtatatacatggttgggctcgagcaggtcctgaaggcacaacttcatggggagttccctatgaacagttgacagaggaagagaagactacggccttgtacacagatggttctgcacaatatgcaggcaccacccgaaagtggacagctacagcagtacagcccctttctaggacatccctgaaggcagcagtgaagagaaatcttcccaggcagaggtttgtcctcattggaataaacacttactacgggtattggtttacctatcctgaatgcagtgcttctgccaagtctgccatccgtggactcatggaatgccttatccgccatcatggtattccacacagcattgcgtctgacaaaggccctcactttaaggctaaagaagtgcagcagtgggctcatgctcatgggattcactggtcttaccatgtttcccatcaccctgaagcagctgaattgatagaacagtggaatggcctcttggggtcagaattacaatgccaagtcaatgggaatctacaacagcccaatccaggcaggactacaagttacccagtcccttctggaatgaagttttgggtcactccaccaggaaaaataccacaacctgttgaggtgcttgctgaaggcaaagggaatacagaatgggtaggagaagaagttagtcatcaataccagctatgaccacatgaccagctgcagaaacgaggactgtaattgtcatgagtatttcctccttctgttcttaaagacatgtttgtgcatgtgtacacttctact

SEQ ID NO: 120229 - DNA, 1107 bp, Homo sapiens
atggggagaaaccagaacagaaaggctgaaaattccaaaaactggaacgcctcttctcctccaaaggaacacaactcctcgccagcaagggaacaaaactggagggaggatgagtttaacgagttgacagaagtaggcttcagaaggtcggtaataacaaacttctccgacctaaaggagcatgttctaacccattgcaaggaagctaaaatccttgaaaaaaggttagacaaatggctaactaaaataaccagtgtagagaagagcttaaatgacctgatggagctgaaaaccacagtacgagaacttcatgaagcatacacaagcttcaatagccgatttgatcaagcggaaaaaaagatatcagtgattgaagatcaaattaatgaaataaagcaagaagacaagatgagagaaaaaaaaatacaaactaccatcagagaatactacaaacacctctatgcaaatatactagaaaatctagaagaaatggataaattcctggacacatacactctcccaagactaaaccaggaagaagttgaatctctgaatagaccaataacaggatctgaaattgtggcaataatcaatagcttaccaaccaaaaagagtccaggaccagatggattcacagccaaattctacagagctgataagcaacttcagcaaactctcaggatcaaaatcaatgtacaaaaatcacaagcattcttatacaccaataacagacaaacagagagccaaatcatgagtgaactcccattcacaattgcttcaaagagaataaaatacttaggaatccaacttacaagggacgtgaatgacctcttcaaggagaactacaaaccactgctcaatgaaataaaagaggatacaaacaaatggaagaacattccatgctcatgggtaggaagaatcaatatcgtgaaaatggccatgctgcccaaggtaatttatagattcaatgccatccccatcaaactaccaatgactttcttcacagaattggaaaaaactaaagttcatgtggaaccaaaaaagagcccacatcgccaagtcaatcctaagccaaaagaacaaagctggaggcatcacgctacctga

SEQ ID NO: 120230 - DNA, 1395 bp, Homo sapiens
ctatatgaactttaaagtagttttttccaattctgtgaagaaagtcattggtagcttgatggggacggcattgaatctataaattaccttgggcagtatggccattttcataatattgattcttcttatccatgagcatggaatgttcttccatttgtttgtatcctcttttatttcattgagcagtggtttgtagttctccttgaagaggtccttgacgtcccttgtaaattggattcctaagtattttattctctttgaagcaattgcgaatgggagttcactcatgatttggctctgtgtttgtctgtttttggtgtataagaatgcttgtgatttttgtacattgattttgtatcctgagactttgctgaggttacttatcagcttaaggagattttgggctgagacaatcgggttttctagatatacaatcatgtcatctgcaaagagggacaatttgacttcctgttttcctaattgaataccctttatttccttctcctgcctaattgccctggccagaacttctaacactatgttgaataggagtggtgagagagggcatccctgtcttgtgcccgttttcaaagggaatgcttctagtttttgcccattcagtatgatattggctgtgggtttgtcatagatagccctcattattttgagatacgtcccatcaatacctaatttattgagagtttttagcatgaagcgttgttgaattttgtcaaagaccttttctgcatctattgagataatcatgtggtttttgtctttggtcctgtttatatgcagttcctccttgtacctctggtagaatttggctgtgaatccatctggtccaggactctttttggttggtaagctattgattattgccacaatttcagatcctgttattggtctattcagagattcaacttctccctggtttagtcttgggagagtgtatgtgtggcggaatttatccatttcttctagattttctagtttatttgcatagaggtgtttgtagtattctctgatggtagtttgtatttctttctctctggctgcctttaacattttttccttcatttcaactttggtgaatctgacaattatgtgtcttggagttgctgttctcgaggagtatctttgtggcattctctgtatttcctgaatctgaatgttggcctgctttgctgaattggggaagttctcctggataatatcctgcagagtgttttccaacttggttccattcttcccgtcacttttaggtacaccaatcagacacagatttggtcttttcacatagtcccatatttcttggaggctttgttcatttctttttattcttttttctctaaacttctcttcatgcttcttttcattcatttcatctttcat

SEQ ID NO: 120231 - DNA, 1995 bp, Homo sapiens
atggcacgagaactacgtgacgaatgcacaagcttcagtagccaattccatcaactggaagaaagggtatcagtgattgaagatcaaatgaatgaaatgaagcaagaagagaagtttagagaaaaaggaataaaaagaagtgaacaaagcctccaagaaatatgggactatatggaaagaccaaatctatgtctgattggtgtacctgaaagtgacggggagaatggaatcaagttggaagacactctgcaggatattatccagaaggacttccccaacctaggaaggcaagccaacattcagattcaggaaatacagagaatgccacaaagatactcctcgagaagagcaactccaagacacataattgtcagattcaccaaagaaatacaaactaccatcagagaatattataaacacctctatgcaaataaactagaaaatctagaagaaatggataaattcctcgacacatacaccctcccaagactaaaccaggaagaagttgaatctctgaatagaccaataacaggctctgaaattgaggcaataattaatagcttaccaaccaaaaaaagtccaagaccagacggattcacagccgaattctaccagaggtacaaggaggagctggtaccattccttctgaaactattccaatcaatagaaaaagagggaatcctccctaactcattttatgaggccagcatcatcctgataccaaagctgggcagagacacaacaaaaaaagagaattttagaccaatatccctgatgaacatcgatgcaaaaatcctcaataaaatactggcaaaccaaatgcagcagaacatcaaaaaccttatccgccatgatcaagctggcttcattcctgggatgcaatgctggttcaacatacgcaaatcaataaatgtaatccagcatataaacagaaccaaagacaaaaaccacatgattatctcaatagatgcagaaaaggccttctacaaaattcaacagcccttcattctaaaaactctcaataaattagagaataaaatacctaggaatccaacttacaagggatgtgaaggacctctcttcaaggagaactacaaactaatgctcaaggaaataaaagaggacacaagcaaatggaagaacattccatggtcatggataggaagaatcaatatcgtgaaaatggccatactgcccaaggtaatttatagactcagtgccatccccatcaagctaccaatgattttcttcacagaattggaaaaaactactttaaagttcatatggaaccaaaaaagagcctgcattgccaagtcaatcctaagccaaaagaacaaagctggaggcatcatgctacctgacttcaaactatactacaaggctacagtaaccaaagcagcatggtactggtaccaaaacagagatatagaccaatggaacagaacagagccctcagaaacaataccacacatctacagccatctgatctttgacaaacctgacaaaaacaagaaatggggaaaggatttcctatttaataaatggtgctgggaaaactggctagccatatgtagaaaactgaaactggatcccttccttacaccttacacaaaaattaattcaagatggattaaagacttaaacgttagacctaaaaccataaaaaccctagaagaaaacctaggcaataccattcaggacataggcatgggcaaggacttcatgtgtaaaacaccaaaagcaatggtaaccaaagccaaaattgacaaatgggatctaattaaactaaagagcttctgcacagcaaaagaaactactgtcagagtgaacaggcaacctacagaatgggagaaaatttttgcaatctactcatctgacaaaaggctaatatccagaatctacaaagaactcaaactaatttacaagaaaaaaacaaacaaccccatcaaaaagtgggcaaaggatatgaacagacacttctcaaaagacacatga

SEQ ID NO: 120232 - DNA, 1162 bp, Homo sapiens
  misc_feature (1)...(1162): n = a,t,c or g
atggagaatgactttgatgagctgagagaaggcggcttcagaagatcgaattattctgagctacgggaggacattcaaaccaaaggcaaagaagttgaaaactttgaaaaaaatttagaagaatgtataactagaataaccaatacagagaagtgcttaaaggagctgatggagctgaaaaccaaggctcaagaactacgtgaagaatgcagaagcctcaagagccaatgcaatcaactggaagaaagtgtatcagcaatggaagatgaaatgaatgaaatgaagcgagaagggaagtttagagaaaaaagaataaaaagaaatgaccaaagcctccaagaaatatgggactatgtgaaaagaccaaatctacgtctgattggtgtacctgaaagtgatggggagaatggaaccaagttggaaaacacgctgcaggatattatccaggagaacttccccaatctagcaacgcaggccaacgttcagattcaggaaatacagaaaacgccacaaagatactcctcgagaagnagcaactccaagacacataatgaaatacaaactaccatcagagaatactacaaacacctctacgcaaataaactagaaaatctagaagaaatggataaattcctcgacacatacactctcccaagactaaaccaggaagaagttgaatctctgaatagaccaataacaggagctgaaattgtggcaataatcaatagcttaccaaccaaaaaagagtccaggaccagatggatccacagccgaattctaccagaggtacaaggaggaactggctggagcttttggacattccctgggttacacaggggccagcccctgaagcaagagcttctccaaccagccatttaccccattccacttgtctcatctaaggagtatcataggccaggcttcattgcagttgggctagaactagtagctcctgtgaggactcaaagagatgatgcttatgaagtgcccagcacagggcagcatgtggacgtggtggctgttcatgtgtgccctgcttgggtgaccaccaagttcaggtcacggtccccacccctgccagagcccctcgactngaatatggggcccaaccccatttggcttagcagggatgctgactgtgggagcaggggcatgcgctcag

SEQ ID NO: 120233 - DNA, 2025 bp, Homo sapiens
atgaccaacacctaccactaccctcagcagacatccattagagaagtcggacctggacaactttgccaggtagcattaggcctgacccatggtggttccattggtggtaaccacagtggtgcttgtgtcacccaaccatcagctccagatggctcagcaaagacacagaggagactcagttattttgggagaaggaagagtgacatgggtttgataagtaacatgctcatgggagaggctgaggcagagggtcccaagtatagaccaggccatgcagatgtttgtcagcaaccacccatggcaccacccaatcagccagacacattaagcccttccttgaccccagacaccatcctacacaccagggataaaaatgacctgcagctgagggtcctattagaaggaaaattaacaaacagaaaggacatccacaccaaaaacccatctgtacatcaccatcatcaaagaccaaaagtagataaaaccacaaagatggggaaaaaacagagcagaaaaactggaaactctaaaaatcagagcgcctctcctcctccaaaggaatgcaattcctcaccagcaacaaaacaaagctggaccgaaaatgactttgaggagctgagagaggaaggcttcagacgatcaaattactctgagctatgggaggacattcaaaccaatggcaaagaagttaaaaactttgaaaaaaatttagaagaatggataactagaataaccaaggcagagaagtgcttaaaggacctgatggagctgaaagccaaggctccagaactacgtgacaaatgcagaagcctcaggagccgatgcgatcaactggaagaaagggtatcagcgatggaagacaaaatgaatgaaatgaagcgagaagagaagtttagagaaaaaagaataaaaagaaacgaacaaagcctccaagaaatatgggactatgtgaaaagaccaaatctacgtctgattggtgtacctgaaagtgatggggagaatggaaccaagttggaaaacactctgcaggatattatccaggagaatttccccaatctagcaaggcaggccaatgttcagattcaggaaatacagagaacgccacaaagatcctcctcgagaagagcaactccaagacacataattgtcagattcaccaaagttgaaatgaaggaaaaaatgttaagggcagccagagagaaagaaatacaaactaccatcagagaatactacaaacacctctacacaaataaactagaaaatctagaagaaatggataaattcctcgacacatacactctcccaagactaaaccaggaagaagttgaatctctgaatagaccaataacaggatctgaaattgtggcaataatcaatagcttaccaaccaaaaagagtccaggaccagatggattcacagccgaattctaccagaggtacaaggaggaactgaagacatttatgcagtgtctccaggcttttcagttaccaacccctcccctcgggcaagtcacacaggcacccacggctgctggaaacgattgtggtcagtggatatgggcagttatgatgtcgtctctttgtggggcactcacagtatccaaggtggccactagcatgcctcttctccatgcatttgatctcatcataattctgtcacaccatgttgggagcttggccccctgcccacaatgcagatcagcagtccagcagagcttcctctactgcttcaggggtgagacagcagtagctgtgtcaaggaatcccagctggtgcctagaaggtgaaggagagtcgcaggctctggagctttgggctgagcaggcccacacagatgttgtcagaaacaggaaatataaaatttcgagcaaactgcatgttaagtacatgaaggataagaacaatagcaagcctttaggccgttggggagtaccaatgggcgccttgctggatcagaaacgcagcagacacagatctggaggggtggaagtcaatggcgtgtctgccatggcggcaaacagctga

SEQ ID NO: 120234 - DNA, 885 bp, Homo sapiens
atgagaaacctaaggaatattcagaaggcaaaagcaactataaacttgggaatatcctttgatgaaggcttgaaggggtttatgtggtccagaatagaggcagctcctcttccaaacaccaggtggtgtctgccacatggctactcaggtcctgcgaactctggtggctgctactacatcactacagggatgtcctgctggctctcagatctctatccaagacatgatggtgtccatgttggactccaaggcaaggacctggagcatgacattccagtggacctagggtccaggcccacctctgtggacccagtttccaggtctgccccagggccccagggccccaaggctccagtggactcagggtccaggaccactccagcaaaccctggtgctggaccatcccctgtagacccaagctcccggccagcccctgtggcttcaggctttagactcatcatgatagaccaaaacaccaagctaattccagtgccaggttggcccctgcgactcaggctcaagatctacctcagcagtaggtcagcctctttggactcaggctccaggtttgcccctgtggacacaaattttatacctgtccccacagaccgaggccatagccatgcccctgaagacccagttgacaggctaacctcagtggacccaacaaaggaaaaaaactggatggagaatgagtttgacaagttgacagaagtaggcttcagaaggtcggtaataacaaacttctctgagctaaaggagcatgttctaacccatcgcaaggaagctaaaaaccttgaaaaaaggttagatgaatggctaagtagaataacttgtgcagagaagagcttaaatgacctgatggagctgaaaaccacagtatga

SEQ ID NO: 120235 - DNA, 1935 bp, Homo sapiens
atgagccctgtgacactttgggtgagaacctccagcagaggtgaggaccggtgtggaatgtgcacccctggccgtgacacaggatttgcacccataagtggaatgtgtagtaaatatcgcagctgcacgattaatgaagatacaggtcttggactggccttcaccatgcccatgagtctggacacaaagcacatccccaactttggaaaggtgcacgggtacatcatgcgacatcataaaaacgaagatacaattccttggaggaggaacaccaaaaaggaggaagctagaggaacacagcccctggaggctgatgatcaaaatcctggctgggaagatgggaagccaggatccctagagaatgaaggaagacgcagccataggggcaatccagccccagacatgccccagcctcccaaggaagacctcttcatcttgccagatgagtataagtcttgcttacggcataagcgctctcttctgaggtcccatagaaatgaagaactgaacgtggagaccttggtggtggtcgacaaaaagatgatgcaaaaccatggccatgaaaatatcaccacctacgtgctcacgatactcaacatggaaagaattcttaaaaagacatcatttaccattatccatccatctgccatggagagatgtcccgtgctgaacttacagataagggactctctctggaatcattgcttcagtttagcaacgacagtccatagatttcaccccgtgggcagacatgctttgaagaaaatgtacaagcttccatcagcttacataaatgtcagcatcactaaatacacacaaagattcgcccttacatacatttcttgcgtcttccacagaaatgctgcttttgtggcagtcccaggcgaaggtcgctgctgtgcaggggttgatgtgccagctcccatgtccttgaggtcaccaggacctcactggccccaggagcatggggctctgtggatctcttgtacagtacgtgggatggcgagctgccttgggcagctctgccgagtttccatgagagtgagagcgaacattggaaaggttcaaaaaccccggctgagaattagcaatgggaaaggcctccacacacagtctgagctctctggctctgcatacctggagaaaggctggcgtggagctgctccaggactggactccaggaatgagaaagggacagagggggcccgggactcgggaacacccgggcgccagtcccagacgctccaaaggggcccaccgggaccggtgcctggaagcagtaagattgctccacaaaccctcactagacaaggctcaatgacagcttccaggaaactggtcctgcttctgcctgaattttgtgaaagaaccggagagcagagcggacaactctacccaccctccccactcctagttgaatgggtcatgcctgctgggacttccagcacagtggacccacttctgcctgaactctgcagacgttgggaaagacaggcactaagtctgtgcagactttaccgccagaggacttctgtttctatcaaggctctttgcgatcacacagaaactcgctcagtggccctttcaacctgccaaggcttggaatgcaactcctcaccagcaaggaaacaaaactggatggagaatgagtttgaagagttgacagaagtaggcttcagaaagtcagtaataacaaaattctccaagctaaaggagcatattctaacccatcgcaaggaagctaaaaaccttgaaaaaaggttagacgaatggctaactagaataaccagtgtagagaagagcttaaatgacctgatggagctgaaaaccacactacgagaacttcatgaagcatacacaagcttcaatagccgatttgatcaagtggaagaaagaatattagtgattgaacatcaaattaatgaaataaagtga

SEQ ID NO: 120236 - DNA, 1158 bp, Homo sapiens
atggagatgtatgaaacccttggaaaagtgggagagggaagttacggaacagtcatgaaatgtaaacataagaatactgggcagatagtggccattaagatattttatgagagaccagaacaatctgtcaacaaaattgcgatgagagaaataaagtttctaaagcaatttcatcacgaaaacctggtcaatctgattgaagtttttagacagaaaaagaaaattcatttggtatttgaatttattgaccacacagtattagatgagttacaacattattgtcatggactagagagtaagcgacttagaaaatacctcttccagatccttcgagcaattgactatcttcacagtaataatatcattcatcgagatataaaacctgagaatattttagtatcccagtcaggaattactaagctctgtgattttggttttgcacgaacactagcagctcctggggacatttatacggactatgtggccacacgctggtatagagctcccgaattagtattaaaagatacttcttatggaaagttggggctaagaagagggacacctttaaaggaacacaactcctcaccagcaagggaacaaaactggatggagaatgagtttgacaagttgacagaagtaggctctcagaaggtcggtaataacaaacttctctgagctaaaggagcatgttgtaacccattgccaggaagctaaaaaccttgaaaaaaggttagacgaatggctaactagaataaccagtatagagaagagcttaaatgacctgatggagctgaaaaccacagtacgaaaaacttcatgaagcatacacaagcttcaatagccgatttgatcaagcggaaaaaaagatatcagtgattgaagatcaaattaatgaaataaagcaagaagacaagatgagagaaaaaaaaatacaaactaccatcagagaatactacaaacacctctatgcaaatatactagaaaatctagaagaaatggataaattcctggacacatacactctcccaagactaaaccaggaagaagttgaatctctgaatagaccaataacaggatctgaaattgtggcaataatcaatagcttaccaaccaaaaagagtccaggaccagatggattcacagccaaattctacagag

SEQ ID NO: 120237 - DNA, 2199 bp, Homo sapiens
agttttggaggctggaaaggcaaatgttattttaccaaaaagttcaccaagtggaataactcatgtgattgccagtaatgcaagaattaaagctgagaaagaaaaagataactttaaggctccattttatccaattcagtatctaggggattttcttttagagaaagaaattcagaatgatgaagattcccaaaccaattctgtttggactgaacatagcaatgaagaaacaaacaaagatttcaggaaagatgcaggatttcttgaaatgaaaggtgccttaagagagaccatgtatagaacccagaaagaaatgaagaattctatttttgctgaatatgccaaagaatcaaaagccatggctattaagacagatgtggatgttgttgaaataaaaaataccttaaggaagcacatatatagagctcaggctgtcagatacaactgcattagaatagataaacaaccagtgtacaacgtagaggttaaaaatgctgaatttcccagaggtgtattaaatttaattgaaagcctcatagaaggacatttttttaaagaagcaattgaggaactttccactttgcaggcacattatatccctcctgtatgcgttcttcatgcccttctagagaacgttctacaggaacacaactcttcaccagcaaaggaacaaaactggatggagaatgagtttgaggagttgacagaagtaggcttcagaaggttggtaataacaaacttctccgaggtaaaggaagaaagtcgaacccaacccaaagaagctaaaaaccttgcaagaagagacacacataggctcaaaataaaaggatggaggaagatctatgaagaaaatggaaaacaaaaaaaggcaggggttccaatcctagtctctgataaaacagacttcaaaccaacaaagatcaaaagagacaaagaaggccattacacaatggtaaagggatcaattcaacaagaagagctaactatcctaaatatatatgcacccaatacaggagcacccaggttcataaagcaagtccttagagacctacaaagagacttagactcccacacaataataatggaagactttaacaccccactgtcaacattagacagatcaacaagacagaaagttaacaaggatatccaggaattgaactcagctctgcaacaagtggacctaatagacatctgcagaatgctccaccccaaatcaacagaatatacattcttctcagcaccacatcacacttattccaaaattgaccacagagttggaagtaaagcacttctcagcaaatgtaaaagaacagaaattataacaaactgtctctcagaccacagtgcaatcaaactagaactcaggattaagaaactcactgaaaaccgctcaactgcatataatctgaacaacctgctcctgaatgactatggggttcataacgaaatgaagtcagaaatcaagatgttctttgaaaccaacgagaacaaagacacaacataccagaatctctgggacacatttaaggcagtggaaatacaaactacccatccagagaatactacaaacacctctatacaaataaactagaaaatctaggagaaataaggattaattccttgacacatacaccctccccaagactaaacccaggaagaaattgaatctctgaatagaccaataacagggctctgaaattgaggcaataattaatagcttaccaaccaaaaaaagtccaggaccagatggattcacagccaaattctaccagaggtacaaggaggagcttgtacccattccttctgaaactattccaattaatagaaaaagagggaatcctccctaactcattttatgaggccagcatcatcctgataccaaagcctggcagagacacaacaacaacaaaaaaagaattttagaccaatatccctgatgaacattgatgcaaaaatcatgaataaaatactggctaaccaaatccagcagcacatcaaaaagcttatccaccatgatcaagtgggcttcatccctgggatgcaagtctggttcaacataggcaaatcaataaatgtaatccagcatataaacagaaccaaagaccaaaaaaaaccacaggattatctcaatagatgcagaaaaggccttctacaaaattcaacagcccttcattctaaaaactctcaataaattag

SEQ ID NO: 120238 - DNA, 485 bp, Homo sapiens
atgacgccgtggcaccggcccttgatccccgtcgacccacgcgtccggtggcgacagcggcggcgagaggatgaacaacaagttcgacgctttgaaagatgatgacagtggggaccatgatcagaatgaagaaaacagcacacagaaagatggtgagaaggaaaaaacggaacgagacaagaatcagagcagtagcaagagaaaggctgttgtccctggaccggcagagcatcccctgcagtacaactacactttttggtactccaggagaacccccggccgtcccacgagctcacagagctatgaacagaatatcaaacagattggcacctttgcctctgtgagttcttggtgaattaatggagtgtgccttgatagttcgttcatgcctgtattgatatgatgtttatttactttcctagtaacctatttaagattctggttttcttaattgactgacctgagtctccggagtcagatttgtt

SEQ ID NO: 120239 - DNA, 747 bp, Homo sapiens
ccagctttccccacacactccctctcccctctgagcctcagttttctcatctgcagagtggggacggtaacaccctttgtcgtagagtttggaggatgcaatgagtttgaaagatgatgacagtggggaccatgatcagaatgaagaaaacagcacacagaaagatggtgagaaggaaaaaacggaacgagacaagaatcagagcagtagcaagagaaaggctgttgtccctggaccggcagagcatcccctgcagtacaactacactttttggtactccaggagaacccccggccgtcccacgagctcacagagctatgaacagaatatcaaacagattggcacctttgcctcctgtggagcagttctggaggttttatagccacatggtacgtcctggggacctgacaggccacagtgacttccatctcttcaaagaaggaattaaacccatgtgggaaggatgatgcaaataaaaatgggtggcaagtggattattcggcttgcggaagggctttggctcccgttgcctgggagaatctcattttggccatgctgggggaacagtttcatggttggggaggagatctgtgggggctgtggtgtctgtcccgcttttcaggaagacattatttcaaatatggaataagactgccagtgaccaagcaaccacagcccgaatccgggacacactttcggcgagtgctttaacctacctgccaacaccattatggaatacaaaaactt

SEQ ID NO: 120240 - DNA, 240 bp, Homo sapiens
ctgagtttccttagcagactaacctcccagcatgccttattggctccatgcaccaggtgaaccaaactgtcaaaatgtgaaccccattttcatattctgctcttttgcttcagaaaacagcagataaaaatctgctggcagagctgtaccagtattccaacttcaacagctccaagccaaacaagcttccgaatggcgtggacttctgtgacatggtgggcaacgtggtccgggctgaga

SEQ ID NO: 120241 - DNA, 419 bp, Homo sapiens
ggaagttttagatttcattcagcaaatagatgaagtctggcgtgaaatgagatggatcatggatgctctacagtatgcaagatacaaacaaccagtttctggcttgcccatcactaagctgatagacccctcagatgagcagagcctaaagaagatcaattctacatcatcatcacatatacactgtcttccatccccacccccatccccagagatgcacagaagaaagacagtgagtgattcacagccctgctctgatgaagaagcctgctcagaagtcttcctccccaccaacagtgactacgactccagcgatgccctgagccccagagacctggacctggtctacctatcatctcacgacattgcgcagcagacccttagcggcctaagcggcagcgcccccgacgtcctgcaag

SEQ ID NO: 120242 - DNA, 717 bp, Homo sapiens
gatattctatcctatcacaaaaggagtcatcagcgtctctttcctggattatatctgggttacctaaagctctgtagctctgtggatcaaatcaaagttcttgttacccaaaagttgcccaacattctctgccacgtgaagatccgtgaaaacaataatatttctagactaactgtaacctggttagaatgtgggctttttcttcgattaactgttgtattttttaatgagcaaggtagtccttcagaatatggaggtggacggcagctaggatttgaaaccagttcaaaatgtgtcagcatttcaggaggtgacagcagggcattaaacgaagcacaggccccttctaagtgcggggtcaaatgcactgttcctatgcctgtgaagcaggctctagctaagactatatttttcctaacctcagtttctggcttcgcagattcacagccctgctctgatgaagaagcctgctcagaagtcttcctccccaccaacagtgactacgactccagcgatgccctgagccccagagacctggacctggtctacctatcatctcacgacattgcgcagcagacccttaacgggcctaagcgggagcgcccccgacgtcctgcaagtgcacgacgtgaaaacccctctgggggccggccaagaatccccaaggcgagggcccaaatcccgatcactcatgtgcccaggttctccttaacctga

SEQ ID NO: 120243 - DNA, 1317 bp, Homo sapiens
ttattctgtcaagcttaggctgttttcttcttcttcttcttcttcttcttcttcttcttcttcttcttcttcttcttcttcttcttcttcttcttcttcctcctcctcctcctccttcttcttcttctctttcttcctcttcttcttttttaagctaaaggaactacgtttggtaatatagccattgaatccagaaaactgagaatcctgcccacttttctctccagttaaccttgatatgccataaaccttcaaggataagagatggaaagtgaactgggccaggtctacttcacgacagcagttactggaaagtgccagaactaaatcatgggcagagagggaaggaggcactaggtggagggcatggtaaaacagaacctgatgtctcagattccccaagatcttaatcagagtcactctgtgctgttttactgtctgcattcctacctttctccagccacttcccattactttatctcccacttgaaaaggtttcgttttttcataatctgaagcagttatcttgagcatatggtagtacttcctcggtactccatattccaaggcagcattcctttttcctcctgcatgtgtaggaaggtgctggtaatgtactctctgaggtgagaggccattgccaatggtggggttcatggggttggagggccccgacggaggcacaaagctgtctgtatagctggaaaatccatgcctggtgctggggaggcagtaggcagagctgctgtctgggttggaaggaatcgtgctttggtgtacagtgcttggaggaagcggttgaggtctgtgaacggtgctgctgggatctgacacagctctcttctctgctgatttttgtgtgtgtgtgtgtgatactttcagaataagattatcctggaccccatgacgttcagcgaggccaggttccggccgtccctggaggagaggctggagagcatcatcagcggcgcagcgctgatggccgactcctcctgcacgcgagacgaccggcgcgagaggatcgtggcggagtgcaacgccgtgcggcaggcgctccaggacctgctcagcgagtacatgaataatgtaagtcttgggatctccattctcatgtcttggtggattctgttctgcaatcgtgttgctctggtgattagtgatgataggagtggtggtgcttctagcagcagcagcagcagcagcagcctcaatgcaaagccatagcaataatgcagcttcccctggcccataggtaccactgggcctacacaatgggcactgtgcctcagaaatccaggaccatattcgggacaccat

SEQ ID NO: 120244 - DNA, 420 bp, Homo sapiens
ttaactagggggcagtgcccaactgtccccaagccagaagtaagaggtatgcatcttcacgacctcaatgacaaacttgatcatataaaataggcagcattcattgacctggttcaggctacgccggaggtggactaccaccataatagtaactgaaggaccttgcatggaaatattggcttcattctggtgaacaataatttcttccaagtaagtccagtggtaaaagaatttcctgccaaattgttctgcaaaggagcttttcttcttcttcttcttcttcttcttcttcttcttattattattattattattattatactttaagtttagatctgatggttttataagcatctggcatttccgctgcttgcattcattctctctcccactgccctgtgaagaggtgtcttccaccat

SEQ ID NO: 120245 - DNA, 582 bp, Homo sapiens
tcatttatcttcactgagtaggaactgattcttcccagatatcatatcccctgctgacctggaatgtaagctccaccaagacagggatctttgtcgtttttgttcaccctgaatgtcctgctgtactccaagtgcctcaagtcctcctcccaggcaggatccattgatggcagccacaataggctttgtggacttttcaagtttctcaactattctctgtgcttcttgtgatagctgtgttacttctgccattgtttgatttcctctagaaacctcaggagttgattcgtaagaaataacagtttcttcctgttcgtcaacactgttctttgtattttcttcaggatgctcttctggtttatgatttgcggtctgtgtttcatcttgagggctggttaggttcttgtttcttttggtgttttgttgttgttgttgtttatattttttacttctttctcttttctcttctttttttttcttcttttcttcttcttcttcttcttcttcttcttcttcttcttcttcttcttcttcttcttcttcttctttcttctcctcctcctcctccttcttctgtgccat

SEQ ID NO: 120246 - DNA, 1716 bp, Homo sapiens
ttttttgcggttctgcaaactttttttaattttaattttatttttttacaatgtaccatgaacatcttttccatgcacatgggtgaaaatcctctactaaaatatagagcgctgtagttgggtcaaaaggctgctggtaacgagattgacatctaaagcaaaaatatcagcttaaggttaaagcattggggcctggcaaataccctaccagggaaaagcaggactggcaatattcccatcagagaaatcagaattaaaggccaaaggcattaaacctatgggacattcttataagtctttctggcccctacctccacccctcactcccctgacaccccgttgtccccttggggcgaaatggatcctgtacatctctttgcatcccaatgaaaaccacccattttctgttttttcccttagctccctcttgaacccttgaaaacatctcccacattctctcatcatctcctcactgctcagatgcctttcctgtaagtcctcctgagagtccttgggggaaaatcgtccggtccccctggtccggtttttcttttttgcctttccggggccacataatcttcaagccgggcgcttttcggcggcccgcggctggccctctggctttgcctgggaggctggcttgccctcgccttgtggcttgccctcaccttcggacttgccctgcttttcctggcttcccttatcttccagttgtccctcatcacctggctctccctcagcctttcgctttccctcgcattctgtcttcccctccgcgtctggcttttcttcctcgtctgactttccttcatcatcaggctctacttcatcttctggctttccctcgttttccaggtttccttcatttttattgtagggtttttccatgtcgagatttctctttttcctgtctctcaacccttgtgggcccctgtccatgcagccccctgctttcacggacctgcggggattctggacaggttgctcttcctttgcaggcctcccagagcgctgggaacaacagacgcgcagactgattctctcttcgttcacttcagactcattattgagctgctctaacaagtttttcattacagttgttttccgttcaatggagaaaaggtagtcttttccacaaatgatactggaaatcaactggacttgctgataggcactctccttggaatcttccctcaactgaagttccctaattttcctccttagctctctcatctcctccatgaaccgttccatatcatctccatctccatctatcatatcaatgttatcgacaagcctattgggcacatcctctccaaaacccggggcaggtggagcccaaacccctttaacatttcctccaggctcctggtattcaccacctcctaaagcgggggcttcattctgcactggggccttctccacaactttgttttccttggggacattttccatgttgagtttttttcctgttttttttttttttttcttcatattcattttcttcttcttcttcttcttcttcttcttcttcttcttcttcttcttcttcttcttattattattattattattattatactttaagtttggtgcaaggggtgggctcccaagggcttgtgcaacccttcccctggctttgcagggtgtaacctccatggctgttctcatggtctgaagttgagtgcctatggcttttctaggctcaacgggcat

SEQ ID NO: 120247 - DNA, 369 bp, Homo sapiens; identical to SEQ ID NO: 117836

SEQ ID NO: 120248 - DNA, 394 bp, Homo sapiens
acaaacatactccttaagaagagcaaccccaagacacataattgttggattcaccaaggttgaaatgaaggaaaaagtgttaagggcagccataagcccatcagactaacagtggatctctcggcagaaaccctacaagccagaaaagaggggggaccaatattcaacattcttaaagaaaagaattttcaacccagaatttcatatccagccaaactaagcttcataagtgaaggagaaataaaatcctttacagacaagcaaatgctgaaagattttgtcaccactaggcctgccttacaagagctcctgaaggaagcactaaacatggaaagaaacaaccagtaccagccactgcaaaaacatgccaaatggtagagaccatcaatgctat

SEQ ID NO: 120249 - DNA, 381 bp, Homo sapiens
  misc_feature (1)...(381): n = a,t,c or g
caaagatactcttcgagaagagcaaccccaagacacataattgtcagattcaccaaggttgaaaggaaggaaanaatgttaagggcagccagagagaaaggtcgggttacccacaaagggaagcccatcagactaacagtggatctcttggcagaaactctacaagccagaagagagtgggggccaatattcaacattcttaatgaaaagaattttcaacccagaatttcatatccagccaaactaagcttcataagtgaaggagaaataaaatcctcaaatgctgagagatttgtcaccaccaggcctaccttaagagacctcctgaaggaagcactaaacatggaaaggaacaaccggtacctgcccgggcggccgctc

SEQ ID NO: 120250 - DNA, 762 bp, Homo sapiens
atggacaaacttctccgagctaaaggaggaagttcgagccatcgcaaagaagttaaaaaccttgaaaaaagattagacgaatggctaactagaattaccaatgtagagaaggccttaaatgacctgatggagctgaaaaccatggcaggagaactatgtgacgaatgcacaagcttcagtagccaatttggtcagctggaagaaagggtatcagtgattgaagatcaaatgaatgaaatgaatgacgaggagaatggaactaagttggaaaacactctgcaggatattatccaggagaacttccccaacctagcaaggcaggccaacattcaaattcaggaaatacagagaatgccacaaagatactcctcgagaagagcaactccaagacacataattgtcagattcaccaaagttgaaatgaaggaaaaaatgttaagggcagccagagaaaaaggttgggttacccacaaagggaagccaatcagactaacagctgatctctcagcagaaattctacaagccagaagagagtgggggccaatattcaacattcttaaagaaaagaattttcaatccagaatttcatatccagccaaactaagcttcataagtgaaggagaaatcaaatcctttacagacaagcaaatgctgagagattttgtcaccaccaggcctgccctacaagagctcctgaaggaagcactaaacatggaaaggaacaaccggtaccagccactgcaaaaacatgccaaattgtaa

SEQ ID NO: 120251 - DNA, 612 bp, Homo sapiens
atggccgaatacgaacagctccagtctacagctgccagtgtgagcgacgcagaagacggaccaaatctacatctgattggtgtacccgaaagtgatggggagaatggaaccaagttggaaaacactctgcaggatattatccaggagaacttccccagtctagcaaggcaggccaacattcagattcaggaaatacagagaatgccacaaagatactcctcgagaagagcaactccaagacacataattgtcagattcaccgaagttgaaatgaaggaaaaaatgttaagggcagccagagagaaaggtcgggttacccacaaagggaagcccatcagactaacagctgatctattggcagaaactctacaagccagaagtgagtgggggccaatattcaacattcttaaagaaaagaattttcaacccagaatttcatatccagccaaactaagcttcataagagaaggagaaataaaatactttacagacaagcaaatgctgagagattttgtcaccaacaggccgcccctaaaacagctcctgaaggaagcactaaacatggaaaggaacaaccggtaccagccactgcaaaaacatgccaaattgtga

SEQ ID NO: 120252 - DNA, 1180 bp, Homo sapiens
ggcggtctatgaatgtcatcgaaatgtcgataacttatccctagaagaaagaaatcctctaggatatgctgaaccttctgaaaatgattttcttacctctatttacaagtatctcaattttaaaatcacacttctcaaagattcatgtggactcctgcttctgctggtacagtccatcactggcaaatctgtggcaagacgttcagttccagagcctccatgtcaaggccagtctactggcttcaagccaaggctccacctctgggggcagggcacagacgaacaaaaagacagcagtaacctctgcagacttaaatgtccctgtctgacagctttgaagagagtagtgtttctcccagcacgcagctggagatctgagaacgggcagactgcctcctcaagtgggtccctgacccccgagcagcctaaatgggaagcaccccccagtagtgcacgactgacacctcacatggccggaagcctcaagagccaatgcgatcaactggaagaatgggtatcagcgatggaagacgaaatgaatgaaatgaagcgagaagggaagtttagagaaataagaataaaaagaaacggacaaagcctccaagaaatatgggactatgtgaaaagaccaaatctacatctgattggtgtacctgaaagtgacggggagaatggaaccaagttggaaaacactctgcaggatattatccaggagaactttcccaatctggcaaggcaggccaacactcagattcaggaaatacagagaacaccacaaagatactcctcgagaagagcaactccaagacacgtaattatcagattcaccaaagttgaaatgaaggaaaaaatgttaagggcagccagagagaaaggtcgggttacccacaaagggaagcccatcagactaacagcggatctctcggcagaaactctacaagccagaagagagtggggatcaatattcaacatccttaaagaaaagaattttcaacccagaatctcatatccagccaaactaagcttcataagtgaaggagaaataaaatactttacagacaagcaaatgctgagagattttgtcaccaccaggcctgccctaaaagagctcctgaaggaagcactaaacatggaaaggaacaaacgataccagccactgcaaaaacatgccaaaatgtaa

SEQ ID NO: 120253 - DNA, 459 bp, Homo sapiens
atggatgtgatggaaatgtgcaacttccgtgttgcaatcatggttgtgaatgttaacactctgaagagagcagcagatctcccagcacagcacttgagctctgctaagggacagactgcctcctcaggtgggtcccggacccctgtgcctcctgacagggagacatctcccagcaggggtcaacagacacctcatacaggagagctccagctggcatctgacagggtcacaagggatcaaaactggatagagaatgagtttgacaaattgacagaagtaggcttcagaaggtgggtaataacaaattcctctgagctaaaggagcatgttctaacccaatgcaaggaagttaagaacattgataaaaagttacaggaactgctgactagaataaccagtttagagaagaacatatgtgacctggtggagctgaaaaaacacagcacaagaacttcatga

SEQ ID NO: 120254 - DNA, 1014 bp, Homo sapiens
ttacattttggcatgattttgcagtggctggtaccggttgttcctttccatgtttagcgcgtccttcaggagctcttttagggcaggcctggtggtgacaaaatctctcagcatttgcttgtctgtaaagtattttatttctccttcgcttatgaagcttagtttggctggatatgaaattctgggttgaaaattcttttctttaaaaatgttgaatattggcctccactctcttctggcttgtagggtttctgctgagagatctgctgttagtctgatgggcttccctttgtgggtaacccgacctttctctctggctgcccttaacattttttccttcatttcaactttggtgaatctgacaattatgtgtcttggagttgctcttctcgaggagtatcttcgtggcgttctctgtatttcctgaatctgaacgttggcccgcctttctagattggggaagttctcctggataatatcctgcagagtgttttccaacttggttccattctccccatcactttcaggtacaccaatgagacgtagatttggttccttgaaggccatgtggactataaggtctaacaccctgttgatgtagccaaattcattgtcataccaggaaatgaggttgacaaagtaagtggtaattgagggcatttcaccagcattgaagagaggaagagcaggtgtcatggaggattccacagcataatcaatgccagcatcaacccatttgattttggtgggatcttgctcctggaagatggtgatagtattgccattggtgacacactttctgttcacagccttgacagtgccatggaacttgccatgggtggaattatactggaacatgtagactatgtagttgagatcaatgaaggagtcattgatggcgacaatatttactttgccagagttaaaagctggtgctgcatgagaagctgcagtaactgcagtcaactgaggacctatgacatggtctactggggggttgattggaggttgcat

SEQ ID NO: 120255 - DNA, 5971 bp, Homo sapiens
  misc_feature (1)...(5971): n = a,t,c or g
ttacattttggcatgattttgcagtggctggtaccggttgttcctttccatgtttagcacttccttcaggagctcttttagggcaggcctggtggtgacaaaatctctgagcatttgcttgtctgtaaagtattttatttctccttcacttatgaagtttagtttggctggatatgaaattctgggttgaaaattattttctttaagaatgttgaatattggcccccactctcttctagcttgtagggtttctgccgagagatcggctgttagtctgatgggcttccctttgagggtaacctgacctttctctctggctgcccttaacattttttccttcatttcaactttggtgaatctgacaattatgtgtcttggagttgctcttctcgaggagtatctttgtggcgttctctgtatttcctgaatctgaatgttggcctgccttgctagattggggaagttctcctggataatatcctgcagagtgttttccaacttggttccattctccccatcactttcaggtacaccaatcagacgtagatttggtcttttcacatagtcccatatttcttggaggttttgctgatttctttttattcttttttctctaaacttcccttctcgcttcatttcattcatttcatcttccatcgctgataccctttcttccagttgatcacgtgggctcctgaggcttctgcattcttcacgtagttctcgagccttggttttcagctctatcagctcctttaagcacttctctgtattcgttattctagttatactttcttctaaatttttttcaaagttttcaacttctttgcctttggtttgcatgtcttcccgtagctcagagtaatttgatcgtctgaagccttcttctctcagcttgtcaaagtcattctccatccagctttgttccgttgctggtgaggagctgcactcttgaattaacaggttttgaattataaatataatctcctctgggctaaaaatataatccattatttgcattagcaggaggatcaaaaagtacagggaaacatccaccagtgcttggccaaaccagtatgcagaagggtagaggcctgaaatccgtagctgggaatgagctttttttttgtagtcaccaatgctgctcattgcaatgtatggagtgaaagaggctgccatcggtatccagaagaaggtgttacttcggtacccatactcataatccatatgctcttcaaaaaatgtgcttctgtcagtctgaatgtgttctgacgaattaaaaattccaagtagtccattgctaatgacatccaggaggacaggaaagcaattcagccgttttgtattacatgctattgaaaatctgtgatccttttcatcacctgacacaatgatagcaccattgtaagatgggtcatctgtgccatttctagttccaaaggcatccacttctatagctatgttctgtcgcctcagtgaatgtaaaaagttatcaatggttgaccctgtcttattgatgaccagtaaatgggtcagaggatcctgtggttgttgtcctggtgagaggaagtatgtatttggagacagttcccacgggtaacttttctgatatgactcgtagaatagatgttccaaaagttgagggataaagctaataccaaaaagcaataatatagtccacaggctttttctttctttctttaactttaggaagcgaacttttgctattgcacagacctgctgcctccagagcgccacgccactgattgttttccttgtttcgtggaaggaagacaaaacttgttccagctcaacaaggcttcctatatcttttgccccatcagtttgtaattgtccccaaattccaatatctgattcatcaatagttgattttccttctaatttcagaaacacctcattcaaagttgttatggaaacaccataatcctcaatggccttggttagaacatctatcaagatccctgtaaagttctggaaatttgtttggtcctttccaaaaggcaaaattatatacaaggtttttcttcactttggggctggtcaaattttgggcatcagagatggtgcctgcttaaaccagtgatgttatactcttctggatcacacctttcattcaggatgcaaaacttaaatggtaggcctatgccccatttcttcttaaggaacagagaagagcctgcacacttcagcttcccattggatatgaacaccttcctgtccgccagaatgtcagcctcatctataaactgggtgctgaagagaattactctgtctgatttcccctctttcaggagattccatattcggtgccttgaaagaggatccaatccagcagtcggttcatccaatagcaaaacttgaggatctcctaaaatggcaatcccaaaagttagtttcctattttgtccaccacttaagttttgagcaaggatgtcttgaatattttccatttctaattcctgtacaactcgttgtacctctttctccacttcatgtggcaaaatcccttttattttagcaaacagcctgaggttttctttcacagtgagaaatccaaattgcacattggattgtggacaaaatccagtgaacttgctgatattttctatatcagccattcttgaaagtgtgtgattatagacagtgactgaacctttcaaagcttctactctctcacacttccctgcatattcttttttaagatttttgattctgatggcttctttcccacagaattctggagacactggttcaaaacagtcattaggtgtaggatcagaatctgtttcattctcaaggaccacatgattagcccttccgtgttgaaaccaaaaacaggatttcaggaaaaacaagggagaacatcgatgtccatattcagcgggcaaaattttgtcaaaatataatgtcaataccaaatacagaagggtgtcaaaaaccaacatgaaaagagtagctattatgaggtatggattttgtgaagaatccaagtgggcattagaattcacatcatagtccaaatgtataagctgggccatcccaacagtgaaggcaaaggggctaagaagacacaaagtccattccaaaaatgcaggaagacgtgtatacaatgctgggaatcccaggatcccccaaaagacaataaggagaaacacaaccaagcccgtaaggaaaggtttctttatcaacacactcatcaggaaagctaaagttatcaaagacaggccatagaggagaaagagggtgaagaccatcacaaaaccagtcaggacgacaatttgtgcagattttacaataagagccattaaagtggccatgataaggatgaagccagcatacatcaaaccccaggaaagccagaatgctgactctcggagtcccatcattgtcatcaatgacgtaatgtattgtctttcttgtgtaacattgactgatacatagtatataaatgtagaaaaagaaataatgcaaaagaaaatgaaaaaatcagttgcaactcctccttgggcaacaaaaggtaatatcttcatatgtacaccagtaactgacatcagctgttccatcactgaatgatttgttgcgatttctatgatagcagcattaatggcagcttgaaaagctacaaagcctttctcccagaactctgaaccttcacacttcattttttcattcactgcttgacagtgagctgaatggtctctgtgctctttcatcatggggattctatgtccccaagaaaacttcaaatggtaggagaaggtatcagtaaagatgactctcactgcgtctattgaatagttcaaatccaattcatccatgcttttttcatcaggccaccccatgattgttcttcgccacattggctgctgagttcttttggcataaccgatcaggtcttgatggctagtctctaagctatcaacaaggtctgtcttttcattctccattttttgagacagttcttgcagagaagagcccatgtttgctgacccacgctcatgcgtctcttgctcattttgacctgtttccttcacagagcccagcaatgtcagatccactagactgaaattctcactgccagcacagcagtctgaagtcgacctggggtgctcgagcttggtgacgggaggggtgtctgccattactgaggcttgaataggtggttttcctctcacagtggnnnnnnnnnnnnnnnnnnnnnnnnnnnnnnnnnnnnnnnnnnnnnnactgcaaagtcactgtagccagactgcctctctatattactcctctctgggcagggcatcactgaaagaaaggtagcagcctcagtcagggacttatagataaaactcccatctccctggggcagagcacctgggggaatggggcggctgtgggtgcagcttcagcgcacttaaacattcctgtcttctggctctgaagagagcagcagatctcccagaaaattgcttgagctctactaagggacagactgactccttaagtgggtccctgacccccgtgcctcctgactgggaggcacctcccagcaggggtaaacagacacctcatacaggagagcaccggctggcatctggtgagtgcccctctgggatgaagcttccagaggaaggagcaggcagcaatctttgctgttctgcagcctccactggtgttacccaggcaaacagagtctggattggacctccagcaaactccagcagacctgcagcagaggggcccgttagaaggaacactaacaaacagaaagcaagaacatcaacatcaacaaaaaggaggcccatgcaaaaaccccatccaaaggaccacaactcttcaccaggaagtgaacaaaactggatggagaatgagtttgacaaattgacagaagtaggcttcagaaggtgggtaataacaaacagctctgagctaaaggagcatgtgctaacccaatgcaaggaagctaagaaccttaataaaaggttacaggaactgctaactggaataaccagtttagagaagaacataaatgacctgatggagctgaaaaacacagcacaagaacttcatgaagcatacacaagtatcaatacccaaatcgatcaagcagaagaaaagatatcagagattgaagatcaactcaatgaaataaaaccaaatctacgtctgattggtgtacctgaaagtgatggggagaatggaaccaagttggaaaacactctgcaggatattatccaggagaacttctccaacctagcaaagcaggccaacattcaaattcaggaaatacagagaacaccacaaagatactcctcgagaagaacaaccccaagacacataattatcagattcaccaaggttggaatgaagggaaaaaatattaagggcagcccagagagaaaggtcggggttacccacaaagggaagcccatcagactaacaacagctgatctctcagcagaaacttctacaagcgagaaaagaatgggggccaacattcaacattcttaaagaaaagaatttttcaacccagaatttcatatccagccaaactaagcttcttcataagtgaaggagaaataaaatcctttacagacaagcaaatgctgagagatttttgtcaccaccaggcctgccttaacaagagctcctgaaggaagcactaaacatggaaaggaaaaaccagtaccagccactgcaaaaacataccaaattgtaaagaccatcgacactatgaagaaactgcatcaacttaacgagcaaaataaacagctaacatcataatgacaggatcaaattcacacataacaatattaaccttaaatgtaaataggctaaatgctcgaattaaaagacacagactggaaaattgcataaagagtcaagacccatcagtgtgctgtatttaggagacccatctcatgtgcagagacacatataggctcaaaataaagggatggagcaatat

SEQ ID NO: 120256 - DNA, 2468 bp, Homo sapiens
atgggagactttaacaccccactgtcaacattagacagatcaacgacacagaaagtcaacaaggatacccaggaattgaactcagctctgcaacaagcagacctaatagacatctacaaaactctccaccccaaatcaacagaatatacattcttctcagcacctcatcacacttattctaaaattgaccacataattggaagtaaagcactcctcagcaaatgtaaaagaacagaaatcacaacaaactatctctcagatcaccgtgcaatcgaattagaaatcaggattaagaaacttactcaaaaccacacaactacatggaaactgaacaacctgctccggaatgactactgggtaaataatgaaatgaaggcagaaataaagatgttctttgaaaccaacgagaacaaagacacaacgtaccagaatctctgggacacatttaaagcagtgtgtagagggaaatgtacagcactaaatgcccacaagagaaagcaggaaagatctaaaatcaacaccctaacatcacaattaaaagaactagagaagcaagaggaaacaaattcaaaagctagcagaaggcaagaaataactaagatcagagcagaactgaaggagataaagacacaaaaaacccttcaaaaaatcagtgaatccgggaggaggagccaagatggccgaataggaacagctccggtctacagctcccagcgtgagcgacgcagaagacaggtgatttctgcatttccatctgagggcacagacaaacaaaaagacagcagtaacctctgcagacttacgtgtccctgtctgacagctttgaagagagcagtggttctcccagcacgcagctggagatctgagaacgggcagactgcctcctcaaaaggaaaactaacaaccaggaaaggacatctacaccgaaaacccttctgtacattcaccatcattcaaagacccaaaagtaaataaaacccaccaaagatggggaaaaaaaacagaacagaaaaactgggatattctaaagaagcagagcgcctctccttcatccaaagggaatccggttccttcacccagctaccagaacccacgcttgattggagattgatttttgacgcgctgagagaagaaggcttcagccgatcaaaattactctgagcctacggggggacattcatacccaaagggcaacgatgttgaaaactttggaaaaaaattttagcaagaatgtataactagaataaccaataccagagaagtgcttaaaggagcagctgatggagcttgaaagccaaggcctcgagaaactacgtgaaagaatgcagaacgcctcaggatgccgatgcgatcaacttggaagaaagggtatcagcaatggaagatgaaatgaatgaaatgaagcgagaagggaagtttagagaaaaaaagaataaaaagaaatgagcaaagccttgaaggaattatgggactatgtgaaaagaccaaatctatgtctgattggtgtacctgaaagtgacggggagaatggaaccaagttggaaaacactctgcaggatattatccaggagaacttccaccaatactagcaaggcaggccaacattcaaattcggggaaattacagagaacgcccacaaaggttgcctcctcgagaacagcaactccaagatacacaattgtcagattcacccaaagttgaaatgaaggggaaaaaattgttaaggggcagccagagagaaagggtcggggttacccccacaaaaggggaaacccccatcaggacttaccagcagatcctcccggaagaaactcctacaagccagaagacagagtgggggccaatattcaacattcttaaagaaaagaattttcaacccagaatttcatatccagccaaacctaagcttcataagtgaaggagaaattaaaatactttacagacaagcaaatgcttgagagatttttgtcaccacccaggccctgccctaaaaagatctcctgaaggaagaagcactaaacattggaaagggacaacccggtaccagccacttgcaaaaacattgccaaattgtaaagaccatcaagacttaggacgaaactgcattcaacttaacgagcagcataatcacctgcttaacatcataatgacaggattcaaattcacacataacaatattaaccttaaatgtaaatgggctaaatgctccaattaaaagacacagactgggcaaattggataaacagtcaagacccatcagtgtgctgtattcaggaaacccatctcatgtgcagagacacacataggctcaaaataaagggagagaggaagatctaccaaggaaatggaaaacaaaaaaaggcaggggttgcaatcctagtctctgataaaacagactttaaaccaacaaagatcaaaagagacaaggccattacataatggtaaagggatcaattcaacaagaagag

SEQ ID NO: 120257 - DNA, 603 bp, Homo sapiens
tttcgtgcggacgtggcgggcccctcccgccccagtgccgtggcgttctggagccgggacttttctgatgaagaacaatcagtagtatacgttccaggaatttctgctgaaggaaatgtcagatcaagacacaagctgatgagtccaaaagctgatgttaaacttaagacttccagggtgactgatgcttcaatctccatggagtccttaaaaggcacaggagattcagtagatgaacagaattcctgcaggggagaaataaagagtgcatcattgaaggatttatgtcttgaagacaaaagacgcattgcaaacttaattaaagaactggccagagtaagtgaggaaaaggaagtgacagaggaaagactgaaagctgagcaggagtcatttgagaagaagatcaggcagttggaagaacagaatgaactgatcatcaaagaaagggaagctcttcagctacagtatagagaatgccaagaacttctaagcctgtatcagaaatatttatcagaagaacaagagaagctcaccatgtctctctcagaacttggtgctgctagaatgcaggaacagcagctatataacaatccatacatctga

SEQ ID NO: 120258 - DNA, 424 bp, Homo sapiens
tttcgtgtcgggggtggtggaagaaggaggattcgtttaatcacttataaatggcgccgaagcaggacccgaagcctaaattccaggagggtgagcgagtgctgtgctttcatgggcctcttctttatgaagcaaagcgtgtaaaggttgccataaaggacaaacaagagaaatacttcatacattacagtggttggaataaaaattgggatgaatgggttccggagagcaaagtactcaaatacgtggacaccaatttgcagaaacagcgagaacttcaaaaagccaatcagtaagtttgttttgtgaactgaatattaaggagaaatgcctgtagattaattctggacatggaatgaacaatggagatcatgttggctgccctgcctatataatgatacctcggacctttcagctggtgtgg

SEQ ID NO: 120259 - DNA, 3829 bp, Homo sapiens
atgcagaaagccatccgacttaatgatggccacgtcgcgcccctgggactgctggcgcgcaaggacggcacgcgcaaaggctacctgagcaagcggagttcggacaacacaaaatggcaaaccaagtggttcgcgctgctgcagaacctgctcttctacttcgagagcgactcgagctcgcggccctcggggctttacctgctggagggctgcgtctgcgaccgcgcgccctcccccaagccggcgctgtcggccaaggagccgctggagaaacagcattacttcacggtgaacttcagccatgagaaccagaaagccttggagctgaggacagaggacgcaaaagattgtgacgaatgggtggcagccattgcacatgccagctacaggaccctcgccacagagcatgaggcattaatgcagaaatacctgcacctgctgcagatcgtggagacagagaagaccgtggccaagcagcttcggcagcagatcgaggatggggagatcgagatcgagcggctgaaggcagagatcacatccctgctcaaggacaatgagcgcatccagtccacccagactgtcgcccccaacgatgaagacagcgacatcaagaaaattaagaaggtgcagagcttcctgcggggctggctgtgccggcggaagtggaagaccatcatccaggactacatccggtcaccccatgctgacagcatgcgcaagaggaaccaggtggtgttcagcatgctggaggctgaggctgagtacgtgcagcagctgcacatccttgtcaacaatttcctgcgcccgctgcggatggccgccagctccaagaagcctcccatcacacacgacgacgtcagcagcatcttcctgaacagcgaaaccatcatgtttttacatcagatcttttaccaaggcctgaaggcccgcatctccagctggcccacgctggtcctggctgacctacttgacatcctgctgcccatgctcaacatctaccaagagttcgtccgcaaccaccagtacagcctgcagatcctggcccactgcaagcagaaccgtgacttcgacaagctgctgaagcactacgaggccaagcctgactgcgaggagaggacgttggagaccttcctcacctaccccatgttccagatccccaggtacatcctgaccctccatgacgtcctggcccacacgcctcatgagcacgttgagcgcaacatactggactatatccaaggacatactggaggagctgtgcacaataatgcacgacgaagtgagtgaaaaagagaacatccggaaaaacctggccatcgagcgcatgatcatcgaaggctgtgagatcctcctggacaccagccagacctttgtgagacaaggttccctcattcaggtgcccatgtctgaaaagggcaagatcaccagggggcgcctggggtctctctccctaaagaaagagggcgagcgacagtgcttcctgttttctaagcatctgattatctgtaccagaggctctggagggaagcttcacttgaccaagaatggagtcatatccctcattgactgcactttattggaggagccagaaagcacggaggaggaagccaaaggatccggccaagacatatatcacttggattttaaaatcggggtggagccaaaggattccccgccctttacagtcatcctagtggcctctgccagacaggagaaggcagcgtggaccagtgacatcagccagtgtgtggataacatccgatgcaatgggctcatgatgaacgcatttgaagaaaattccaaggtcactgtgccgcagatgatcaagaggaccagggaggggaccagggaagcagaaatgagcaggtccgacgcctccttatattgtgatgatgttgacattcgcttcagcaaaaccatgaactcctgcaaagtgctgcagatccgctacgccagtgtggagcggctgctggagaggctgacggacctgcgcttcctgagcatcgacttcctcaacaccttcctgcactcctaccgcgtcttcaccaccgccatcgtggtcctggacaagctcattaccatctacaagaagcctatcagtgccattcctgccaggtggctgaggtcgctggagctcctgtttgccagtggccagaacaataagctcctgtacggtgaaccccccaagtccccgcgcgccacccgcaagttctcctcgccgccacctctgtccatcaccaagacatcgtcaccgagccgccggcggaagctgatctccctgaacatccccatcatcactggcggcaaggccctggacctggccggatccctcagctgcaactccaatggctacaccagcatgtactcggccatgtcacccttcagcaaggccacgctggacaccagcaagctctatgtgtccagcagcttcaccaacaagattccagatgagggcgatacgacccctgagaagcccgaagacccttcagcgctcagcaagcagagctcagaagtctccatgagagaggagtcagatattgatcaaaaccagagtgatgatggtgatactgaaacatcaccaactaaatctccaacaacacccaaatcagtcaaaaacaaaaattcttcagagttcccactcttttcctataacaatggagtcgtcatgacctcctgtcgtgaactggacaataaccgcagtgccttgtcggccgcctctgcctttgccatagcaaccgccggggccaacgagggcaccccaaacaaggagaagtaccggaggatgtccttagccagtgcagggtttcccccagaccagaggaatggagacaaggagtttgtgatccgcagagcagccaccaatcgtgtcttgaacgtgctccgccactgggtgtccaagcactctcaggactttgagaccaacgatgagctcaaatgcaaggtgatcggcttcctggaagaagtcatgcacgacccggagctcctgacccaggagcggaaagctgcagccaacatcatcaggactctgacccaggaggacccaggtgacaaccagatcacgctggaggagatcacgcagatggctgaaggcgtgaaggctgagccctttgaaaaccactcagccctggagatcgcggagcagctgaccctgctggatcacctcgtcttcaagaagattccttatgaggagttcttcggacaaggatggatgaaactggaaaagaatgaaaggaccccttatatcatgaaaaccactaagcacttcaatgacatcagtaacttgattgcttcagaaatcatccgcaatgaggacatcaacgccagggtgagcgccatcgagaagtgggtggccgtagctgacatatgccgctgcctccacaactacaatgccgtactggagatcacctcgtccatgaaccgcagtgcaatcttccggctcaaaaagacgtggctcaaagtctctaagcagactaaagctttgattgataagctccaaaagcttgtgtcatcagagggcagatttaagaatctcagagaagctctgaaaaattgtgacccaccctgtgtcccttacctggggatgtacctcaccgacctggccttcatcgaggaggggacgcccaattacacggaagacggcctggtcaacttctccaagatgaggatgatatcccatattatccgagagattcgccagtttcaacaaactgcctacaaaatagagcaccaagcaaaggtaacgcaatatttactggaccaatcttttgtaatggatgaagaaagcctctacgagtcttctctccgaatagaaccaaaactccccacctga

SEQ ID NO: 120260 - DNA, 903 bp, Homo sapiens
atgtgggccacgctgccgctgctctgcgccggggcctggctcctgggagtccccgtctgcggtgccgccgaactgtgcgtgaactccttagtgtggcatgtggacatggaatctccatggaaccaggtgagccgcagccgtcaaaggcctggggctgcttgcccagagggtgcccaccaggcctctgccctcctggcagccgttgtggatgccagtgaaggggtcaagtgtgtggataacatccgatgcaatgggctcatgatgaacgcatttgaagaaaattccaaggtcactgtgccgcagatgatcaaccatctggccctgcagagaggcctaaaggagtatcccaggggcacatttgctactgggaaacagaatggacttgtcccactgctgctgccccagcatctcaaccttcaaggctgggtcagaggcaaaggttccctcattcaggtgcccatgtctgaaaagggcaagatcaccagggggcgcctggggtctctctccctaaagaaagagggcgagcgacagtgcttcctgttttctaagcatctgattatctgtaccagagcctctggagggaagcttcacttgaccaagagtaaacccacaaaagtaaacaattatagacagaaaaaagctgaccataattttacacaggtgaaaatgcccttaattaatgctcagattgggatgaatgggttccggagagcagagtactcaaataagtggacaccaatttgcagaaacagcgagaacttcaaaaagccaatcagcaccctcaagcctaatcaggaggtgagtacagcacctccaaatgtctttattccaggacccgaagcccttcaaacatcaccttcaatgccacaagccttttaccatctgactcagaataaacagtaa

SEQ ID NO: 120261 - DNA, 600 bp, Homo sapiens
acccacgcgtccgcgcggtgctgtgaggtctgcgggcgctggcaaatccttcccaggatgtagagctggcagtgcctgacggcgcgtctgacgcggagttgggtggggtagagagtagggggcggtagtcgggggtggtgggagaaggaggaggcggcgaatcacttataaatggcgccgaagcaggacccgaagcctaaattccaggagggtgagcgagtgctgtgctttcatgggcctcttctttatgaagcaaagtgtgtaaaggttgccataaaggacaaacaagtgaaatacttcatacattacagtggttggaataaaaattgggatgaatgggttccggagagcagagtactcaaataccgtggacaccaatttgcagaaacagcgaggaacttcaaaaagccaatcagggagcagtatgcagaggggaagatgagaggggctgccccaggaaaagaagacatctgggtctgcaacagaaaaatgttgaagtgaaaacgaaaaagaacaaacagaaaacacctggaaatggagatggtggcagtaccagtgagacccctcagcctcctcggaagaaaagggcccgggtagatg

SEQ ID NO: 120262 - DNA, 1109 bp, Homo sapiens
gaattcctggtcgaccctcgcgtccgagttgacgctctgggccgccacctccgcggaccctgagcgcaagagccaagccgccagcgctgcgatgtgggccacgctgccgctgctctgcgccggagcctggctcctgggagtccccgtctgcggtgccgccgaactgtgcgcgaactccttagagaagtctcacttcacgtcatggatgtctaagcaccgtaagacctacagtacggaggagtaccaccacaggctgcagacgtttgccagcaactgtaggaagataaacgcccacaacaatgggaaccacacatttaaaattggcactgaaccaattttcagacatgagcttttggctgaaataaaacacaagtatctcttgggtcagagccttcaggaattgcttcagccaccaaaagtaactacctttcggaggtactggtccctacccacctttcgtggactggcggaaaaaaagaaattttgtctcacctgtgaaaaatcagggtgcctgcggcagttgctggactttctccaccactggggccctggagtctgcgatcgccatcgcaaccggaaagatgctgtccttggcggaacagcagctggtggactgcgcccaggacttcaataattacggctgccaagggggtctccccagccaggctttcgagtatatcctgtacaacaaggggatcatgggtgaagacacctacccctaccagggcaaggatggttattgcaagttccaacctggaaaggccatcggctttgtcaaggatgtagccaacatcacaatctatgacgaggaagcgatggtggaggctgtggccctctacaaccctgtgagctttgcctttgaggtgactcaggacttcatgatgtatagaacgggcatctactccagtacttcctgccataaaactccagataaagtaaaccatgcagtactggctgttgggtatggagaaaaaaatgggatcccttactggatcgtgaaaaactcttggggtccccagtggggaatgaacgggtacttcctcatcgagcgcggaaagaacatgtgtggcctggctgcctgcgcctcctaccccatccctctggtgtga

SEQ ID NO: 120263 - DNA, 495 bp, Homo sapiens
aaagctgtgcccagacgttcccaaagctcgacacatttctggagcacatcaagagccaccaggaggagctgagctaccgctgccacctctgcggcaaggacttcccctcgctgtacgacctgggcgtgcaccagtactcccacagcctcctgccacagcacagccccaagaaggacaatgccgtctacaagtgtttccttgtgaacgctacctgcggcgtcatctgcccacccacggcagcgggggcaggttcaagtgccaagtgtgcaagaagttcttccggcgggagcattatctcaaactgcatgctcacatccactcgggtgagaagccctacaaatgctcagtgtgcgagtctgcgttcaaccgcaaggacaaactgaagagacacatgttgatccagtatgatgaagtgcgccaggggcttggcatggtgcccggcacgcagaaagtgctcaataaatgtttttgtcataacgtgaaaaaaaaaaaaaa

SEQ ID NO: 120264 - DNA, 2145 bp, Homo sapiens
atgaggacatggacgtctttgaaggaccattatcctgcccaccaggaggctactgcaatagtgcaggcaagagatgatggtggctttgaccagagtaaccgcaatgaagatggaatggacaatcagaccgttctggctgtccagtcattattggatggccaaggagcagtccctgatccgacaggccagagtgtcaatgcgccccctgctatccagccattggatgacgaggatgtatttctctgcgggaagtgtaagaagcaattcaactcgctgccagcgtttatgacccacaagcgggaacagtgccaggggaatgcccccgccctggccacagtctcactggccaccaacagcatctacccaccttcggcagcacccacagcggtccagcaggccccaactcctgccaatcgccagatctccacatacatcacagtgcccccgtccccactgatccagaccctggtgcaggggaacatcttggtgagcgatgatgtgctcatgtctgccatgtcagccttcacatccctggaccagcccatgccccagggccccccacctgtgcagagcagcctgaacatgcattccgtgcccagctacctcacccagcctccacctcctcctccacctcctccaccactgcccccaccgccaccaccttaacctctatccacctccattccagagcctgggcccccctgggcgtcccaaccctggtgggaacggggtggtggaggtgtacagtgctgctgcgcccctggctgggagtggaacggtggagatccaggcactggggatgcaaccctacccacccctagaggtgccaaaccagtgggtggagcctccagtatatcccacccccacagtgtacagccctggcaaacaggggattcaaaccccaaaggaccaaaccccgccgcccccatgaccagcgccaccgggggcacggtggccacctttgactctccagcaacgctgaagacccgacgagctaaaggtgccaggggactcccggaagctgcagggaagccaaaggctcagaaactcaagtgctcatactgtgacaagtcattcaccaaaaactttgacctgcagcagcacatccgaaggtacacatgcgtggagggcactgacaagcttgtcttccacagccacaccggtgagaagcccttccagtgcattgcatgtggccgtgcctttgcccagaagtctaatgttaagaaacacatgcagacccacaaggtgtggcctccaggacacagtggtggcaccgtgtctcgaaactctgtgaccgtacaggtcatggccctgaaccccagcaggcaggaggacgaggaaagcacagggttgggccagcccctgccgggtgcgccacagccccaggccttgtccacagctggtgaggaagagggggacaagccggagtccaagcaggtggtcctcatcgacagctcctacctgtgccaattctgccccagcaaattcagcacctacttccagctcaagtctcacatgacccagcataagaatgagcaggtgtacaagtgtgtggtcaaaagctgtgcccagacgttcccaaagctcgacacatttctggagcacatcaagagccaccaggaggagctgagctaccgctgccacctctgcggcaaggacttcccctcgctgtacgacctgggcgtgcaccagtactcccacagcctcctgccacagcacagccccaagaaggacaatgccgtctacaagtgtgtcaaatgtgtcaacaaatactccacccctgaggccctggagcaccacctgcagaccgccactcacaacttcccctgcccacactgccagaaggacacgcaggcagggctcaggggctgctccacagatgacacagtgtctctgcctggccatctcatccatcacattccagatgtggccatgtcggggctgctgctggagccaggctgggtgtttccttgtgaacgctacctgcggcgtcatctgcccacccacggcagcgggggcaggttcaagtgccaagtgtgcaagaagttcttccggcgggagcattatctcaaactgcatgctcacatccactcgggcccctatgggcatttgaatgtgtacccctttctggcccatatcctataa

SEQ ID NO: 120265 - DNA, 399 bp, Homo sapiens
atggggtttcaccatgttgcccaggctggtcttgaattcctgacctcaggtcctcttcctgatggatgggaacaagccatgactcaggatggagaaatttactatataaaccataagaacaagaccacctcttggctagacccaaggcttgaccctcgttttgcgttagcacatgtggaaccccggagccaggaatttacccgcaataaagccaggccctctgtcagtaaaactgatgattacagaagcagggagagtctggctgccattagagaagtaaaatcacttcacacatcacctatggacactgacttcttggctcttctggaggccttgcgccctcatacagaaagcagaaaactagatcccgatggaggggattttctgctatatacataa

SEQ ID NO: 120266 - DNA, 597 bp, Homo sapiens
tcaccaagtgctggaagcaacacaagcgtccttcaatggtgaacggatggcagggcccccagaagaccacaggaaagtcgtgtagagaagacgttcaggtgagctctgggacgaggaatcttcagaggaggcgaagattcctctgaatcctccttcagaggaggcgaagattcctctgaatcctccttcagaggaggcgaagattcctctgaatcctccttcagaggagtctgggggtgggagggcacagggcatggggtatccaggagccaagcaaagtgttggtttccgggagaaggactgaggcaccctcaatgctgcagatggggcgtcagatgtgggggagaacgagctggagatggacacggacatggaggtgtggatggccctggggaggccccctggcagctcggcacgtgtccagctgcacaaagcagggtcattagtaacccactttccccgcaggcgcctctgcagcatgggcctggcagggctaaactgagaatccaggagcgtgaatgctctagtgtgcacctcggccattgtgtgcgtgtgttccggactcaccgtgaatgttctagagtgtacctcggccat

SEQ ID NO: 120267 - DNA, 580 bp, Homo sapiens
cagtttggagtcgtttgctgcggggagggaatgaatgggcgctgggaacacgcccgcgaggtggggacgcgccggccgtagcgaggtccttagcgtgtgagtggccggggtcgggtcgcttccccgcagcatggaggacgatgcaccagtgatctacgggctggagttccaggcacgtgcctttaacacctcaaacctgcagaaacagatgccattcggtttttggttgggacgcagtctcttaaatatgataatcagatccatatcatagattttgacgatgaaaacaacattataaataaaaatgtcctcctccatcaaagccgggtgaaatctggcatattagcgctagccctgcagacagaggtgtgctgacgacctgctacaacagaacttcagacagcaaagtcctgacatgtgcagccgtgtggaggatgccgaaggaattggaatcaggcagccacgagtcccctgatgattcatccagcactgcacagaccctgggagctgctctgtcaccttgacaacacagcccatggcaacatggcctgtgtcgtgtgggagccaatgggagatggga

SEQ ID NO: 120268 - DNA, 936 bp, Homo sapiens
atggtgtgtgctttgatggagctctggagggcagagcaagctggcgccgacaactccgttgccagtggaacagccattgaagtgtgcgctcccgagtctgcaccaggccggcgcctgtcgggttgttgtgggggccattcattcaccggccggttctcggcgccggtggaacctgctacccgcctggagcgcggggaagtgatggagccgagagtgtccagcagggacagcgccttccgtgcagggtcgactctagaggatccccgtgcagccgtgtggaggatgccgatgaagttggaatcaggcagccacgagtcccctgatgattcatccagcactgcacagaccctggagctgctctgtcaccttgacaacacagcccatggcaacatggcctggagtgccgcccgtggagacctgccagagggtaaagggtcaggcactgccactgccctcgagcgctgtgagcctgttcagcttggtcagcacgcacttattcacactcacatggcaattattcaccacttcaggctcctggattctcagtttagccctgccaggcccatgctgcagaggcgcctgcggggaaagtgggttactaatgaccctgctttgtgcagctggacacgtgccgagggtgtgtgtgcccaaacgacagagcacaatcaagagtgtattgcgaccattgactactatgggtccttaggcaccctgattagacatgagtgtacctccggcgaggacagcggcagtgaccgaaaggaagagaggaggaggggcattctgagacctgactgtgctcctcgaactgtctgctggactgagagtaacgactgtgaaggctccagcatggagcgatgtcctggaagtcaagagcagagcatgccgtgtaagtcgacagacaaactctgctctggggacatgctgctggtgtag

SEQ ID NO: 120269 - DNA, 457 bp, Homo sapiens; identical to SEQ ID NO: 119969
  misc_feature (1)...(457): n = a,t,c or g

SEQ ID NO: 120270 - DNA, 411 bp, Homo sapiens
atgggatggggccctggactcctgggtctgaggaagacggggctgggacctggactcctgggtcagagagaaaaagaggatggaagtctggacccctgggagacgattcgtaccgccctggccatgggtgcagaccgaggtatccacgtggaggtgcccccagcagaagcagaacgcttgggtcccctgcaggtggctcgggtcctggccaagctggcagagaaggagaaggtggacctggtgctgctgggcaaacaggggcataaaaaaagcaaaacacaccctaatcatatcacggatgtacagctgccccccatctctatgagccccaggaccaaccattatgtggagttaaaaatcactcaaaggctccaggaccatggacccaacatgacctgtcaggaggagtag

SEQ ID NO: 120271 - DNA, 912 bp, Homo sapiens
  misc_feature (1)...(912): n = a,t,c or g
ttggagatcgatatcactagtccangtggtggaattcgagccgctgagggtgcgggctgaccctgtttggtggctgcggcgggatagatggcggacgtgcgcgtgctcgtagctgtcaagagggtcatcgactacgccgtgaagatccgagtgaagcctgacaggaccggtgtggtcacggatggtgtgaagcactccatgaaccccttctgtgagatcgcggtggaggaggctgtgcggctcaaggagaagaagctggtgaaggaggtcatcgccgttcagctgtgggcctgcacagtgccaggagacgatttcgtaccgccctggccagtgggtgcaagaccgaggtatccacgtggaaggtgcccccagcagaagcagaacgctttgggtccccttgcaggtggctcgggtcctgggccagctggccaaaaaaggaaaaggtggacctggtgctgctgggcaaacaggcccatcgcatgcactgactgtaaccagcacagggcagatgacagctggatttcttgactggccacagggcacattttgcctcccaggtgacgctggagggggacaagttgaaagtggagcgggagatcgatgggggcctggagaccctgcgcctgaagctgccagctgtggtgacagctgacctgaggctcaacgagccccggtacgcccacgctgccccaacatcatgaaagccaagaagaagaagatcgaggtgatcaagcctggggacctgggtgtggacctgacctccaagctctctgtgatcagtgtggaggacccgccccagcgcacggccggcgtcaaggtggagaccactgaggacctggtggccaagctgaaggagattgggcggatttgagcccctcccagagatggcaataaaactgactctcaacatct

SEQ ID NO: 120272 - DNA, 1026 bp, Homo sapiens
atggtccttaatcgttccagtctattgccgcaggaagacacccgccagctcctgctctgggtggggtcaggctgcagagtacgggctccgtatggcagggactgtgttataatcatctcagtgttcctggcactgcgcatggaaaacagtaccttctcaactgacaaaccttctgaacaaagatataattcacacaatcacttcggcaagtccagtcataagcagcataactatgtttggtcaacaacagactgcagatacgatgatggtcccgacgacctgaggaaggaggatttcagcagcatgagcgctcagttgttatacaaaatgatcaaatccaagacagagtacccgctacataaagccatcaaagtggagagagaagacgtggtcttcctgtatctgattgaaatggattcccagctccctgggaagctgaatgaagcggatcataacggagatctggcattagatctagccctctcacgacgactggagagtattgccaccacgctggttagtcacaaagctgatgtggacatggtggacaagagtggctggagcttgttacacaaaggaatccaaagaggagatctctttgctgccactttcctcattaagaatggggcctttgtcaacgctgctacactgggtgcccaggagacaccactgcaccttgtggccttgtacagttcaaagaaacactcagcagatgtgatgtctgagatggcgcagattgcagaggcccttctgcaggctggtgccaaccccaacatgcaggacagcaaggggagctttatacacagccttgagtcagaggaggtggccaagttggagaagcacttgatgcttctgcggcaggagtatgtcaagctgcagaagaagctggcggagacagagaagcgctgcgctctcttggctgcgcaggcaaacaaggagagcagcagcgagtccttcatcagccgtctgctggccatcgtggcagacctctacgagcaggagcagtacaggtgggagagctcctag

SEQ ID NO: 120273 - DNA, 844 bp, Homo sapiens
aaataaccctgttcctccgacgtatcccaaatcccacccaacttgtgaactcctacttatctgttgagccccaacgcaagggtcacctcttctatgaagccctccttgattccctcacctgccaccactgttcatcagattttatggccggaagatggtgaatatcttgatggcgaacactaagtttgatgcatttctgaagcaatctctcccatcttacgacttgcagaaggtcatggcggccattaaacagcagggaatagaagataatgatgaacttccctctgccaaaggctgcaaggtgttgaggagtctggtggtgtgtgagaacgggctgcccatcaaggaggggctcagctgcaatggcccaaggctggtggggctgcgctccacactgcagggccgcggggagatggtggagcagctacgggagctgacacggctgctggaggccaaggacttccggtcccggatggaaggcgtggggcagctcctggagctctgcaaggccaagacggagcttgtcactgcccacctggtccagggttttgatgctttcaccccaaggttcagggtttccaacaagaaagtgaaccagtgggcgctggagtctttcgccaacatgatccccctcctcagagagagcttacaccccatgctgctctccatcatcatcactgttgcagacaacctcaactccaagaactcagggatttacgctgctgccgtggctgtgctggatgcgatggttgagagcctgggggattgggtgatagcagcagagagtgcatcaaatcggacggaagagaaggggtatgaagtcttcccaaatcacccaagctga

SEQ ID NO: 120274 - DNA, 269 bp, Homo sapiens
gtgaccaacacacagatattccagcttcagtttcacactggattcataccactggacacaacagttttaaagttcaccaaatcctatcctgtgataacaactggaatgggctggagaaattaagtgagacaatagtggcattttggacctggatcattcacctccttgttgatgaagaaaacctgtccctgaaaggtagatggaaaccaaaagggctctgggttccaggcaagggcctctttacctttcaaccaatgtggagccggtga

SEQ ID NO: 120275 - DNA, 491 bp, Homo sapiens
gtgagttgggtggacaccaccaacagacgtgtccccacttcagacctggcgggacactgttcaaccagaactccaccaaccagctggcagcagtaccccagcactgggatctgtgggaaaccagaagcactccagcggcacgccatcaaatgccccaaaacgccagaaagtggaggagctgggtcctcatccaggtgcagaaccagctccggtacagccagctccccaccaccctgcacaactgcccctggagctgccccagcggacaaaaagccggtcgggggacaaaggcctgcggccgcgcctgcgcgcaagcctttggggcgctccggtaccccggcctggccccgccccctggcgcggcgcgccgacgtcgcgtgacgtcacggagttgccatggcgtcgctgagcggcctgacagtcggcctggagtcgtacaggggccgggaccgcctggttatatgcaaaagtgcatctttggagagggttga

SEQ ID NO: 120276 - DNA, 1260 bp, Homo sapiens
atgaatgatgccactgcagttcaggaagggtcccagatgtactcatggcagaaattgacaccaaccgggccgtttatcatgcagccggaagggatgggacgcctgtttgccatcaacaaaatggcggaaggtccgttcccggaacactacgagccgattgaaacgccgctgggcactaacccgctgcatccgaacgtggtgtctaacccggttgttcgtctgtatgaacaagacgcgctgcggatgggtaaaaaagagcagttcccgtatgtgggtacgacctatcgtctgaccgagcacttccacacctggaccaagcacgcattgctcaacgcaattgctcagccggaacagtttgtggaaatcagcgaaacgctggcggcggcgaaaggcattaataatggcgatcgtgtcactgtctccagcaagcgtggctttatccgcgcggtggctgtggtaacgcgtcgtctgaaaccgctgaatgtaaatggtcagcaggttgaaacggtgggtattccaatccactggggctttgagggtgtcgcgcgtaaaggttatatcgctaacactctgacgccgaatgtcggtgatgcaaactcgcaaacgccggaatataaagcgttcttagtcaacatcgagaaggcgtccgcaactaactccatcacgccgccttctcaggtgcgtgattacaaagcagaagtcgcaaaacttatcgacgtttccacctgtatcggctgtaaagcctgtcaggtggcgtgttcggagtggaacgacatccgtgatgaagtggggcactgcgtcggggtttacgataaccccgccgatctgagcgccaagtcctggacggtgatgcgctttagcgaaaccgaacagaacggcaagctggagtggctgatccgtaaagacggctgtatgcactgtgaagatcccggctgcctgaaggcgtgcccgtctgctggtgcaatcattcagtacgctaacgggattgtcgatttccagtcggaaaactgcatcggctgtggttactgcattgccgggtgtccgtttaatattccgcgcctcaacaaagaggataaccgggtatataaatgcacgctctgcgtcgatcgcgtcagcgtcggccaggaaccggcttacttctgccgcatcgtgccagtcctagctgcttaccaagaccgtcacactgactgtgcacagagcacaaagtttgtgcttctacagtgtttccaatatgcacataattcccggaagaacaactga

SEQ ID NO: 120277 - DNA, 949 bp, Homo sapiens
  misc_feature (1)...(949): n = a,t,c or g
agatgaaaagctacaagtttgaaagacaggtgtacaaatcttcatttagtatctaactagctctgacagaagtctttttacctttttggacctagcttcctttttcagacaatacatctttgatgatcgaaaacaacaacaacctgatacagttccttgcagttctaaaagcccaatagtccagaatacaaaggctctattatgttcttctctggataaaagaacttgtggactttataacataatccaagaatgaagnnnnnnnnnnccacccaaaccctacctttaggaacaaagagggcccatagcaggaagctgaaatacagaacgtcttctgagaacacagagaacatttagcaaaaagtggaaaatctgacaacactgtacagtcgcagtcttcctctccataacaataatatcttctcctctcactaaaatagagcaatttttattgtcacaagcccatgtgtattactggcaataagggatatagctgtataggacacctccttaaacatctcctttattttaagattcagttagggggaaatgactagtttcccagcactttctggttaccatggatacctgtcatccacatccagagcctgcaggttacactcagggactcttgccagctcatgaataatatcgctgcaagcccgctgccgctgcgatatgtacacatgtcttcccactctcatcatcatagttgattatggacggcccctggtgatggctcagaatgatggagcacagaatcctatttccactctggaaaagagagtcaaagaaagcccattatgtacaatccagtgttcttctctgtctaggcatgttaagataaaaatacaaaggaaaaaaaggaaagaaagaaagaaagaaaaaagatgaaaagagaaaaggaaatggaaaaaaaagaataaaaatacactctatctaagctctc

SEQ ID NO: 120278 - DNA, 1072 bp, Homo sapiens
atggggaagcagctcagtcttactcctgaccacgacttcgacttcgctgttggaatcaaagtgggctggcttgaaggctgtgtgagtctactcagaaacggtgccaagcacaatatcccagataaaaatgggcgcctgtcactggatgctggcactggtgaagccgaattgaagagtggaaataggattctgtgctccatcattctgagccatcaccaggggccgtccataatcaactatgatgatgagagtgggaagacatgtgtacatatcgcagcggcagcgggcttcagcgatattattcatgagctggcaagagtccctgagtgtaacctgcaggctctggatgtggatgacagtgagaggagaaaaaattattgttatggagaggaagactgcgactgtacagtgttgtcagattttccactttttgctaaatgttctctgtgttctcagaagacgttctgtatttcagcttcctgctatgtgccctctttgttcctaaaggccctgcctaccacctctcgcctcatctggaacatccaaaatcacactaatgatcctggacatgtggagacccaagcccagggcagcatgtttcatttgagcttctgccgcatcttggcactcctagctgctaacaagaccctcacactgactgtgcacagagcacaaagtttgtgcttctacagtgtttccaatatgcacataattcccggaagaacaactgaagagaaagcaggacctggcatttgtcaaggagaaacagagctggacacagtctacggggctaaagacagattctattcagtgcttgtggcaaccagggaaaggagatttcagtatggagctgagctccgctccaaatacaaaaccagcgacgtggatcgccaggagacccggctcaggaaacctcgcctaccggtccgccctgcaccccccagcccctcgcaccggcaaacacgaaagcccaacacgcaacccccgcaaaccaaaccggggacaccggagccagcgaccacccgagcaaaaccgcatcacccccggacacagcgacacgcagccaccatga

SEQ ID NO: 120279 - DNA, 588 bp, Homo sapiens
atgggcgctgagtgggagctgggggccgaggctggcggttcgctgctgctgtgcgccgcgctgctggcggcgggctgcgccctgggcctgcgcctgggccgcgggcagggggcggcggaccgcggggcgctcatctggctctgctacgacgcgctggtgcacttcgcgctgagaggagggggcaatgggagagaaatgaaggttggagaaggagctgtacgaagttctggggaagaaaatggagtggtttatgcctggggccacaatggatatagccagcttgggaatgggacgaccaaccaaggcattgctcccgtccaggtctgtaccaatctcttgatcaagcaagtggtggaagtagcttgtggctcacatcattcaatggctctggcagctgatggagagcatttggaaggtgttatggtaggccctgataatgcagctgcaagtaggaccatgttggcccttagtggcccacatcctagtgaggctgaaaaccaggcaaaaaagcactgcattgtaagtgacttggtccaaccagtgaaaaatacaaacaggaccattcatagacaaaaaagtgaagaataa

SEQ ID NO: 120280 - DNA, 933 bp, Homo sapiens
gatcacaactcctcgccagcaatggaacaaaactggatggagaatgcgtttgacgaattgacagaagtaggcttcagaaggtgggtaataacaaacttctccaagctaaaggagcatgttctaactcaatgcaaggaagctaagaagcttgaaaaaaggttagaggaattgctaactagaataaccagtttagagaagaacataaatgacctgatggagctgaaaaacacatcacaagaacttcgtgaagcatacacaacggaagaaaggatatcagagattgaagatcaacttaatgaaataaagcatgaagacaggattagagaaaaaaatgaaaaggaacgaacaaagcctccaagaaatatgggactacgtgaaaagaccaaacctacatttgactgtgtacctgaaagtgatggggagaatggaaccaagttggaaaacactctgcaggatattatccaggagaacttccccaacctagcaaggcaggccaacattcaaattcaggaaatacagagaacaccacaaagatactcctcgagaagagcaaccccaagacacataatcatcagattcaccaaagttgaaatgaaggaaaaaatgttaagggcagccagagagaaaggtcaggttacccacaaagggaagcccatcagactaacagctgaccccttggcagaaactctacaagccagaagagagtgggggccaatattcaacattcttaaagaaaagaattttcaacacagaatgtcatatccagccaaactaagcttcataagtgtgggagaaataaaatactttacagacaagcaaatgctgagagattttgtcaccaccaggcctgccctacaagagctcctgaaggacgcgctaaacatggaaaggaacaaccagaaccagtcactgcaaaaacatgccaaattgtaa

SEQ ID NO: 120281 - DNA, 467 bp, Homo sapiens
ctgcagagaaagaagcactccgggtgagccggagaggtccctcttcagctaccccctgcagcagtttgctctgcatgcttgcagcgacccgcactgtggtggaattcttcattttttctgtaatcttgtcttcacgctttatttcattaagttgatcttcaatctctgatagcctttcttctgcttgattgatccagctattgatacttgtgtatgcttcatgaagttctcgtgctgtgtttttcagctccatcaggtcatttatgttcttctctaagctagttattctagttagcaattcacctaaccttttttcaaggttcttagcttccttgcattgggttagaacatgcttctttagctcagaggagtttgttattacccaccttctgaagcctacttctgtcaattcatcaaactcaattctccatccagttttgttcccttgctggtgaggagctgtgatc

SEQ ID NO: 120282 - DNA, 600 bp, Homo sapiens
tcagctattgttacttttgtatgcttcatgaagttctcgtgctgtgtttttcagctccatcaggtctttcatgttcttctttaaactggttattctagttagcagttcctgtaaccttttttcaaggttcttagcttccttgcattgggttacaacatgctcctttagctcagaggagtttgttattacccaccttctgaagcctgctcctgtcaattcgtcaaattcattctctgtccagttttgttcccttgctggcaaggagttgtgatcctccaggtctgccttgatctgctttaaatcagagagggagaaggggacatgtacctgggttgggccaaattcccctccccctacagcttgaaggggacataaccgatagcctgggggtttttgtggtcctttggagatttcttggcttatttccttcgacgcagcagcagaaacactagttttcctcccagaccacaagggggactgaggaaggttggatttagtggcccttaccaacacattctcgaaaacctgcacccttgtctgtcctcctagaccacaaagaggactgagaaaaatcggatttagtggccttgaccgacgcat

SEQ ID NO: 120283 - DNA, 1092 bp, Homo sapiens
atggggtggaggccacgctggctcccgtacctttactggggcttccagtctgatctctgcccccattgcaagaggaaggcacaagaggaggactcgctggcagcacaggctgcttctcacccaaggctttcagccaacagcaagaacaactcctgggggaagcagtactcctacgcgctcttcaaggccatgagacacatgctgtgcatcggctacgggcggcaggcgcctgcggcagtgtccgacgtctggctcaccatgctcagcatgagtcgtgggtgccacctgctacgccatgttcattggccacgcactgccctcatccaggtcctggactgctctcggcgccagtaccaggaaaaggtagtgttacccagggagcacccgaacattggttcctcccaagaaggaggcacatggcaccagacagttggcctccagcagacaagcgataagttcgacgccaacgatccgatcctgaaagatcagacgcaagaatggtccggttctgcaacctttacatctgacggaaaaatccgtttattctacactgactattccggtaaacattacggcaaacaaagcctgacaacaagcgcagccaacacgggaacagaaaacggataccaaggcgaagaatctttatttaacaaagcgtactacggcggcggcacgaacttcttccgtaaagaaagccagaagcttcagcagagcgctacaacacgcgatgctgagttagcgaacggcgccctcggtatcatagagttagataatgattccccattgaaaaaaagaggtgcgactcaacgctctagcgaagagaatataaccctaaaagcatacaagagagacgtacggagtctcctcatgttaacacgcaatgaagatgttgcggattccttaaacagcagcaaaaaacgacagaattaccagttgccttccattcgatcagtgacgcgatgtaagaaaattggagtgtgtgcaaaaggcataggttgtggccagggaacccactacttaagtgtatctattctcaatactgccgatcgggaccggaggaaattgggctttaccaggacctccatgtattga

SEQ ID NO: 120284 - DNA, 1140 bp, Homo sapiens
atgtcaaccgatgttattaggttggtgcaaagcctcactaagcagtcttttgatcacacctttcccatctccaagctcctctacatcttcttccagcagttcaccaccccgctggcttcgaagtcagacaacaagtttggaaaatggcatcatcccaagaagttgagttgcaagtttcctcttgctgagaaaacctccgctggtgatacccaggcaaacagggtctgtagtgtacctccaacaaaccacagcagacctgcagcagacaggcctgttagaaggaaaattaacaagcagaaaacagccacatcaacatcaacaaaaaggacgtccactcagagaccccatccgaaggtcaccaacgtaaaagaccaaaggatcacagctcctcaccagcaagggaacaaaactggatggagaattgagtttgatgaattgacagaagtaggcttcagaaggtgggtaataacaaactcctctgagctaaagaagcatgttctaacccaatgcaaggaagctaagaaccttgaaaaaaggttaggtgaattgctaactagaataactagcttagagaagaacataaatgacctgatggagctgaaaaacacagcacgagaacttcatgaagcatacacaagtatcaatagctggatcaatcaagcagaagaaaggctatcagagattgaagatcaacttaatgaaataaagcgtgaagacaagattacagaaaaaatgaagaattccaccacagtgcttgtgtccacttggggcagccaactagaacaaaataaccttccccacataatttcccctttatttcacagcacccatgacctaaatattagcttttatggaggctgtctgctgcaagcatgcagcagcaaactgctgcaggggttagctgaaggaggacctctccggctcacccggagtgcttctttctttgcagctaaactgtgtttaaccaaacacttccttcctacggaaatgatccttatcaaaagcaggaaaacaacccctgatacacaaccaaggcgattgtacttgttacaaggtgttgtggatcaaactagtagaaaaggccctaccgccttgaatattcggcaaaagaccttcgccgctgctccgccacatcgatga

SEQ ID NO: 120285 - DNA, 1786 bp, Homo sapiens
atggcagtgattatgaacttggactctggtgaccctggctcacgagtgaagctacagaccttcacggtgagtgttacagctcttaaagtggagcgtctggagttgttcgttcctccctttgggctcgtggtctcgctggcttcaggagtgaagctgcagaccttcgcgggcgggaaagcgtggctgttacaaacgcattctgacttgggggagcagaagttaactactttcataccaatctctctctctttaaaagtgatcttttggtgtaattggcctgaagcgaaaaccgcagcctatgatggtgaacaggccacgtgtgagcctgtgctcaaagccatgtttttggctgacacccacttgcttagggaattcctaggtcactggctggacaaattacgaagggaatggcaggtggagagagccttccagacagctctgtggttgctgcagccggaagtcgtcttcatcctggaggatgtctttgatgaagggaagtggagcacctctgaggcctgggtggatgatgtggagcagtttcggaaaatgttcagacacccaagtcatgtgcagctgaaggtagttgctggaaaccatgacactggcttccactatgagacgaacacatacgaagtagaacgttggaggaacagaaacaaccccagtttcattatgggtagcatcacacccacagactatgccctctccaagtgccacctaccacctgaggacgtggtcttgatcatctactgtggagtgaaattaccagatagaatagtagactctaaagcaggactcctgaaactacctgtgttgaagaatgtgatttccacccaactccaattcccatctatcatggaccaacttttggtctacaacttgttcaatgagacgagtccattggtcatgtgcctggatgtcatggcaatgtcaaatcgaggaaaccaccatctggctgcaacacgcctaaggaaggtattggatcacaactccttgccagcaagggaacaaaactggacggagaatgagtttgatgaattgacagaagtagtcttcagaaggtgggtaataacaagctcctctgagctaaaggagcctgttctaacccaatgcaaggaagctaagaaccttgaaaaaaggttagagaaattgctaactggaataaccagtttagagaagaacataaatgacctgatggagctgaaaaacacagcacaagaacttcatgaagcatacacaagtatcaatagccaaattgatcaagtggaagaaaggatatcagagattgaagatcaacttaatgaaataaagtgtgaagacaagattagagaaaaaagaatgaaaaggaacaaacaaaccctccaagaaacatgggactatgtgaaaaagaccaaaactacgtttgattggtgtacctgaaaatgacagggagaatggaaacaagttggaaaacacacttcaggatactattcaggaaaacttccccgaactagcaagataggccaacattcaaattcaggaaatacagagaacaccacaaagatactcctcgagaagagcaaccccaagacacataatcgtaagattcaccaaggttgaaatgaaggaaaaaatgttaagggcagctggagaaaaagaagatgaaactgacaacaatgagttcttcttgtggagccagaaagggaagagggccggaaccctgaacgaccacgtggaggaaagctgtccaccaaccaaaaatgcctgccttggaacacccattcattgctatgtgggcaagaaataa

SEQ ID NO: 120286 - DNA, 1299 bp, Homo sapiens
atgctcagagatattaaggcatcacttgagatgcttcgaccagcaggattggaaatgaagaggggccagcaagctgaggatgccagtgtagaagctgttgccaccttcccctggctaaacccactgaacggggctggcagattttactgggacctgaccatgctgctgctgatggtgggaaacctgattatcattcctgtgggcatcaccttcttcaaggatgagaacaccacaccctggattgtcttcaatgtggtgtcagacacattcttcctcatcgacttgggtgtctataagagcctccagaccaagaatgttctgaataccacaatgcaagctggaagccagctgaagacacagaatgaaatgcacagacatgggctagctagcctcaaatccttgaatatcacgctgctgaagcctgatgagagacctaaaagatctgcaagattgtctcgtatgatcttccacatgacctacgacctggccagcgccgtggtgcgcatcgtgaacctcatcggcatgatgctcctgctctgccactgggacggctgcctgcagttcctggtacccatgctacaggacttccctgacgactgctgggtgtccatcaacaacatggtgaacaactcctgggggaagcagtactcctactcgctcttcaaggccatgagccacatgctgtgcatcggctacgggcggcaggcgcccgtgggcatgtccgacgtctggctcaccatgctcagcatgatcgtgggtgccacctgctacgccatgttcattggccacgccactgccctcatccagtccctggactcctcccggcgccagtaccaggaaaagaaggaaaacaaacaaacagaaaggaatagtatcaacatcaacaaaaaggatgtctactcagagaccccacccaaaggtcaccaacatcaaagaccgaagatagataaatccacgaagatgaggagaaaccagtgcaaaaaggctgaaaattccaaaaaccagaaaacctcttcacctccaaaagatcacaacgcctcgccagcaagggaacaaaactggatggacaatgagtttgatgaactgacagaagcaggcttcagaaggtgggtaataacaaactcctctgagctaaaggagcatgttctaacccaatgcaaggaagctaagaactttgaaaaaaggttagatgaattgctaactagaataacctgtttagaaaagaacagaaatgacctgatggagctgaaaaacacagcacgagaacttcatgaagcatacacaagtatcagtagctga

SEQ ID NO: 120287 - DNA, 1686 bp, Homo sapiens
atgaacacagcaagagcaaggggttacagaagacaggctgtggaggaggcaaaatccacagtcattgatgatgcatgggacatgggggaagaaagaaaaagaggactgaagatggttgtcaggcttccagctggcgcaactggttgtgcctctgaaatacagagttcaggagagagctgtgcaatggttcttccacccaccaccacagaccgtcgtgtgaaacccctgcaccgtcgacgcacttacccggttccactctgggccaatcaggcacccggctttgtgctcacacgttggataatatcagtgctgctggagaaaatccagtgtggtggagcaggactctccttcctgccaccggcttcttttcctcctctccttcccctggtgacctccgaggaggagtgtgaggcagcacttttcctccagaggcattcatggggggtcatcacgtcacagttttttcatgatacgttaacaagcaggggagaaagagacaattggcacctgcaccagacccagtgtagaaatgggagccagtgcgaaacagagctcacgaccactggtttagagctgctcctgtcacatgggcagcaagtaagctccagcaccaagagcaacaccaaagcagatgctggcaattgcacacagagctgccttgtgcagccgtggtcagggccaggtgtgtgggcagggaactgccagtgtctgctacagccatctcacctgtcgggtacccagccctcttcatgccagctttctaaccccttctccgtgatgctagcagcatcagagacagcatcacaagtggagagattgcaggaaggtaaattatctgctgtagcttcattcatggccatgaaactaggcaacaacgacagcctgcctgatgactttaatctgatgaggaaggaaggaggaaggaaggaaggaaggagggaaaggagggaggatcacaactcctcgccagcaagggaacaaaactgtatggagaatgagtttgatgaattgacagaagtaggcttcagaaggtgggtaataacaaactcctctgagcagaaggagcatgttctaacccaatgtaaggaagctaagaaccatgataaaaggttacaggaactgctaactagaataaccagtttagagaagaacataaatgacctgatggagctgaaaaacacagcacgagaactttgtggagcatatacaagtatcagtagccaaatcaatcaagtggaagaaaggatatcagagattgtagatcaactgaatgaaagaaatgacagggagaatggaaccaagttggaaaacactctgcaggatattacccaggacaacttcccctacctagcaaggcaggtcaacattcaaattcaggaaacacagagaatgccacaaagatactactcgagaagagtaaccccaagacacataattgtcagattcgccaaagttgaaatgaaggaaaaaatgttaagggcagccagagagaaagacacatcagtgaaacagaaagttaacaaggatatccaggaattgaactcagctctgcaccaagtggacctaatagccatctacagaactctccaccccaaatcaacggaatatacattcttctcagcaccacatcacacttattccaaaactgaccacatagttcattcgatactctgcgactctggttaa

SEQ ID NO: 120288 - DNA, 630 bp, Homo sapiens
atggcttcctgtctcctcacattcttcagctgggacctgagccgggcaggggctgctctcctcatcttgtcattcacaagacacggacttctgccattggttcagctggctctgtccatgggcgagcactgtccctgcatcacatatgacaagaatgcctggtgcgctctactggggcccaagctgtgccgagcccactggcagggccccaagaacccacgtgtgtccagagtgacagttcagctggagatgaagcctctgtgggaggaattcaaccagctgggcactgagatgatcgtcaccaaggcaggcaggaggatgttcccccccttccaggtgaagatcctgggcatggactccctggccgactacgccctgctcatggacttcatccccctggacgacaagagatacaggggctccaggatgtacggagccgggatccacggggacgcccctccaggaacccgaggtcgatcgtctgtgtgtgagacggtgctgatggacttcgatgcgctggtgcaggcacagacaggcctgggcacagctgcggtgatcgtcatggaccgctcggaccgggagctgcggcccgaggagattgaaggcttaggcagctgtgagctcaaatga

SEQ ID NO: 120289 - DNA, 736 bp, Homo sapiens
cccacaatctgccgccgtggaggtacctggtttgctggctttggcagagaacgcaactcaggcaccaaactattcaacatctctggccatgtcaaccacccttgcactgtggaggaggagatgtctgtgcccttgaaagaactgattgagaagcatgctgggggtgtcacgggcggctgggacaacctccttgctgtgatcccttgcggctcgtcttaccccactgatccccaaagtctgtgtgtgaaacgttgcttgatggacttcgatgcgcttggtgcaggcacagacaggcctgggcacagctgcggtgatcgtcatggaccgctcgacggacatcgtgaaagccatcgcccgcctcattgagttctataagcacgagagctgtggccagtgtaccccatgccgtgagggtgtggactggatgaacaaggtgatggcacgtttcgtgaggggggatgcccggccggccgagatcgactcccctgtgggagattcagcaagcagattagaaggccatacgatttgtgctctgggtgacgtggccgcctggcctgtgcagggtctgatccgccactttcggccggagctcgaggagcggatgcagcggtttgcccagcagcatcgaggcgcggcaggctgcctcttagcccaccaccctggcctgctgtcctgcgtctatccatgtggaatgctggacaataaagcgagtgctgcccaccctccaaaaaaaaaa

SEQ ID NO: 120290 - DNA, 406 bp, Homo sapiens
ctgcaggcgcgtgccgccacgcctgactggttttcgtatttttttggtggagacggggtttcgctgtgttggccgggctggtctccagctcctaaccgcgagtgatccgccagcctcggcctcccgaggtgccgggatggcagacggggtcttgctcactcagtgctcaatcttgcccaggctggagtgcagtggtgtgatctcggctcgctacaacctccacctcccagccgcctgccttggcctcccaaagtgccgagattgcagcctctgcccggccgccaccccgtctgggaagtgaggagcatctctgcctggccgcccatcgtctgggatgtgaggagcccctctgcctggctgcccagtctggaaagtgaggagcgcctcttcccggccgccatcccgt

SEQ ID NO: 120291 - DNA, 1125 bp, Homo sapiens
ttaagccagcagggaagggcagatgtgggctgctgtttcatgcatgcacagaggcaggccctggctcttgcagcagcggacttcacgaatgtggaatgtggaggttacacagcgatgcctagactgtctgtccttagaccgaagggcagcagaaaggctcagggggcttgctctatattccttagacatctccggagattttctcagcatcagaatcagatcctcccatggcctgcggctacttttaagaaagtttggcaaccttttggatatgtcctcttctcttttttgactttccaggctgtaaaccttcagaagcttccacatgtggtgccagtgggctccttgaaaaatgacttccctgggaaccagaacatccaggttggcctcaaacttgctgccaaacaggaactgtggcaagccggagaggattctgatgcttggaagtgggcgaatgttttgattttcaagcaaagaaaaagctagcttcctggtgaaccctgtgggcatgaaccggtacagcgtggacacctccgcctccacctttaaccacaggggctccttgcacccctcctcctcgctgtactgcaagaggcagaactctggagacagccaccttgggggtggtcctgctgccaccgctggtggtccccgcactagccccatgtcttctggtggcccctcggcacctgggatgaggcctccagcctccagccccaagagaaacacgacctctctattaaactctggcttggaacctacattttcttttcgtatcacctttggattcatgtgaccttgtccgcagtgtgctgacttgcctctctccacctgggaattccccaagtttcgatatgcacaggtatcagctgccttgtgtacattaatacaggaagtgttaggaggcgtttgctcttctggttctatttcattaagcaagctgaagctggatgtagaaccgtagaatcctagagttggggaaaagaggtcttgggggacatctggacggctcccctccagagtagaaccttctcccccgtgggttccacattgctcagcgatgatgagagctcctgttggtccacattctggccagcatttgtcagtattacagatttcgcccat

SEQ ID NO: 120292 - DNA, 805 bp, Homo sapiens
gaatttaaagacggctcttcccgggtcccaccgaggaaaggcacgcaaaactgaggtcagcggccgcagagactttccatctccttccccttctgagaggagatggcttcgcagcggagatggcaatcgagtcggcactccaagacccagtcgaattgggactttccagtctaagaaaagctcagcaagatcatccgtgagcccttcagccaaaattacgcatcatggggatcccgattctccccggaacctgcctgccttcgtgtccatgccgccaccagtccttggctgggagcggccagccagcttcagcttgcttaatgaaatagaaccagaagagcaaacgcctcctaacacttcctgtattaatgtacacaaggcagctgatacctgtgcatatcgaaacttggggaattcccaggtggagagaggcaagtcagcacactgcggacaaggtcacatgaatccaaaggtgatacgaaaagaaaatgaagtgaggagcgtctctgcccggctgcccatcgtctgggatgtgaggaaaccctatgcctggctgcccagtctggaaagtgaggagcgcctcttcccggccaccatcccatctaggaaagtgtgggcagcattagagtgtatctggttccccactgacctcaacgtcagggacttgccttctactctggtgcaactgaccatccactggctcatcatgggttactccatgactgccttctgcctcttcacatggggcaaatggcttaaggtagcctacagcaggactggtgcagaaattactcatcacagctag

SEQ ID NO: 120293 - DNA, 1867 bp, Homo sapiens
ctacaaggagacctacctcatccacctcttccatacctttacaggcctctcaattgcttattttaactttggaaaccagctctaccactccctgctgtgtattgtgcttcagttcctcatccttcgactaatgggccgcaccatcactgccgtcctcactaccttttgcttccagatggcctaccttctggctggatactattacactgccaccggcaactacgatatcaagtggacaatgccacattgtgttctgactttgaagctgattggtttggctgttgactactttgacggagggaaagatcagaattccttgtcctctgagcaacagaaatatgccatacgtggtgttccttccctgctggaagttgctggtttctcctacttctatggggccttcttggtagggccccagttctcaatgaatcactacatgaagctggtgcagggagagctgattgacataccaggaaagataccaaacagcatcattcctgctctcaagcgcctgagtctgggccttttctacctagtgggctacacactgctcagcccccacatcacagaagactatctcctcactgaagactatgacaaccaccccttctggttccgctgcatgtacatgctgatctggggcaagtttgtgctgtacaaatatgtcacctgttggctggtcacagaaggagtatgcattttgacgggcctgggcttcaatggctttgaagaaaagggcaaggcaaagtgggatgcctgtgccaacatgaaggtgtggctctttgaaacaaacccccgcttcactggcaccattgcctcattcaacatcaacaccaacgcctgggtggcccgctacatcttcaaacgactcaagttccttggaaataaagaactctctcaaggtctctcagatgctattcctgttcctctggcacggcctgcactcaggatacctggtctgcttccagatggaattcctcattgttattgtggaaagacaggctgccaggctcattcaagagagccccaccctgagcaagctggccgccattactgtcctccagcccttctactatttggtgcaacagaccatccactggctcttcatgggttactccatgactgccttctgcctcttcacgtggggacaaatggcttaaggtgtataaatccatctatttccttggccacatcttcttcctgagcctactattcatattgccttatattcacaaaggcaatggtgccaaggaaagagaagttaaagaagatggaataatccatttccctggtggcctgtgcgggactggtgcagaaactactcgtctcccttttcacagcactcctttgccccagagcagagaatggaaaagccagggaggtggaagatcgatgcttccagctgtgcctctgctgccagccaagtcttcatttggggccaaaggggaaacttttttttggagaaggcgtcttgctttgtcacccacgctggaatgcagtggcgggatctcagctcaccgcaacctccacctcctgggttcaagtgattttcctgcctcagcctcccaagtagctgggaatacaggcacgccaccatgcccagctaatttttgtattttcagtagaaacgggatttcaccacgttggccaggctggtctcgaactcctgaccgcaagtgatccacccgcctccgcctcccaaagtgctgggattacaggcgtgggccaccgcgcccagccagaagcgggaagtgaggagcgtctctgcctggccacccatcgtctgggatgtgaggagcccctctgcctggctgcccagtctggaaagtgaggagcgtctctgcccggccgccatcccatctaggaa

SEQ ID NO: 120294 - DNA, 386 bp, Homo sapiens
actcaggagcccagatggcttcacctcgtggatcccgcaccggggctgcagatagatggagctgcctgccagtcccgcgttgttcgcccgcactcctcagcccttgggtggtcgatgggactgggcgccatggagcagggggtggcgctcgtcaaggaggctcgggccgcacaggagcccacggagggggtcggaggctcaggcatggcgggctgcaggtcccgagccctgccccgcgggaaggcagctaaggcccgtaaatatagaatggctgtttgctttaattctaacacatacttttggcacattccaggttcttgcttagacttctcaggctctaatttgaaaccccagagtcctttacccagactgatctggggcctatg

SEQ ID NO: 120295 - DNA, 543 bp, Homo sapiens
atgcggccgtccggagggcgggcggaagggcggtgcaggcggtggccggcgcgctcggccgcggtagctcgatcccgggctcgccgcccccgcaccagcagagctgccgccgaccagccgctgccgcccccgggaagggaacccgcttataaggcggcgctgcccgacgggaggggcttcccagggggcctgctctcccttctacatcttacctatgggacactgttcaccacagttcactggacagaaaggaaagaaaagagaaaagaaaagaggaaaggaaggaaggaagaaagaaaggaaggaaagaaggaaggaaaagaaaaaggaagggagggagggcaggccagcccgagcctccccgacgagcgccgccccctgtccacggcgcccagtcccatcgaccacccaagggctgaggaatgcgagcgcacagcgcgggactggcaggcagctccacctgcagtctcggtgcgggatccactaggtgaagccagctgggctcctgagtctggtggggacgtggagagtctttatatctag

SEQ ID NO: 120296 - DNA, 457 bp, Homo sapiens
cattcttgatggataaacttaatactgccagtacatacacaaggatgataaagcggtttctcaggtgttccttctgaccgacacactctacatatgtccgggctgcaggtggagctgcctgccagtcccgcgccatgcgctggcactcctcagcccttgggtggtcgatgggactgggcgccgtggagcagagggtggtgctcgtcggggaggctcgggccgcacaggagcccatggagtgggtgggaggctcaggcatggcgggctgcaggtcccgagccctgcccagcgggaaggcagctaaggcccggcaagaaatcgagcacagcgccggtgggccggcactgctgggggacccagtacaccctctgcagccgctggcccgggtgccaagtctctcactgcctgggccggcagggccggccggctgctccgagtgcaggcccaccaagcccat

SEQ ID NO: 120297 - DNA, 942 bp, Homo sapiens
tcagggacagtcccgcccacatttgtgaggacagtcattcaggcacaaggggctcgtacagtcattcagcaatcgttgattgggagcctctatatattcagacactgtgttaggtgccaggggattgagtctgtctttgtcatcattatttggagcagagtagggtatgatgagaaaggcttctgcctcttcacatctgtcttgggagtttgggggcatgtgagaaccaaaccatgtctcctgattacctggagaaccctgaagtctagaagtggcctggagtagcctgccggcttcagctctagcccaggtaccagcccccaaatcataagaaagcaaaagcgcggggtccctcaacaccccgtctgcgatctgccgggacgcttccggccgcgggctggcacgcccttggctgcgcaaatccaagtgcctggcctgccaccttgtggacaccaggagtaaaaccgccggtgggctggctccagtgccctctgcccaccttatctctgtgcgcgagcgggaaccggggctgtgtgccgtgcttgtgagccagctggagttccgggtgggcgtgggcttggtgggccccacactcggagcacgccgcgagccctgctggccccaggcaatgggggacttagcacccgagccagtggcggcactgcgcttgatttctcgccgggccttacctgccttcccatggggcagggctcgggacctgcagcccgccatgcctgagcctcccacccactccatgggctcctgtgcgcccgagcctccccgatgagcaccaccccctgctccacggcacccagtcccatcgaccacccaagggctgaggaatgtgcgcacggcgcaggactggcaggcagctccacctgcagccccggtgtgggatccactaggtgaagccagctgggctcctgagtctggtggggacat

SEQ ID NO: 120298 - DNA, 444 bp, Homo sapiens
ctagacataaggactctccacctccccaccagactcaggagcccagctggcttcacccagtggatcccgcaccagggctgcaggtggagctgcctgccagtcacgcgccgtgtgctcgcactcctcagcccttgggtggtcgatgggactgggcgccgtggagcagggggtggtgctcgttggggaggctcgggccgcacaggagcccatggagtgggtgggaggctcaggcatagcaggctgcaggtcccgagccctgccctcctcttcaaatactactactgtgatatatttaaataaggagatccgttcaagaatttccttcattggtttggatttggatttctttgccatggaacatattccaaccacaatctgcctttctggtggtccagtctgccaccctgtgaagaaggtgcctgcttctcctttaccttctgccat

SEQ ID NO: 120299 - DNA, 1608 bp, Homo sapiens
atggaagatgaaatgaatgaaatgaagcatgaagagaagtttagagaaaaaagaataaaaagaaatgaacaaagcctccaagaaatatgggactatgtgaaaagacaaaatctacgtctaattggtgtacctgaaagtgacggggagaatggaaccaagttggaaaacactctgcaggatattatccaggagaacttccccaatctagcaaggcaggccaacattcaaattcaggaaatacagagaacaccacaaagataccccttgagaagagcaactccaagacacataattgtcagattcaccaaaattgaaatgaagaaaaaaatgttaagggcagccagagagaaagcctccccgacgagcaccaccccctgctccagggcgcccagtcccatcgaccacccaagggctgaggaatgcgagcgcacggcatgggactggcaggcagctccacctgcagccccggtgcgggatccactaggtgaagccagctgggctcctgagtctgggctaggagagagccaaagcctgggaaagctggcctttcagtggcagcctgcttccaggacctccttcctgaggacgatggacaagctattggcactgagtgtggctctgctcttcctcctgggcgatgagtcctggaagttgctgcctgaacagggttttaacagtggaggcccccgcatggtctgggaagatggcactcgctcctgtgccctgagctctgaggttgtgagggccagtcagcacaaacttgagaggccttctggtgcccgtgtaggcttcaccagcctccaggaagggatagttcatgcagaatggaccagtggtctgggcctgcggaggtcaggaaaggatttctgctatataaactgcgagaggctaatggaatgggagctcctctctgaagcttgtccagatttctccgaatttcagtccaaggaacatcagcatcacattctgcgggaacaagggccaaaatgcctcattatgggaacatcttcccaggcagcaagccatactgcccagacccgtcctgctcatacctacaagtaccccaacctgtacgaagcagtgggcactggcattaagctagtcccccacctctatcatcaaacttcagttcagcaacttccaggtgagttcttttcacttgaaaacccttctgatgctgaggctttatatgagacttcttcaggcctgaacactttaagtgagcatggttccagtgagcatggttcaagcaagcacactgtggccgagcacacttctggagaacatgctgagagtgagcatgcttcaggtgagcccgctgcgactgaacatgctgaaggtgagcatactgtaggtgagcagccttcaggagaacagccttcaggtgaacacctctccggagaacagcctttgagtgagcttgagtcaggtgaacagccttcagatgaacagccttcaggtgaacatggctccggtgaacagccttctggtgagcaggcctcgggtgaacagccttcaggtgagcacgcttcaggggaacaggcttcaggtgcaccaatttcaagcacatctacaggtacaagtgtgcagtacgtagaaaactactag

SEQ ID NO: 120300 - DNA, 1083 bp, Homo sapiens
atggagaaacaactgaaccttgaggactctcagcagataaaccagatgaagtggataaagactcgctgtgtggagaaggcagggcagcccacgcagaaaggtgggaggcaagtagacagaggaggtggtagagcggtgatggagtgtgagcatctagataaaaagctgcagtcagcttcccaaaaatcagggaaaataataaccggaaataataaagtagaatgcaagaacaaaccagcaatcctgagaggacccacagaccctctgaaggaagcagactgctactgcaggacccgggagacacctcaaatatactctgggaggcggaaagcgtcggcaagttttcaagcccgtctagccctctgcctggaaacagactcagggctgttttggtggggcaccgtgggagagggggcaggtgtttcttgggaaaacaacaacaacaacaacattatttctcaggccccagcaatggaaaccacatgccaaaataagaaccatccgatcaggagtgtagtggcactgcttccaagtggagctgcaaccttaggagtgaagctgcagaccttcgcagtgagtgttgcagctcttaaggtgtcgcctctggagttgttcgttcctcccggtgggctcgtggtctcgctggcttcaagagtgaagctgcagaccttcgcagtgagtgttacagctcataaaagcagtgtggacccaaagagtggagctgcctgccagtcccgtgccatgcgctcgcactcctcagcccttgggtggtcgatgggactgggcgccgtggagcagggggcggcgctcgtcggggaggctcgggctgcacaggaacccacggagataaacagcaagggacagaagaagtctcagatccattgtgaactggtccccaaaggatcaagaaagctggccaaagtggataaggtcttgactgtgggtgggacccccaaagggcagcacacccctgattatatacttcaggaaccatgtgacttatcaagtgaagctttgaaggacatcctgcttctagaggaagaaggaacaaagaccaggctgtcccagagagttcctccctaa

SEQ ID NO: 120301 - DNA, 1499 bp, Homo sapiens
agacaaaggagacatgttttatccgtggacccaaaactccggtgccggtcacggactgggaaggcagccttcccttggtgtttaatcactgcagggacacctctgtgattattcacccacgtttcaaaggtgtcagaccacgcagggacgcctgccttggtccttcacccttagcggcaagtcctgcttttctggggaaggggcaagccgagctaggtcccaattcttcctcagcctctgctcctccaccctataatctttttatcgcctcccctcctcacacctggtccggcttacagtttcgttcggtgactagccctcccccacctgcccagcaatttactcttaaaaaggtggctggagccaaaggcatagtcaagcggctgaagactgacactgcccgatcgccttggaagacccctagaccatcacggacgccgagcttcagaaaagcagaacggactaaaggtcttttaaaaatacacctcaccaagctcagccaccaacttaaaaaggactggacaatacttttaccactttcccttctcagaattcaggcctgtcctcggaatgctacaagactggctactggccaattgggatatccttttatcagtcaaagctatgtcctggtcaatggatttcaaactgttgaggatctatgtgaagctgcagaccttcgagtgagtgttgcagaccttcgagtgagtgttacagctcttaaggtggcgcgtctggagttgttcgttcctcccggtgggctcgtggtctcgctggcttcagcagtgaagctgcagaccttcgcggtgttacagctcataaaagcaaaaagatgggactggggcaccttggagcagggggcggcgctcatcggggaggctcgggacgcacaggagcccacggagggggtgggaggctcaggcatggcgggctgcaggtccagagacctgccccgcgggaaggcagctaaggcccggcgagaaatcgagcgcagcgccgggctgacgatcaagaaggaaagatgcatacgaaatggatacagcaaagaaaaaatgaaactcatagttgtttctcatggcctccatgtaaatgacttgcagcataaactgacgcttttcaccaaggaaacatacacatacctagccagggattcagagaagcagaagcaggggtatctagcaggacttgaaggagcccatgccaacagggtgaaccagcagatcagtgacaacttagccatagtctttggacaaaagattcaaggccatctctccactactggacagctgcttatggcaggtcaagaaggaaagctgggccagcttcttttcctgggaatttcgggttggacaattcaactgaatgatgtttattgtctacagacacaatcaacaattgtccacataagatcagaagcagggaattccaatccacgagaatggctgccgcttttacaaggaatcagcagtaaagatgaaacacagccctttatgccttag

SEQ ID NO: 120302 - DNA, 390 bp, Homo sapiens
atggcgccaacatctgctgctggtgagggcttcaggaagcttccactcatggtagaagactcaggagcccagctggcttcacctagtggatcccacaacggggctgcaggtggagctgcctgccagtcctgcaccgttcgctcgcatacctcagcccttgggtggtcgatgggactgggcgccgtggagcagggggtggtgctcgtcggggaggctcgggcagcacaggagcccatggagtgggtgactagtgatgatgtgtcctgtacaattaagaaatccaagtatgacagcgacctacctcccagacctgggattactgtagcaacactactagtgatcaaatacattgtccaagcagatgtgaaaagagactcctaccagttctga

SEQ ID NO: 120303 - DNA, 363 bp, Homo sapiens
ttattcacagtcatcacccacattaggcacagagtcaggagcccagctggcttcacccagtggatcccgcaccggggctgcaggtggagctgcctgccagtcctgcgccgtgcgctcgcgttcctcagcccttgggtggtcgatgggactgggtgccgtggagcagggggtggtgctcgtcggggaggctcgggccacacaggagcccatggagtgagtgggagactcaggcatggcgggcttcaggtcccgagccatgggctggttgtctcttctaccccagatcctatatgtcatcttcttgcccactccacaccatccactctgacctctttgctgttcttcaaggacgcacaaagtcat

SEQ ID NO: 120304 - DNA, 1513 bp, Homo sapiens
ctaaatgagaaaagctaaattcaagcgagttatgcaaacgaggcgtttggcaacttttacttgcatgcttatggttttctggggaaattcaaatgcgggctccggagccgcagccctgagcgtcccgggggtggccatggcgccaccttggcctcccaaagtgctggaattacaggtgtgagccaccgcccctggcttgggcagctgatttttaaaccatttgatgaagtgactttctttaaaggaaacatacttagcatcgccaccacagtcccatagctcgaattcacagcccgtgcctttgttgttgctggtaacatgcgggttctcaaattctaggatcctcactccttgggttgggctgtattcagtgatgtcagaagattctgtcagaaagttggccaaaacagtttttccactctgtgaaaatgagtgcaaataaaggtctttgcttgggccttcggggctcattaacaccgggctcgcctccactacctcctccgggcagtggttggaatcaaggtctccagaatagggggcagcgggcgagagattccccagcggcgttgcaggagcccacgtggagcccacgtggagcccacgggcttccttgccctgagcagctgcagctgcagcccctgccaccccgagagtccagccccgagggcagctcctgccttgcctgcggttaccgccgccgccagacaaagacaggcttcctttatcatctccagagcctggtttgtggtgtgcaattagcatacactgtgtgtcctgtaaggacggctgttggacaaagcaggaataccacatctccatttccttccggtggcttgggatgtcagcattgaagacgatcaccactccatgagcatccttcatcagggccggccagcaggactcaaaccgagccttagctgccttcccgcggggcagggctcgggacctgcagcccgctatgcctgagcctcccacccactccatgggctcctgtgcggcccgagcctccccgacgagcgccaccccctgctccacagcgcccagtcccatcgaccacccaagggctgaggaatgcgagcgcacggtgcaggactggcgggcagctccacctgcagccccagtgcgggatccactagaaacagggaaaattgaccaagagattcacaaatacaacaccccaggattcactggttgcctctccagagtccagttcaaccagatcgcccctctcaaggccgccttgaggcagacaaacgcctcggctcacgtccacatccagggcgagctggtggagtccaactgcggggcctcgccgctgaccctctcccccatgtcgtccgccaccgacccctggcacctggatcacctggattcagcggtgtttgcagaacagcggtttttcgtgaactgcgaatgctgccatctgatcgttcctctggaagttttgtctcagaggagtacccggccgtgtgaagtgtcagtctgcccctactggggggtgcctcccagttag

SEQ ID NO: 120305 - DNA, 489 bp, Homo sapiens
ctcctggtgagaggtgacagcgtgctggcagtcctcacagcccccgctccctctcggagcctcttctgcctgggctcccactttggcggcacttgaggagcccttcagtccaccactgcactgtgggagcccctttctgggctggccaaggccggagcccactccctcagcggcgctgcgctcgatttctcgccgggccttagctgccttcccgtggggcaaggctcgggacctgcagcccgccatgcgtgagcctcccacccgctccgtgggctcctgtgcggcccgagcctcctcgacgagcgccaccccctgctccacagcgcccagtcccatcgaccacccaagggctgaggagtgcgggcgcacggcgcgggactggcaggcaactccacctgcagctgcgagggtccgcggcttcattcttgaagtcagtgagaccaagaacccaccaattccggacacattagcatctgcattccagaagac

SEQ ID NO: 120306 - DNA, 826 bp, Homo sapiens
atgactgtatttgaagataaggcctttggaaggataggagccagaagcgctggtgcaagtcaagccttcatcgacattttgaccacacacgtaatgggtttttcagctggaagtctgacgatccagccagccagtgcttctcagcccccttgcagtaagaagcagccagtgggagctcagatgaggcaggaatctagctcccgtaggcctgacagtacctcaggcagcgattcgcgaagggccatctgcagatttttgagggtccctgaatccaatttaggaaggtatgaagtcaaaactcttcgtaacaatagtaagacgtttgcctttgtcactgtgttgatatttgtactgatgcccttggctgcaagtaaggcaggggctgtcgagttggcagctgagtgtgcagctaagaagaaaaggagaacgggctctgagagggctcgggacctgcagtctgccatgcctgagcctcccacccactccatgggctcctgtgtggcccgagcctccccgacgagctccaccccctgctccacggcgcccagtcccatcgaccacccaagggctgaggaatgcgagcgcatggcgcaggactggcaggcagctccacctgcagccccggtgcgggatccactaggtgaagccagctgggctcctgagtctgttaagatgtttgtcatgctgcattgtaataaccctttcacctgtctgtctcctctgatcaactgtgagccttttctcaagtgcctaacacattgcaaggaattagcaaatgcttgtttcctctccttcgtgctccctgcaagcacagtccacgagacag

SEQ ID NO: 120307 - DNA, 510 bp, Homo sapiens
atgccccaaaggcagctcctggaccagtggattgaaatggatgtatcattatatgacaaatcgcctttgaacgtgcctggagatctgactgtcagcaaagatcatgtcagggcactgaagtacttctttggcttctttaaaacacaggctcgggacctgcggcccgccgtgcctgagcctcccaccccctcggtgggctcctgtgcggcccgagcctcccggatgagcgccgccccctgctccacggtgcctagtcccatcgaccacccaagggctgaggagtgcgagtgcatggcgcgggactggcaggcagctccacctgcagccccaaattcctatgatgcatatgttggtacacttgatggtgtcctacagatccctgggactctgttcattttcttcattctttttttcgttctgctccttagactgaataattttgatggccttaaatttaagttcacggatcctttcttcttcttgctcaagtctgctgtcgaatacctctag

SEQ ID NO: 120308 - DNA, 470 bp, Homo sapiens
atgaagccacggaccctcgcggtgagtgttacagctcttaaaagcagcgtggacccaaacaactcaggagcccagctagcttcacccagtggatcccgcaccagggctgcaggtggagctgcctgccagtcccgtgccgtgcgctcgcactcctcagcccttgggtggtcgatgggactgggcgccgtggagcagggggtggtgctccttggggaggctcgggccgcacaggagcccatggagtgggtgggaggctcaggcatggcgggctacaggtcccgagccctgccccgcgggaaggcagctaaggcccggccaacaccctttggtcacatgaataaaagtcaagccctttctttgctcattgctcagcctctgggtattaatctgctgagctggtggccacctaaatacaatcgtcctgttcccctcattggtctctccggtctcctgattccagccacattttg

SEQ ID NO: 120309 - DNA, 991 bp, Homo sapiens
taggacctgtatcctcatcacctaagctggcagagcagaaatgcagcaagaaagagaaagtcatgaagaggccaaagacccatccccgctatctcctagggaaggttctcaaaagcagcaacaaaatgttaatacttccacaccttcccattgcccgaggctcccctacgaatgccgccccctgctccacggcgcccagtcccatcgaccacccaagggctgaggaatgcgagcgcaaggcacagcactggcaggcagctccacctgcagccccagtgcgggatccactaggtgaagccagctgggctcctgagtctggtggggacgtggagagtctttatatctagctcagggattgtaaatacaccaatcggcactctgtatctagctcaaggtttgtaaacacaccaatcagcaccctgtgtttagctcaaggtttgtgagtgcaccaatcgacactctgtatctagctgctctggtggggcctcggagaacctttatatctagctcagggattgtaaatacacccatcggcactgtgtatctagctcaaggtttataaacacaccaatcaacaccctgtgtctagctcagggtttgtgagtgcaccaatcaacactctgtatctagctgctctgggtggggggccttgggagaacttttgtgttcaatactctgtatgtaactaatctgatggggactgtggagaacctttgtatctagctcagggattgtaaatgtaccaatcagcaccctgtcaaaacaggccacttcggctctaccaatcagcaggatgtggggtggggccagattaagagaataaaagcagggctgccggagccagccagtggcaacccgctggggtccccttccacagtgtggaagctttgttctttcattctttgcaataaatcttgctgctgctcactctttgggtccacgctgcttttatgagctgtaacactcaccgcgaaggtctgcagcttctctc

SEQ ID NO: 120310 - DNA, 2992 bp, Homo sapiens
ttacatcaagcatattacatgagctgctggtaaacagtacagacaatcatggcctacagctgagcagatgctgatgctgatgctgatgctgatgctgatgctggattcttggttcaaggagcagagaaaaggaaaactaaaagctccccgcacactagcactgttgtcaaggaacgtgatcactactgtctttgctccatggagctgaacgcctgaggtatggcctgctgacattccagtggcaaatcctgcccctcgtcctgttgccttttcctgctggctcagcagtatgccatctccacctggatacctgatggcctcgtactgctctacacccaaaatgttcaaagtaggatcaccattcaaaacagatcttccctcaacacccccacttctatcgtgaatgccacaattcttctcccctgcctgggctcccactttggtggcatttgaggagcccttcagcctcccccctgcactgtgggagcccctttctgggctggccaaggctggagcccactccctcagcttgcagggaggtgtggagggagaggcacgagcgggaaccggggctgcgtgcggcgcttgcgggccagctggagttccgggtgggcttgggcttggtgggccccgcactcggagcagccggctggcccgccccaccggccccgggcaatgaggggcttagcacccgggccagcagctgcagagggtatactgggtcccccagcagtggctggcccaccagtgctgcgctcgatttcttgccagggccttagctgccttcccatggggcaggactcgggacctgcagcccgccatgcctgagcctcccaccccctccattgggctcctgtgctgccggagcctccccgaacgagcgccgccccctgctccacggcgcccagtcccatcgaccgggaaggaacaaacaacccaagggctgaggaatgcgagcgcacggcaccgggactggcaggcagctacacctgcagtcccggtgcgggatccactgggtgaagccagctgggctcctgagtctggaactaacatttccattacacctggaaatgccacatttgtgacccgggtgcagggacaggcttggtttgcctcatgtatcactggtcatgatatgtctagtttaaaaacttccagtgtcgtggtattaaggagacaatctgaggcacttctaccagccaatttgacatgcaattggcaagattcttctgcccttgccaccttagaaagtgccctgtcccaggtcagacacaaaagattcacatttacacttatggtctttacaggctcagccatagacattatggcaactgttagcattgctgttgtatctattactgaatcagtacaaacaactgcttttgtagataatctggccaaaaatatatgtgatgaacttctcctacaggacatggatgaagctggaaaccaacattctcagcaaaataacacaagaacagaaaaccaaacaccacatgttctcactcataagtgggagttgaacaatgagaacatacggatacagggaggggaacattacatactggggcctgttggtggcaggttgccaacatccaaactcgctgttgattgccagctcctgctccttgcagcagcccagcatgctctctgctggtgccaaaatacccttccaccaaaccccgctaacttctggaactgtcctagagggtttcctaccctagcaagtgagcttgcctatgtcagccctaaccttgctcttgtcattcagctgagccagaggaaaaaatttgagctattctggggtggtctacagagaaccatcttctttcccttcagtgttctcagaatattgactgttgatgaacaagccaatgatgtgagtgtggctgcagcaaggacccttcaaattttcagagatgacatgattgtatatctagaaaaccccattgtctcagcccaaaatctccttaagctgataagcaacttcagcaaaatctcaggatacaaaatcaatgtacaaaaatcacaagcattcttatacaccaacaacagacaaacagagagccaaatcatgagtgaactcccattcacaactgcttcaaagagaataaaatacctaggaatccaacttacaagggatgtgaaggacctcttcaaggagaactacaaatcactgctcaaggaaataaaagaggatacaaacaaatggaagaacattccatgctcatgggtaggaaaaatcaatatcgtgaaaatggccatactgcccaaggtaatttacagattcagtgccatccccatcaagctaccaatgactttcttcacagaattggaaaaaactactttaaagttcatatggaaccaaaaaagagcccacactgccaagtcaatcctaagtcaaaagaacaaagctggaggcatcacactacctgacttcaaactatactacaaggctacagtaaccaaaacagcatggtactggtaccaaaacagagatatagatcaatggaacagaacagagccctcagaaataacgctgcttatctacaactatctgatctttgacaaacctgagaaaaacaagcaatggggaaaggattccctatttaataaatggtgctgggaaaactggctagccatatgtaggaagctgaaactggatcccttccttataccttatacaaaaatcaattcaagatggattaaagacttaaatgttagacctaaaaccataaaaaccctagaagaaaacctaggcattaccattcaggacataggcatgggcaaggacttcttgtctaaaacaccaaaagcaatggcaacaaaagacaaaattgacaaatgggatctgattaaactaaagagcttctgcacagccaaagaaactaccatcagagtgaacaggcaacctacaaaatgggaaaaaattttcgcaacctactcatgtgaaaaagggctaatatccagaatctacaatgaactcaaataa

SEQ ID NO: 120311 - DNA, 604 bp, Homo sapiens
ggaagaagtgaatgaacagcttcgagatacagcagacgggacctttttggtacgagatgcgtctactaaaatgcatggtgattatactcttacactaaggaaagggggaaatgtcaaattaatcaaaatatttcatcgagatgggaaatatggcttctctgacccattaaccttcagttctgtggttgaattaataaaccacgaccggaatgaatctctagctcagtataatcccaaattggatgtgaaattactttatccagtatccaaataccaacaggatcaagttgtcaaagaagataatattgaagctgtagggaaaaaattacatgaatataacactcagtttcaagaaaaaagtcgagaatatgatagattatatattctacaacaaaggataaaagtaaaagatgttacattccttctaagtgtgttttcttgcatctacctacggaccattatcattgacattttccagtcttctctctctcacatccaggcagcaactggaaggtttcagagaaaaggaagacaaaggctaaccagcaacagcaactgtagggactgcagcataaatacgacaaggaagagaggagccaaatag

SEQ ID NO: 120312 - DNA, 522 bp, Homo sapiens
atggaccgtgcctcctttgtagataagctgattgagtgtcatcacgtgggcttgggtccacctgatgccgtggttccttccctctctcacacgcgccttaaacagagagtagtcagtcagggaggacccgaaggagtgtccttctgtctgctgtcattcctgtattccatcaaccagacaatctgcttgcggttggatagcattgaagccaaattgcaagccctggaggctacttgtaaatccttagaagaaaagctggatctggtcacgaacaagcagcacagccccatccaggttcccatggttgccggctcccctctcaggacaacccagatgtgcaacaaagtgcgatggttccctggcctggctgtagccttctgcccgtggtgcctctttgagctctcgggcatgccggaagttttggaaacgctacccggccgtcttccgagctccgctgctggtggtggagttggcatctcagttcgcatgcgggagctggggatcgttcacgtgttactctga

SEQ ID NO: 120313 - DNA, 432 bp, Homo sapiens
gctcgaccggggttccggtcagccagcagaacctgcctgctggagaaggccagtgtcctgttcaacactggggccctctacacccagattgggacccggtgtgatcggcagacgcaggctgggctggagagtgccatagatgcctttcagagagccgcagatatgtctcctccagggctgaccagacggagccttggccccacccggtggcaccaggggaccccccactgaagagaatctacaggtcatccctcgcaagggccagaccagtctccagctctggtgtaacttcccattaagaaacttgctccggccgggcgcggtggctcacgcctgtaatcccagcacttcgggagaccaaagcgggtggatcacaaggtcaggagatcgaggccagactgcatctcagaaaaaaaaagaaaaaagtcgacg

SEQ ID NO: 120314 - DNA, 966 bp, Homo sapiens
atggctgcgctatggaatacctgtggagcttggaaaaacatgcttatacctgagtgccactctcagcttctgagagtggccgcaaacccaaaggtgcgggagcaagtgcggctggagctgagcttcgtcaactcagacctgcagatgctcaaggaagagctggaggggctgaacatctcagtgggcgtctatcagaacacagatgaagatggctatttatatgaagatgaaatcacagatcttatggatctgagacaagcttgtcggacgcccagccgggatgaggccagggtggaactgctgatgacatacttcatccagctgggctttgttgagaatcgattattcccacccacatggcagatgggattcctgttcacctggtatgactccctcactggggttctggtcagccagcagaacctgctgctggagaaggccagtgtcctgttcaacactggggtcctctacacccagattgggacccggcgctatcggcacacgcaggctgggctgcagagtgccatagatgcctttcagagagctgcaggggttttaaactacctgaaagagacatttacccataatccaagttacgatatgatccctgccatgctcagcgtgcttgtcaaaatgatgcttgcacaaacccaagaaagcgtgtttgagaaaatcagccttcctgggatctggaatgaattcttcatgctggtgaaggtggctcaggaggctgccaaggtgggagaggtctgccgacagctgcacgcagccatgagccaggtgctggtgaaagagaacatcccctactcctgggccagcttggcctgcgtgaaggcccaccactatgcggccctggcccactacttcactgccatcctcctcatcgaccaccagggtaaggcctgtggggttcgggggtttggccagggctgtggtccagctgccccaggggcgattctgagctga

SEQ ID NO: 120315 - DNA, 1330 bp, Homo sapiens
atggattttatcctggaacattacagtgaagatggctatttatatgaagatgaaattgcagatcttatggatctgagacaagcttgtcggacgcctagccgggatgaggccggggtggaactgctgatgacatacttcatccagctgggctttgtcgagagtcgattcttcccgcccacacggcagatgggactcctgttcacctggtatgactctctcaccggggttccggtcagccagcagaacctgctgctggagaaggccagtgtcctgttcaacactggggccctctacacccagattgggacccggtgtgatcggcagacgcaggctgggctggagagtgccatagatgcctttcagagagccgcagagccccacgcgcggcgggcgagcatctacttacgaaatgactcctgcggcctctccgaaatcccaggagcatccttgcagcgcgaggagaatggaccggggcctggactcatcagcagatctatccacagccagggaccactccctaaagcccgccgcaggcccagccctcacgctttctcttcgcaatggactttgcagcaaccacgtcggccattggctcagctcggccctcgaccaatcagagctaaggttacttccacaccggtcgttcttggcaaccagtggcataataagagtgccacatactccgtgggaatgcagaaaacgtactccatgatctgcttagccattgatgatgacgacaaaactgataaaaccaagaaaatctccaagaagctttccttcctgagttggggcaccaacaagaacagacagaagtcagccagcaccttgtgcctcccatcggtcggggctgcacggcctcaggtcaagaagaagctgccctccccctttcagctttctcaactcagacagttcttggtactaatgtgaggaaacaaacatgttcaagcccccgaacatttccggtgctgactcggccttaaacgtttgtgccataatggaaaatatctatctatctgttctcaacatcctgtttttctcatagcgtaaactcacatttgatgtgtttttatgaaggaaagtaaccaagaaacctctaggaattaccgaaaaaagaacttttttgaggtgtgttactatactgctgtaagttatttattatataaagtattgtaaatagaatagcgttgaagatatgaaatatggctatttttaatggtgacaattatgacttttagtcactattaaattggggttacctatatcagtacaatttgtagttgtttccaggtttggctaataatcattccttaacctagaattcagatgatcg

SEQ ID NO: 120316 - DNA, 397 bp, Homo sapiens
ctagatggagtttctaagggttggcccccatgcttaagagccttggcagcaactgtcctgctaggacaagaggcagataagctaactcttgggcaaaacctaaacataaaggcccccccatgctgtgtgtcagagagcccagttgaacataactgtgtagaggtgttggactcagtttattctagcaggcccgacttccgagaccatccttggatgtcactagactgggagctgtacgtggacgggagcaactttgtcaactcacaaggagagaggtgtgtgggatatgcagtggtaaccctggatgctgtcattgaagccaaatcgttgccccagggcacttcagcccagaaggccgaactcattgctttaattcgggcctcagagctaagtgaag

SEQ ID NO: 120317 - DNA, 2628 bp, Homo sapiens
atggagcaggccaatcacccagtaaggcttatcaatgtggtttgcaaggacactttaaaaaagattgtccaacaagaaacaagctgccccctcacccacgtccactatgccgaggcaatcactggaaggtgcactgccccagaggacaaaggctctctggaccagaagcccccaacagatgatccaacagggtgcccatggcaagtgccagctcatgtcatcaccctcactgagacctgggtatgtttaaccattgagggccaggaaattgacttcctcctggacactggagtacaaaaaccgaatggtcagtggagactagtgcaagatcttatacccatcaaagaggcagtaattcctttatatccagttgtaccaaacccctataccctgatctctcaaataccagagaaagcagaatggttcatggctctggacctcaaggatgccttcttctgtatctccctgcactctgactcccagtttctttttgcctttgaggatcccacaaaccacacatccaaaattacacggacagtcttgccccaagggtttagggatagccctcctctgtttggtcaggcactggcccaagatctaggccacttctcaagtccaggcactctagtctttcagtatgtggatgatttaattttggctaccagttcagaagcctcatgccagcaggccactctagatctcttgaacttcctagctaatcaaggaaaggtagttcctaatctttgggggaaactcccattaaataccacaaggaaatcatggagttattgcacgcagtgcaaaaacccaaggagatggcagtcttacactgccaaagccatcaaaaagcagctggcagaggcaggtcctgtgacagccatcttgctgctactcatctttgggccctgtatttttaacctccttattaaatttgtttcctccaggattgaggccatcatgctacagatggtcttacaaatggaaccccaaatgagctcaactaacaacttctaccaaggacccctggaccgatgcactgaccctttgtctggcctagagagttcccctagatgctcagaggccccatgcctgatgagtcagtggacaggggacattgaatatgacctgcttctgccacccattccacaccaaacaactctgtgtgacctacaaaatcttaaaggcatcttttcaagatatcacagaaaatggtatggagaaatacttgcattgcttacccccaccgccaacgtatgtggacatagtcaagtaccccatgcttgctcaatctatcacgaccctgtcacgtggaaccctcagggtttattgcctaagtccctgtatggagtcacaaagtggggagataaggaacattttgaatgggggtcccaacagcaacgagctttttatgagttaaaaggaaaactcatttcggccccagccctggggctacctgacctgacaaaaccttttacactatatgtgtcagagagagaaaaaatggcagttgcagttttgacccagactgtggggccctggccgaggccagtggcctacttctctaaacaactagatggggtttctaagggttggcccccatgtttgagggccttggcagcaacagccctgctagcacgagaagtggataagctaactcttgggcaaaacctaaacataaaggccccccatgctgtggtgactttaatgaataccaaaggacaccattggctaatgaatgctagaataactagataccaaagtttgctctgtgacaaaccccatataaccattgaagtttgcaacaccctgaaccccaccaccttgctcctggtatcagagagcccagttgaacataactgtgtagaggtgttggactcagtttattctagcaggcccaacctccgagaccatccttggacatcagtagactgggagctgtatgtggacgggagcagcttcatcaacccacaaggagagagtgtatggggcattatacaaggaaaaaggcctattaaactctgggggaaaagacgtaaagtatcagcaagagatcttgcaattattggaggcagtgtggaagccccaaaactggtgcagcagtgtgtcacctactggcagcacaatgctaggcaaggtccaaatgtcctgcccggcatacaatcttatggagcagccccctttgaagatctccaagtagccctcactgagatgcccaaatgtggaggtaacaagtatttgctagttctagtgtgtgcatacgctgggtgggtggaagtctatccaacacagaccgagaaagctcatgaagtaacctgtgtgcttctccgagatctccttcctaggtttggactgcccttacaaatcagctcagacaacgggctgggatttgtggctgacttggtacagaagacagcaaagaatctcaccgacactggacagctcccactggactatactggatatgtgggcatagagcctacaccaaattacctgaccaatgggattaccctggatgttgtattaagaacagaatgtaaagaagtggaactatctcagggagaattattagtaggccactgcaataacaaagtgaagggaaatggtgacttagagcaggaagatggctga

SEQ ID NO: 120318 - DNA, 384 bp, Homo sapiens
taaccattgaagtttgcaacacctaaaccccgccaccttcctcccggtgtcaaagagcccagttaaacataactgtgtagaggtattggactcagtttattctagtgggcctaaccaccgagaccatccttaaacatcagtagactgggagctgtacatggatgggagcagcttcaccaacccctgcaaagtgactctgaagaagacgacaagccctgctccagtcacacccggaagctgactggtccacgcacagctgaagcatgaggaaactcatcgcgggactaattttccttaaaatttagacttgcacagtaaggacttcaactgaccttcctcagactgagaactgtttccagtatatacatcaagtcactgaggtag

SEQ ID NO: 120319 - DNA, 1665 bp, Homo sapiens; identical to SEQ ID NO: 118653

SEQ ID NO: 120320 - DNA, 897 bp, Homo sapiens
atggggtttcaccgtgttggtcaggctggtcttgaactcctgaccgcagctgccctggcagccgactggatggtgcccacccacaatgaggagagcccagttgaacataactgtgtagaggtgttggactcagtttattctagcaggcccgacctccgagaccatctttggacatcagtagactgggagctgtacgtggacgggagcagcttcatcaacccacaaggagagaggtgtgcgggatatgcggtggtaatcctggatgctgtcattgaagccaaatcattgccccagggcacttcagcccagaaggccgaactcattgctttaatttgggccttagagctgagtgaaggtccaaccgtcctgtctggcatacaagcttatggagaagccccctttgaagatctcaatatagacttcaccaagatgcccaaatgtggcagtaacaagtatttgctagttccagtgtgtacatactctgggtgggtggaggcctatccaacacgaaccaagaaagctcgtgttcttctccgagatctcatcgctaggtttggactgcccttatggatcggctcagaaaatgggccggcgtttgtggctgacttggtacagaagacagcaaaggtgatgagtgtggatcaaagactggaacgtagcccccttgcagccacggtggaaaggaccccagactgtcatcttgaccactcccacagctgtgaaggtagagggaatcccagcctgggtccaccacagctgcgtaaaacctgcagcaccggagacctggtaggtgagaccaagcctagacaacccctgcaaagtgactctgaagaagtcgacaagccctgctccagtcacacccggaagccgactggtccactcatggccgaagcatga

SEQ ID NO: 120321 - DNA, 258 bp, Homo sapiens
atgaggcgggtctacacgagacccaaatcttacatggacgtggcgggtcttacgcgggccctaaatcctacgggggacgtggcagtgtgcacggccagggatgccggggaggacgtgcagagtcagggtctgacacccgctggggaccgcgtccctcacctgctccaggtggaaagagaagccatcgccgccaccggaaccgaagcctccgcgctcgggctccgcactctccccacccctgccgccgcgtcgctctag

SEQ ID NO: 120322 - DNA, 282 bp, Homo sapiens
atggtcaccgggggggctttagagtcgcacccgacagggctgtcaagtctgaatctggaaaataagggtcctgtggctgcttttgcaatcctagtacactttgagaacgtcatgttccagcgtgggaacgccgaggaggaagctggtgcagcgcgacagtcgagcggctacggagggccggagggcccaagccgctgcgacgaagcggggctgggagcctgccggtgcgccccgcaaagagacattgcgcaggcgcagcgcgtcaaggctggccccacctag

SEQ ID NO: 120323 - DNA, 411 bp, Homo sapiens
gcatgtaccgggtgtttcagcacactccacagccggctcctgagtgaccagactcggctgaaggatgacgtggacatgctgaggcgggagaatgggcagctgctgcgggagcgaaacctgctgcagcagtcatgggaggacatgaagcggctccacgaggaggaccagaaggagatcggtgacctccgtgcccagcagcagcaggtaggcccagcccctggagactggccatttctcccaagtagtcctcattccttttaatggagaatagtattgagaagtaaatgctgggccgggcacgttggctcacatctgtgatcccagcgctttggaagaccaaggtgagagattgcttgagatgagcctgggcaacatggcaagatcccatctctacaaaaaaaaaaaagtcga

SEQ ID NO: 120324 - DNA, 642 bp, Homo sapiens
atgctggaagagccagcaagggaggttgaaatccttcgaaagcagtgcaaggctctgtgccaggagctgaaggaagccctccagaaggcggatgtggccaagggccggcgggactgggccttccaggagcgagacaagattgtagcagagcgtgacagcatccgccagggcctggaggtggccaggaagtttacctggacatctctctggctcctggaagcacaggcatacagggcctggaagcaaagcatctctgatcagctggctaaagaaaggccctaccacaggctgaatcctgactatgagaggctgaagatccagtgcgtgcgagccatgtcggacctgcagagcctgcagaaccagcacaccaacgccttgaagaggtgtgaggaggtggccaaggagactgacttctaccagccccagtatttggaggcactaggtctgtaccagaggggcctgtctcccttccctggagatacatgtgccctttttggtgtcaggtttgtaagtggtgatttggatgtttctggaattgggctgttagcaggttttggcttgcctctgagtgctacagacctacctgccattggctcctgtccgctgtatctacgggaagtgtggaacctgaggcttgagtaa

SEQ ID NO: 120325 - DNA, 1935 bp, Homo sapiens
atggctcaagagctcaagtatggtgacatcgtagagagacacctcatcgatggagatgtggtgctgttcaatcggcagccctcgctgcacaaattgagcattatggctcatctggccagggtcaagccccaccggaccttcagatttaatgagtgtgtctgtacaccctataatgctgactttgatggtgatgaaatgaaccttcatcttcctcaaacagaagaagctaaagcagaggcccttgttctgatgggggtatgcttttcatacctggcagtgctgaccgtggccatccagacctgtttagagatgcagctttctccagcatccacccgctgctcctggtttggctgctggaggccatcaagaacaaatctaatcccttctgacagtcgtattgagagacaagacacctacccattccccagtcattctcttcagcccatgctcaacgccttcagattcttcagagtctctgaaaatgtgataatgaggctactggtcattgccggttctacctacagcgtcctgtccaccatgccctcagactcagaaagcagcagctccctcagcagtgtgggaggagcgactcaagccttcgcgaaagaaaataaccaaaaagcatacaaagaaacgtacggcgtctctcatattacacgccatgatatgctgcagatccctaaacagcagcaaaacgaaaaataccaagtgcctcaattcgatcaatcaacgattaaaaatattgagtctgcaaaaggacttgatgtgtgggacagctggccgctgcaaaacgctgacggaacagtagctgaatacaacggctatcacgttgtgtttgctcttgcgggaagcccgaaagacgctgatgacacatcaatctacatgttttatcaaaaggtcggcgacaactcaatcgacagctggaaaaacgcgggccgtgtctttaaagacagcgataagttcgacgccaacgatccgatcctgaaagatcagacgcaagaatggtccggttctgcaacctttacatctgacggaaaaatccgtttattctacactgactattccggtaaacattacggcaaacaaagcctgacaacagcgcaggtaaatgtgtcaaaatctgatgacacactcaaaatcaacggagtggaagatcacaaaacgatttttgacggagacggaaaaacatatcagaacgttcagcagtttatcgatgaaggcaattatacatccggcgacaaccatacgctgagagaccctcactacgttgaagacaaaggccataaataccttgtattcgaagccaacacgggaacagaaaacggataccaaggcgaagaatctttatttaacaaagcgtactacggcggcggcacgaacttcttccgtaaagaaagccagaagcttcagcagagcgctaaaaaacgcgatgctgagttagcgaacggcgccctcggtatcatagagttaaataatgattacacattgaaaaaagtaatgaagccgctgatcacttcaaacacggtaactgatgaaatcgagcgcgcgaatgttttcaaaatgaacggcaaatggtacttgttcactgattcacgcggttcaaaaatgacgatcgatggtattaactcaaacgatatttacatgcttggttatgtatcaaactctttaaccggcccttacaagccgctgaacaaaacagggcttgtgctgcaaatgggtcttgatccaaacgatgtgacattcacttactctcacttcgcagtgccgcaagccaaaggcaacaatgtggttatcacaagctacatgacaaacagaggcttcttcgaggataaaaaggcaacatttgcgccaagcttcttaatgaacatcaaaggcaataaaacatccgttgtcaaaaacagcatcctggagcaaggacagctgacagtcaactaa

SEQ ID NO: 120326 - DNA, 1645 bp, Homo sapiens
atggcagaagatgaggagcaccaaattaactccaaatttgatggcgaaaccccagaggtagatgacgccgacacctgcccctccgccccatggaagcaaccggccttgaaaggacaccgcttttcatacctggcagtgctgaccgtggccatccagacctgtttagagatgcagctttctccagcatccacccgctgctcctggtttggctgctggaggccatcaagaacaaatctaatcccttctgacagtcgtattgagagacaagacacctacccattccccagtcattctcttcagcccatgctcaacgccttcagattcttcagagtctctgaaaatgtgataatgaggctactggtcattgccggttctacctacagcgtcctgtccaccatgccctcagactcagaaagcagcagctccctcagcagtgtggccatgctcattggttacacagtgtctatgactgctttcctgctacaaaggccctaccacaggctgaatcctgactatgagaggctgaagatccagtgcgtgcgagccatgtcggacctgcagagcctgcagaaccagcacaccaacgccttgaagaggtgtgaggaggtggccaaggagactgacttctaccagtttgtaagtggtgatttggatgtttctggaattgggctgttagcaggttttggcttgcctctgagtgctacagacctacctgccattggctcctgtccgctgtatctacgggaagtgttgcggacctgaggctggtgatgccctgggcacactccacagccggctcctgagtgaccagactcggctgaaggatgacgtggacatgctgaggcgggagaatgggcagctgctgcgggagcgaaacctgctgcagcagtcatgggaggacatgaagcggctccacgaggaggaccagaaggagatcggtgacctccgtgcccagcagcagcaggtgttgaagcacaacgggtcatccgagattctcaacaaactgtatgacacggccatggacaagttggaggtggtcaagaaggactatgacgcccttcggaagaggtacagtgagaaagtcgccatccacaatgcagacctgagccgcctggagcagctgggggaggagaaccagcggttgctgaagcagacagagatgctgacccagcagagggacacggccatccagctgcagcaccagtgcgccctctccctgaggagctggcgggaggcagcagcgcagccggccactgaccgggcagggcccccgcccttcccacatctcgccacctctcttgccaaaaatgaggcgatcaaccatgagctgaacaaggccacggcgcagaacaaggacctgcagtgggagatggagctgctgcagtcagagctgaccgagctgagaaccacgccagcaaaggagtcggagaaatacagggaggagcgggacgctgtgtacagcgagtacaagctcatcatgagtgagcgtgaccaggtcatctctgagctggacaagctgcagaccgaagtggagctggccgagtccaagctcaagagcagcacatctgagaagaaggcggccaatgaggagatggaggcgctgcggcagctcccaggggagagatatcctcgggagctcccctaa

SEQ ID NO: 120327 - DNA, 402 bp, Homo sapiens
ctctgagcacactgtcattcagcttatattgccaggacgggatatggactgaatgtacttcatggcattgcagaataaatggtcctatagatatttgattttcttttccttctgtacgtttctggatgtaactccattgcagaaccacagcattttacaacaactgtgactcgatgcagcccgaccgtggcctttgtggaatttccctccagcccccagctgaagaatgatgtgtcggaagaaaaagaccagaaggaaaccaggaaaatgaaatgagtgggaaaggtgggagttgggtgctgttcacaaaaggtgaagtgcaggagtggagggaaagcggtttaaaccccaccaagtttaacatgggcccccttatttacagctagctgctgctgtggcagt

SEQ ID NO: 120328 - DNA, 2538 bp, Homo sapiens
cgctctcggcagacgccttcaccagatgtagtcctcaggggaagcagcgatgggagaggaagcgactctgaatccgacttgcctcatcggaagctgccagatgtgaagaaggatgacatgtctgcacggcggacttcccatggtgagccgaaatcagcagtgccttttaaccagtacctcccgaacaaaagcaatcagacggcctacgtccccgcgcctctgagaaagaagaaagcagagagagaggaataccgcaagagctggagtaccgccacctccccgctgggtggggagaggcccttcagatacggtccgagaactcctgtgtctgatgacgcagagagcaccagcatgtttgacatgcggtgtgaggaggaggccgcggtgcagccgcacagcagggcccgccaggagcagctgcagctgataaataaccagctgagggaagaggacgacaaatggcaagatgacctggctcgttggaagagtcgtagaagaagtgtttctcaggacttaatcaagaaagaggaagaaaggaaaaaaatggagaagttactggctggagaagatgggacaagtgaacgaaggaaaagcatcaaaacctacagagaaattgttcaagaaaaagagcggagagagagagagctgcatgaagcatataagaacgctcggtcccaggaggaggcagaggggatccttcaacagtacattgagaggttcaccatcagtgaggctgttctcgaacgcttggagatgccaaaaattctggaaagaagccattcaacagagccaaatttatcctccttcctgaatgaccccaatcccatgaaatacctgcggcaacagtcactgcctccacccaaattcactgccactgttgaaaccaccattgctcgtgccagtgttctggataccagcatgtcagcaggcagtgggtctccaagcaaaactgtcactcccaaagcagtgcctatgctgacacccaagccttactcccagcccaaaaattctcaagatgttctgaagacctttaaggtagacgggaaagtcagtgtgaatggagagacggttcatagagaggaggagaaggaaagagagtgtcccacggtggcacctgcccactccttaaccaaatcccagatgtttgaaggtgtggccagagtgcacgggtctccactggagctgaaacaagacaacggtagcatcgagatcaacataaagaagccaaactctgttccccaagagctcgcagcaaccactgagaaaacggaaccgaatagtcaagaggacaagaatgatggtggaaaatcaagaaaagggaatatagaacttgcctcatcagaaccacagcattttacaacaactgtgactcgatgcagcccgaccgtggcctttgtggaatttccctccagcccccagctgaagaatgatgtgtcggaagaaaaagaccagaagaaaccagaaaatgaaatgagtggaaaggtggagttggtgctgtcacaaaaggtggtaaagccaaaatctccagaacccgaagcaacgctgacatttccatttctggacaaaatgcctgaagccaaccaactacatttgccaaatctcaattctcaagtggattctccaagcagtgagaagtcacctgttacgacaccttttaagttctgggcatgggacccagaagaggagcgcaggcgacaggaaaaatggcaacaggaacaggaacgtttgctccaggagagataccagaaggagcaggacaagctgaaagaagagtgggaaaaggcccaaaaggaggtggaagaggaagaacgcagatactatgaggaggagcgtaagataattgaagacactgtggttccatttactgtttcttcaagttccgctgaccagctgtctacctcttcctccatgactgaaggcagtgggacaatgaataagatagacctgggaaactgtcaagatgaaaaacaagacagaagatggaagaaatcattccagggagatgacagtgacttattgctgaagactagggaaagtgatcgactggaggagaagggcagcctaactgaaggggccttggctcattctgggaaccctgtatcaaaaggagtccatgaagaccatcagctggataccgaggctggggccccacactgtggaacaaacccacagcttgctcaggatccatcccagaatcagcagacatcaaatccaacgcacagttcagaagatgtgaagccaaaaaccctcccgctggataaaagcattaaccatcagatcgagtctcccagtgaaaggcggaagtctataagtggaaagaagctgtgctcttcctgtgggcttcctttgggtaaaggagccgcaatgatcatcgagaccctcaatctctattttcacatccagtgtttcaggtgtggaatttgtaaaggccagcttggagatgcagtgagtgggacggatgttaggattcgaaatggtctcctgaactgtaatgattgctacatgcgatccagaagtgccgggcagcctacaacattg

SEQ ID NO: 120329 - DNA, 474 bp, Homo sapiens
tcacgcctcattggcaggaaatggcagcagcagcagcataacagaaggcatggtccaggcaagaggcaggcccatttgaacgaagcctctgtaagagccaaggatgtggtaaagccaaaatctccagaacccgaagcaacgctgacatttccatttctggacaaaatgcctgaagccaaccaactacatttgccaaatctcaattctcaaggaattttgctgatcatcagtggcttcctcgctgagctgcagcacccagtacagtgcccagcaatggactggaaccaaaccagcagagcaaaaccagaaccacagcattttacaacaactgtgactcgatgcagcccgaccgtggcctttgtggaatttccctccagcccccagctgaagaatgatgtgtcggaagaaaaagaccagaagaaaccagaaaatgaaatgggttcctctagagtcgcactgcaggttgcaacctag

SEQ ID NO: 120330 - DNA, 801 bp, Homo sapiens
atgaagttccagtacaaggaggaccatccctttgagtatcggaaaaaggaaggagaaaagatccggaagaaatatccggacagggtccccgtgattgtagagaaggctccaaaagccagggtgcctgatctggacaagaggaagtacctagtgccctctgaccttactgctgccttcccgcggggcagggctcgggacctgcagcccgccatgcctgagcctcccacccactccatgggcacctgtgcggcccgagcctccccgacgagcaccaccccctgctccacggcgcccagtcccatcgaccgggaaggaacaaacaacccaagggctgaggaatgcgagcgcacggcgcgggactggcaggcagctccacctgcagccccggtgtgggatccactgggtgaagccagctgggctcccgagtctagtgggaatgtggagagtatatctagctcagggattgtaaatataccaatcagcaccctgtgtttagctcaaggtttctcaaggtttgtgaatgcaccaatcgacactctgtatctagctgctctggtggggccttggagaacctttatgtctagctcagggattgtaaatacaccaatcggcactctgtatctagctcaaggtatggtccactaccacaagtcccctttccctacctgtcttgtgcaaatgtcaaaaatagaatctctgcccaaagagaagggagcacagggagttgctgctggactgccatcatctctggccccaacttgtccacctcctgacccatctatgaaactgcacaacaattaa

SEQ ID NO: 120331 - DNA, 1449 bp, Homo sapiens
ctatttctttcttctgctgggtttgggtttggtttgttcttgtttctctagttccttgaggtgtgaccttagattgtctatttgtgctctttcagactttttgatgtaagcatttagggctatgaactttcctcttagcaccgcctttgctgtctcccagaggttttgataggttgtgtcactattatcatttggtttgaagaattttaaaatttccatcttgatttcattgttgacccaatgatcactcaggagcaggttatttaatttccatgtatttgtctggttttgaaggttctttttggagttgatttctagttttattccactgtggtcagggagagtacttggtataatttcaattttcttaaatttattaagacttgttttgtgtcctatcatacggtctgtcttggagaaagttccatgctctgatgaatagaatatatattcagcggttgttgggtagaatgttctgtaaatatctgttaagtccatttgttccagggtatagtttaaatccattgtttctttgttgactttctgtcttgatgacctgtttagtgctgtcagtggagtactgaaataccccactattattgtgttgctgtctgtcttatttcttaggtctagtggtaattgttttgtaaatttgggagctccagtgttaggtgcatatatatttatgattgtgatactttccttttggacaaggccttttatcattatataatgtccctctttgtcttttttaactgctcttgctttgaagtctgttttgttcggagcagccagccggccctgctggccccgggcaatgagggacttagcacccaggccagtggctgcggagggtgtgctgggtctccagcggtgccggcccactggcgctgtgctcaatttcttgtccggccttagctgccttcccgcgggtggggctcgggacctgcagcccaccatgcctgagcctcccacccactccatgggctcctgtgcggcctgagcctccccgacgagcaccaccccctgctccacggcgcccagtcccatcgaccacccaagggctgaggagtacgagcgcatggcgcgggactggcaggcagctccacctgcagccctagtgcggaatccactgggtgaagccagctgggctcctgagtcgtgagggtccgcggcttcattcttgaagtcagtgagaccaagaacccaccaattccggacacatttggactgcctcctgggtcctcctctgctgcctccaccctggtccaggtcactaggctctgaatttctgcaataagtcttcctcatttgctgtccaggccctgttccaacacggctcgcgggcccgtgccggctccggtccccggcgcggctgtccgagcccctgcggcgggcggacgatggtgtggcggagcacgcggacgcgggcggcgcggcggcgggcat

SEQ ID NO: 120332 - DNA, 426 bp, Homo sapiens; identical to SEQ ID NO: 117268

SEQ ID NO: 120333 - DNA, 682 bp, Homo sapiens
atgaaacactcaggagcccagctggcttcacctagtggatcccgcactggggccgcaggtggagctgcctgccagtcccgtgccgtgtgcttgcacttctcagcccttgggcggtcgatgggactgggcgccgtggagcagggggtggtgctcgtcggggaggctggggccgcacaggagcccatggagtgggtgggaggctcaggcatggcgggctgcaggtcccgagccctgccccgcgggaaggcagctaaggcccagcgagaaatccagcacagcgccgggccggccggctgctccgagtgcggggcccgccaagcccacgcccacccagaactccagctggcccgcaagcgctgcgcgcagccccggttcctgctcgcgcctctccctccacacctccctgcaagctgagggagtgggctccagccttggccagcctagaaagaggctcccacagtgcagtgtcaggccgaagggctcctcaagtgccgccaaagtgggagcccaggcagaggaggcgctgagagcgagtgagggctgtgaggactgccagcacgctgtcacctctcactactacatacacattagaatgaatattattaaaagaattgacaatgccaagtgttgtcaagaatgtgaagtcactgggattatcataattctgctggtagaaatgtaa

SEQ ID NO: 120334 - DNA, 1743 bp, Homo sapiens
atgcgctcgcacttctcagcccttgggtggtcgatgggactgagcgccctggagcagggggtggtgctcgtcggggaggctcgggctgcacaggagcccatggagtgggtgggaggctcaggcatagcgggctgcaggtcccgagccctgccccgcgggaaggcagctaaggctcggtttgagtcctgctggccggccctgatgaaggatgctcatggagtggtgatcgtcttcaatgctgacatcccaagccaccggaaggaaatggagatgtggtattcctgctttgtccaacagccgtccttacaggacacacagtgtatgctaattgcacaccacaaaccaggctctggagatgataaaggaagcctgtctttgtctggcggcggcggtaaccgcaggcaaggcaggagctgccctcggggctggactctcggggtggcaggggctgcagctgcagctgctcagggcaaggaagcccgtgggctccacgtgggctccacgtgggctcctgcaacgccgctggggaatctctcgcccgctgccccctattctggagaccttgattccaaccactgcccggaggaggtagtggaggcgagcccggtgttaatgagccccgaaggcccaagcaaagacctttatttgcactcattttcacagagtggaaaaactgttttggccaactttctgacagaatcttctgacatcactgaatacagcccaacccaaggagtgaggatcctagaatttgagaacccgcatgttaccagcaacaacaaaggcacgggctgtgaattcgagctatgggactgtggtggcgatgctaagtatgtttcctttaaagaaagtcacttcatcaaatggtttaaaaatcagctgcccaagccaggggcggtggctcacacctgtaattccagcactttgggaggccgaggagtgaagctgcagaccttcacggtgagtattacagctcctaaggcagcacgtctggagttgttcgttcctcccggtgggctcgtggtcttgctggcttcaggagtgaagctgcaaatcttcgcggtgagtgttacagctcataaaagcagtgtggacccaaagacccttgggtggtcgatgggactgggcgccgtggagcaggaggtggtgctcgtcggggaggctccggccgcacaggaaccaatggagtgggtgggaggctcaggcatgggggctgcaggtcccggagccctgccccgcgggaaggcagctaaggcccggcgagaaatcgagcacagcgccggtctgtacaagctgctgccgcactcggagtacagccggcccaaccgggtgcccttcaactcgcagggatccaaccctgtccgcgtctccttcgtaaacctcaacgaccagtctggcaacggcgaccgcctctgcttcaatgtgggccgggagctgtacttctatatctacaagggggtccgcaagcctggtccatcaggctctgacatggccagggagcgggcctgcgagtccccggaagagagacaggatctcatcctgttgcctaggctggagtgcggtggcgtgctcatcgttcactacagcctcaaactcctgggctcaaatgatcttcccacttcagccttcctagtggctggaactacagacacagcaaccatccgatttctcaatcttttccccacctttccccgctttctattccacaaaaccaccattgtcatcatggcccgttctcaatga

SEQ ID NO: 120335 - DNA, 428 bp, Homo sapiens
ggcacgagggaagaacacctgaagaggagcgggcgcgagattgcgctgcccattgaagcctgtgtcatgctgcttctggagacaggcatgaaggaggagggccttttccgaattggggctggggcctccaagttaaagaagctgaaagctgctttggactgttctacttctcacctgggatgagttctattcagacccccatgctgtagcagggtgctttaaaatcctatttacgggaattgcctgaacctttgatgacttttaatctgtatgaagaatgggacacaagttgcaagtgtgcaggatcaaggacaaaaaactttcaaggacttgtggagaacatgtcagaagttgccaccacaaaattttgttaactttagatatttgatcaagttccttgcaaagcttgctcagaccagcgatgtgaa

SEQ ID NO: 120336 - DNA, 549 bp, Homo sapiens
ctgcatgacttgcagcttagcaagcctctgagcgatgacacagctttgaccgacgggggccgccactgcctgcccgttggtgggcacagccaggaagactccagcgctgcgctcgatttctcgccgggccttagctgcctttccgcggggcagggctcgagacctgcagcccgccatgcctgagcctcccaccccctccatgggctcctgtgcggcccaagcctccccgatgagcgccgccccctgctccacggcgcccagtcccatcgaccacccaagggtctttgggtccacactgcttttatgagctgtaacactcaccgtgaagatctgcagcttcactcctgaagccagcgagaccatgagcccaccgggaggaacgaacaactccagacgcagtgcattaagagctgtaacactcaccgcgaaggtctgcagcttcactccggaagaaagaaactccgaacacatccgaacatcaaaaggaacaaactccagacgcgccaccttaagagctgtagcactcaccgcgagggtccgcagcttcat

SEQ ID NO: 120337 - DNA, 2234 bp, Homo sapiens; identical to SEQ ID NO: 117270

SEQ ID NO: 120338 - DNA, 1242 bp, Homo sapiens
atgcaggaagaggccaaggaacatgggcagacccaagaagctggaaaaggcaagcatgccctcttgcccgtccaccttccaccatgggatgatgcagcaagaaggccctcaccagatgtgggccccttgaccttggacttcccagcgttgagaactgatcaacttgcagcagacatgtacaactttatggccaaagaaggggagtatggcaaattctttgttacgttattagaagcccaagcagattaccatagaaaagcattagcagtcttagaaaagaccctccccgaaatgcgagcccatcaagataagtgggcggaaaaaccagcctttgggactcccctagaagaacacctgaagaggagcgggcgcgagattgcgctgcccattgaagcctgtgtcatgctgcttctggagacaggcatgaaggaggagggccttttccgaattggggctggggcctccaagttaaagaagctgaaagctgctttggactgttctacttctcacctggatgagttctattcagacccccatgctgtagcaggtgctttaaaatcctatttacgggaattgcctgaacctttgatgacttttaatctgtatgaagaatggacacaagttgcaagatatttgatcaagttccttgcaaagcttgctcagaccagcgatgtgaataaaatgactcccagcaacattgcgattgtgttaggccctaacttgttatgggccagaaatgaaggggctcgggacctgcagcccaccatgcctgagcctcccactccctccgtgggctcctgtgcggcccgagcctccctgacgagcaccaccccctgctccacggcgcccagtcccatcgaccacccaaaggctgagaagtgcgggcgcacggcacgggaccggcaggaaattgactctggtgatcaggttgaagacagactggaaaggaaattacagacaggaaatgtagctcaggaggtgactacaacagtccagggtggaacagaaacagtcaaaaacggggaatgtaactccacacaaatcaatgcaatggaacgcgctttcaatctgccaagagcttggaaaaagcagctttctcactccatcaagaaaaactactggggccaactccccaggcaattcccaagcaaagagaacactgagaactgctgcaaggagaaggttcaggtagcaacagctggcaggtggcagaacgagcagcaggacagactagaagggtag

SEQ ID NO: 120339 - DNA, 477 bp, Homo sapiens
cagcgtcctccgcacggcgtctttgttctgggtgtcgcagggcgtgtacacggaccagaactggcctcccacaaagccggccctcagcttggggatgttggtgtgtgtgccggccaaggtggtcaggttggccctctcgtcctgcagccggttgttgaacatatccagcagctgccaggggaggtcattgtgcccatcaatgacaggggagtccctcatgatcctctctgcctcgtcccgaaagaagtctgcagtgcagacggccacaaggggccacagccaccatccgctccacatggtggggtccccggggacctgtgtgcactgctgccctggtgcctctgtgctggcctggctggcccgtgcagaaggatgagcttcaggctgtgaggagccactctgccctggcctctgcgatgcagacttgctccctggcagggcccggcctaggcagctcccacgccaggctcacagctg

SEQ ID NO: 120340 - DNA, 1137 bp, Homo sapiens
atgaaaaagaaaagttttagacaattgaaggaaaatgatttatatggacacaagcgaaggcagagtggctcctcacagcctgaagctcatccttctgcacgggccagccaggccagcacagaggcaccagggcagcagtgcacacaggtccccggggaccccaccatgtggagcggatggtggctgtggccccttgtggccgtctgcactgcagacttctttcgggacgaggcagagaggatcatgagggactcccctgtcattgatgggaggaactggaacagcgcgcggttctgcgggctcgtcacgtgggacctcttcagcaagtccgaccccttcctggagctctacagggtcaacgacgaccagggcttgcagctggtgtacaggacggagggctttggtggctgtggctatggccagaatccaacagggagccgcaggcgcagggccctgggggccgtggctgtggccagaatccagcaggcttgtgtagtcgtggctgtgattatttttagacctaccttccacttcctgcaggtggtgaagaacaacctgaacccggtgtgggaggccttcaaagtctctctgagttccctctgcagctgcgaggagacaaggcctctaaaggtgggggacgggatggaccaagggggcaacagcagtgctgaggaggactgggctccccagtgcctggtctgggattacgactctcgaggaaagcacgacttcatcggagaattctctaccaccttcgaggagatgcacaaagcctttttcgaggggcagggctacctggtaccagggcgtctgtggttccagatgggttgccagaggccctgtttcctcgaggtgctggtggccagggccacctggtacaagggcgtctgtggttccagatgggttgccagaggccctgtttcctcgaggtgctggtggccagggccacctggtaccagggcgtctgtggttccagatgggttgccagaggccctgtttcctcaaggtgctggtggccagggctacctgttcacggcgaagcagctggagaagctggccaagaaggcggggaaggactccaaggcggagcagtccaaagtgaagaaagtgagacccctgggggctgtggggtcatga

SEQ ID NO: 120341 - DNA, 2474 bp, Homo sapiens
agcgactcacaaaaggtcctcggccacggcgtgcgtcaccatggcgaccgccgccggcagccgcgccccgcccctctggcgggaccggccaccatcctctcgcgaggagcatcccgtgcgaccggaagtggggcggcgaccccggaagtccccgccgggtgcagcttggtcggttcgatcgccgccgggacctgacaccgcccggagttggcgtcccttctccctctccgagtgctgctcctgtcattgtggccatggacgataccctgttccagttgaagttcacggcgaagcagctggagaagctggccaagaaggcggagaaggactccaaggcggagcaggccaaagtgaagaaggcccttctgcagaaaaatgtagagtgtgcccgtgtgtatgccgagaacgccatccgcaagaagaacgaaggtgtgaactggcttcggatggcgtcccgcgtagacgcagtggcctccaaggtggacacagctgtgactatgaagggggtgaccaagaatatggcccaggtgaccaaagccctggacaaggccctgagcaccatggacctgcagaaggtctcctcagtgatggacaggttcgagcagcaggtgcagaacctggacgtccatacatcggtgatggaggactccatgagctcggccaccaccctgaccacgccgcaggagcaggtggacagcctcatcatgcagatcgccgaggagaatggcctggaggtgctggaccagctcagccagctgcccgagggcgcctctgccgtgggcgagagctctgtgcgcagccaggaggaccagctgtcacggaggttggccgccttgaggaactagccgtgccccgccggtgtgcaccgcctctgccccgtgatgtgctggaaggctcctgtcctctccccaccgcgtcttgcctttgtgctgaccccgcggggctgcggccggcagccactctgcgtctctcacctgccaggcctgcgtggccttagggttgttcctgttcttttaggttgggcggtgggtctgtgtcctggtgttgagtttctgcaaatttctgggggtgatttctgtgactctgggcccacagcggggaggccaagaggggccctgtggactttcacccagcactgtgggggccttcagactctggggcagcagacatgctgcttcccatcagccagagggggtcagggctgccctgttgccaaacaactccctgaggcctctccgcaccacctcagcgggcaggaggtcccaccatgtggacagacatagcccaaggaggcaccacaggtctatgtgtgctgggggatgtcaggtgccacccaacgctgtcctggtggtatttacaatgacatcctcctcctccatcactccaggggtggtgtctcggccgcccctaccagctggctgagccccctggcctcctgcgctccctcacttccctcagttcccaaagctgcccagtccatggggacagaaccgtcactcagatccacattcaagtgtgcccaccctgcagtcttcatcctcactcagctgctgcctctggaggtgcctttggccacatgtgctgtgctgtttgtctcctcgacagggagcctgtccaccagcaggctgcggtcccagcgggtgcgtctgcagctcctccccttgggcaggctggttctcccggaggacctttccttggggccctgcttcatgacgatgctgcctgtgtcaccctctaccatctgtaaacaactgggtgccttccccgaccacaccccaatgccttcccagcttggaagccaaggcagctgatgaagggagctcaggagagccgtcttcagctgggctggggttggggctgctgtgaggaaaacctgccattgtggccctggagagtcaccagcagctcttgggaaggacttgctgggaggctgagagaggctttgggcacagcctgctgtcttttccatttcctaaagtttacttcattgtcttgaggcttccaggttttgtttttgtttttgccaaagtagaaaaggcaggtggtgggcggctggcagggagtgcgggtccccgcccctcttcagtcctgccctcccctcctcagtcctgcccaccccgtgcagcccatgctgaggctgcagtggtgtcgtgggtgttacgtgcaggaacgtggagaccctgacgtgggctcactgcatttggttttcttttcagaacttgggagcccccagggaggggctagtgttggtaggtcctagacgtggttccctccagcctccccaaaatcaaccctggtgttgagagaacgtccttctgtccatcgtgggtaacagccttggggagggtgcagagctctgcagagccatgggccaggtggggctgcctcagtcctgtccccttgggcactgaggagaggggcccattcacctttctcctagaatgctgttgtaaataaacaaatggatccctgga

SEQ ID NO: 120342 - DNA, 228 bp, Homo sapiens
atgggcaaggacttcatgtctaaaacaccaaaagcaatggcaacaaaagccaaaattgacaaatgggatctaattaaactaaagagcttctgcacagcaaaagaaactaccatcagagttggttaccagttccagtttaaacccagatatccaaacccagggaccagaacagaggcctcggaaaaagtgccatacatctacaaatatctgatctttgacaaaccttga

SEQ ID NO: 120343 - DNA, 471 bp, Homo sapiens
atggctgaaatgacagaaacaggcttcagaatgtggataaaaatgaacttcagtgagctaaaggagcatgttgcaaccgaaggcaaggaagccaagaatcatgataaaacaatgcaagagctgacagccaaaatagccagaatagagaggaacataactgacctgatagagctgaaaaacacactacaagaacttcacaatgcaattacaagcattaacagcagaatagaccaagtggagaaaagaatctcagagcttgaagactgtctttctgaaatgacagctagacaggccaaaattcaaattcaggaaatccagagaaccccagtaagatattccatgagaagatcatccccaaggtggaacgagagacttggaaaagaaaaagacacagagacaaagtatagagaaagaaataagggggcccagggaaccagcgttcagcatatggaggataccgccagcctctga

SEQ ID NO: 120344 - DNA, 1826 bp, Homo sapiens
tgagttcccttagtatttattgatcatctgtgggtgtttctcaaagagggggatgtgtcagggtcacaagacaattgtggggagagggtcagcagacaaacacgtgaacaaaggtcttggcatcatagacaatgtaaaggattaagtgctgtgcttttggatatgcatacacataaacatctcaatgctttacaaagcagtattgctgcccgcaggtcccacctccagccctaaggcggtttttccctatctcagtagatggagcatacaatcgggttttataccgagacattccattgcccagggacaggcaggagacagatgccttcctcttgtctcaactgcaagaggcattccttcctcttttactaatcctcctcagcacagaccctttacgggtgtcgggctgggggacggtcaggtctttcccttcccacgaggccatatttcagactttcacatggggagaaacgttggacaatacctggctttcctaggcagaggtccctgcggccttccgcagtttttgtgtccctgggtacttgagattagggagtggtgatgactcttaaggagcatgctgccttcaagcatctgtttaacaaagcacatcctgcaccgcccttaatccattcaactctgagtggacacagcacatgtttcagagagcacggggttgggggtaaggtcatagattaacagaatctcaaggcagaagaatttttcttagtacataacaaaatggagtctcctatgtctacttctttctacacagacacagtaacaatctgatctctcttgcttttccccacatttcccccttttcttttcgacaaaaccgccatcgtcatcatggcccgttctcgatggtcgctgtctcttcggagctgttgggtacacctgcagacaccattgatacaatcatcaaggctgcaagcagcatactctctggggtttgtttcacctttgtgttctctagatattttgtagctaactgcgtcagcttctttagttgtgcccaagttggcggctctgccttcttggtggatggcaacttcatctgttcttctgacgtcaccattttgttcatcttgtgagtcaacggtgctcgattgcgatgtctccgtctccgcggaggtgcttttctttgcatctctgatgggttcattgtagaacttcaaatgtcgtaaggctgactgtagatgtactcgggatctctcgtcgacttgtcctcaatgaccacgctcgagcgtaccttcaccctagagaaaagcctccacgttgggcaccagatgtaggggtgggttgccctcctttcacacctgtgggtgtttctcgtaaggtggaacaagagacttaggaaagaaaaagacacagagacaaaagtatagagaaagaaataaggggacccggggaaccagcgttcagcatatggaggatcccgccagcctctgagttccctgagtatttattgatcatttgtgggtgtttctcgaagagggggatgtgtcagggtcacaagacaatagtggggagagggtcagcagacaaacacgtgaacaaaggtctttgcatcatagacgatgtaaacgattaagtgctgtgcttttagatatgcatacacataaacatctcaatgctttacaaagcagtattgctgcccgcaggtcccacctccagccctaaggcggtttttccctatctcagtagatggagcatacaatcgggttttataccgagacattccattgcccagggacgggcaggagacagatgccttcctcttgtctcaactgcaagaggcatgccttcctcttatactaatc

SEQ ID NO: 120345 - DNA, 510 bp, Homo sapiens
atggaggctcgctctgtcaccccagctggagtgcaatggcgcattctcgcgtcacttgaacatccaccttctgggttcaagcaattttgttgcttaagccccccgggagagacatgtgatccccgcagctctgtgttccagataattcagcaggcaggacaggtgtggttcccagactcagcctacaaaaccgcccaggccatcaaggacttcaaccgggagaagttgcccctgatgatctttgccaactggaggttgttctccggtgggatgaaaggtggttcctgtggcactacaggtggagatcagacgtcttccgggggagatgccccaccctgggtcccaggctctcacttggggctacgcgaaccggcatctcccaaagagccagttaaaatgcagagttggggccccacctcagaccctgaagccccacccttggacttccactatgctctgggggaaggacagcccacaggggacacgggcaaagctcaggctttgacctga

SEQ ID NO: 120346 - DNA, 389 bp, Homo sapiens
acgcgtccgaaatgtagatcatctacctgtaacctgaatgtttactggtgccaaagccctggtattgctgagtacctcatgagcaatgagtgaaaaaatattgcgagaaaacagtgaccaggacagattcactcatatgcatcaactctcaggccgctgagagtaggctgtgtttttttgtcaacgatgagagctcatgggactttcctcataaaagggagctggggtgttgcagacctttggttcgtctgagtctgtgttctgcattgacgtagacagagagttgcttatatttgcataccagaacatcttgctattccttaaaaataaaagagccttaatcttggaaactacatgctttggatgggtaggcactgtaaaaagaacaa

SEQ ID NO: 120347 - DNA, 258 bp, Homo sapiens
atgttctggtatgcaaatataagcaactctctgtctacgtcaatgcagaacacagactcagacgaaccaaagggcccacccaatgctaatgaagactacagagaagcttcttcttgtgccgtgaacctcgttttgagattaagagcacagctagaagctacacaacagagctggaaggcatcctctagaacagaaacactcaggccccctgcctcacccacccccacaccccctgcagcaggccagaggcagtcttag

SEQ ID NO: 120348 - DNA, 1055 bp, Homo sapiens
aaatacaaattaccatcagagaataccataaacacctctatgcaaataaactaaaaaatctagaagaaatggataaattcctggacacatacaccctcccaagactaaagcaggaagaagttgaatctctgaatagaccaataatgggctctgaaattgaggcaataattaatagcctaccaaccaaaaaaagtccaggaccagatggattcacagccaaattctacgagaggtacaaagaggagttggtatcattccttctgaaactattccaatcaatagaaaaagagggaatcctccctaactcattttatgaggctagcatcatcttgataccaaaacctggcagagacacaacaaaaaaagagaattttagaccaatatccctgaagaacatcgatgcaaaaatcctcaataaaatactggcaaaccgaatccggcagcccatcgaaaagcttatccaccacgatcaagtcggcttcatccctgagatgaaaggctggttcaaaaaatgcaaatcaataaacgtaatccatcacataaaccaaaccaatgacaaaaaccacatgattatctcaatagatgcagaaaaggccttcgacaaaactcaacagcccttcatgctaaaaactctcaataaactagggacaatcaggcaaaagaaagaaataaaaggtattcaattaggaaaagaggaagtcaaattgtctctgtttgcagatgacatgattgtctatttagaaaactccatcgtctcagcccaaaatctccttaagctgataagcaacttcagcaaagtctcaagatacaaaatcaacctgcaaaaatcacaagcattcctatacaccaataacagacacatggagagccaaatcacgagtgaactcccattcacaattgatacaaagagaataaaatacctaggaatccaatttacaagggatgtgaaggacctcttcaaggagaactacaaattactgctcaatgaaataaaagaggacacaaacaaatggaagaacattccatgctcatggatagaagaatcaatatcatga

SEQ ID NO: 120349 - DNA, 1596 bp, Homo sapiens
caacattaaagactaaaggtagataaaaccacaaagatggggagaaaccagagcagaaatgctgaaaattctaaaaaccagagagccttttctcctccaaaggattgcatctcctcgccagcaatggaacaaagctggacagagaaggagttggttttttgaaagattgacaaaattgatagactgctagcaagactaataaagaagaaaagagagaagaatcaaatagacgcaataaaaaatgataagggggatatcaccaccgatcccacagaaatacaaactaccattagagaatactacaagcacctctacgcaaataaactagaaaatctagaagaaatggataaattcctcgacacatacaccctcccaagactaaaccaggaagaacttgaatctctgaatagaccaataacaggctctgaaattgaggcaataattagtagcctacgaacaaaaaagagtccaggaccagatggattcacagccgaattctaccagagatacaaggaggagctggtactattccttctgaaactattccaatcaatagaaaaagagggaatcctccctaactcattttatgaggccagcatcatcctgataccaaagcctggcagagacacaacaaaaaaagagaattttaggctaatatccctgatgaatatcgatgtgaaaatcctcaataaaatactggcaaaccgaatccagcagcacatcaaaaagcttgtccaccatgatcaagttggcttcatccctgggatgccagactggttcaacatatgcaaatcaataaacataatccatcacataaacaggaccaacggcaaaaaccatatgattatctcaatagatgcagaaaaggcctttgagaaaattcaacagtgcttcatgctaaaaactctcaataaactaggtattgatggaatgtatctcaaaataataagagctatttttgataaacccacagccaatgtcatactgaatgggcaaaaactggaagcatttcctttgaaaactggcacaacacaggggtgccccctctcaccactcctattcaagatagtgttggaagttctggccagggcaatcaggcaagagaaagaaataaagcgtattcagttaggaaaagaagaagccaaattgtccctgtttgcagatgacatgattgtatatttagaaaacccaattgtctcagcccaaaatctccttcagctgagaagcaacttcagcaaagtcttaggatacaaaatcaatatgcaaaaatcacaagcattcctatacactaagaacaaacaaacagagagccaaatcatgagtgaactcccattcacaattgctacaaagagaataaaatacctaggaatccaacttacaagggatgtgaagtccctcttcaaggagaactacaaaccactgctcagcaaaataaaagaggacacaaacaaatggaagaacattccaagctcatggataggaagaatcagtatcgcgaaaatggccatactgcccaaggtaatttatacattcaatgccatccccatcaagctaccaatgactttcttcacagaattggaaaaaactactttaaag

SEQ ID NO: 120350 - DNA, 1491 bp, Homo sapiens
atggcacgagaaatacgtgacgaatgcacaagcttcagtagccgtttcgatcaaccagaagaaagggtatcagtgattgaagatcaaatgaatgaaatgaagcgagaagagaagtttagagaaaaaagagtaaaaagaaacgaacaaagcctccaagaaatatgggactatgtgaaaagaccaaagctacatctgattggtgtacctgaaagtgacggggagaatggaaccaagttggaaaacactctgcaggatattatccaggagaacttccccaacctagcagggcaggccaacgttcaaattcgggaaatacagagaatgccacaaagatactcctggagaagagcaactccaagacacataattgtcagattcaccaaagttgaaatgaaggaaaaaatgttaaggacagccagagagaaagcaccacatcgcacttattccaaaattgaccacatagttggaagtaaagcactcctcagtgaatgtgaaagaacagaaattataacaaactgtctctcagaccacagtgcaatcaaactagaactcaggatgaagaaacccactcaaaactgctcaactacatggaaactgaacaacctgctcctgaatgactactgggtacataacaaaatgaaggcagaaataaagatgttctttgaaaccaatgagaacaaagacacaacataccagaatctctggtacacatttaaagcagtgtgtagagggaaatttatagcactaaatgcccacaagagaaagcaggaaagatctaaaattgacaccctaacatcacaattaaaagaactagagaagcaagaggaaacacattcaaaagctagcagaaggcaagaaataactaagatcagagcagaactgaaggagatagagacacaaaaaacccttcaaaaaatcaatgaatccaggagctggttttttgaaaagatcaacaaaattgatagactgctagcaagactaataaagaagaaaagagagaagaatcaaacaaatgcaataaaaaatgataaaggggatatcgccactgatcccacagaaatacaaacaaccatcagagaatactataaacacctctatgcaaataaactagaaaatctagaagaaatggataaattcctggacacatacactctcccaagactaaaccaggaagaagttgaatccctgaatagaccaataacaggctctgaaattgaggcaataattaatagcctaccaaccaaaaaaaggccaggaccagacagattcgcagccgaattctaccagaggtacaaggaggagctggtaccattccttctgaaactattccaatcaatagaaaaagagggaatcctccctaactcattttatgaggccagcatcatcctgataccaaagcctggcagagacacaacaaaaaaagagaattttagaccaatatccctgatgaatatcgatgcaaaaatcctcaataaaatactgacaaactga

SEQ ID NO: 120351 - DNA, 1404 bp, Homo sapiens
atggggagaaaccagagtggaaaggctgaaaattccaaaaaccagaacacctcttctcctccaaaggaacacaactcctcaccagcaagggaacaaaactggatggagaatgaatttgatgagttgacagaagtaggcttcagaagtgacggggagaatgggaccaaattggaaaacactcttcaggatattatccaggagaacttccccaacctagcaaggcaggtcaacattcaaattcaggaaatacagagaacgccacaaagatactccttgagaagagcaaccccaagacacataactgtgagattcatcaaggttgaaatgaaggaaaaaatgttaagggcagtcagagagaaagaaatacaaactaccatcagagaatactataaacacctctacacaaataaactagaaaatctagaagaaactgagaaattcatggacacatacaccctcccaaaactaaaccaggaagaagttgaatctctgaatagactaaaaatagcttctgaaattgaggcaataattaatagcctaccaaccaaaaaaaatccaggaccagatggattcgcagccgaattctaccagaggtacaaagaggagctggtaccattccttctgaaactattccaatcaatagaaaaacagggaatcctcccaaactcattttatgaggccagcatcatcctgataccaaagcctggcagagacacaacaaaaaaagggaattttaggccaatatccctgatgaacattgatgtaaaaatcctcaataaaatactggcaaaccaaatccagcagcaaatcaaaaagcttatccaccacaatcaagtcggcttcatccctgggatgcaagactgcttcaacgtacccaaatcaatagacataatctatcacataaacagaaccaatgataaaaaccacatgattatgtcaatagatgcagaaaaggccttcaacaaaaatcaacagcctttcgtgctaaaaactctcaataaactaggtattgatggaatgtatctcaaaataataagagctatttatgacaaacccacagccaatatcatactgaatgggcaaaaactggaagcattccctttgaaaactggcataagacaaggatgccctctctcaccactcccattcaacatagtaatggaagttctggccaaagcaatcagacaagagaaagaaataaagtgtattcaattaggaaaagaggaggtcaaattgtctttgtttgtggatcacatgattgtatatttagaaaaccccatcatctcagcccaaaatctccttaagctgataagcaacttcagcaaagtctcaggatacaaaatcaatgtgcaaaaatcacaagcattccaatacaccaataacagacagagagccaaatcatga

SEQ ID NO: 120352 - DNA, 1258 bp, Homo sapiens
tgacggggagaatgggaccaaattggaaaacactcttcaggatattatccaggagaacttccccaacctagcaaggcaggtcaacattcaaattcaggaaatacagagaacgccacaaagatactccttgagaagagcaaccccaagacacataactgtgagattcatcaaggttgaaatgaaggaaaaaatgttaagggcagtcagagagaaagaaatacaaactaccatcagagaatactataaacacctctacacaaataaactagaaaatctagaagaaactgagaaattcatggacacatacaccctcccaaaactaaaccaggaagaagttgaatctctgaatagactaaaaatagcttctgaaattgaggcaataattaatagcctaccaaccaaaaaaaatccaggaccagatggattcgcagccgaattctaccagaggtacaaagaggagctggtaccattccttctgaaactattccaatcaatagaaaaacagggaatcctcccaaactcattttatgaggccagcatcatcctgataccaaagcctggcagagacacaacaaaaaaagggaattttaggccaatatccctgatgaacattgatgtaaaaatcctcaataaaatactggcaaaccaaatccagcagcaaatcaaaaagcttatccaccacaatcaagtcggcttcatccctgggatgcaagactgcttcaacgtacccaaatcaatagacataatctatcacataaacagaaccaatgataaaaaccacatgattatgtcaatagatgcagaaaaggccttcaacaaaaatcaacagcctttcgtgctaaaaactctcaataaactaggtattgatggaatgtatctcaaaataataagagctatttatgacaaacccacagccaatatcatactgaatgggcaaaaactggaagcattccctttgaaaactggcataagacaaggatgccctctctcaccactcccattcaacatagtaatggaagttctggccaaagcaatcagacaagagaaagaaataaagtgtattcaattaggaaaagaggaggtcaaattgtctttgtttgtggatcacatgattgtatatttagaaaaccccatcatctcagcccaaaatctccttaagctgataagcaacttcagcaaagtctcaggatacaaaatcaatgtgcaaaaatcacaagcattccaatacaccaataacagacagagagccaaatcatga

SEQ ID NO: 120353 - DNA, 955 bp, Homo sapiens
attccctcagaataatcggcccattccagttgttaggacgtggtctttaaagctgagttattcttcaatatcttggaaaataggggctcttcatctcaccaattatgaaatactgcagacatcgtttgccgtcggagagaaagatttatctccaaagataatggaacacagctcctcaccagcaacagaacaaagctggacagagaatgactttgacgagttgagagaagaaggcttcagaagatcaaactactccgagctaaaggaggaagttcgaacccatggcaaagaagttaaaaaccttgaaaaaagattagacgaatggctaattagaataaccaatgtagaaatgtccttaaaggacctgatggagctgaaaaacatggcacgaggaactacgagctggttttttgaaaagatcaacaaaattgatagaccgctagcaagaataataaagaagaagagaagaatcaaagacacaataaaaaatgataaaggggatatcaccaccgatcccacagaaatacaaactaccatcagagaatactataaacacctctacggaaataaactagaaaatctagaagaaatggataaattcctggacacatacaccctcccaagactaaaccaggaagaagttgaatccctgaatagaccaataacaggctctgaaattgaggcaataattaatagcttaccaaccaaaaaaagtccaggaccagacagattcacagccgaattctaccagaggtacaaggaggagctcgtaccaatccttctgaaactattagaatcaatagaaaaagagggaatcctccctaactcagtttatgaggccagcatcatcctgataccaaagcctggcagagacacaacaaaaaaagagaattttagaccaatacccctgatgaacatcgatgcaaaaatcctcaataaaatactggcaaactga

SEQ ID NO: 120354 - DNA, 2718 bp, Homo sapiens
aaacctcaactctctatgcagcttcgatcgtaggtatgtgtggggcttctgtaaaagtctgatccagggttactttgcccaattacactctccgctgcctgctggaccccacttgtgatgccccttgtaatgatcatggcatgaacacccgctggatgagccatagatactgtgagatggtgagctcactttctttagagaattttcattgttgcacccaaaggagctccattctcttccctcatgtgcctgttggcagaagacaactcgtatggaaagtggtttttggaatcgatgtgattctacatgaggttctatgcagagtcaatgcctctgcaaggagaagcaggcttgcccacacatggtttgccctgagagcatgtactgtctgtatttatctccctgtctatatgcagcccactgtcttacaacagtgcagtgcaagccctgcagctggtaggatatcaaaacctgaaggcctagatttcaagtgccatccagatatgaaatctttcaacctttcggtggctttgaatctaaagtgtgtctcttgtaaatggcacactgagtttgaagtgcctcacagtgaggtctctgctgtgggcgactgctgggcttcaagcagtccaggacccttcagtcaactgcccaagttcagatggcccagttctccaaaaggagagaagggtgcaccagaatgtcaccagggcagagagcgaaacagatcatggtagcgatccttccccagatccaggccctcccccttcctccttctctctcgttatctcagaattcacatggtattctcagttttgccttttggcctgcaaaacccgaaatatttactatctggctctttgcaggaaaagttcaggacccctggtataaattcccataaaacactggatccaaatagagtaatcattaaggtgaggaggaggctggagaaggagaaagccctgagggcctatgttgggaaatcagaggttcgtaacatgcatttaagagaaagatgcaaactatagaagaaaagagagaagaatcaaatagacacaattaaaaatgataaaggggatatcaccactgatgccacagaaatacaaactaccatcagagaatactataaacacctctatgcaaataaactagaaaacctagaagaaatggataaattcctcgacacatacatcctcccaagactaaaccaggaagaagttgaatctctgaatagaccaataacaggctctgaaattgaggcaataattaatagcttaccaaccaaaagaagtccaggaccagatggattcacagccgaattctaccagacgtacaaagaggagctggtaccattccctctgaaactattccaatcaacagaaaaagagggaatcctccctaactcattttatgaggccagcatcatcctgataccaaagcctggcagagacacaacaaaaaaagagaattttagaccaatatccttgatgaacatcgatgcaaaaatcctcaataaaatactggcaaaccgaatccagcagcacatcaaaaagcttatccactatgatcaagtgggcttcatccctgggatgcaaggctggttcaacaaacgcaaatcaataaatgtaatccagcatataaacagaaccaatgacaaaaaccacatgattatctcaatagatgcagaaaaggcctttgacaaaattcaacaacccttcatgctaaaaactctcaataaattaggtattgatgggacgtatctcaaagtaataagagctatctatgacaaacccacagccaatatcatactgaatgggcagaaactggaagcattccctttgaaaactgacacaagacagggatgccctctctcaccactcctattcaacatagtgttggaagttctggccagggcagtcaggcaggagaaggaaatagagggtattcaattaggaaaagaggaagtcaaattgtccctgtttgcagatgacatgattgtatatctagaaaaccccatcgtctcagcccaaaatctcctcaagctgataagcaacttcagcaaagtgtcaggatacaaaatcaacatacaaaaatcacaagcattcttatacaccaataacagacaaacagagagccaaatcatgagtgaactcccattcacaactgcttcaaagaaaataaaatacctaggaatccaacttacaagggatgtgaaggacctcttcaaggagaactacaaaccactgctcaatgaaataaaagaggatacaaacaaatggaagaacattccatgctcgtgggtaggaagaatcaatatcatgaaaatggccatactgcccaaggtaatttgtagattcaatgccatccccatcaagctaccaatgcctttcttcacagaattggaaacaactactttaaagttcatatggaaccaaaaaagagcccgcaagtcaatcctaagccaaaagaacaaagctggaggcatcacactacctgacttcaaactatactacaaggctacagtaaccaaaacagcatggtactggtaccaaaacagagatatagaccaatggaacagaacagagccctcagaaataatgccacatatctacaactatctgatctttgacaaacctgagaaaaacaagcaatggggaaaggattccctatttaataaatagtgctgggaaaactggctagccatatggagaaagctgaaac

SEQ ID NO: 120355 - DNA, 2907 bp, Homo sapiens
atgggagactttaacaccccactgtcaacattagacagaacaaccagacagaaagtcaaccaggatacccaggaattgaactcagctctgcaccaagcagacctaatagacatctacagaacactccactccaaatcaacagaatatacatttttttcagcaccacaccacacctattccaaaattgaccacatacttggaagtaaagctctcctcagcaaatgtaaaagaacagaaattataacaaactatctctcagaccacagtgaaatcaaactagaactcaggattaagaatctcactcaaaactgctcaactacatggaaactgaacaacctgctcctgaatgactactgggtacctaatgaaatgaaggcagaaataaagatgttctttgaaaccaatgagaacaaagacacaacatacccaaatctctgggacgcattcaaagcagcgtgtagagggaaatttatagcactaaatgcccacaagagaaagcaggaaagatccaaaattgacaccctagtatcacaattaaaagaactagaaaagcaagagcaaacacattcaaaagctagcagaaggcaagaaataactaaaatcagagcagaactgaaggaaatagagacacaaaaaacccttcaaaaaattaatgaatccaggagctggttttttgaaaggatcaaaaaaattgatagaccgctagcaagactaataaaggaaaaaagagagaagaatcaaatagacgcaataaaaaatgataaaggggatatcaccaccaatcccacagaaatacaaactaccatcagagaatactataaacacctctacacaaataaactagaaaatctagaagaaatggataaattcctcgacacatacactctcccaagactaaaccaggaagaagttgaatctctgaatagaccaataacaggatctgaaattgtggcaataatcaattgcttaccaaccaaaaagagtccaggaccagatggattcacagctgaattctaccagaggtacaaggaggaactggtaccattccttctgaaactattccaatcaatagaaaaagagggaatcctccctaactcattttatgaggccagcatcattctgataccaaagcctgacagagacacaagcaaaaaagagaattttaggccaatatccttgatgaacattgatgcaaaaatcctcaataaaatactggcaaaccgaatccagcagcacatcaaaaagcttatccaccatgatcaagtgggcttcatccctgggatgcaaggctggttcaatatacgcaaatcaataaatgtaatccagcatataaacagagccaaagacaaaaaccacctgattatctcaatagatgcagaaaagccctttgacaaaattcaacaatgcttcatgctaaaaactctcaataaattagttatcgatgggacatatttcaaaataataagagctatctatgacaaacccacagccaatatcatactgaatgggcaaaaactggaagcattccctttgaaaacgggcacaagacatggatgccctttctcaccactcctattcaacatagtgttggaagttctggccagggcaattaggcaggagaaggaaataaaggagaataaaatacctaggaatctaacttacaagggatgtgaaggacctcttcaaggagaactacaaaccactgatcaaggaaataaaagagaatacaaacaaatggaaaaacattccatgctcatgggtaggaagaatcaatatcgtgaaaatggccatactgcccaagaattggaaaaaactactttaaagttcatatggaaccaaaaaagagcccacatcgccaagtcaatcctaagccaaaagaacaaagctggaggcatcacactaccagacttcaaactatactacaaggctacagtttccaaaacagcatggtactggtaccaaaacagagatatagatcaatggaacagaacagtgccctcagaaataacgccgcatatctacgactatctgatctttgacaaccctgagaaaaacaagcaatggggaaaggattccctatttaataaatggtgctgggaaaactggctagccatatgtagaaagctgaaactggatcccttccttacaccttatacaaaaatcaattcaagatggattaaagacttaaacattagacctaaaaccataaaaaccctagaagaaaacctaggcattaccattcaggacataggcatgggcaaggacttcatgtctaaaacaccaaaagcaatggcaacaaaagccaaaattgacaaatgggatctaattaaactaaagagcttctgcacagcaaaagaaactaccatcagagtgaacaggcaacctacagaatgggagaaaatttttgcaatctactcatctgacaaagggctaatctccagaatctacaatgaactcaaacaaatttacaagaaaaaaacaaacaaccccatcaaaaagtgggcaaaggacatgaacagacacttctcaaaagaagacatttatgcagccaaaaaacacatgaaaaaattctcatcttcactggccatcagagaaatgcaaatcaaaaccacaatgagataccatctcacaccagttagaatggcaatcattaaaaagtcaggaaagaacagggctggctcggcactggctccttgcagtcggcgaactgtcggggcgggaggagccgtgagcagtagctgcactcagctgcccgcgcggcaaagaggaaggcaagccaaacagagtgcgcagagtggcagtgccagcggcgacacaggcagcacaggcagcccgggctgcctgaatagcctcagaaacaacctcagcgactccggctgctctgcggactgcgagctgtggcggtag

SEQ ID NO: 120356 - DNA, 2361 bp, Homo sapiens
atgaagaaaggaattcaggtaccttcctttaaacatatctcttctgcaaatgtagtcatccctgataaagtacaattagagggctctgggcccacaggcgcggatgcaattcaggagggagttggagcgaatgttggtgttgagaaaggccaccacgcagcccagcttggcgaggccgaaccacacgtgaacgaagtccggctcattgctcatcagcagagccaccgtgtccccctttttcagagaggaatggttcaggaagacatgggccactctgctgctccttttgtctacatcctgataggtgtagatgtctccctcatagatgatgaaaggcacagctctccacggagaccgcagatcctcactactcagggcttacacctgaagttcttgtcagcttttccggggcgaagcgggatggggaggaatcctgagaaacagaatcgtaggtttgcaccgaaaaggtcgccccaagtggtgctgaagattaagcttgggtcactgggcggctggaaagcagggagcctccgactcctgcgagaaaccaacacagccaccctcaggggtcttggaatctacaaccccagcgctgcgccctcgcctcccaaccgcgacagcggcccgtgccctgcgagttccccaggactttccagacctcttctctccggaacagcctgggccccgccgccagctcctccctgggcgcgcgtccggccacctagagaagtgtggcgcgccgacctgctcacaccccagggaggaggccccgcgactggcgtctccggcggggaagaatgtgacagtcccgtggggggaaacccagggatctggaaggcttggggtcacaggagaaccagagttgctgggattgggcggcgcgggggccctggcgaggctgataagcagcctctgctggtgatactcaggcaaacagggtctggagtggacctccagcaaactccaacagacctgcagctgagggtcctgactgttagaaggaatactaacaaacggaaaggacatccacaccaaaaccccatctgtacatcaccatcatcaaagaccgaaggcagatcaatgagacagaaagttaacaaggatatccaggaattgaactctgctctgcaccaagtggacctaatagacatctacagaactctccaccccaaatcaacagaatatacattcttctcagcaccacatcacacttattccaatattgaccacatagttggaagtaaagcactcctcaacaaatgtaaaagaacagaaattgtagcaaactgtctctcagaccacagtgcaatcaaaccagaactcaggattaagaaactcactcaaaactgctcaactacatggaaactgaacaacctgctcctgaatgactactggagaagcaagagaaaaacacattcaaaagctagccgaaggcaagaaataactaagatcagagcagaactgaaggagatagagacacaaaacacccttcaaaaaatcaatgaatccaggagctggttttttgaaaacatcaacaaaattgatagactgctagaaagactaataaagaaggaaagagagaagaatcagatagatgcaataaaaaatgataaaggggatatcaccaccgatcccacaaagatacaaaccaccatcagagaatactataaacacctctacaaaaataaactattaaatctagaagaaatggataaattcctggacacatacaccctcccaagactaaaccaggaagaaattgaatccctgaatagaccaataacaggctatgaaattgaggcaataattaatagcctaccaaccaaaaaaagtccaggatcagatggattcacagctgaattctaccagaggtacaaacaggagttggtaacattccttctgaaactattccaatcaacagaaaaagagggaatcctccctaattcatttcatgaggccagcatcatcctgataccaaagcctggcagagacacaacaaaaaaagagaattttagaccaatatccctgatgaacatcgatgcaaaaatcctcaataaaatactggcaaaccaaatccagcagcacatcaaaaagcttatccaccacgatcaacttggcttcatccctgggatgcaaggcttgttcagcacatgcaaatcaataaacgtaatccatcatataaacaaaaccaaagacaaaaaccacatgattatctcaatagatgcagaaatggcctctgacaaaattcaacagcccttcatgctaaaaactctcaataaactaggtattgacgggatgtatctcaaaataataagagctatttatgacaaacccacagccaatatcatactgaatgggtaa

SEQ ID NO: 120357 - DNA, 1869 bp, Homo sapiens
atgggagactttaacaccccactgtcaacattagacagatcaacaagacagaaagtttacaaggatatccaggaattaaacacagctctgcaccaagcggacctaatagacatctacagaactctctaccccaagtcaacagaatatacattttcagaatatacatttttctcagcaccacatcacacttattccaaaattgaccacttagttggaagtaaagcactccttagcaaatgtaaaagaacagaaattataacaaactgtctctcagaccacagtgcaatcaaactagaactcaggattaagaaattcactcaaaaccactcaactacatggaaactgaacaacctgctcctgaacaactactgggtacataacgaaatgaaggcagacataaagatgttctttgaaatgaatgagaacaaagacacaacataccagaatctctgggacacatttaaagcagcatgtaaagggaaatttatagcactaaatgcccacaagagaaagcaggaaagatctaaaattgacaccctaacatcacaattaaaagaactagagaagcaagagcaaacacaaatacaaactaccatcagagaatactataaacacgtctatgcaaataaactagaaaatctagaagaaatggataaattcctggacacatacaccctcacaagactaaaccaggaagaagttgaatccctgcataggccaataacaggctctgaaattgaggcaataattaatagcctacgaacccaaaaaagtccaggaacagatggattcacagccaaattctaccagagttacaaagaggagctggtaccattccttctgaaactattccaatcaatagaaaaagatggaatcctccctaactcattttatgaggccagcatcatcctgataccaaagcctggcagagacacaacaaaaaaagaggattttagaccaatatccctgaagaacatcgatacaaaaatcctcagtaaaatactggcaaaccaaatccagcagcacatcaaaaagcttatccaccatgatgaagtgggcttcattcctgtgatgcaaggctggttcaacatatgcaaatcaataaacataatccatcatataaacagaaccaaagacaaaaaccacatgattatctcaacagatgcagaaaagacctttgagaaaattcaacagtgcttcatgctaaaaactctccataaattagtgttggaatttctggccagggcaatcaggcaggagaaagaaataaagggtattcaattaggaaaagaggaaatcaaattgttcctgttggctgatgacacgattgtgtgtttagaaaaccccctcatctcagcccaaaatctccttaaactgataagcaacttcagcaaagtctcaagacacaaaatcagtgtgcaaaaaccacaagcattcttatacaccaataacagacaaatagagagccaaatcatgagtgaactcccattcacaattgcttcaaagaaaataaaatacctaggaatccaacttacaagggatgtgaaggacctcttcaaggagaactacaaaccactgctcaatgaaataaaagagtactcaaacaaatggaagaacattccatgctcatggataggaagaatcaatatcatgaaaatggccatatggcccaaggtaacttatagattcagtgccatccccatcaagctaccaatgactttcttcacagaattggaaaaaactactttaaagttcatatggaaccaaaaaagggcccacatcaccaagacaatcctaagccaaaagaataaggctgcaggcatcacgctacctgacttcaaactatactacaagtctacagtatcctaa

SEQ ID NO: 120358 - DNA, 888 bp, Homo sapiens
atgcagctggagatccgagaatgcacagactgcctcctcaagtggcctccactgctgatactcaggcaaacagggtctggagtagacctccagcaaactccaacagacctgcagctgagggtcctgactgttagaaggaaaactaacaaacagaaaagacatccacaccaaaaccccatctgtacgtcaccatcatcaaagaccaaagaactagagaagcaagagcaaacacattcaaaagctagcagaaggcaagaaataactaagatcagagcagaactgaaggatatagagacacaaaaaacccttcaaaaaatccatgaatccaggagctggttttctgaaaagatcaacaaaattgatagaccgctagcaagactaataaagaagaaagagaagaatcaaatagatgcaatacaaaatgataaaggggatatcaccaccgatcccacagaaatacaaaccaccatcagagaatactataaacacctctatgcaaataaactagaaaatctagaagaaatggatacattcttcgacacatacaccctcccaagtctaaaccaggaagaagttgaatctctgaatagaccaacaacaggctctgaaattgaggcaataattaatagcttaccaaccaaaaaaagtccaggaccagatggattcacagccgaattctaccagaggtacaaggaggagctggtaccattccttctgaaactattccaatcaatagaaaaagagggaatcctccctaacacattttatgaggccagcatcatcctgatactaaagcctggcagagacacaacaaaaaaagagaattttagaccaatatccctgatgaacatcgacgcaaaaatcctcaataaaatactggcaaactga

SEQ ID NO: 120359 - DNA, 1059 bp, Homo sapiens
atgaaaaacaactcagagagttttgagcctctgctgctgatacccaggcaaagagggtctggagtggacctccagcaaactccaacagacctgcagctgagggtcttgactgttagaaggaaaactaacaaacaggacatccacaccaaaactccaactgtacgtcaccatcatcaaagaccaaagaatccctgggacacattcaaagcagtatgtagagggaaatttatagcactaaatgcccacaagagaaagcaggaaagatctaaaattgacaccctaacatcacaattaaaagaagtagagaagcaagagcaaacacagtcaaaagctagtagaaggcaagaaataactaagatcagaggagaactgaaggaaatagagacacaaaaaacccttcaaaaaatcaatgaatccaggagctggttttttgaaaagatcaacaaaattgataggctgctagcaagactaataaagaagaaaagagagaagaatcaaatagacacaataaaaaatgataaagaggatatcaccactgattccacagaaatacaaactaccatcagagaatactataaacacctctacgcaaataaactagaaaatctagaagaaatggataaattcctcaacatatacaccctcccaagactaaaccaggaagaagttgaatccctgaatagaccaattacaggctctgaaattgaggcaataattaatagcttaccaaccaaaaaaagtccaggaccagatggattcacagccgaattctaccagagttaccaggaagagctggtaccattccttctgaaactattccaatcaatagaaaaagagggaatcctctctaactcattttacaaggccaacatcatcctgataccaaagcctggcagagatacaacaaaaaaagagaattttagaccaatatccctgatgaacatcgatgccaaaatcctcaataaaatactggaaaccgaatccagcagcacatcaaaaagcttatccaccatgatcaagtgggcttcatccctgggatgcaaggctggttcaacataa

SEQ ID NO: 120360 - DNA, 1695 bp, Homo sapiens
atgaggcccccattccagaccccagctcctgaacacatcctgggctggaaggaaacctgttgctttcaagggaagaacccattcctggcagcattcatcacctgctacctgaagagcccttggaccttgattaaccatcagcaagatccaggtactacactgaagagcagtcctggtagtggaggccacaggggtgcttcttttacaccaccagaagctctgggtggcttagaacaaagagagactgttcatttgggagaacgtaagaaagataacaagtgtatctgcctggtaatccagagaattcttccagaacttgtgcaagaccatcaaggcggcacctctatgagtctgcaaaaccaccgtgttactgggtttggggagccccctaaagcagatacagttcagatcataacagccaattcctttaaaatatctgaaaagcctcctcaaagaaagagggattcatcaccaggcatctattggccattgatgagaaaaagccttgctactattgaccttcaaggtgcaattgctgttttaattctctcactcactctcactgctgggttgccaagtggcatcacccagacaaatcagacccatctagaatatgactacctggaagtcttttgccctcctcccattcaggatgatggctccttttctgggagaggtaatagagaagagaaactagagacaaattacaaaaaggagaaccagttaaatgaagccttaacaccattcgaaatacaaactaccatcagacaatactataaacacctctatgcaaataaactagaaaatctagaagaaatggataaactcctcaaaacatacaccctctcaagacaaaaccaggaagaagttgaatctctgaatagaccaatagcaggctctgaaattgaggcaataattaatagtttaccaaccaaaaaaagtccaggaccagatagattcacagctgaattctaccagaggtacaagaaggagctggtaccattccttctgaaactattccaatcaatagaaaaagagggactccttcctaactcattttatgaggccagcatcatcctgataccaaagcctggcagagacacaacaaaaaaagagaattttagaccaatatccctgatgaacattgatgcaaaaatcctcaataaaatacttgccaaacaaatccagcagcacatcaaaaagcttatccaccatgatcaagtgggcttcatccctgggatgcaaggctggatcaacatactcaaatcaataaatgtaatccagcatataaacagaaccagtgacaaaaaccatgtgattatctcaatagatgcagaaaaagcctttgacaaaattcaacaacccttcatgctaaaaactctcaataaattaagtattgatgggatgtatttcaaaataataagagctatctatgacaaacccacagccaatatcatactgaatgggcaaaaactggaagcattccctttgaaaactggcacaagacaaggatgccctttctcaccactcctattcaacatagtgttggaagttctggccagggcaatcaggcaggagaaggaaataaagggtattctattaggaaaagaggaagtcaaattgtccctttttgcacatgacatgattgtatatctagaaaaccccatcatctcagcccaaaatctccttagctga

SEQ ID NO: 120361 - DNA, 2871 bp, Homo sapiens
atggctggagcaggaagaagaaagagagagcagggaggtgctacacactttagacaaccggagcttatgggaactcactatcatgagagcaccaagagggatagtgctaaaatgttcatgagaaaccacccctatcacccagtcacctcccaccaagccccacctccaacactggggattacaatttggtatgagatttcggcggggacacagatccagaccactgcaatacatgtgttgaaattcatagaactagaatgttatttggttattaataaagtgatgtactcatgtgtggccaaagcagcttatttttatgtactgaggtgtgtgccgccaccctatggaagatttgatggacatgtacttaagcctcctaaggcccagaactatcttctcagttgcgagctaaagggtgacaaaggttgtcactttcagatggataatgatacaaatgagcgccagttatctttaagaaccaccagttcaggagctggtgcaaaggatgaattgcacgttgttgaagcagagataatgaataatgaaggcagtccaattaagcttctggtaaccattgttctactctctgtctccatgagttcagttgttttaattttagttcccacaaataaattaactttgaagattccttggaagaacctttatggagaagcagttgttgcgaccctggaaggattatacctgcttgttgtccctggagcaagtattaagtatgatgctgtaaaagaagaaaaatccttgcaggatgttaaacagaaagagctatcccgaattgaagaagcccttcaaaaagcagcagaaaaagataagccaaaagaagccaaaaaggatacatttgtggaaaaattggcaactcaagtaataaaaaatgtacaagtaaaaatcacagatattcacttaaatatgaagatgattctctcagaccacagtgcaatcaaactagaactcaggattaagaaactcactcaaaaccactcaactacatggaaactgaacaaccttctcctgaatgactactgggtgcataacgaaatgaaggcagaaataaagatgttctttgaaaccaacgagaacaaagacacaacataccagaatctctgggacacattaaaagcagtgtgtagagggaaatttgcagcactaaatgcccacaagagaaagcaggaaggatctaaaattgacaccctaacatcacaattaaaagaactagagcagcaagagcaaacacattcaaaagctagcagaaggcaagaaataactaagatcagagcagaactgaaggaaatagagacacaaaaaacccttcaaaaaatcaatgaatccaggagctggttttttgaaaagatcaacaaaatcgatagactgctaaaatacaaaactaccatcagagaatactataaacacctctacgcaaataaactagaaaatctagaagaaatggacaaattcctcgacacatacaccctcccaagactaaaccaggaagaagttgaatctctgaatagatcaataacaggctctgaaattgaggcaataattaatagcttaccaaccaaaaaaagtccaggaccagacggattcacagccgaattctaccagaggtacaaggaggagctggtaccattccttctgaaactattccaatcaatagaaaaagagggaatcctccctaactcattttatgagtccagcagcatcctgataccaaagcctggcagagacacaaccaaaaaagagaattttagaccaatatccttgatgaacatcgatgcaaaaatcctcaataaaatactggcaaaccgaatccagcagcacatcaaaaagcttatccaccatggacaagaaggcttcatccctgggatgcaaggctggttcaacatacgcaaatcaataaatgtaatccagcatataaacagaaccaaagacaaaaaccacatgattatctcaatagatgcagaaaaggcctttgacaaaattcaacagcccttcatgctaaaaactctcaatagattaggtattgatgggatgtatctcaaaataataagagctatttatgaaaaacccacagccaatatcatagtgaatgggcaaaaactggaagcattccctttgaaaactggcacaagacagggatgccctctctcaccactcctattccacatagtgttggaagttctggccagggcagtcaagcaggagaaagaaataaagggtattcaattaggaaaagaggaagtcaaattgtccgtgtttgcagatgacatgattgtatatctagaaaaccccatcgtctcagccccaaatctccttaagctgataagcaacttcagcaaagtctcaggatacaaaatcaatgtgcaaaaatcacaagcattcttatacaccaataacagacaaacggagagccaaatcatgagtgaactcccattcacaattgattcaaagagaataaaatacctaggaatccaacttacaagggacgtgaaggacctcttcaaggagaactacaaaccactgctcaatgaaataaaagaggacacaaacaaatggaagaacattccatgctcatggataggaagaatcaatatcgtgaaaatggccatactgcccaagataatttatagattcagtgccatccccatcaagctaccaatgactttcttcacagaattggaaaaaactactttaaagttcgtatggaaccaaaaaagagcccacattgccaagtcaatcctaagccaaaagaacaaagctggaggcatcacgctacctgacttcaaactatactccaaggctacagtaaccaaaacagcatggtactggtaccaaaacagagatacagaccaatga

SEQ ID NO: 120362 - DNA, 2317 bp, Homo sapiens
aagttcagaaaatatattaacagtgcacgaacaggccaatgttgaatctcttaaagaaacaaaacagaattgtaaggatttggatgaagatgccaatggaataacagatgaggggaaagaaattaatgagaaaagttctcagctgaagaatctttctgaacttcaggacactagccttcaacatgatgatgaagaagagtccacagttataagtgtcagtgaagacatgaacagtgaagggaatgtagattttgaatgtgataccaaactatacacgtttctcagcagtgatgaaagccaacagtctgaaaacagtgagaatgaagaggatactttatgttttgttgaaaatagtggccaaagggagtcattaagtggagacacaggaagtctgtcatgtgacaatgcattgtttgtaattgacacaactcctggaatgagtgctgataaaaatttttacttggaagaggaagacaaggcaagtgaggttgccattgaggaagaaaaagaagaggaagaggatgaaaaaagtgaagaagattcatcagaccatgacgaaaatgaagatgagtttagtgatgaagaagacttcctaaatagcacaaaggctaaactgggcagactgacacctcacatggctgggtactcctctgagacaaaacttccagaggaacgaccaggcagcaacatctgctgttcaccaatatctgctgttctgcagcctccgctgctgatacccaggcaaacagggtctggagtggacctccagcaaactccaacagacctgcagctgagggtcctgactgttataaagaaaactaacaaacaaaaaggacatccacaccaaaaccccatctgtacgtccccatcatcaaagaccaaagacagatcaacgagacagaaagttaacaaggatatccaggaattgaactcagctctgcaccaagcagacctaatagacatctacagaactctccaccccaaatcaacagaatatacattcttcgcagcaccacactgcacttattccaaaatcgaccacatagttggaagtaaagcactcctcagcaaatgtaaaagaacagaaattataacaaactgtctcttagaccacagtgcaatcaaactagaactcaggattaagaaattcactcaaaactgctcaactacatggaaattgaacaacctgctcctgaatgactactgggcacataacgaaatcaaggcagaaataaagatgttctttgaaaccaacgagaacaaagacacaacataccagaatttctgggacacattcaaagcagtgtgtagagggaaatttatagcactaaatgcccacaagagaaagcaggaaagatctaaaattgacaccctgacatcacaattaaaagaactagagaagcaagagcaaacacattcaaaagctagcagaaggcaagaaataactaagatcacagcagaactgaaggaaatagagacacaaaaaacccttcaaaaaatcaatgaatccaggagctggttttttgaaaagatcaacaaaattgagaccgctagcaagactaataagaaaagagagaagaatccaatagatgcaataaaaaatgataaaggggatatcaccaccaatcccacagaaatacaaactaccatcagagaatactataaacacctctatgcaaataaactagaaaatctagaagaaatgaataaattcctcgacacaaacaccatcccaagactaaaccaggaagaagttgaatctctgaataggccaataacaggctctgaaattgaggcaataattaatagcttaccaacaaaaaaaagtccaggaccacatggatttacagccagattctaccaggagtacaaggaggagctggtaccattccttctgaaactattccaatcaatagaaaaagagggaatcctccctaactcattttatgaggccagcatcatcctgacaccaaagcctggcagagacacaacaaaaaaagagagttttagaccaatatccctgatgatcatcaatgcaaaaatcctcaataaaatactggcaaaccgaatccagcagcacatcaagaagcttatccaccatgatcaagtgggcttcatccctgggatgcaagactggttcaaaatatgcaaatcaataaacgtaatccagcatataaacagaaccaaagacaaaaaccacatgattatctcaatagatgcagaaaaggcctttgacaaaattcaacaactcttcatgctaaaaactctcagtaaattaggtattgatgggacgtatctcaataagagctatctatga

SEQ ID NO: 120363 - DNA, 1554 bp, Homo sapiens
atgatgagctttcatgaactctcagtccacactgccatagatggtcattcccacagctcctgctctgcatggtgtagccccatagacagagattattttgaacaggagaacaacagcagcagcagctgctgctgctgctgctaccactgccaccggaagcactgtggtgggaagggactcagttttccaggcgaaatgccattgagtcccggacattttaacaagatgatgtattcagtgtctgagctcatgcagggcagtggcagtggcaccttcatccctctccctgcagaattgtcattgtggctactggtcaccaataccaagggacaacgtatgataaaaaatgatgctgaaatacaaactaccatcagagaatactacaaacacctctacgcaaataaactagaaaatctagaagaaatggataaattcctcgacacatacaccctcccaagactcaaccaggaagaagttgaatctctgaatagaccaataacaagctctgaaattgtggcaataatcaatagcttaccaaccaaaaagagtccaggaccacatggattcacagccgaattctaccagaggtacaaggaggaactggtaccattccttctgaaactattccaatcaatagaaaaagagggaatcctccctaactcattttatgaggccagcatcatcctgataccaaagcctggcagagacacaacaaaaaaagagaattttagaccaatatccttgatgaacagtgatgcaaaaatcctcaataaaatactggcaaaccgaatccagcagcacatcaaaaagcttatccaccatgatcaagtgggcttcatccctgggatgcaaggctgtttcaatatatgcaaatcaataaatgtaatccagcatataaacagaaccaaagacaaaaaccacatgattatctcaatagatgcagaaaaagcctttgacaaaattcaacaacccttcatgctaaaaactctcaataaattagagaataaaatacctaggaatccaacttacatgggacgtgaaggacctcttcaaggagaactacaaaccactgctcaaggaaataaaagaggatacaaacaaatggaagaacattccatgctcatgggtaggaaaaatcaatatcatgaaaatggccataccgcccaaggctacctctccattggagagttacaagagagagaagaggtaatggggcagaaaaggcttaggatggtgttagtgccttctgaaagagctagatatctaattgcagattatttccttgtgaggtatggagagccctttactggagtcttccaattccctagcatgctgaagacccctctagtgggctccctacaacttaagtctcccacagtacctggctaccagtgcttccacactagtcacttctccagtccacatggtccacacagaggcttggtgcttcctgggatgcaaatatggattcagccagatgaacatatggcagagactagttacaagactcctactgggaacaagccactttcagaaccatttctagaatgttga

SEQ ID NO: 120364 - DNA, 2745 bp, Homo sapiens; identical to SEQ ID NO: 119717

SEQ ID NO: 120365 - DNA, 2055 bp, Homo sapiens
atgggagactttaacaccccactgtcaacattagacagatcaatgagacagaaagtcaacaaggatacccaggaattgaactcagctctgcaccaagcggacctaatagacatctacagaactctccaccccaaatcaacagaatatacatttttttcagcaccacaccacacctattccaaaatagaccacatagttggaagtaaagctctcctcagcaaatgtaaaagaacagaaattataacaaactatctctcagaccacagtgcaatcaaactagaactcaggattaagaatctcactcaaaaccgctcaactacatggaaactgaacaacctgctcctgaatgactactgggtacataacgaaatgaaagcagaaataaagatgttctttgaaaccaatgagaacaaagacaaaacataccagaatctctgggacgcattcaatgcagtgtgtagagggaaatttgtagcactaaatgcccacaagagaaagcaggaaggatccaaaattgacaccctaacatcacaattaaaagaactagaaaagcaagagcaaacacattcaaaagctagcagaaggcaagaaataactaaagtcagagcagaactgaaggaaatagagacacaaaaaacccttcaaaaaattaatgaatccaggagctgcaagactaataaagaaaaaaagagagaagaatcaaatagagcaataaaaaatgacaaacgggatatcaccatcgatcccacagaaatacaaactaccatcagagaatactacaaacacctctacgcaaataaactagaaaatctagaagaaatggataaattcctcgacacatacactctcccaagactaaaccaggaagaagttgaatctctgaatagaccaataacaggatctgaaattgtggcaataatcaatagcttaccaaccaaaaagagtccaggaccagaaggattcacagccgaattctaccagaggtacaaggaggaactggtaccattccttctgaaactattccaatcaacagaaaaagagggaatcctccctaactcattttatgaggccagcatcattctgataccaaagccgggcagagacacaaccaaaaaagagaattttagaccaatatccttgatgaacattgatgcaaaaatcctcaataaaatactggcaaaacgaatccagcagcacatccaaaagcttatccaccatgaccaagtgggcttcatccctgggatgcaaggctggttcaatatatgcaaatcaataaatgtaatccagcatataaacagaaccaaagacaaaaatcacatgattatctcaatagatgcagaaaaggtctttgacaaaattcaacaacgcttcatgctaaaaactctcaataaattagtgttggaagttctggccagggcagttaggcaggagaagaaaataaagggtattcaattaggaaaagaggaactcaaattgtccctgtttgcagacgacatgattgtatatctagaaaaccccattgtctcagcccaaaatctccttaagctgataagcaacttcagcaaagtctcagaatacaaaatcaatgtacaaaaatcacaagcattcttatacaccaacaacagacaaacagagagccaaatcatgagtgaactcccattcacaattgcttcaaagagaataaaatacctaggaatccaacttacaagggatgtgaaggacctcttcaaggagaactacaaaccactgctcaaggaaataaaagaggatgtaaacaaatggaagaacattccatgctcatgggtaggaagaatcaatatcgtgaaaatggccatactgcccaaggtaatttacagattcaatgccatccccatcaagctaccaatgacttccttcacagaattggaaaaaactactttcaagttcatatggaaccacaaaggagcccgcatcgccaagtcaatcctaagccaaaagaacaaagctggaggcatcacactacctgacttcaaactatactacaaggctacagtaaccaaaacagcatggtactga

SEQ ID NO: 120366 - DNA, 3529 bp, Homo sapiens
ctctagtgatggcagctggtggacagggtttcagtggagagaatggaggcaggcagggagatcggtgaactcttgggacaatcccaaacaggaagttagagcttcaagtaaggacaagagcaggggaagcattcaagaggcgatgaggatgcaaagttcagcgaagctgctgtgttctgcctggactctagcttactccattgcagtaaggacattgtcctcagacagcgagggccagcctccgctggtgatacacaggcaaacagggtctggagaggacctccagcaaactccaacagacctgcagctgagggtcctgactattagaaggaaaactaacaaacagaaaggacatccacaccaaaaccccatctctagcagaagacaagaaataactaagatcagagcagaactgaagaagatagagacacaaaaacccttcaaaaaaatcaatgaatccaggagctggttttttgaaaagatcaacaaaattgatagactgctagcaagactaataaagaagaaaatagagaagaatcaaatagatgcaataaaaaatgataaagggaatatcaccaccaatcccacagaaatacaaactaccatcagagaatactataaacacctctatgcaaataaactagaacacctagaagaaatggataaattcctggacatatacaccctcccaagactaaaccaggaagaagttgaatctgtgaatagaccaataacaggttctgaaattgaggcaataattaatagtctaccaaccaaaaaaagtccaggaccagacagattcacagctgaactctaccagaggtacaaagaggagctggtaccattccttctgaaactattccaatcaatagaaaaagagggaatcctccctaattcattttatgaggccagcatcatcctgatatcaaagcctggcagagacacaacaaaaaaagagaattttagaccaatatccctgatgaacatcgatgcaaaaatcctcaataaaatactggcaaaccaaatccagcagcacatcaaaaagcttatccaccaccatcaagttggcttcatccctgggatgcaaggctggttcaacatactcaaatcaataaacgtaatccatcatataaacagaaccaaagacaaaaaccacatgattatctcaatagaagcagaaaaggcctttgacaaaattcaacagccctttatgctaaaaactctcaataaactaggtattgatgggacatatctgacatatctcaaaataataagagctatttatgacaaacccacagccaatatcatactgaatgggcaaaaactggaagcattcccttttaagactggcacaagacagggatgtcctctctcaccactcctattcaacatagtgttggaagctctggccagggcaatcaggcaagagaaagaaataaagggtattcaattaggaaaagaggatgtcaaattgtccctgtttgcagatgacatgattgtatatttagaaaaccccatcgtctcagcccaaaatctccttaagctgataagcaacttcagcgaagtctcaggatacaaaatcaatgtgcaaaaatcacaagcattcctatacaccaataacagacagacagagagccaaatcatgagtgaactcccattcacaattgcttcaaagagaataaaatacctaggaatacaacttacaagggatgtgaaggacctcttcaaggagaactacaaaccactgctcaatgaaataaaagaggacacaaacaaatggaagaacattccatgctcatggataggaagaatcaatattgtgaaaatggccatactgcccaagactctcaatcagaaattctcatactggttcagagtcaacaaacactacattcaccagaggacttttcccctcaaagagacagaattcaacaccatagcaacgctttataatggtgcttctccagcacagcaccaaaaagcactggaaccaatggccatcaagcatcaggattgccacggttctgaagaattgccttttgcagtgctcttgtcaagtctaaacgaaaactctatcagggttatttgcctggtcagacagataggagggaagagggagtttcttggtgtccaggtggtccttaagacaaagccagaactggcatttccagtggagggaggactacaaggtcaaaggtggataagcaattacctctatgaaggaaacgggcagggagatgaaaaggagaaaagcaacacggaggataggaaaagcctttccatggagatgatgttccagccaagacaggaaggggtagaacgagccagcgaggccaagggcaggatgggggtgggcaaggatactgagaaacagctcctggaggaggagtcggccagggcacaggcctggaggcggaaatgtgctgggtgcatggtcacagaatccaggatgttattttggctttctggagacaagggcccacagttcgtcaccatgggtccagcagaaggcccagctagatctaagaatcaacacaaaaagattgaaagctttaaacacctgagtttggataattctagccaggaagagaccccaggaccaggccagtgtcattaccacctccagcaactcccctcagctccccacaaggaggcgaaagcaacccaacacaaacgtgtgtgcccaagcatctcctctcagtccttgaccccttcatctttactctctaaagatattactacagcaccttgcaaattgaatttaacaaaggacctatgtttgatgaatgaacagccatacagaaatgtgattggacacaaaggatctggcctaacggtgaaggacggagtggggaaacccagcaaaaccacagaattttttactgagtacttcagttacaagaaaagctatccaaaaaaaccctacaaatgcatccaaagacagcttctgctcatccagagccaagaagaactagcaggcaatcatgtgcagaggcctttagctttagagtttggggcgcttttttctcctggaggtgccagctggggttttggggacttgaaaagttacctggggctacagaacacagtgtccacgcacttggacaagctgcctcttctgggtgaaaggcacatgtcccaccagacacccatgagccatccttggcccctctctggaaccttacccctcacatcccataaatccccaaggactgtgcatccacctgctgaacatcaccaaagtccacttccaattccactcccagtgactgcaaagggggcctttgcctcggtgccaccattactattccctgctccacaaggattatcgaatgagggcagaagatgtcatgggtatattttgataaatatttcaggcattacaaacaatactgaaatatatgccagtcttgtaaccatcacactgcaacattttctgctgccttctgaagactgtggaaaagcccccttgcaagggagggtggaaggaagagagggagtttctcagaaagagaagagaaaaacctaa

SEQ ID NO: 120367 - DNA, 3021 bp, Homo sapiens
atggatggacctggaagccattatcctcagcaaagtaacgcaggaacagaaaatcaaacaccgaatgttctcacttataagtgggagctgaacaatgagaacacatggacacaaggaggagaacaatacacactggggccttttggggggtggcaggggaaggagagcatcaagataagtagctattacacgctgggcttaatacctaggtggagctggttttttgaaaagatcattaaaattgatagaccactagcaagactaataaagaagaaaagagagaagaatcaaatagatgcaataaaaaatgataaaggggatatcaccaccgatcccacagaaatacaaactaccatcagagaatactataaacacctctacacaaataaactaggaaatctagaagaaatggatcaattcctggaaacatacaccctcccaagactaaaccaggaagaagttgaatccctgaagagaccaataacaggctctgaaattgaggcaataattaatagcctaccaaccaaaaaaagtccaggaccagatggattcacagctgaattctaccagaggtacgaggaggagctggttccattccttctgaaactattccaatcaatagaaaaagagggaatcctccctaattcattttatgaggccaacatcatcctgatatcaaaggctggcagagacacaataaaaaaagagaattttagaccaatatccctgatgaacatcaatgcaaaaatcctcaataaaatactggcaaaccgaatccagcagcacatcaaaaagcttatccaccacgatcaagtgggctgcatccctgggatgcaaggctggttcaacatatgcaaatcaataaacgtaatccatcatataaacagaaccaaagacaaaaaccacatgattatctcaacagatgcagaaaaggcctctgacaaaattcaacaacccttcatgctaaaacctctcaataaattaggtattgatgggatgtatctcaaaataagaagagctatttatgacaaacccacagccaatatcatactgaatgggcaaaaactggaagcattccctttgaaaactggcacaagacagggatgccctctctcaccactcctattcaacatagtgttggaagttctggtcagggcaatcaggcaggagaaggataaaactactttaaagttcatatggaaccaaaaaagagcccgcattgccaagataatcctaagccaaaagaacaaagctggaggcatcaagctacctgacttcaaactatactacaaggctacagtaaccaaaacagcgtggtactggtaccaaaacagagatatagaccaatggaacagaatagagccctcagaaataataccacacatctacaaccatctggtctttgacaaacctgacaaaaacaagaaatggggaaaggattccctatttaataaatgttgctgggaaaactggctagccatacgtagaaagctgaaactggatcccttccttacaccttatacaaaaatcaattcaagatggattaaagacttaaatgttagacctaaagccataaaaactctagaagaaaacctaggcaaaaccattcaggccataggcatgggcaagggcttcatgtctaaaacaccaaaagcaatggcagcaaaagcccaaattgacaaatgggttctaattaaactaaagagcttcttcacagcaaaagaaaccaccatcagagtgaacaggcaacctacagaatgggagaaaatttttgcaatctactcatctgacaaagggctagtatccagaatctacaaaaaactcaaacagatttacaagaaaaaatcaaacaaccccattaaaaagtgggtgatggatatgaacagacaattctcaaaagaagatgtttatgcagccaacagacacatgaaaaaatgctcatcatcacgggccatcagagaaatgcaaaccaaaaccacaatgagataccatctcacaccagttagaatggcgatcattaaaaagtcaggagacaacaggctgctctctggcggtgcagagcctctcattcagtgtcggacacctgccccgccgtgcattgcacacagctgtgcctgctcctgctccgtcagtacccctccactggggtgggatgggagtccttttgggctgatacaacagaataccttaggttgggtaatttataaacaacagaaatttattgctcacagttttgaaggttggaaagtccaagacgcaggcacccatagatttggtgtctggtggaagcccataggcagtgcctgccatgaaggggaaagggatctttcaagactcttttataaagaatcaaccttgtcctatgttaggcagctggaggcaagagtaagacagctggaggaagaaaatcgcatgctgccccaggatagatacacattttatgtaatggttgcagccacagttatgtgcctggagtggagaaggtcaaatgagcacagagctgatgttaatctggtcttggatgttcaggaaactatagatcgtcaacagggtaaagagtatgaacatgaccttagtgagacagaaaaagctatagtcagagaaatgtgcaatgttgtgtggaggaaacttggagatgctgcaggttcgtgtcctggaattaggcaacatttgtcaggaaaccagtacaaaggaccaatgattagagtggatagtggggacaacaggcaaagagaactggaagaagatgaagtattccagctagatggtcctggatttaatactcaatttgatgggcagctctttgggccaagcacaaatgtcctgtattggtgccagtggcagatggtccttttcatgacagataaggtatcaatgaactgggggggctctagggagtcagagggtagacgtttccatgctctgctggttcttacatccagcatgaaaagcaactcagtgttgacatttttggatccagaaatcaggggcatttctctgagagtagaaaggggtttttag

SEQ ID NO: 120368 - DNA, 2016 bp, Homo sapiens
atgggagactttaataccccactgtcaacattagacagatcaaagagacagaaagttaacaaggatatccaggaattgaactcagctctgcaccaagtggacctaatagacatctacagaactctccaccccaaatcaacagaatatacattcttttcagcaccacaccgcacttattccaaaatggaccacacagttggaagtaaaccactcctcagcaaatgtaaaagaacagaaattataacaaactgtctctcagaccacagtgcaatcaaactagaactcaggattaagaaactcactcaaaactgctcaactacatggaaactgaacaacctgctcctgaatgactactggctacataacgaaatgaaggcagtaataaagatgttctttgaaaccaacgagaacaaagacacaacataccagaatctctgggacacattcaaagcagtgtgtagagggaaatttatagcactaaatgcccaaaagagaaagcaggaaagacccaaaattgacaccctaacatcacaattaaaagaactagaaaagcaagagcaaacacattcaaaagctagcagaaggcaagaaataactaagaccagagcagaactgaaggaaatagagacacaaaaaaacccttcaaaaaaatcaatgaatccaggggctgaaatacaagctaccatcagagaatactataaacacctctatgcaaataaactagaaaatctagaagaaatagataaattccttgacacatataccctcccaagactaaaccaggaagaagctgaatctctgaacagacaaataacaggctctgaaattgaggcaataattaacagcttaccaaccaaaaaaagtccaggacctgatggattcacagctgaattctaccagagggacaaggaggagctggtaccattccttctgaaactattccaatcaatagaaaaagagggaatcctccctaactcattttatgaggccagtatcatcctgataccaaagcctggcagagagacaacaaaaaaagagaattttagaccaatatccctgatgaacatcgatgcaaaaatcctcaataaaatactggcaaaccgaatccagcagcatatcaaaaagcttatccaccatgatcaagtggacttcatccctgggatgcaaggctggttcaacatatgcaaaacaataaacataatccagcatataaacagaaccaaagacaaaaaccatacgattatctcactagatgcagaaaaggcctttgacaaaattcaacaacccttcatgctaaaaactctcaataaattaggtattgatgggacgtatctcaaaataataagaactatctatgacaaacccacagccaatatcataccgaatgggcaaaaactggaagcattccctttgaaaacgggcacaagacagggatgccctctctcaacactcctattcaacatagtgttggaagttctggccagggcaatcaggcaggagaaggaaataaaggcccaaaatctccttaagctgataggcaacttcagcaaagtctcaggatacaaaatcaatgtgcaaaaatcacaagcattcttatacaccaataacagacaaacagagagccaaatcatgagtgaactcccattcacaattgcttcaaagagaataaaatacctaggaatccaacttacaagggatgtgaaggacctcttcaaggagaactacaaaccactgctcaaggaaataaaagaggatacaaataaatggaagaacattccatgctcatgggtaggaagaatcaatatcgtgaaaatggccacactgtccaaggtaatttatagattcaatgccatccccatcaagctaccaatgactttcttcgcagaattggaaaaaactactttaaagttcatatggaaccaaaaaagagcccgcatcgccaagtcaatcctaagccaaaagaacaaagctggaggcatcgagctacctgacttcaaactatactacaaggctatg

SEQ ID NO: 120369 - DNA, 1215 bp, Homo sapiens
atgcctaactttgcccccagcacagggggagttgaaggagtttcattggtgtatatccagagagattatcagattcatcagtcatccaatcggtggttggtagaaatacaaactaccatcagagaatactataaacaactctacgcaaataaactagaaaatctagaagaaatggataaattcctggacacacacatcctcccaagactaaatcaggaagaagttgaatctctgaatagaccaataacaggctctgaaattgaggcaataatcaatagcttatcaaccaaaaaaattccaggaccagatggattcacagctgaattctaccagaggtacaaacaggagctggtaccattccttctgaaactattccaatcaatagaaaaagagggaatcctccctaactcattttatgaggccagcatcatcctgataccaaagcctgggagagacacaaccaaaaaagagaattttagaccaatatccttcatgaacattgatgcaaaaatcctcaataaaatactggcaaaccgaatccagcagcacatcaaaaagcttatccaccatgatcaagtgggcttcatccctgggatgcaaggctgggtcaacatacgcaaatcaataaatggtatccaacatataaacagaaccaaagaccaaaaccacatgattatctcaacagatgcagaaaaggcctttgacattatactgtacagcgcactcttcgctgaagtttatgcgactgtcatagtggggaccgaagctgttcaaaaggaagtagattatccttcccctacgtacgtgggaagggggaggctctgggttatcaagaggatcaaaatcgaatttgctcatccagtactgtacctgacattggataagtcaagtgagctctgtaaggcagaaaccggggaagccgccctcatacggtatggagaccggaagcacatagtgcccgagagcgccgtcacttccggcgtcacagacggtcattacaagcgactcgtgggcgtcaatactgggctgaatctcatttttgatgaagaggaaggagcggtttccacaaggggcacctccgttcagagcattgaactggtcctcccaccccatgcaaaccatcacggaaatacatttggtggccagattatggcgtggatggagacagtggctactatttctgcaaggttcttggttttgaccttcggcctatga

SEQ ID NO: 120370 - DNA, 2268 bp, Homo sapiens
atggccgggtacccctctgagacgaaacctccagaggaacgatcagacagcaacatttgctcttcagcaatattcactgttctgcaccccccgctgctgatacccaggcaaacagcgtttggaatggacctccagcaaatgccaacagacctgcagctgagggtcctgactgttaaaaggaaaactaacaaacagaaaggacatccacaccaaaaccccatccgcacatcaccatcatcaaagaccgaagactttcaaccaacaaagatcaaaagagacaaagaaggccattatataatggtaaagggatcaattcaacaagaagagctaactatcctaaatatatatgcacccaatacaggagcacccagattcataaaggaagtccttagagatctacaaagagacttagactcccacacaataataatgggagaatttaacacacgactgtcaacattagacagatcaatgagacagaaagttaacaaggatatccaggaattgaattcagctctgcaccaagcagacctaatagacatctccagaaatctccaccccaaatcaacagaatatacattcttctcagcaccacatcgcacttattccaaaattgaccacatagttggaagtaaagcactcctcagcaaatgtaaaagaacagaaattataacaaagtgtctctcagaccacagtgcaatcaaactagaactcaggattaagaatctcactcaaaactgttcaactacatggaaactgaacaacctgctcctgaatgactactgggtacataatgaaatgaaggcagaaataaagatgttctttgaaaccagcgagaacaaagacacaacataccagaatctctgggacacatttaaagcagtgtgtagagggaaatttatagcactaaatgcccacaagagaaagcaggaaagatctaaaactgacaccctaacatcacaattaaaagaactagagaagcaagagcaaacacattcaaaagctagcagaaggcaagaaataacaaagatcagagcagaactgcaggagatagagacacaaagaacccttcaaaaaatcagtgaatccaggagctggttttttgaaaagatcaacaaaattgatagatcgctagcaagactaataaagaagaaaagagagaagaatcaaatagaggcaataaaaaatgataaaggagatatcaccaccaatcccacagaaacacaaactaccatcaaagaatactataaacacctctacaaaaataaactagaaaatctagaggaaatggataaattcctgaacacatacaccctcccaagactaaaccaggaagaagttgaatctctgaatagaccaataacaggatctgaaattgtggcaataatcaatagcttaccaaccaaaaaaagtccaggaccggatggattcacagccgaattctaccagaggtgcaaggaggagctggtaacattccttctgaaactattccaatcaatagaaaaagagggaatcctccctaactcattttatgaggccagcatcaacctgataccaaagcctggcagagacacaacaaaaaaagagaattttagaccaatatccctgatgaacatcgatgcaaaaatcctcaataaaatactggcaaaccgaatctgggcaattaggcagaagaaagaaataaagagtattcaattaggaaaagaggaagtcaaattgtccctgtttgcagatgacatgattgtgtatctagaaaaccccatcatctcagcccacaatctccttaagctgataagcaacttcagcaaagtctcaggatacaaaatcaatgcacaaaaatcacaagcattcttatacaccaataacagacaaacagagagccaaatcatgagtgaactcccattcacaattgcttcaaagagaataaaatacctaggaacccaacttacaagggatgtgaaggacctcttcaaggagaactacaaaccactgctcagtgaaataaaagaggacacaaacaaatggaagaacattccatgctcatggataggaagaatcaacatcgtgaaaatcgccatactgcccaaggtaatttatagattcaatgccattcccatcaagctaccaatgactttcttcacagaattggaaaaaactaccttaaatttcatatggaaccaaaaaagtgcccacattgccaagtcaatcctaagtcaaaagaacaaagctggaggcatcaagctacctgacttcaaactatactgctag

SEQ ID NO: 120371 - DNA, 1797 bp, Homo sapiens
atgataatgggagactttaacaccccactgtcaacattagacagatcaacgagacagaaagttaacaaggatatccaggaattgaactcagctctgcaccaagcggacctaatagacatctacagaactctccaccccaaatcaacagaatataccttcttctcagcatcacacctcacttattccaaaattgaccacatagttggaagtaaagcactcctcagcaattgtaaaagaacagaaattataacaaactatctctcagaccacagtgcaatcaaactagaactcaagattaagaaactgactccaaaccgctcaactacatggaaactgaacaacctgctcctgaatgactactgggtacataacgaaatgaaggcagaaataaagatgttctttgaaaccaacgagaacaaagacacaacataccagaatctctgggacacattcaaagcagagtgtagagggaaatttatagcactaaatgcccacaaaagaaagcaggaaagatctaaaattgacaccctaacatcacaattaaaagaactagagaagcaagagcaaacacattcaaaagctagcagaaggcaagaaataactaagatcagagcagaactgaaggaaatggagacacaaaaaaacccttcaaaaaaatcaatgaatccaggggctgaaatacaaactaccatcagagaatactataagcacctctacgcaaataaactagaaaatctagaagaaatggatacattcctcgacacatacaccctcccaagactaaaccaggaagaagttgaatctccgaatagaccaataacaggctctgaaattgaggcaataattaatagcttaccaaccaaaaaaagtccaggaccagatggattcacagccaaattctaccagaggtacaaggaggagctggtaccattccttctgaaactattccaatcaatagaaaaagagggaatcctccctaactcattttatgaggccagcatcatcctgataccaaagcctggcagagacacaacaaaaaaagagaatttcagaccaatatccctgatgaacatcgatgcaaaaatcctcaataaaatactggcaaaccgaatccagcagcacatcaaaaagcttatccaccatgatcaagtgggcttcatccctgggatgcaaggctggttcaacatacgcaaatcaataaacataatccagcatataaacagaaccaacaacaaaaaccatatgattatctcaatagatgcagaaaaggcctttgacaaaattcaacaacccttgatgctaaaaactctcaatgaattagcccaaaatctccttaagctgataggcaacttcagcaaagtctcaggttataaaatcaatgtgcaaaaatcacaagcattcttatacaccaataacagacaaacagaaagccaaatcatgagtgaactcccattcacaactgcttcaaagagaataaaatacctaggaatccaacttacaaggttggcaaaggaactcttcaaggagaactacaaaccactgctcaatgaaacaaaaggggatacaaacaaatggaagaacattccatgctcatgggtaggaagaatcaatattgtgaaaatggccatattgcccaaggtattgagaaagggtcaaactccagtgccttcaggcataaggctagcaaaacaattgtcatataataagaaacacttgtgttgcagctcagaaaatgataccctcaaatatgccgctttaaaactcaaactgagagcacctggaaagcagcaaatgcag

SEQ ID NO: 120372 - DNA, 2065 bp, Homo sapiens
gataaaaactcttagtattcgcctaacattacgggccactgaattaacctgcaccgggtctcccagttctaccgagagtggaggtcttcctggaggagccgggcagtggctcgtgggagccaagatggcggcggcggcggcagcgacagcagcagcagcagccagtattcgggaaaggcagacagtggctttgaagcgtatgttgaatttcaatgtgcctcatattaaaaacagcacaggagaaccagtatggaaggtactcatttatgacagatttggccaagatataatctctcctctgctatctgtgaaggagctaagagacatgggaatcactctgcatctgcttttacactctgatcgagatcctattccagatgttcctgcagtatactttgtaatgccaactgaagaaaatattgacagaatgtgccaggtttttgaccaatatctcaattttattactttggaagatgatatgtttgtattatgtaatcaaaataaggagcttgtttcatatcgtgccattaacaggccagatatcacagacacggaaatggaaactgttatggacactatagttgacagcctcttctgcttttttgttactctggaaatacaaactaccatcagagaatactataaacacctctatgcaaataaactagaaaatctagaagaaatggataaattcctggacacatataccctcccaagactaaactgggaagaatttgaattgctgaatagaccaataacaggctctgaaattgaggcagtaatcaatagcctaccaacccaaaaaaaaagtccaggaccaggtgaattcacagctgaattctaccagagatacaaagagaagctggtaccattccttctgaaactattccagtcaatagaagaagagggaatcctccctaactcattttatgaggccagcatcatcctgataccaaagcctggcagagacacaacaaaaaacgagaattttagaccaatatccctgatgaacatcaatgcgaaaatcctcaataaaatactggcaaagcaaatccaacagtacatcaaaaagcttatccaccacaaacaagttggcttcatccctgggatgccaggctggttcaacatatgcgaatcgataaacataaatcatcatattaacagaaccaaagacaaaaaccacatgattatctcaatagatgcagaagaggccttcgacaaaattcaacagcccttcatgctaaaacctctcaataaattaggtattgatggaacgtatctcaaaataataagacctatttatgacaaacctacagccaatatcatactgaatgggcaaaaactggaagcattccctttgaaaactggcacaagacagggatgccctctctcaccactcttattcaacatagtgttggaagttctggccagggcagtcaggcaagagaaagaaataaagggtattcaattaggaaaagaggaagtcaaattgtccctgttgagaataaaatacctaggaattcaacttacaagggatgtgaaggacctcttcaaggagaactacaaaccactgctcaacgaaataaaagaggacacaaacaaatggaagaacattccatgctcatggataggaagaatcaatatcgtgaaaacggccatactgcccaaggatttccatttaaacagggttaatttggaagaatcttcaggagtggaaaactctccagctggtgctagaccaaagagaaaaaacaagaagtcttatgatttaactccggttgataaattttggcaaaaacataaaggaagtccattcccagaagttgcagaatcagttcagcaagaactagaatcttacagagcacaggaagatgaggtcaaacgacttaaaagcattatggttcatacaggaatagaaacagaactgcagtctgtaggtgattctgctgatgttttcacttctatatgtagtgtctctgtgaaatggcaaaaggctgttcagatctgtttacctgaggtcattgtctcttgtggaggtgatacagatacagatatagatgtatag

SEQ ID NO: 120373 - DNA, 1215 bp, Homo sapiens
atgaaggtgatgacttggaaggcacctaacactacctggggacagctaaagaaattggatcaacaggcatctatttggcttgcagctgtggaagccctcgcaaccgcatggaatcggtttcttaagtatctggtggtaactggggaaacttctgagaaagagtatctttattaccagccccaaagggatactaagtttgcaaacttgacctttatgtctgctgttagcactaatcttactgaggtctctaatgaagctacacaagtgcctgatcttcctatatgctgtctgagtacggactggcgatacaagtgcatttgcagacggctctgtgctgccacccaacgtatctatgaccaaggaagaacaatagaagtttaccttgcattggatgaccagcatgtgctaagaattaaagaagagggagacatcgggggagcatggcaatatattcaaccttataataacccaaatgcacatggcgattttttaaaaataaatagagcatatgaagtactcaaagatgaagatctacggaaaaagtatgacaaatatggagaaaagggacttgaggataatcaaggtggccagtatgaaagctggaactattatcgttatgattttggtaagggcatagctgaacaaaaggcagcagacaacttctgcagacttaaacgttcctgtctgacagctctgaagacagtggtggttctcccagaacggcatttgagctctgagaagggacagactgcctcttcaaaaatacaaactaccatcagagaatactataaacacctctacacaaataaactagaaaagctagaagaaatggataaattcctggacacaaacaccctcccaagactaaaccaggaagaagatgaatttctgaatagaccaatagcaggctctgaaattgaggcaataattaatagcctatcaaccaaaaaaagtccaggaccagaaggattcacagctgaattctaccagagctacaaagaggagctggtaccattcctgctgaaactattccaatcaatagaaacagagggaatcctccctaactcattttatgaggccaacatcatcctgataccaaagcctggcagagacacaacaaaaaaagggaattttagaccaatatccctgatgaacatcgatgtgaaaatcctaaatattgatgtgaaaatcctcaataaaatactggcaaactga

SEQ ID NO: 120374 - DNA, 2721 bp, Homo sapiens
atggccctcttcagggtggggatgaccacaaggagactgggtcatgctaataaattcacaagagacttactggtaaaaagactactgctttatgaatttgtggtagaaattataccgggtttaagaaccaagaccacattggtgggtcccctggagacaggatatacatcaagtgactcagtgaacagtccccactttatgttggacatagctctatctcataatgtcaagagcacacagctgttgctaagaccatggaggaatattgactgttcaaggaaccacaagaacgcaaagaaggaggaacaaatgggggatgatgaaataaacaggcagcaggaatgcagctcctcaccagcaatggaacaaagctggacagagaatgactttgatgagttgagagaagaagtcttcagacgatcaaactactccgagctacaggaggaaattcgaaccaatggcaaagaagttaaaagctttgaaaaaaaattagacgaatggataactagaataaccaatgcagagaagtccttaaagcacctgacggagttgaaaaccaaggcacgagaactacaactagaaaagcaagagctaacacattcaaaagctagcagaaggcaagaaataactaagatcagagcagaactgaaggaaatagagacacaaaaaacccttcaaaaaattaacgaatccaggagctggttttttgaaaagatcaacaaaattgatagaccgctagcaagactaataaagaagaaaagagagaagaatcaaacagacacaataaaaaatgataaaggggatatcatcaccgatcccacagaaatacaaactaccatcagagaatactataaacacctctacacaaataaactagaaaatctagaagaaatggataagttcctggacacatacgtcctcccaagactaaaccaggaagaagttgaatctctgaatagaccaataacaggctctgaaattgaggcaataatcaatagcttaccaaccaaaaaaagtccaggaccagatggattcacagccgaattctaccagaggtacaaagaggagctagtaccattccttctgaaactatcccaatcaatagaaaaagagagaatcctccctaactcatcttatgaggccagcatcatcctgattccaaagcctggcagagacacaaccaaaaaagagaattttagaccaatatccttgatgaacatcgatgcaaaaatcctcaataaaatattggcaaacagaacccagcagcacatcaaaaagcttatccaccatgagcaagtgggctgcatccctgggatgcaaggctggttcaacatacgcaaatcaataaatgtaatccagcatataaatagaaccaaagacaaaaaccacatgattatctcaatagatgcagaaaagctgataagcaaattcagcaaagtctcaggacacaaaatcaatgtacaaaaatcacaagcattcttatacaccgataacagacaaacagagagccaaatcatgagtgaactcccattcacaattgcttcaaagagaataaaatacctaggaatccaacttacaagggatgtgaaggacctcttcaaggagaactacaaaccactgctcaatgaaataaaagaggatacaaacaaatggaagaacattccatgctcatgggtaggaagaatcaatattgtgaaaatggccctactgcccaagattcagtgccatccccatcaagttaccaatgactttcttcacagaattggaaaaaactactttaaagttcatatggaaccaaaaagagcccgcatcgccaagtcattcctaagccaaaagaataaagccggaggcatcacactacctgacttcaaactatactacaaggctacagtacccaaaacagcatggtactgctaccaaaacagagatatagatcaatggaacagaacagagccctcagaaataatgctgcttatctacaactatctgatctttgacaaacctgacaaaaagaaggaatggggaaaggattccctatttaataaatggtgctgggaaaactggctagccatatgtagaaagctgaaactggatcccttccttacaccttatacaaaaatgaattcaagatggattaaagacttacatgttagacctaaaaccataaaaaccctagaagaaaacctaggcaataccattcaggacgtaggcatgggcaaggacttcatgtctaaaacaccaaaagcaatgggaacaaaagtcaaaattgacaaatgggatctaattaaactaaagagcttctgcacagcaaaagaaactaccatcagagtgaacaggcaacctacagaatgggagaaaatttttgcaacctactcatctgacaaagggttaatatccagaatctacattgaactcaaacaaatttacaagaaagaaacaaacaaccccatcaaaaagtgggccaaggatatgaacagacacttctcaaaagaagacatttatgcagccaaaaaacacatgaaaaaatgctcatcatcactggccatcagagaaatacaaatcaaaaccacaatgagaaagcatctcataccagttagaatggtgatcattaaaatgtcaggaaacaacaggtgctggagaggatgtggagaaacaggaacacttttacgctgttggtggaactgtaaactagttcaaccattgtggaagtcagtgtggtga

SEQ ID NO: 120375 - DNA, 2310 bp, Homo sapiens
atgggcaaggtaaacctgctgatggagagtcatgaatgccagagtgagaatttcagaattgattcagtaacaatcagtaaacgaacattttgcctgcagtacactgttaggcactccatgtcctcaaacacaaggtctggccttgtacacaaacaaccagagaagtggcaagaatcaccacataatgtagaagaaaacctgagctgggccttacagggtggggaaggattaacaaggagaagaaaagaacagaatgagcaatcttatatggagttaaaaattggttatggtgtagaaaagctttttggaatttctgaagcaatttcagtggcctctgctgatgatacccagacaaacacggtctggagtggacctccagcaaactccaacaaacctgcagctgaggtcctgactgttagaaggaaaactaataaacagaaaggacatccacatcaaaaccccatctgtatgtcaccatcatcaaagaccaaagaaatacaaactaccatcagagaatactataaacacctctatgaaaataaactacaaaatctagaagaaatggataaattactggacacatacaccctcccaagactaaaccaggaagaagttgaatccctgaatagaccaataacaggctctgaaattgaggcaataatgaatagcctaccaaacaaaaaaagtccaggaccagatggattcacagccgaattctaccagaggtacaaagaggagctggtaccattccttctgaaactattccaatcgatagaaaaagagggaatcctccctaactcattttatgaggccagcatcattctgataccaaagcctggcataaaaacaacaaaaaaagagagttttagaccaatatccctgatgaacatcgatgcaaaaatcctcaataaaatactggcaaaccgaatccagcagcccatcaaaaagcttatccaccacgatcaagttggcctcatccctgggttgcaaggctggttcaacatacacatatcaatagacataatccatcatataaacagaaccaatgacaaaaaccacataattatctcaatagatgcagaaaagggctttgacaaaattcaacagcccttcatgctaaaaactctcaataaactagcccaaaatctccttaagctgataagcaacttcagcaaagtctcaggatacaaaattaatgtgcaaaaatcacaagcattcctatacactaataacagacaaacagagagccaaatcatgagtgaactcccattcacaattgcttcaaagagaataaaatacctaggaatccaacttacaagggatgtgaaggacctcttcaaggagaactacaaaccactgctcattggaataaaagaagacacaaataaatggaagaacattccatgctcatggataggaagaatcaatatcgtgaaaatggtcatactgcccaaggtaatttatagattcaatgccatccccatcaagctaccaatgactttcttcacagaattggaaaaaattactttaaagttcatatggaaccaaaaaagagcccacattgccaagacaatcctaagccaaaagaacaaagctggaggcatcacgctacctgacttcaaactatactacaaggctacagtaaccaaaacagcacggtactggtaccaaaacagagatatagaccaatggaacagaacagagccctcagaaataataccatacatctacaaccatctgatctttgacaaacctgacaaaaacaagaaatggggaaaggattccccatttaataaatggtgctgggaaaactggctagccttatgtagaaagctgaaactggatcccttccttataccttatacaaaaattaattcaagatggattaaagacttaaatgttagacctaaaaccataaaaaccctagaagaaaacctaggcaataccattcaggacataggcatgggcaaggacttcaggactaaaacaccaaaagcaatggcaacaaaagccaaaattgacaaatgggatctaattaaactaacgagcttctgcacagcaaaagaaactatcatcagagtgaacacgcaacctacagaatgggagaaaatttttgcaatctacgcatctgacaaagggctaatatccagaatctacaaagaacttaaacaaatttacaagaaaaaatcaaacaaccccatcaaaaagtgggcaaaggatatgaacagacacttctcaaaagaagatgtttatgcagccaaaagacacatgaaaaaatgctcatcatcactggccatcagaaaaatgtaa

SEQ ID NO: 120376 - DNA, 1992 bp, Homo sapiens
gaacgcagctccgcaccagcaacggaaagctggatggagaatgactttgacgagttgagagaagaaggcttcagacgatcaaactactccgagctaaaggaggaagttcgaacccatggcaaagaagttaaaaaccttgaaaaaagattagacaaatggctaactagaataatcaatgcagagaagtccttaaaggacctgatggagctgaagaccatggcacgagaactacgtgatgaatgcacaagcctcagtagccaattcaatcaactggaagaaagggtatcagtgatggaagatcaaatgaatgaaatgaagaaagaagagaagtttagaagaaaaagaataaaaagaaaggaacaaagcctccaagaaatatgggactatgtgaaaagaccaaatctacgtctgattggtgtacctgaaagtgacggggagaatagaacgaagttggaaaacactctgcaggatattatccaggagaacttccccaatctagcaaggcaggccaacattcaaattcaggaaatacagagaacgccacaaagatactcctcgagaagagcaactccaagacacataattgtcagattcaccaaagttgaaatgaaggaaaaaatgttaagggcagccagagagaaagaaatacaaactaccatcagagaatactataaacacctctatgcaaataaactagaaaatctagaagaaatggataaattcctcgacacatacactctcccaagactaaaccaggaagaagttgaaactctgaatagaccaataacaggttctgaaattgaggcaataattaatagcttaccaaccaaaaaaagtccaggaccagatggattcaccgccgaattctaccagaggtacaaggaggacctggtaccattctttctgaaactattccaatcaatagaaaaagagggaatcctccctaactcattttatgaggccagcatcatcctgataccaaagcctggcagagacacaaccaaaaaagagaattttagaccaatatccctgatgaacagtgatacaaaaatcctcaataaaatactggcaaaccgaatccagcagcacatcaaaaagcttatccaccatgatcaagtgggcttcatccctgggatgcaaggctggttcaacatacgcaaatcaataaacataatccagcatataaacagaaccaacgacaaaacccacatgattatctcaatagatgcagaaaaggcctttaacaaaattcaacagcccttcatgctaaaaactctgaataaattagtgttggaagttctggccagggcaatcaggcaagagaaagaaataaagggtattcaattaggaaaagaggaagtcaaattgtccctgtttgcagatgacatgattgtatatctagaaaaccccatcgtctcagcccaaaatctccttaagctgataaacaacttcagcaaagtatcaggatacaaaatcaatgtgcaaaaatcacaaatattcttatacaccaataacagacaaacagagagccaaatcatgagtgaactcccattcacaattgcttcaaagacaataaaatacctaggaattcaacttacaagggatgtgaaggacctcttcaaggagaattacaaaccactgctcaatgaaataaaagaagatacaaacaaatggaacaacattccatgctcatgggtaggaagaatcaatatcatgaaaatggccatactgcccaaggtaatttatagattcagtgccatcgccatcaagctaccaatgactttcttcacagaactggaaaaaactactttaaagttcatatggaaccaaaaaagagcccgcattgccaagtcaatcctaagccaaaagaacaaagccggaggcatcatgctacctgacttcaaactatactacaaggctacagtaaccaaaacagcatggtactggtaccaaaacagagatattgatcaatggagcagaacagagccctga

SEQ ID NO: 120377 - DNA, 3288 bp, Homo sapiens
atgaaggttgcttcacagtcttcccttctatctgattcagtggaccaagtaaatgactctctggtaactgcagaggctatttcctggaatgaatcaacgagtgaaacgaataactctatggtgactgaattcatttttctgggtctctctgattctcaggaactccagaccttcctatttatgttgttttttgtattctatggaggaatcgtgtttggaaaccttcttattgtcataacagtggtatctgactcccaccttcactctcccatgtacttcctgctagccaacctctcactcattgatctgtctctgtcttcagtcacagcccccaagatgattactgactttttcagccagcgcaaagtcatctctttcaagggctgccttgttcagatatttctccttcacttctttggtgggagtgagatggtgatcctcatagccatgggctttgacagatatatagcaatatgcaaacccctacactacactacaattatgtgtggcaacgcatgtgtcggcattatggctgtcgcatggggaattggctttctccattcggtgagccagttggcctttgccgtgcacttacccttctgtggtcccaatgaggtcgatagtttttattgtgaccttcctagggtaatcaaacttgcctgtacagatacctacaggctagatattatggtcattgctaacagtgaaatacaaactaccatcagagaatactacaaacacctctatgcaaataaactagaaaatctagaagaaatggataaattcctggacacatacactctcccaagactaaaccaggaagaagttgaatctctgaatagaccaataacagaagctgaaattgtggcaataatcaatagcttaccaaccaaaaagagtccaggaccagatggattcacagccgaattctaccagaggtacaaggaggaactggtaccattccttctgaaactattccaatcaatagaaaaagagggaatcctccctaactcattttatgaggccagcatcattctgataccaaagccaggcagagacacaacaaaaaaagagaattttagaccaatatccttgatgaacattgatgcaaaaatcctcaataaaatactggcaaaacgaatccagcagcacatcaaaaagcttatccaccaagatcaagtgggcttcatccctgggatgcaaggctggttcaatatatgcaaatcaataaatgtaatccagcatataaacagagccaaagacaaaaaccacatgattatctcaatagatgcagaaaaagcctttgacaaaattcaacaacgcttcatgctaaaaactctcaataaattaggtattgatgggacgtatttcaaaataataagacctatctatgacaaacccacagccaatatcatactgaatgggcaaaaactggaagcattccctttgaaaactggcacaagacagggatgccctctctcaccactcctattcaacatagtgttggaagttctgcccagggcaactaggcaggagaaggaaataaagggtattcaattaggaaaagaggaagtcaaattgtccctgtttgcagacgacatgattgtatatctagaaaaccccattgtctcagcccaaaatcttcttaagctgataagcaacttcagcaaagtctcaggatacaaaataaatgtacaaaaatcacaagcattcttatacaccaacaacagacaaacagagagccaaatcatgagtgaactcccattcacaattgcttcaaagagaataaaatacctaggaatccaacttacaagggatgtgaaggacctcttcaaggagaactacaaatcactgctcaaggaaataaaagaggatacaaataaatggaagaacattccatgctcatgggtaggaagaatcaatattgtgaaaatggccatactgcccaaggtaatttacagattcaatgccatccccatcaagctaccaatgactttcttcacagaattggaaaaaactactttaaagttcatatggaaccaaaaaagagcctgcatcgccaagtcaatcctaagccaaaagaacaaagctggaggcatcacgctacctgacttcaaactatacgacaaggctacagtaaccaaaacagcatggtactggtaccaaaacagagatatagatcaatggaacagaacagagccctcagaaataatgccgcatatctacaactatctgatctttgacaaacctgagaaaaacaagcaatggggaaaggattccctatttaataaatggtgctgggaaaactggctagccatatgtagaaagctgaaactggatcccttccttacaccttatacaaaaatcaattcaagatggattaaagacttaaacgttagacctaaaaccataaaaaccctggaagaaaacctaggctttaccattcaggacataggcatgggcaaggacttcatgtctaaaacaccgagagaggcactcttatgcattgttggtgagaatacaaaatggagcaaagaccccagtgctttatccacacctccaacaagctgcagtcgaccacaaagaagaaacaagtctgtctcccatgggtcctacccacaccccctgctgttcaccatgaatgatagagtcaacagtgtgaaaacgaccatactgccaaaagcaacctacaaattcaatgcaattcccatcaaaataccaccatcattcttcacagaactagaaaaaacaaggctaaaattcacatggaaccaaaaaagagcccacatagccaaagcaagactaagcaaaaagaataaatctagaggcatcacattactcgacttcaaactatactataaggccatagtcaccaaaacagcatggtactggtataaaaataggcatatagaccaatggaatagaatagagaacccagaaataaagccaaatactttcagccaactgatctttgacaaagcaagcaaaaacataaagtggggaaaggacaccctattcaacaaatggtgctggtataattggcaagccacatgtagaagaatgcaactggatcctcatctctcaccttataaacaaatcaactcaagatggttcacagacttaaatctaagacctgaaaccataaaaattctagaagataagattggaaaaacccttctagacattggcttaggcaaagacttcacaatcaagaacccaaaagcaaacacaacaaagataaatagatgggacttaattaaactgaaagccttctgcacatcaaaataa

SEQ ID NO: 120378 - DNA, 4733 bp, Homo sapiens
ggtgtgctgatctgcaaaccctggacacaatgcagccaattgagaggaaaagacagggctatattcatgagctgattcagaccgaagagcggtacatggctgaccttcagctcgtcgtcgaggtttttcagaaacgcatggcagagtcaggctttctcactgaaggggagatggccctgatttttgttaactggaaggagctcatcatgtccaacacaaagctgctgaaggctttgcgggtgcggaagaagaccgggggcgagaagatgccggtgcagatgattggggacatcctggccgctgagctgtcccacatgcaggcttacatcaggttctgcagctgccagcttaatggagcagctctgttacagcagaagacagatgaagacacagatttcaaagaatttttaaagaagctggcatctgacccgcggtgtaaaggaatgcccctctccagcttcctgctgaaacccatgcagaggatcacccgctacccactgctcatcagaagtcagcgttacctgtccctgtgtccccaagaacttgtgggagtacgagtttctcaagggcggaaagtgtcgtcttgttcaccgccgcgtttccagggcatggaagcagtccataacatggggttggaggagcggtcctgcgaaggtccaggtgggcagattctggagaacaccccggagagccatgcagaccattcctccctaaagctggccctcgagcgggcagaggagctgtgctctcaagtgaatgagggagttcgggagaaggaaaactcggaccgactggagtggatccaggcgcacgtgcagtgtgaaggcctcgcggagcaacttattttcaactctctcaccaactgcctggggccccggaagctcttacacagtgggaaattatacaagaccaagagcaacaaggaactgcacggattcctcttcaatgacttcctgcttcttacctacatggtcaagcagtttgctgtttcctctggctctgagaaacttttcagctcgaagtccaatgctcaattcaaaatgtataaaacgcccattttcctgaatgaagtcttggtgaaactgcccacagacccttccagcgatgagcctgtcttccacatttcccacattgatcgggtctacaccctccgaacagacaacattaatgagaggaccgcctgggtgcagaagatcaaggcggcgtctgagcagtacatcgacaccgagaagaagaagcgtgagaaagcttaccaagcccgctcccaaaagacttcaggcattgggcgcctgatggtgcatgtcattgaagctacagaattaaaagcctgcaaaccaaatggaaagagcaacccatactgtgaaatcagcatgggctcccagagctacaccaccaggaccatccaggacacactcaatcccaagtggaattttaactgccagttctttattaaggatctctaccaagacgtgctgtgtctcaccctgtttgacagagaccagttttcaccagatgatttcctgggtcgtactgaaattccagtggcaaaaattcgaacagaacaggaaagcaaaggccctatgacccgccgactgctgctgcatgaggtccccaccggggaggtctgggaacgcagttcctcaccagcaacagaacaaagctggacggagaatgactttgacgagttgagagaagaaggcttcagacgatcaaactactctgagctacaggaggaaattcaaaccaatggcaaagaagttaaaaactttgaaaaaaaattagacgaatggctacctagaatatccaatgcagagaagtccttaaaggagctgatggagctgaaagccaaggctcaagaactacgtgaagaatgcagaagcctcaggagccgatgcgatcaactggaagaaagggtatcagtgatggaagacgaaatgaatgaaatgaagagctggttttttgaaaagatcaacaaaattgatagaccgctagcaagactaataaagaagaaaagagagaagaatcaaatagacgcaataaaaaatgataaagggggtatcaccaccgatcccacagaaatacaaactaccatcagagaatactacaaacacctctacgcaaataaactagaaaatctagaagaaatggataaattcctggacacatacaccctcccaagactaaaccaggaagaagttgaatctatgaatagaccaataacaggctctgaaattgtggcaataatcaattgcttaccaaccaaaaaaagtccaggtccagatgaattcacagccgaattctaccagaggtacaaggaggagctggtaccattccttctgaaactattccaatcaatagaaaaagagagaatcctccctaactcattttatgaggccagcatcatcctgataccaaagcctgacagagacacaaccaaaaaagagaattttagaccaatatccttgatgaacattgatgcaaaaatcctcaataaaatactggcaaaccgaatccagcagcacatcaaaaagcttatccaccatgatcaagtgggcttcatccctgggatgcaaggctggttcaacatacgaaaatcaataaacgtaatccagcatataaacagaaccaaacacaaaaaccacatgattatctcaatagatgcagaaaaggcctctgacaaaattcaacaacccttcatgctaaaaactctccgtaaattaggtattgatgagacacaaacagagagccaaatcatgagtgaactcccattcacaattgcttcaaagagaataaaatacctaggaatccaacttacaagggacgtgaaggacctcttcaaggagaactacaaaccactgctcaatgaaataaaagaggatacaaacaaatggaagaactttccatgctcatgggtaggaagaatcaatattgtgaaaatggccatagtgcccaaggtaatttatagattcaatgccagccccatcaagctaccaatgactttcttcacagaattggaaaaaactactttaaagttcatatggaaccaaaaaagagcctgcattgccaagtcaatcctaagccaaaagaacaaagctggaggcatcatgctacctgacttcaaactatactacaaggctacagtaaccaaaacagcatggtactggtaccaaaacagagatatagaccaatggaacagaacagagccctcagaaataacgccgcatatctacaactatctgttctttgacaaacctgacaaaaacaagcaatggggaaaggattccctatttaataaatggtgctgggaaaactggctagccatatgtagaaagctgaaattggatcctgtacttacaccttatacaaaaattaattcaagatggattaaagacttacatgttagacctaaaaccataaaaaccctagaagaaaacctaggcattaccattcaggacataggcatgggcaaggacttcatgtctaaaacaccaaaagcaatggcaacaaaagccaaaattgacaaatgggatctaattaaactaaagagcttctgcacagcaaaagaaactaccatcagagtgaacaggcaacctacagaatgggagaaaatttttgcaacctactcatctgacaaagggctaatatccagaatctacaatgaactcaaacaaatttacaagaaaaaaacaaacaaccccatcaaaaagtgggcgaaggacatgaacagacacttctcaaaagaagacatttatgcagacaaaaagcacatgaaaaaatgctcatcatcactgatcatcagagaaatgcaagtcaaaaccacaatgagataccatctcacaccagttagaatggcgatcattaaaaagtcaggaaacaacagcctctttagaggtcatggagccaaagaatcttatgttgacaaggacaagaggggccatctacattcaggagttccttttcaaaagtccccagcaggatttgcaaaagctgagagaggatccaggagaagtgtagtagctgcaggcctgctgccgtctctcaccagcaacatgagccggcagacaaatgacaacacatgcacggctgccacagtgccgagctaccgaatgcacagacaatatgatgctgtcctgtcctgtgcaagatgtctcttgtggcccaccctaactggaattatgcagaaaagggaattctgggaagcacagttcagccttgccatggtgacatgtaacaatgtggcaggccagaccccaccccatacaacagaaccaagaaagaaaaaaggtgtgatggcaaaactctctggggctttcactggcaaatctgtcttctcaggtgagagctcaatgggagaggaaagccctgcaggaatgcgaaatggaacaggtgctagggtggggcaggaggagagggtgggagttgggaaggaaaggcagctgaggaagaaagaactggaggtgggactccctgaattagaatctccagggagtgaggccagagtggtgtcgagctgcatgtccccctctgatgcgcaggcatatttgggacaccactccccgcccccagctgtgggccacctgggaacttgcttggctacctctagatatactgattcctgtaccttccagtggttctgtttgctgtctggatacatttggtctttgcctactcaatgtgaagatggcgaggatgaagacctttatgatggtccacttccatttaatgaatggtaa

SEQ ID NO: 120379 - DNA, 2816 bp, Homo sapiens
atggggaaaaaacagaacagaaaaactggaaactctaaaaagcagagcgcctctcctcctccaaaggaacgcagttcctcaccagcaacggaacaaagctggatggagaatgactttgacgagatgagagaagaaggcttcagacgatcaaattactctgagctacgggaggacattcaaaccaaaggcaaagaagttgaaaactttgaaaaaaatttagaagaatgtataactagaataaccaatacagagaagtgcttaaaggagctgatggagctgaaaaccaaggctcgagaactacgtgaagaatgcagaagcctcaggagccgatgcgatcaactggaagaaagggtatcagtgatggaagatgaaatgaatgaaatgaatgatggggagaatggaaccaagttggaaaacactctgcaggatattatccaggagaacttccccaatctagcaaggcaggccaacgttcagattcaggaaatacagagaacgccacaaagatactcctcgagaagagcaactccaagacacataattgtcagattcaccaaagtggaaatgaaggaaaaaatgttaagggcagccagagagaaagactttaaaccaacaaagatcaaaagagaaaaagaaggccattacataatggtaaagggatcaattcaacaagaagagctaactatcctaaaaatatatgcacccaatacaggagcaccaagattcacaaagcaagtcctgagtgacctacaaagagacttagactcccacacattaataatgggagactttaacaccccactgtcaacattagacacatcaacgagacagaaagtcaagaaggatacccaggaattgaactcagctctgcaccaagcggacctaatagacatctacagagctctccaccccaaatcaacagaatatacatttttttcagcaccacaccacacctattccaaaattgaccacatagttggaagtaaagctctcctcagcaaatgtaaaagaacagaaattataacaaactatctctcagaccacagtgcaatcaaactagaactcaggattaagaatctcactcaaaaccactcaactacatggaaactgaacaacctgctcctgaatgactactgggtacataacgaagtgaaggcagaaataaaggtgttctttgaaacgaaggagaacaaagacacaacataccagaatctctgggacgcattcaaagcagtgtgtagagggaaatttatagcactaaatgcccacaagagaaagcaggaaagatccaaaattgacaccctaacatcacaattaaaagaactagaaaagcaagagcaaacacattcaaaagctagcagaaggcaagaaataactaatatcagagcagaactgaaggaaatagagacaaaaaaacccttcaaaaaaatcagtgaatccaggagctgaaatacaaactaccatcagagaatactataaacacctctatgcaaataaacaagaaaatctagaagaaatggataaattccttgacacatacaccctcccaacactaaaccaggaagaagttgaatctctgaatagaccaataacaggctctgaaattgaggcaataattaatagcttaccaaccgaaaaaactccaggaccagatggattcacagccgaattctaccagaagtacaaggaggagctggtaccattccttctgaaactattccaatcaatagaaaaagagggaatcctccataactcattttatgagaacagcatcatcctgatactaaagcctggcagagacacaaccaaaaaagagaattttagaccaatatccctgaagaacattgatgcaaaaatcctcaataaaatactggcaaaccaaatccagcagcacatcaaaaagcttatccaccatgatcaagtgggcttcatccctgggatgcaaggctggttcaacatacacaaatcaaataaatgtaatccagcatataaacagaaccaaagacaaaaaccacatgattatctcaatagatgcagaaaaggcctttgacaaaactcaacagcccttcatgctaaaaactctcaataaattaggtattgatgggatgtatctaaaaataataagagctatttatgacaaactcacagccaatatcatactgaatgggcaaaaactggaagcattccctttgaaaactgccacaagacagggatgccctctctcaccactcctattcaacatagtgttggaaattctgaccagggcaatcaggcaggagaaagaaataaagggtattcaattaggagaagaggaagtcaaattgtccctgtttgcagatgacatgattgtatatctagaaaaccctatcatctcagcccaaaatctccttaagctgataagcaacttcagcaaagtctcaggatacaaaatcaatgtgcaaaaatcacaagcattcttacacaccaataacagacaaacagagagccaaatgatgagtgaactcccattcacaattgcttcaaagagaacaaaatacctaggaatccaacttacaagggatgtgaaggacctcttcaaggagaactacaaaccactgctcaatgaaataaaagaggacacaaacaaatggaagaacattccatgctcatggataggaagaatcaatatcgtgaaaatggccatactgcccaaggtaatttatagattcaatgccatccccatcaagctaccaatgactttcttcacagaattggaaaaaactactttaaagttcatatggaaccaaaaaatagcctgcattgcaaatcaatcctaa

SEQ ID NO: 120380 - DNA, 2979 bp, Homo sapiens
atgcctggcactccagcagccaaattggatgctaaagacaaagaccaaaccctaagaatggcagataagggtactggaaggaacctggaggtccttggtaaatctgtagcagaggctatttggaggacaaaacccacccatccaggactcagaggggttagtggtgagctatttagtgcctgctccctgtctcttgtgctctacctgtgcatgctgcatcccatggaccttcagatcctggcactgacagtcatttgtaaggagactgcaagtaaagagtctctagccatgttcgactacgacaagagcaaggacagtgggctgccaagtcaaggacttagttttaaatatggagatattctccacgttatcaatgcctctgatgatgagtggtggcaagccaggagagtcatgctggagggagacagtgaggagatgggggtcatccccagcaaaaggagggtggaaagaaaggaacgtgcccgattgaagacagtgaagtttaatgccaaacctggagtgattgattcgaaagggcctaactgggagtcaccccccagtaagggcagactgacacctcacatggccgagtactcctctgagacaacactgccagaggaacgatcaggcagcaacatttgctgttcaccaatatccgctgttctgcagcctctgctgctgatacccaggcaaacagggtctggagtggacctccggcaaactccaacagacctgcagctgagggtactgactgttagaaggaaaactaacaaacagaaaggacatccacaccaaaaccccatctgtacgtcaccatcatcaaagaccaaagaaacacaaactaccatcagagaatactataaacacctctacgcaaatagactagaaaatctagaagaaatggataaattcctggacacatacaccctcccaagactaaaccaggaagaagttgaatctctaaatagacgaataacagaatctgatattgaggcaataattaatagcttaccaaccaaaaaaagtccaggaccagatggattcacagccgaattctaccagaggtacaaggaggagctggtaccattccttctgaaactattccaatcaatagaaaaagagggaatcctccctaactcattttatgaggccagcatcatcctgataccaaagctgggcagagacacaacaaaaaaagagaattttagaccaatatccctgatgaacatcgatgcaaaaatcctcaataaaatactagcaaaccgaatccagcagcacatcaaaaagcttatccaccatgatcaagtgggcttcatccctgggatgcaaggctggttcaacatatgcaaatcaataaatgtaatccatcatatgaagagaaccaaagacaaaaaccacatgattatctcaatagatgcagaaaaggcctttgacaaaattcaacaacccttcatgctaaaaactctcaataaattaggtattgatgggacatatctcaaaataataagagctatctatgacaaacccacagctaatatcatactgaatgggcaaaaactggaagcattccctttgaaaactggcacaagacagggatgccctctctcaccactcctattcaacatagtgttggaagttctggccagggcaatcaggcaggagaaggaaataaagggctttcaattaggaaaagaggaagtcaaattgtccctgtttgtagatgagatgattttatctttagaaaaccccatggtctcagccaaaaatctccttaagctgataagcaacttcagcaaagtctcaggatacaaaatcaatgtgcaaaaatcacaagcattcttatacaccagtaacagacaaacagagagccaaatcatgagtgaactcccattcacaattgcttcaaagagaataaaatacctaggaatccaacttacaggagatgtgaaggatttcttcaaggagaactacaaaccactgctcaatgaaataaaagaggatacagacaaatggaagaacattccatgctcacgggtaggaagaatcaatatcatgaaaatggccatactgcccaaggtaatttatagattcaatgccatccccatcaagctaccaatgactttcttcacagaattggaaaaaactactttaaagttcatatggaaccaaaaaagagcccgcattgccaagtcaatcctaagccaaaagaacaaagctggaggtatcacgctacctgacttcaaactatactacaaggctacagtaaccaaaacagcgtgccatagagtgggccgtgcacagcagcattccatcagcaaatggaagtggtatatacatgattggtctcaagtaggtcctgaaggcacaaatgattctgcacgatatccagataccacccaaaagtggacagctgcagcactacagcccctttctaggacatccctgaaggacagccatgaagggaaatcttcccagtgggcagaacttagagcagtgcacctggttttgcgctttgcatggaaggagaaatggccagatgtgcaattatatactgattcatgggctgtagccagtggtttggctggatggtcagggacttggaagaagcatgattggaaaattggtgacaaagaaatttggggaagagccacccctgtcatcgcccaatgggcccatgaacaacgtggccatggtggcagggatggagattatgcatgggctcagcaacatgggcttccactcaccagggatgacctggctacagccactgctgagtgccccatttgccagcagcagagaccaacactgagccctcaatatggcaccattcctcaggccaggattcacgggtccaggaatcaacgggtggaagtggaagcggcaccactcaccatcactcctagtgatccactagcaaattttttgcttcctcctcccacaacattacattctgctggcctagatagtctgctggcctag

SEQ ID NO: 120381 - DNA, 6369 bp, Homo sapiens
atggaagacgaaatgaatgaaatgaagcgagaagggaagtttagagaaaaaagaataaaaagaaatgaacaaagccaccaagaaatatgggactatgtgaaaacaccaaatctacgtctgattggtgtacctgaaactgacggggagaatggaaccaagttggaaaacactctgcaggatattatccaggagaacttccccaatctagcaaggcaggccaacattcagattcaggaaatacagagaacaccacaaagatactcctcgagaagagcaactccaagacacataatcatcagattcaccaaagttgaaatgaaggaaaaaatgttaagggcagccagagagaaaggtcaagttacccacaaagggaagcccatcagactaaaagcggatctctcggcagaaactctacaagccagaagacagagctggtttcattgaaaagatcaacaaaattgatagaccactagcaagactaataaagaaaaaaagagagaagaatcaaatagacgcaataaaaaatgataaaggggatatcaccactgatcccacagaaatacaaactaccatcagggaatactataaacacctctacgcaaataaactagaaaatctagaagaaatggataaattcctggacacatacaccctcccaaggctaaaccaagaagaagttgaatctcttaatagaccaataacaggctctgaaattgaggcaataattaatagcctcccaaccaaaaaaaaggacaggacctgatggattcacagctgaattctaccagaggtacaaagaggaactggtgccattgcttctgaaactatgccaatcaatagaaaaagagggaatcctccctaactcattctatgaggccagcatcatcctgataccaaagctgggcagagacacaacaaaaaaggagaattttagaccaatatccctgatgaacattgatgcaaaaatcctcaataaaatactggcaaaccgaatccagcagcacatcaaaaagcttatccaccatgatcaagtgggcttcatccctgggatgcaaggctgtgttggaagttctggccagggcaataggcaggagaaggaaataaagggtattcaattaggaaaagaggaagtcaaattgtccctgtttgcagatgacatgattgtatatctagaaaaccccactgtctcagcccaaaatctccttaagctgataagcaacttcagcaaagtctcaggatacaaaatcaatgtacaaaaatcacaagcattcttatacaccaacaacagacaaacggagagccaaatcatgagtgaactcccattcacaattgcttcaaagagaataaaatacctaggaatccaacttacaagggatgtgaaggacctcttcaaggagaactacaaaccactgctcaatgaaataaaagaggatacaaacaagtggaagaacattccatgctcatggataggaagaatcaatatcgtgaaaatggccatactgcccaaggtaatttatacattcaatgccatccccatcaagctaccaatgactttcttcacagaattggaaaaaactactttaaagttcatatggaaacaaaaaagatcccacatcgccaagtcaatcctaagccaaaagaacaaagctggagacatcacactacctgacttcaaactacactacaaggctacagtaaccaaaacagcatggtactggtaccaaaacagagatatagatcaatggaacacaacagagccctcagaaataatgctgcatatctacaaccatctgatctttgacaaacctgacaaaaacaagcaatggggaaatgattccctatttaataaatggtgctgggaaaactggctagccatatgtagaaagctgaaactggatcccttccttacatcttatacaaaaatcaattcaagatggattaaagacttaaatgttagacctaaaaccataaaaaccctagaagaaaacctaggcaataccattcaggacataggcatgggcaaggacttcatgtctaaaacaccaaaagcagtggcaacaaaagccaaaattgacaaatgggatgtaattaaactaaagagcttctgcacagcaaaggaaactaccatcagagtgaacaggcaacctacagaatgggagaaaattttcgcaacctactcatcggacaaagggctaatatccagaatctacaatgaactcaaacaaatttacaagaaaaaaacaaacaaccccatcaaaaagtgggcaaaggatatgaacagacacttctcaaaagaagacatttatgcagccaaaagacacatgaaaaaatgctcatcatcactggccatcagagaaatgcaaatcaaaaccacaatgagataccatctcacaccaattagaatggtgatcattaaaaagtcaggaaacaacagagcacctgggggaaggggtggctgtgggtgcagctttggcagacttaaacgttcctgcgtgccagctctgaaaagagtagcagatctcccagcacaacgctcgagctctgctaagggagagactgcctcctcaagtgggtccctgaaccccgtgccccctgactgggagaaacctcccagcaggggtcgacagacacctcatactggagaactccggctagcatctgacgggtgcctctctgggatgaagcttccagaggaaggaataggcagcagtctttgctgttctgcagcctctgctggtgatacccaggcaaatggggtccggagtggactgccagcaaactccagcagacctgcagcagaggggcctgttagaaggaaaactaacagacagaaaggaatagtatcaacttcaacaaaaaggacgtccacaccaaaaccccatccaaaggatcacaactcctcgccagcaatggaacaaaactggatggagaatgcgtttgacgaattgacagaagtaggcttcagaaggtgggtaataacaaacttctccaagctaaaggagcatgttctaactcaatgcaaggaagctaagaagcttgaaaaaaggttagaggaattgctaactagaataaccagtttagagaagaacataaatgacctgatggagctgaaaaacacatcacaagaacttcgtgaagcatacacaacggaagaaaggatatcagagattgaagatcaacttaatgaaataaagcatgaagacaggattagagaaaaaaatgaaaaggaacgaacaaagcctccaagaaatatgggactacgtgaaaagaccaaatctacctcttattggtgtacccgaaagtgacggggataacgcaaccaagttggaaaacactctgcaggatattatccaggagaactgccccaatctagcaaggcaggccaacattcaaattcaggaaatacagagaacgccacaaagatactcttcgagaagagcaactccaagacacataattgtcagattcaccaaagttgaaatgaaggaaaaaatgttaagggcagccagagagaaaggtcgggtcacccacaaagggaagcccatcaggctaacagctgctctctcagcagaaactctacaagccagaagagacaggaggccaatattcaacattcttaaagaaaagaattttcaacccagaatttcatatccagccaaactaagcttcgtaagtgaaggagaaatagaatactttacagacaagcaaatgctgagagattttctcatgaccaggcctgccctaaaagagctcctgaaggaagcactgaacatggaaacaaccggagcacccagattcataaagcaagtccttagagagctacaaagagacttagacacccacacaataataacgggagactttaacaccccactgtcaacatcagacagatcaactagacagaaagttaacaaggatatccaggaactgaactcagctctgcaccaagcggacctaatagacatctgcagaactctccaccccaaatcaatagaatatacattcttttcagcaccacaccacacctattccaaaattgaccacatagttggaagtaaagcactcctgagcaaatgcaaaagaacagaaattataacaaactgtctctcagaccacagtgcaatcaaactagaactcaggattaagaaactcactcaaaaccgctcaactacatggaaactggacaatctgctcctgaatgactactgggtacataacgaaatgaagacagaaataaagatgttctttgaaaccaatgagaacaaagacacaacataccagaatctctgggacacattcaaagcagtgtgcagagggaaatttatagcactaaatgcccacaagagaaagaagacaagatctaaaattgacaccctaacatcacaattaaaagaactagagaagcaagagcaaacacattcaaaagctagcagaaggcaagaaataactaagatcagagaagaactgaaggaaatagagacacaaaaaacccttcaaaaaatcaatgaatccaggagctggttttttgaaaagatcaacaaaattgatagaccactagcaagactagtaaagaagaaaagagagaagaatcaaatagacgtaataaaaaatgataaaggggatatcaccaccgatcccacagaaatactaactaccatcagagaataccataaacacctctacacaaataaactagaaaatctagaagaaatggataaattcctcaacacatacaccctcccaagactaaaccaggaagaagttgaatctctgaatagcccaataacaggctctgaaattgaggcaataattaatagcttatcaatgaaaaaaagtacaggaccagatggattcacagccgaattctaccagaggtacaaggaggaactggtaccattccttctgaaactattccaatcaatagaaaaagagggaatcctccctaactcattttatgaggccagcatcatcctgataccaaagcctggcagagacacaacaaaaaaagagaattttggaccaatattcctgatgaacatcaatgcaaaaatcctcaataaaatactggcaaacagaatccagcagcacatcaaaaagcttatccaccatgatcaagtgggctccatccctgggatgaaaggctggttcaacatatgcaaatcaataaatgtaatgcagcatataaacagaaccaaatacaaaaaccacatgattatctcaatagatgaagaaaaggcctttcagaaaattcaaaagcgcttcatgctaaaaactctcaataaattaagtattgatgggacatatctcaaaataataagagcgatctatgacaaacccacagccaatatcatactgaatgggcaaaaactggaagcattccctttgaaaaaatggcacaagacagggatgtcctctctcaccagtcctattcaacatagtgttggaagttctggccagggcaatcagctgataagctgcttcagcaaagtctcaggatacaaaatcaatgtacaaaaatcacaagcattcttatacaccaacaacaggcaaacagagagccaaatcatgagtgaactcccattcacaattgcttcaaagagaataaaatacctaggaatccaacttacaagggatgtgaaggacctcttcaaggagaactacaaaccactgttcaatgaaataaaagaggacacaaacaaatggaagagcattccatgctcacgggtaggaagaatcaatattgtgaaaacggccatactgcccaaggtaatttatagattcaatgccatccccatcaagctaccaatgactttcttcacagaattggaaaaaactactttaaagttcatatggaaccaaaaaagagcctgcattgtcaagacaatcctaagcaaaaagaacaaagctggaggcatcacactacctgacttcaaacgatactacaaggctacagtaaccaaaacagcatgtcattccatgagcttggaaagacccagctggctaccagaacaactgtttccaccttccaacaaatccctggcatctaagttcagttgcgctttgacttctccagagatatcacacttctcagtctcctttgcagataggtgggaccatgtgagtgggttctacacagtggaatgtgggcagatgccatatataccccttccaggcttgtcccgtaggcttctggcagaatgcttcatgacttctctcttcccttgcctgcaggctgaaagcaaagggcccagtggaggatggcaaagcctcataagacagaaaagccacaccacagaaaagcctgggaccctgaatgactgtgtgaaccagagagtcttgaaagccattcccataactgtacttaactga

SEQ ID NO: 120382 - DNA, 2885 bp, Homo sapiens
atgccagatgagctgatactgatcacggtcagattttggaaacgagctgaggatagcggtgcaaccagagggtgctctgtgataaaaagcctgggacctcatgactggcccacagttcagccactgcaggtttcatgcttggtgctggagggtctccaggacctgcgcctgcatggttcctccatcctgccaactagaaatttccacatcactcacatgagaccacctcctgaaatctaccaagaatgtgtgcattttcctaatttgtacaatggtaaaaatagtgaggattctggtggaaattattggcaacggaagaatctctgggacacagctaaagcagtgtttagagggaaatttatagcattagacgcccacaggagaaagctggaaagacctaaaatcgaccccctatcatcaaaattaaaagaactggagaagaaagagcaaacaaattcaaaagctagaagaaggcaagaaataactaagatcagagcagaattgaaggagatagagacacaaaaagcccttcaaaaaatcaatgaatccaggagctggttttttgaaaagatcaacataattgatagaccgctagcaggactaataaagaataaaagggagaagaacaaaatagatgcaataaaaaatgataaaggggatattaccaccgatcccacagaaatacaaactaccatcagagaatactgtaaatacctctatgcaaagaaactagaaaatctagaagaaatggataaattcctggatacttacacccctccaagactaaaccagaaagaatttgaatctctgtatagaccaataataggctctgaaattgaggcaataattaatagcctaccaaccaaaaaaagtccaggaccagatggagtcacagccgaattctaccagaggtacaaagaggagctggtaccattccttctgaaactattccaatcaatagaaaaagagggaatcctccctaactcattttatgaggccagcatcatcctgataccaaagcctggcagagacacaacaaaaaaagagaattttagaccaatatccctgatgagcattgatgcaaaaatcctcaataaaatactggcaaaccaaatccagcagcacatcaagaagcttatccaccaagatcaagttggcttcatccctaggatgcccggctggttcaacatatgcacatcaataaacgtaatccatcacataaagagaaccagtgacaaaaatcacatgattatctcaatagatgcagaaaaggcctttgacagaattccacagtgcttcctgctaaaaactctcaataaactagtattggaagttctggccagggcaatcaggcaagacaaagaaataaagggtattaagttaggaaaagaggaagtcaaattgtccctgtttgcagatgacatgattgtttatttagaaatccccatcgactcagcccaaaatctccttaagctgataagcaacttcagcaaagtctcaggatacaaaatcaatgtgcaaaaatcacaagcattcccatacaccaataacagaaaaacagagatccaagccacgtgtgaactcccattcacaattgttacaaagagaataaaatacctaggaatccaacttactgagcactgcaaaccactgctcaatgaaataaaagaggacacaaacaaatggaagaacattcaatgctcatggataggaagaataaatatgaaaatggccatactgcccaagaccgctagccagactaataaaaatgaaaagagagaagaatcaaataaatgcaataaaaaatgataaaggggatatcaccaccgatcccacagaaatacaaactaccatcagagaatacttataaacacctctacacaaataaacttagaaaatctagaagaaatggataaattcctggacacatacagcctcccaagactaaaccaggaagaagttgaatcccttcagtagactaataacaggctctgaaattgaggcaataattaatagcttaccaaccaaaaaaagtccaggaccagacggattcacagccaaattctaccagaggtacaaagaggagctggtaccattccttctgaaactattccaatcaatagaaaaagagggaatcctccctaactcattttatgaggccaacatcatcttgataccaaagcctggcacagacacaacaaaaaaagagaatttcagaccagtatccctgatgaacattgatgcaaaaatcctcaataaaatactggcaaaccgaatccagcaaacacatcaaaaagcttatccaccatgatcaagtcagcttcatccctgggatgcaaggctgtttcaacatacacaaatcaataaacataatccatcatataaacagaaccaacaacaaaaaccacatgattatctcaatagatgcaggaaaggcctttgaccaaattcaatatcccttcatgctaagaactctcaataaactaggtactgatggaacatatctcaaaataataagagctacttatgacaaacccacagccaatatcatactgaatgggcaaaagctggaagcattccctttgaaaactgggagaagacaaggatgccttctctcaccactcctattcaacatagtgttggaagttctggccagggcaatcaggcaaaagaaagaaataaagggtattcgattaggaaaagaggaagccaaattgtccctgtttgcagatgacatgattgtatatctagaaaactccatcatctcagcccaaaatctccttaagctgataagcaacttcaccaaaggttcaggatacaaaatcaatgtgcaaaaatcacaagcattcctatactccattaacagacagagagccaaatcatga

SEQ ID NO: 120383 - DNA, 4698 bp, Homo sapiens
atggtaaagggatcaattcaacaagaggagctaactatcctaaatatttatgcacccaatacaggagcacccagattcataaagcaagtcctcagtgacctacaaagagacttagactcccacaaattaataatgggagactttaacaccccactgtcaacattagacagatcaaccagacagaaagtcaacaaggatacccaggaattgaactcagctctgcaccaagcggacctaatagacatctacagaactctccaccccaaatcaacagaatatatatttttttcagcaccacaccacacctattccaaaattgatcacatacttggaagtaaagctctcctcagcaaatgtaaaagaacagaaattataacaaactatctctcagaccacagtgcaatcaaactagaactcaggattaagaatctcactcaaagccgctcaactacatggaaactgaacaacctgctcctgaatgactactgggtacataacgaaatgaaggcagaaataaagatgttctttgaaaccaacgagaacaaagacaccacataccagaatctctgggacgcattcaaagcagtgtgtagagggaaatttatagcactaaatgcctacaagagaaagcaggaaagatccaaaattgacaccctaacatcacaattaaaagaactagaaaagcaagagcaaacacattcaaaagctagcagaaggcaagaaataactaaaatcagagcagaactgaaggaaatagagacagaaaaaacccttcaaaaaatcaatgaatccaggagctggttttttgaaaggatcaacaaaattgatagaccgctagcaagactaataaagaaaaaaagagagaagaatcaaaaaatacaaactaccatcagagaatattacaaacacctctacgcaaataaactagaaaatctagaagaaatggatacattcctcgacacatacactctcccaagactaaaccaggaagaagttgaatctctgaatagaccaataacaggctctgaaattgtggcaataatcaatagtttaccaaccaaaaagagtccaggaccagatggattcacagccgaattctaccagaggtacaaggaggaactggtaccattccttctgaaactattccaatcaatagaaaaagagggaatcctccctaactcattttatgaggccagcatcattctgataccaaagcctggcagagacacaaccaaaaaagagaattttagaccaatatccttgatgaacattgatgcaaaaatcctcaataaaatactggcaaaccgaatccagcagcacatcaaaaagcttatccaccatgatcaagtgggcttcatccctgggatgcaaggctggttcaatatacgcaaatcaataaatgtaatccagcatataaacagagccaaagacaaaaaccacatgattatctcaatagatgcagaaaaagcctgtgacaaaaatcaacaacccttcatgctaaaaactctcaataaattaggtattgatgggacgtatttcaaaataataagagctatctatgacaaacccacagccaatatcatactgaatgggcaaaaactggaagcattccctttgaaaactggcacaagacagggatgccctctctcaccactcctattcaacatagtgttggaagttctggccagggcaattagacaggagaaggaaataaagggtattcaattaggaaaagaggaagtcaaattttccctgtttgcagacgacatgattgtatatctagaaaaccccattgtctcagcccaaaatctccttcagctgataagcaacttcagcaaagtctcaggatacaaaatcaatgtacaaaaatcacaagcattcttatacaccaacaacagacaaacagagagccaaatcatgggtgaactcccattcacaattgcttcaaagagaataaaatacctaggaatccaacttacaagggatgtgaaggacctcttcaaggagaactacaaaccactgctcaaggaaataaaagaggacacaaacaaatggaagaacattccatgctcatgggtaggaagaatcaatatcgtgaaaatggccatactgcccaaggtaatttacagattcaatgccatccccatcaagctaccaatgactttcttcacagaattggaaaaaactactttaaagttcatatggaaccaaaaaagagcccgcattgccaagtcaatcctaagccaaaagaacaaagctggaggcatcacactccttgacttcaaactatactacaaggctacagtaaccaaaacagcatggtactggtaccaaaacagagacatagatcaatggaacagaacagagccctcagaaataatgccgcatatctacaactatctgatctttgacaaacctgagaaaaacaagcaatggggaaaggattccctatttaataaatggtgctgggaaaactggctagccatatgtagaaagctgaaactggatcccttccttacaccttatacaaaaatcaattcaagatggattaaagatttaaacgttaaacctaaaaccataaaaaccctagaagaaaacctaggcattaccattcaggacataggcgtgggcaaggacttcatgtccaaaacaccaaaagcaatggcaacaaaagacaaaattgacaaatgggatctaattaaactaaagagcttctgcacagcaaaagaaactaccatcagagtgaacaggcaacctacaacatgggagaaaattttcgcaacctactcatctgacaaagggctaatatccagaatctacaatgaactcaaacaaatttacaagaaaaaaacaaacaaccccatcaaaaagtgggtgaaggacatgaacagaaacttctcaaaagaagacatttatgcagccaaaaaacacatgaagaaatgctcatcatcactggccatcagagaaatgcaaatcaaaaccactatgagatatcatctcacaccagttagaaaggcaatcattaaaaagtcaggaaacaacagaaacatggatggagctggaggccattatcctaagcaaactaatgaaggaacagaaaaccaaataccagatgttctcacttgtaagtgggagctaaatgataagaacatatggacacaaagaggggaacaacacaccctggagcctgttggaggagaaggtgaattaagaaaagataatcactcaaccaaaaatgaccagtacgataataggcattttcaactggctgtaggaaatggccttatggctaagaccttcatggtcagtttcttctataaagccagtgcctacgttgtacccacaggagaattgccagatttagatataattcagttaaaacaatttggaaacgcattgtcacatctaacagtaggaacctcagtcactcaaatacaaaatttaaatacaatgggaataattggatcccaagatagcagggaccaactggccacactcaaatgtcaaggtaaaggggacccaaaatatcaatgtgatcctccagttaaagtaggtgctaatggaggtcagataattaatgaagttttagctcaggtccaacttacagtgggtccaaagacaaatggatattggagaatgacagtggattatcataagcttaaccaagatgtgactccaattgtagctgctgtaccagatgtggtttcattgcttgaggttatatcaactcttcaaaaagacttctattgctttttccttctgcaaaatatcacactggtccattatattgatggcattatgctgactgaatccagtgagcaagaagtagcagacacactggacttattgactagtatacgtggactcatggaatgccttatccaccatcatggtatcccacacagcattgcctctgaccaaggccctcactttatggctaaagaattgtgggagtgggctcatgctcatggaattcactggtcttaccatattccccatcatcctgaagcagctggattgatagaatggcggaatgaccttttgaagtcacaattacaacaccaactaggtgacaatgctttgcagggctggggcaaagttctccagaaggccatgtatgctctgaatcagcatccaatatatgttactgtttttcccattgccaggattcataagtcctggaatcaaggggtggaagtagaagtggcatcactcaccatcacccctagtgatccactagcaaaatttttgctttccgttcccacaacattacattctcctggcctagaggtcttagttccagctggaggaatgctgccaccaggagacacaacaatcccattgaactggaagttaatattgccacctggacactttgggctcctcctacctttaagtcaacaggctaagaaggcagttacagtgttggctagggtgattgacccagactatcaggatgaaatcagtctactactccacaatggaggtaaggaagagtatgcatggaattcaggagatccattaggtgtctcttggtattaccatgccctgtcattaaggtcaatgagaactacaacagtgcaatccaggcaggattacaaatggcccagatacctcaggaatgaagatttgggtcatgttaccagggaaaaaaaacacaacctgctgaggtgcttgctgaaggctaagggaatatag

SEQ ID NO: 120384 - DNA, 2917 bp, Homo sapiens
atgataatgggagactttaacaccccactgtcaacattagacagatcaacgagacagaaagttaacaaggatacctgggaattgaactcagctctgcaccaagcggacctaatagacatctacagaactccccaccccaaatcaacagaatatacattctttttagcaccacaccacacctattccaaaattgaccacatagctggaaataaagctctcctcagcaaatgtgaaagaacagaaattataacaaactgtctctcagaccacagtgccatcaaactacaactcaggattaagaaactcactcaaaaccactcaactacatggaaactgaacaacctgctcctgaatgactactgggtacataatgaaatgaaggcagaaataaagatattctttgaaaccaacaagaacaaagacacaacataccagaatctctgggacacatttaaagcagtgtgtagagggaagtttatagcactaaatgcccacaagagaaagcaggaaagatctaaaactgacaccagaacatcacaattaaaacatctagagaatcaagagcaaacacattcaaaagctagcagaagaagctggttttttgaaaagatcaacaaaattcatagaccactagcaagactaataaagaagaaaagagagaagaatcaaatagacgcaataaaaaatgataaaggggatatcaccaccaatcccacagaaatacaaactaccatcagagaatactataaacacctctacacaaataaactagaaaatctagaagaaatggataaattcctcgacacatacaccctcccaagactaaaccaggaagaagttgaatctctgaatagaccaataacaggctctgaaattgaggcaataattagcagcttaccaaccaaaaaaagtccaggaccagatggattcacagccgaattctaccagaagtacaaagaggagctgctaccattccttctgaaactattccaatcaatagaaaaagagggaatcctccctaactcattttaatgaggccagcatcatcctgataccaaaacctggcagagacacaacaaaaaaagagaattttagaccaatatccctgatgaacatcaatgcgaaaatcctcaataaaatactggcaaaccaaatccagcagcacatcaaaaagcttatcaaccatgatcaagttggcttcatccctgggatgcaaggctggttcaacatacacaaatcaataaatgtaattcatcacataaagagaaccaatgacaaaaaccacatgattatctcaatagatgcaggaaaggccttcaacaaaattcaacagtgcttcatgctaaaaactctcaataaactaaatattcatggagtgtatctcaaaataataagagctatttatgacaaacccacagccaatatcatactgaatgggcaaaaactggaagcattccctttgaaaactggcataagacagggatgccctctctcaccactcctattcaacagagtgttggaaattctggccagggcaatcaggcaagagaaagaaataaagcgtattcaattaggaaaagaggaagtcaaattgtccctgtttgcagatgacatgattgtatatttagaaaaccccatcgtctcagcccaaaatctccttaaactgatttgcaacttcagcaaaagaataaaatacctaggaatccaacttacaagggatgtgaaggacctcttcaagaagaactacaaaccactgctcaatgaaataaaagaggatacaaacaagtggaagaacattccatgctcatgggtaggaagaatcaatatcgtgaaaatggccatactgcccaaggtaatttatagattcaatgccatcccaatcaagctaccaatgactttcttcacagaattggaaaaaactactttaaagttcatatggaaccaaaaaagagcctgcatcgccaagtcaatcctaaaccaaaagaacaaagctggaggcatcatgctacctgacttcaaactatactacaaggctacaggaaccaaaacagcatggtactggtaccaaaacagagatatagatcaatggaacagaacacagccctcagaaataatgccacatatctacaactatctgatctttgacaaacctgacaaaaacaagaaatggggaaaggattccctatttaataaatggtgctgggaaaactggctagccatatgtagaaagctgaaactggatcccttccttacaccttatacaaaaattaattcaagatggattaaagacttaaacgttagccctaaaaccataaaaaccctagaagaaaacctaggcaataccattcaggacataggcatgggcaaggacgtcatgtctaaaacaccaaaagcaatggcaacaaaagccaaaattgacaaatgggatctaattaaactaaagagcttctgcacagcaaaagaaacgaccatcagagtgaacaggcaacctacagaatgggagaaaatttttgcaacctactcatctgacaaagggctaatattcagaatctacaatgaactcaaacaaatttacaagaaaaaaacaaacaacctcatcaaaaagtgggcgaagaacatgaacagacacttctcaaaagaagacatttatgcagccaaaaaacacatgaaaaaatgctcatcatcactggccatcagagaaatgcaaatcaaaaccacaatgagataccatctcacaccagttggaatggcaatcattaaaaagtcaggaaacaacagtctaagtaaccagatgtacagaatacaaaagatgcaggtacaagcccaaattcaagcttacaatgtgattacaaataataattataataacaatggcattcagctacgggacctgacactgaagatacctactgaatag

SEQ ID NO: 120385 - DNA, 6734 bp, Homo sapiens
atgaggaggagaggagaaggtgatgcaggaggaggagaaaaggaaaaagaagaggagagaaggggcatagatgaagctgtaagccatcattctcagcaaactaacacaggaggagaaaaccaaatgccacatgttctcactcataagtggcagctgaacagaaactctgcctgtgacaagctgcacaagcctcactcagtgcctggcggggttgcagctggagacgtgggaggaaaaacaatttctaatcctggtgtttgtgcaatagagtatcaggtggacggttcacctcacatttgggaagatgtgaacaaaggtgtctacattgaagaggacagagctcctctcatggaacgcagttcctcaccagcaatggaacaaagctggatggagaatgactttgacgagctgagagaagaaggcttcagacgatcaaattactctgagctacgggaggacattcaaaccaaaggcaaagaagttgaaaactttgaaaaaagttcagaagaatatataactagaatagccaatacacagaagtgcttaaaggagctgatggagctgaaaaccaaggctccagaactacgtgaagaatgcagaagcctcaggagccaatgcgatcaactggaagaaagggcatcagtgatagacacacatagtctcaaaataaaaggatggaggaagatctaccaagcaaatggaaaacaaaaaaaggcaggggttgcaatcctagtctctgataaaacagactttaaaccaacaaagatcaaaagagacaaagaaggccattacataatggtaaagggatcaaatcaacaagaagagctaactatcctaaataaatatgcacccaatacaggagcacccagattcataaagcaagtcctgagtgacctacaaagagacttagactcccatacattaataatgggagactttaacaccccactgtcaacattagacagatcaacaagacagaaagtcaacaaggatacccaggaattgaactcagctctgcaccaagcggacctaatagacatctacagaactctccaccccaaatcaacagaatatacatttttttcagcaccacaccacacctatttcaaaactgaccacatagttggaagtaaagttctcctcagcaaatgtaaaagaacagaaattataacaaactgtctctcagaccacagtgcaatcaaactagaactcaggattaagaaactcactcaaaaccactcaactacatggaaactgaacaacttgctcctgaatgactactgcgtacataacgaaatgaaggcagaaataaagatgttttttgaaaccaacgagaacaaagacacaacataccagaatctctgggacgcattcaaagcagtgtgtagagggaaatttatagcactaaatgcccacaagagaaagcaggaaagatccaaaattgacaccctaacatcacaattaaaaaaactagaaaagcaagagcaaacacattcaaaagctagcagaaggcaagaaataactaaaatcagagcagaactgaaggaaatagagacacaaaaaaacccttcaaaacaatcagtgaatcctggagctggttttttgaaaagatcaacaaaactgatagaccgctagcaagactaataaagaagaaaagagagaagaatcaaatagatgcaataaaaaatgataaaggggatatcaccaccgatcccaaagaaatacaaactaccatcagagaatactataaacacctctacgtaaataaactagaaaatctagaagaaatggataaattcctcaacacatacaccctcccaagattaaaccaggaagaagttgaatctctgaatagaccaataacaggctctgaaattgaggcaataattaatagcttaccaaccaaaaaaaagtccaggaccagatggattcacagccaaattctaccagaggtacaaggaggagctggtaccattccttctgaaactattccaatcaatagaaaaagagggaatcctccttgactcattttatgaggccagcatcatcctgataccaaagcctggcagagacacaacaaaaaaaagagaatttcagacccatatccctgatgaacatcgatgcaaaaatcctcaataaaatactggcaaaccgaatccagcagcacatcaaaaagcttatccaccatgatcaagttggcttcctccctgggatgcaaggctggttcaatatatgcaaatcaataaacataatccatcacattaacagaaccaaagacaaaaaccacatgattatctcaatatctcaatagatgcagaaaaggccttcgacaaaattcaacaacccttcatgctaaaaactctcaataaattaggtattgatgggacgtatttcaaactaataagagctatctatgacaaacccacagccaatgtcatactgaatgggcaaaaactggaagcattccctttgaaaactggcacaagacagagatgccctctctcaccactcctattcaacatagtgttggaagttctggccagggcaattaggcaggagaaggaaataaagggtattcaattaggaaaagaggaagtcaaattgtccgtgtttgcacatgacatgattgtatatccagaaaaccccattgtctcagcccaaaatctccttaagctgataagcaacttcagcaaagtctcagcatacaaaatcaatgtacaaaaatcacaagcattcttatacaccaacaacagacaaacagagagccaaatcatgagtgaactcccattcacaattgcttcaaagagaataaaatacctaggaatccaacttacaagggatgtgaaggacctcttcaaggagaactacaaaccactgctcaaggaaataaaagaggatacaaacaaatggaagaacattccatgctcatgggtaggaagaatcaatatcgtgaaaatggccatactgcccaaggtaatttacagattcaatgccatccccatcaagctaccaatgcctttcttcacagaattggaaaaaactactttaaagttcatatggaaccaaaaaagagcccttattgccaagtcaatcctaagccaaaagaacaaagctggaggcatcacactacctgacttcaaactatactacaaggctacagtaaccaaaacagcatggcactggtaccaaaacagcatggtactggtaccaaaacagagatatagatcaatggaacagaacagagccctcagaaataatgccgcatatctacaactatctgatctttgacaaacctgagaaaaacaagcaatggggaaaggattccctatttaatacatggtgctgggaaaactggctagccatatgtagaaagctgaaactggatcccttccttacaccttatacaaaaattaattcaagatggattaaaaaaaaagatttaaacgttagacctaaaaccataaaaaccctagaagaaaacctaggcattaccattcaggacataggcgtgggcaaggacttcatgtccaaaacaccaaaagcaatggcaacaaaagccaaaattgacaaatgggatctaattaaactaaagagcttctgcacagcaaaagaaactaccatcagagtgaacaggcaacctacaaaatgggagaaaattttcgcaacctactcatctgacaaagggctaatatccagaatctacaatgaactcaaacaaatttacaagaaaaaaacaaacaaccccatcaaaaagtgggcgaaggacatgaacagacacttctcaaaagaagacatttatgcagccaaaaaacacatgaaaaaatgctcatcatcactggccatcagagaaatgcaaatcaaaaccactatgagataccatctcacaccagttagaatggcaatcattaaaaagtcaggaaacaacagctgtttccactgtggttccattgcctacaacattcctctcttggtgttccactcacctcccgttagacatctggattcaaggaaaaatccactgtgcttcccaaagttggagttatttcaggacatgaatggagctcgaagccattaccggcatcagcaaactaatgcaggaacagaaaaccaaacaccacatgttttcacttataattgggaactaaatgatcagagcacatgcacacatggaggggaaaaacacacgctggagcctgtctcagggggaaaaacctccctgctccccatcttgtcccctgaaatctaccctctccatggagcagccaaacccctgtccctgggatctgccaagggaagcagtcctgagaaaaggtggcatcgggtagtggtgagggacacagcttcacagcagcccccatttctgccattgaccatgggtactgcaggcaaggcactgaaccccccagtttcctcgtggtgttaccctgaatttagggaagaaaagaaaattgagagattccaagtattgagcgtagtactgaatgctttccatactttatgtaatttcatctccacaaaactaagtgaggtagatgcccgttttatagatgacgcaaagcggctgctggaagaactcaaatatagacacttcctcagaactgtgcaaggtgatagggaaacagatggaaaagacattctctttaaagagctcatgagctggagagaaaatgtgcaaatgcagtttcggatgctctgtgctggttatcctccacttgccaaccgcaccgtctgccatttctgccatgaggccgacctccaagcagagcagcaccagggttccctatccttcagctcccagatggatcagtcaatgccactggcagaagatccaaggcaagaggagaaagaagtgggtgtttctgccccacttactccagatttcagcactgaatttctggcagtgtctgcatccttctatggctacagctcctgccagcctacaacctcattatccacacatgggagcacaggcactcgcctccgggtactgtatgagtcggcttgcaaagaggaatgcctgggaggcagacaggatgctgaggcaaagctggcagccagcaggaggggccagccctcttccctgatgtcgtcacgtgaagggggctggggggagggctcgcagagcaggaactccagccatggagccctgaaagaagcccagttcataataaccaatgcagagaagtccttaaaggacctgatggagctgaaaaccatggcacaagaactacgtgacgaatgcacaagcctcagtagccgattcgatcaactggaagaaaaggtatcagtgatggaagatgaaattaatgaaatgaagcaagaagagaaggttagagaaaaaagaataaaaagaaatgaacaaagcctccaagaaatatgggactatgtgaaaagaccaaatctacatctgattggtgtacctgaaagtgacagggagaatggaaccaagttggaaaacactctgcaggatattatccaagagaacttccccaatctagcaaggcaggccaacattcaaattcaggaaatacagagaatgccacaaagatactcctcgagaagagcaactccaagacacataattgtcagattcaccaaagttgaaatgaaggaaaaaatgttaagggcagctagagagaaagaaatacaaactaccatcagagaatactataaacacctctacacaaataaactagaaaatctggaagaaatggataaattcctggacacatacagtctcccaagactaaaccaggaagaagttgaatctctgaagagaccaataacaggctctgaaattggggcaataattaatagcttacgaaccaaaaaaaagtccaggaccagacagattcacagccgaattctaccagaggtataaggaggagctggtaccattccttctgaaactattccaatcaatagaaaaagagggaatcctccctaactcattttatgaggccagcatcatcctgataccaaagcctggcagagacacaacaaaaaaaaagagaattttagaccaatatccctgatgaacattgatgcaaaaatcctcaataaaatactggcaaaccgaatccagcagcacatcaaaaagcttatccaccatgatcaactgggcttcatccctggtatgcaaggctggttcaacatatgcaaatcaatgaacgtaatccagcatataaacagtcccaaagacaaaaaccacatgattatctcagtagatgcagaaaaggcctttgacaaaattcaacagcccttcatgctaaaaactctcaataaattaggtattgatgggacgtatctcaaaatagtaagagctatttatgacaaactcacagccaatatcatactgaatgggcaaaaattggaagcattccctttgaaaactggcacaagacagggatgccctctctcaccactcctattcaacatagtgttggaagttctggccagggcaatcaggcaagagaaagaaataaagggtattcaattaggaaaagagcaagtcaaattgtccctgtttgcagatgacatgattgtatatctagaaaaccccatcgtctcagcccaaaatctccttaagctgataagcaacttcagcaaagtctcaggatacaaaaatcaatgtgcaaaattcacaagcattcttatacaccaataacagacaaacagagagccaaatcatgagtgaactcccattcacaattgcttcaaagagaataaaatag

SEQ ID NO: 120386 - DNA, 381 bp, Homo sapiens
atgcagtccgaatcggggatcgtgccggatttcgaagtcggggaggagtttcatgaagagcccaaaacctattacgaactcaaaagtcaaccgctgaagagcagtgcgcctttaggaagctcggatggagcgcacttcgcgggggccgcgcgggtcgccgggtacgaagcgtccaggcgcggggaccctcggccgaggatgccagctgctgagactgattgggggctggggagcgacctggcgcgatgtgggggtggaggagcgccgtgtttgtacgctgtcccgaggtcaccttcaggagccatcgcttccggaggtcctccagctgctgtggccgacaggtggctgaggttcatccgctgcctggcgggggctggctga

SEQ ID NO: 120387 - DNA, 2481 bp, Homo sapiens
gccgcgagccggcgagcgggcagagctttgctctgcgccggggcgcacggctcgggggacccaggcccagctaccttccctccggccccgggctctgttctcactttccagcagtggaaggacgggaagcgggagccatgcagtccgaatcggggatcgtgccggatttcgaaggcggggaggagtttcatgaagagcccaaaacctattacgaactcaaaagtcaaccgctgaagagcagcagttccgccgagcatcctggggcctccaagcctccgataagctcctccagtatgacatcacgcatcttgctacgccagcaactcatgcgtgagcagatgcacgagcaggagcgcacggagcagcagcagaagctgcaggcggcccagttcatgcaacagagagtgcccgtgagtcagacaccagccataaacgtcagtgtgcccaccacccttccctctgccacgcaggtgccgatggaagtccttaaggtgcagacccacctcgaaaaccccaccaagtaccacatacagcaagcccaacggcagcaggtaaagcagtacctttctaccactttagcaaataaacatgccaaccaagtcctgagcttgccatgtccaaaccagcctggcgatcatgtcatgccaccggtgccggggagcagcgcacccaacagccccatggctatgcttacgcttaactccaactgtgaaaaagagggattttataagtttgaagagcaaaacagggcagagagcgagtgcccaggcatgaacacacattcacgagcgtcctgtatgcagatggatgatgtaatcgatgacatcattagcctagaatcaagttataatgaggaaatcttgggcttgatggatcctgctttgcaaatggcaaatacgttgcctgtctcgggaaacttgattgatctttatggaaaccaaggtctgcccccaccaggcctcaccatcagcaactcctgtccagccaaccttcccaacataaaaagggagctcacagagtctgaagcaagagcactggccaaagagaggcagaaaaaggacaatcacaacctgattgaacgaagaagaagatttaacataaatgaccgcattaaagaactaggtactttgattcccaagtcaaatgatccagacatgcgctggaacaagggaaccatcttaaaagcatccgtggactatatccgaaagttgcaacgagaacagcaacgcgcaaaagaacttgaaaaccgacagaagaaactggagcacgccaaccggcatttgttgctcagaatacaggaacttgaaatgcaggctcgagctcatggactttcccttattccatccacgggtctctgctctccagatttggtgaatcggatcatcaagcaagaacccgttcttgagaactgcagccaagacctccttcagcatcatgcagacctaacctgtacaacaactctcgatctcacggatggcaccatcaccttcaacaacaacctcggaactgggactgaggccaaccaagcctatagtgtccccacaaaaatgggatccaaactggaagacatcctgatggacgacaccctttctcccgtcggtgtcactgatccactcctttcctcagtgtcccccggagcttccaaaacaagcagccggaggagcagtatgagcatggaagagacggagcacacttgttagcgaatcctccctgcactgcattcgcacaaactgcttcctttcttgattcgtagatttaataacttacctgaaggggttttcttgataattttcctttaatatgaaattttttttcatgctttatcaatagcccaggatatattttatttttagaattttgtgaaacagacttgtatattctattttacaactacaaatgcctccaaagtattgtacaaataagtgtgcagtatctgtgaactgaattcaccacagactttagctttctgagcaagaggattttgcgtcagagaaatgtctgtccatttttattcaggggaaacttgatttgagatttttatgcctgtgacttccttggaaatcaaatgtaaagtttaattgaaagaatgtaaagcaaccaaaaagaaaaaaaaaaagaaagaaagaggaaaagaaatccatactaacccttttccattttataaatgtattgattcattggtactgccttaaagatacagtacccctctagctttgtttagtctttatactgcaaactatttaaagaaatatgtattctgtaaaagaaaaaaaaaatgcggccttttcatgaggatcgtctggttagaaaacataactgataccaaccgaaactgaagggagttagaccaaggctctgaaatataaagtctaatcttgctctcttttattctgtgctgttacagttttcttcatcaatgagtgtgatccagtttttcataagatattttattttgaaatggaaattaatgtcctctcaaag

SEQ ID NO: 120388 - DNA, 1900 bp, Homo sapiens
atgagagcaaacctagaagagctccgaagccaacacaacgaaaaggtggaggagaactccacattgcagcaacgactggaagaaagtgaaggggagctccggaagaatctggaggagctattccaggtgaagatggaacgggagcagcatcagactgagatcagggatctccaggaccagctctcagaaatgcacgatgaactggacagtgcaaagcgatcggaggacagggagaagggagctctgattgaggagctcttacaggcaaaacaggatcttcaagatctgctgattgccaaagaggagcaagaagacctcttgagaaagcgagagcgtgaactcaccgccctgaagggagccctgaaagaagaggtttccagccatgatcaggagatggacaagctgaaggagcaatatgatgctgagttgcaggccctgagggagagtgtggaagaagcaaccaagaatgtcgaggtcttggcgagcaggagcaacacttcagagcaagaccaggcggggactgaaatgcgcgtgaagcttctgcaggaggagaatgagaagctgcagggaagaagcgaagagctggagcggagagttgctcagcttcaaaggcagatcgaggacctgaaaggcgatgaagccaaggcgaaggaaacgctgaagaagtacgagaccatccccacctctgatcctcaagtgtacagagaatgtctttcacactcttctcagcgtgacactgagggcaccaggaaaatggaagtgcccactaatgtgagaaagaaatgcctccctatacaacggctgggcttcttccctgcaggactcctacaggccgccgcccgattctctactgactccccagtccaccagaaaaagtctgactcgattcgacctcggtaccctttagactttggccaccggcagcttctgtatttcgttcctgtgtccctgtgccatacctcatcaatatgcctcaaactcaacacggtcagattcaacatgcacaaaatggaagtcctcatcccacttaccactccaagacatggacctcctctgttccttctcaatgcctccaatattcaccagtcacctaacgagtcaggagagacagggacagggatgcaaatcctggcccaacctatagctgcccctccctctgctctgcctgctggcaagacggcccaggccatgggggacaagatgaggacaatgattcctgacacaaggctctatgcaccctttgggcctggtgatgttctcatggggacctgcaggccattccgctactctgaaaagcttgacggaaagaaaatgtacagcttcccaagcactgctgccttggctgatgggatcattgcttcttggcttggggccaacagcaatccagccaggcaagggagtgatggaggatgccgatggcccacaggaattgccctcgactggagtgagtcaacgtcttcatctgcaaaatggggatacaagggcgggccccgcacgcttatcctgcccgggaggaacgccggcgtccagcccgctaccgaccgccgctgcgggatgctgcgctccacgtccacggtcaccctgctctcgggcggcgccgccaggacgcccggggcgcccagcaggaggcttcttgacctgagcaatggagaacctaccacggaaacttcctcaggggtgttgtttatggtgtggtgcgaagatcagatcaaaatcagcagaaagaaatgggggtgtatgggtggtccaccagtccactgaaagaagagatgaactacatcaaagatgggagagccactttggaaaaggtgagaaaacgaatgtttggagactatgatgagaggagacagaagatttgaccgctcaccccaggaactatcatttttccatgctcagcagg

SEQ ID NO: 120389 - DNA, 409 bp, Homo sapiens
cttaattatacatcatgcaccgctggtgaactcgttagctgaagtcattctgaatggtgatctgtctgagatgtacgctaagactgaacaggatattcagagaagttctgccaagcccagcattcggtgcttcattaaacccaccgagacactcgagcggtcccttgagatgaacaagcacaagggcaagaggcgggtgcaaaagagacccaactacaaaaacgttggggaagaagaagatgaggagaaagggcccaccgaggatgcccaagaagacgccgagaaggctaaagagatcgagatggtgatcatggagcgtagcaagctctcagagctggccgccagcacctccgtgcaggagcagaacaccacggacgaggagaaaagcgccgccgccacctgctctgag

SEQ ID NO: 120390 - DNA, 2643 bp, Homo sapiens
atgtttggccgctcgcggagctgggtgggcgggggccatggcaagacttcccgcaacatccactccttggaccacctcaagtatctgtaccacgttttgaccaaaaacaccacagtcacagaacagaaccggaacctgctagtggagaccatccgttccatcactgagatcctgatctggggagatcaaaatgacagctctgtatttgacttcttcctggagaagaatatgtttgttttcttcttgaacatcttgcggcaaaagtcgggccgttacgtgtgcgttcagctgctgcagaccttgaacatcctctttgagaacatcagtcacgagacctcactttattatttgctctcaaataactacgtaaattctatcatcgttcataaatttgacttttctgatgaggagattatggcctattatatatcgttcctgaaaacactttcgttaaaactcaacaaccacactgtccatttcttttataatgagcacaccaatgactttgccctgtacacagaagccatcaagtttttcaaccaccctgaaagcatggttagaattgctgtaagaaccataactttgaatgtctataaagtggataaccaggccatgctgcactacatccgagataaaactgctgttccttacttctccaatttggtctggttcattgggagccatgtgatcgaactcgatgactgcgtgcagactgatgaggagcatcggaatcggggtaaactgagtgatctggtggcagagcacctagaccacctgcactatctcaatgacatcctgatcatcaactgtgagttcctcaacgatgtgctcactgaccacctgctcaacaggctcttcctgcccctctacgtgtactcactggagaaccaggacaaggtcttcttaattatacatcatgcaccgctggtgaactcgttagctgaagtcattctgaatggtgatctgtctgagatgtacgctaagactgaacaggatattcagagaagttctgtcttacccactctaagctccttatggcagggatctcacctgtcactgaatcagctgcagtctgggctgcacaaatgctcatctcacttatgcggagcccaggctgcagctgattcagtgacaggtgagatccctgccataaggagcttagagtggctaatcagtgctggttccaaggcgcgcacattcttcttcctgaaaatgctaataggcttctgggagaaggttgattgtgaatatcaaaggcgtcaagtgctgagcacgcggctgcaagaggccttgccgtcaaatcgcctcactgatgttgcagctgtgcattcttcatgcatgttgggctttggttccacagctccacgcggctcctggattggcgatccagcggctgtgcatctgcccctacctggggagctggccgagcaccttgggtccaagggtaccaccactgtcaccaagcaccagccccaggccaagcccagcattcggtgcttcattaaacccaccgagacactcgagcggtcccttgagatgaacaagcacaagggcaagaggcgggtgcaaaagagacccaactacaaaaacgttggggaagaagaagatgaggagaaagggcccaccgaggatgcccaagaagacgccgagaaggctaaaggtacagagggtggttcaaaaggcatcaagacgagtggggagagtgaagagatcgagatggtgatcatggagcgtagcaagctctcagagctggccgccagcacctccgtgcaggagcagaacaccacggacgaggagaaaagcgccgccgccacctgctctgagagcacgcaatggagcagacccttcctggatatggtgtaccacgcgctggacagcccggatgatgattaccatgccctgttcgtgctctgcctcctctatgccatgtctcataataaagaaaatctcctgaaaaagaggaaggcttatcaggcactcaaagccacccaggcaaagcaggaacttttggcaaagaaggagcagaagaaaggaaaagggctcaggtttaagctactggaatcattcctacatgattactggcagcagaaacctgacaaggtgcatctcagacgactagaagtgaaacctcatgccgtggaattgccagataaacattccttggcctttgttgtacgcatcgaaaggattgatggcgtgagtttactggtgcagagaaccattgcaagactttgcctaaagaaaatttttagtggtgtctttgtaaaagtcaccccccagaatctacaaatgctgcgtatagtggaaacttatgtgacctggggatttccaaatctgaagtctgtccgagaactcattttgaaacgtggacaagccaaggtcaagagtaagaccatccctctgacagacaacacagtgattgaggagcacctggggaagtttggcatcatttgcttggaagacctcattcatgaaattgcattcccagggaagcatttccaggagatctcatggttcttgcgccctttccacctctcagtggcccatcatgctaccaaaaatagagtgggcttcctcaaggagatgggcacacttggctatcggggtgaacgcatcaatcagctcatccgccagctgaactag

SEQ ID NO: 120391 - DNA, 6607 bp, Homo sapiens
ccggaacctgctagtggagaccatccgttccatcactgagatcctgatctggggagatcaaaatgacagctctgtatttgacttcttcctggagaagaatatgtttgttttcttcttgaacatcttgcggcaaaagtcgggccgttacgtgtgcgttcagctgctgcagaccttgaacatcctctttgagaacatcagtcacgagacctcactttattatttgctctcaaataactacgtaaattctatcatcgttcataaatttgacttttctgatgaggagattatggcctattatatatcgttcctgaaaacactttcgttaaaactcaacaaccacactgtccatttcttttataatgagcacaccaatgactttgccctgtacacagaagccatcaagtttttcaaccaccctgaaagcatggttagaattgctgtaagaaccataactttgaatgtctataaagtgtcattggataaccaggccatgctgcactacatccgagataaaactgctgttccttacttctccaatttggtctggttcattgggagccatgtgatcgaactcgatgactgcgtgcagactgatgaggagcatcggaatcggggtaaactgagtgatctggtggcagagcacctagaccacctgcactatctcaatgacatcctgatcatcaactgtgagttcctcaacgatgtgctcactgaccacctgctcaacaggctcttcctgcccctctacgtgtactcactggagaaccaggacaagggaggagaacggccgaaaattagcctgccggtgtctctttatcttctgtcacaggtcttcttaattatacatcatgcaccgctggtgaactcgttagctgaagtcattctgaatggtgatctgtctgagatgtacgctaagactgaacaggatattcagagaagttctgccaagcccagcattcggtgcttcattaaacccaccgagacactcgagcggtcccttgagatgaacaagcacaagggcaagaggcgggtgcaaaagagacccaactacaaaaacgttggggaagaagaagatgaggagaaagggcccaccgaggatgcccaagaagacgccgagaaggctaaaggtacagagggtggttcaaaaggcatcaagacgagtggggagagtgaagagatcgagatggtgatcatggagcgtagcaagctctcagagctggccgccagcacctccgtgcaggagcagaacaccacggacgaggagaaaagcgccgccgccacctgctctgagagcacgcaatggagcagacccttcctggatatggtgtaccacgcgctggacagcccggatgatgattaccatgccctgttcgtgctctgcctcctctatgccatgtctcataataaaggcatggatcctgaaaaattagagcgaatccagctccccgtgccaaatgcggccgagaagaccacctacaaccacccgctagctgaaagactcatcaggatcatgaacaacgctgcccagccagatgggaagatccggctggcgacgctggagctgagctgcctgcttctgaagcagcaagtcctgatgagtgctggctgcatcatgaaggacgtgcacctggcctgcctggagggtgcgagagaagaaagtgttcaccttgtacgacatttttataagggagaagacatttttttggacatgtttgaagatgagtataggagcatgacaatgaagcccatgaacgtggaatatctcatgatggacgcctccatcctgctgcccccaacaggcacgccactgacgggcattgacttcgtgaagcggctgccgtgtggcgatgtggagaagacccggcgggccatccgggtgttcttcatgctgcgttccctgtcactgcaattgcgaggggagcctgagacacagttgccgctgactcgggaggaggacctgatcaagactgatgatgtcctggatctgaataacagcgacttgattgcatgtacagtgatcaccaaggatggcggcatggtccagcgatccctggctgtggatatttaccagatgagtttggtggagcctgatgtgtccaggcttggctggggagtggtcaagtttgcaggcctattgcaggacatgcaggtgactggcgtggaggacgacagccgtgccctgaacatcaccatccacaagcctgcgtccagcccccattccaagcccttccccatcctccaggccaccttcatcttctcagaccacatccgctgcatcatcgccaagcagcgcctggccaaaggccgcatccaggcaaggcgcatgaagatgcagagaatagctgccctcctggacctcccaatccagcccaccactgaagtcctggggtttggactcggctcctccacctccactcagcacctgcctttccgcttctacgaccaggggcgccggggcagcagcgaccccacagtgcagcgctccgtgtttgcatcggtggacaaggtgccaggcttcgccgtggcccagtgcataaaccagcacagctccccgtccctgtcctcacagtcgccaccctccgccagcgggagccccagcggcagcgggagcaccagccactgcgactctggaggcaccagctcgtcctccaccccctccacagcccagagtccagcagtcaggagtggcaggaaaggacgccgacgagtgttcagcctgtcggaggccgacagtcatggcggccactgggtttagtgctccgaacggcagctgccacggcacctcacgcacagtcaattcagatgcccccatgagtccagaactgcctaagcctcaccttcctgaccagttggtaatcgtcaacgaaacggaagcagactctaagcccagcaagaacgtggccaggagcgcagccgtggagacagccagcctgtcccccagcctcgtccctgcccggcagcccaccatttccctgacccttgtccccccagttgacccccacagcctccgcagcctcaccggcatgcccccgctgtccacgccggctgccgcctgcacagagcccgtgggcgaagaggctgcatgtgctgagcctgtgggcaccgctgaggactgagtcagtgccggggcctccctttgtgtgtgtggccccgctggtagggaccccagtgccgctgactggcaagacacactgggagcacccaccattctgtgcggcccccagcagccatctcaaccacctatccctgcgctcccttgaatgggaagaagccccacgttgtccttgaattcctttttcactttgcatctcttcacgtgcaggctgggaccagcggagacaccgcggcgaatgcagatgactgcaccggccactcagggagctgcctgggctccgtgtctctgagccccgggtggcaggacccaccggcacctctttcttcctctgtcatatggctcctctgtcaccagccccagtgtgcacagaagaattggaccaggtcactgtacgtagaaatttgtagaaaagcagacttagataaacatctcctttggatatttatttccgcttttggcagcaggtgaacatttatttttaaaacttctatttaaaagaagtccaaaaacatcaacactaaggtttgatgtcatgtgaaaagtgtaataataacagttaagatttcatgatcattttcactggacctttcctgatattttgtttcagagttcttagtgtggctttttccatttatttaagtgattctttgttactcactaactctgcaagcctgtggaataatgaagtaccttcctggaaagtttggattattttttaaacaaaaacaagggagatacatgtattctcaggtacacacagagctgagagggctgaatggttttctgctatagcagccgagaggcctcccatcatggaaagatttctccaggaaaaggaggaatgtagccagctccccactcaggacgcttcctcatttctcttcaccaaaaccaaacagagacagcttccagcaccttcttcagtgttaccatctctaagaaggaaccagttgggaccgtgaagactcccgaccctgtggccatgatggaaatcaaaggaagacaccctctacgtcacctgccctcgactgtgtgtgcccacatgtgccgagagatggcccagagccagttcccctccagctgcaagggcatggtgtccccagagctctgagtctgtcactctccctctgctactgctgctgatctgaatatggaaaccccatggttcccttccccattcggactgggtgtgtacaagcaaggacccagatgcatcagacacagcccccaagatgttcctttctactcggccagctcgggagccagacacagcactcacagcccaggccgtgatccaccctccccaagtccaccagggccagcggcccctcacctctctggtcactggtgagaccttccacaactttcctccagacctgccagcagatgtgcccaccaggggcattaggtatccgccggagcctggccatagggtagtctcgggagccgcgctgagatcttttgccacctgcattttagaagaacatggtctctgtctcctcggcccagccagctgtcccggcaaggcctgccgagggcagttttcaacctcatgaaggaaacacagtcctgccaaggagggggagtggcgcccatggggacaggcctcagtccttagaagccctctgggtagctgtgcccacccagccttcatggctgcaggtacaaggacctttgcttccatagagaaaacgcacagctcagaaagggggccacatgggcagaaacccaaaggaaggacaaaccacgaccaccgtggccatctgcagaatccctggaagagaaggaaggcagggtggagcggggggaagaccatcatggagagaaggaccacagcatcaggagacgggacacgccacacccagcaggcagcctgtgtgttgcttaattttttaagagcaagaggggtagagaggatcaagctggccctggctggagatggctagcccctgagacatgcacttctggttttgaaatgactctgtctgtggggcagcagaaactagagaaggcaagtggctgccccaccccaaggcgtgaccaggaggaacagcctgcagctcactccatgccacacgggtgggccaccagcctgctgtcagaagtctctgggctccaactggtcttgtaaccactgagcactgaaggagagaggtcttggtcagggctggacagcatgcccgggaggaccagcagaggattaaaggtgactgggaggaccagcggaggataaaagacactgctcagggcagggcttctaccctgcatccctggccaagaaaagggcagtccccatgtgggcttgcagggtcactctcaggggcctctttcagctggggctggcaacttgcgtctgggggacacctccaggtgtgtggggtgaggatttcctataaccagggctcccagaagctttgcttatgtaaggaggtctgggagccagcccattggaggccaccagccattttggcttcaaaggaccccacctcacccaggtctcagcggcagtgggcacagctatgtcttcaggagctcccgtcaaacctcatagctggggcgctcccagacaggccagtccagacaggacacgctgggcccctggcatccagaggaagagccaggagtgtgggaaggcccacagtgggggctgtggcttctgacactcaggtcatagcctcagaggtctgaggtcagcccccacagacccatccggcccgccccccaagtccctgcagagagcacttagagttatggcccaggccctggtccacccttcccctgtgcacctccggctgggtttgccaagtcagggagcagggctggccgcaggaactcccaaaccttggctttgaatattgttgtggaggtgtgctcgtccctttctggacgtgcaaggtacctgtcccagcaggtcagatggggccagctgaggcgctcccccaggcaggaagggccagccttcaccatcgcgtgggattgggaggaggggcctccgtgagcagcccctcctctgccgctgtcccagcccagtccctctcccggaaccttggcagcctcccacaacccagacacttgcgttcacaagcaacctaaggggcaggtgaagaagcgcagccctgccagacgcgctagattcctctaaggtctctgagatgcaccgttttttaaaaaggcgtggggtgaactgattttgatcttcttgtctagatgcaataaataaatctgaagcatttaatgtagtcatcttgacattgggcctacactgtacgagttccttatgtttccttgagctaaaaatatgtaaataatttttgtcccagtgagaaccgagggttagaaaacctcgatgcctctgagcctcgggaccgctctagggaagtacctgctttcgccagcatgactcatgcttcgtgggtactgaacacgagggtggaaatgaaaactggaacttccttgtaaatttaaacttggcaataaaagagaaaaaaagtt

SEQ ID NO: 120392 - DNA, 577 bp, Homo sapiens
atggctgttctaatttacattcccaccaacagtacacaagagttccctttctccacgtcttcatcaacacttgtcttcttaataattgccattctaacagtccacaagcattcagtgagcacctacaaaggcccccctgaacaaagcaaccaattcctgcctgtggacacacacagtgctcatttccctggctctgaacccaaaaaagagggaggatcttatgtagaggtggcggccgatgaggttgagcttcaggccaagcccagcattcggtgcttcattaaacccaccgagacactcgagcggtcccttgagatgaacaagcacaagggcaagaggcgggtgcaaaagagacccaactacaaaaacgttggggaagaagaagatgaggagaaagggcccaccgaggatgcccaagaagacgccgagaaggctaaaggtacagagggtggttcaaaaggcatcaagacgagtggggagagtgaaggtgagtgtccccatgaacgccgccctgtgcctgcgccgccagccagcccgccagcgaggctgccacctgtgccctctccacccagacttc

SEQ ID NO: 120393 - DNA, 852 bp, Homo sapiens
atgggcaaggacttcatgtctaaaacaccaaaagcaatggcaacaaaagacaaaactgacaaatgggatctaattaaactaaaaaccttctgcacagcaaaagaaactaccatcagagtgaacaggcaacctacagaatgggagaaaatttttgcaatctacacatctgacaaagggctaatatccagaatctacaatgaactccaacaaatttacaagaaaaaaccaaacaaccccatcaaaaagtgggtgaaggatatgaacagacacttctcaaaagaagacatttatgcagccaaaagacacatgaaaaagtgctcatcatcactggccatcagagaaatgcaaatcaaaaccacatgttacctaaatagccttggtttactcctggtcatagctgtttcctgtgtgaaattgtttatccgggtcacaattaccacaccaaaataccaactcgatgcagaaaaggcatttgacaaaatccagcatacatttataattacaaccatcagcaaaattggtgtagaaaggacttaccttaaggtagtagaggccatctctgacaaacccacagccaacattatactgaacagggaaaagttgaaagcattcctcctgagaactggaacaagacaagaatgcccacttttaccacttctattcaacatagtattggaagtcctagccagagcaatcagacaagagaaagaaataaaaggcatccaaatcagtaaagaagaagtcaaactgtcactctttgctgataatatgattgtatacctagaaaaccctaaagactcatccaaaaagctcctagatctgataaatgaattcagtaaagtctcaggataa

SEQ ID NO: 120394 - DNA, 1296 bp, Homo sapiens
atggtgctgggaaaactggctagccacatgcaggcaaatgaaactacacccttacttccatcatatacaaaaattaactcaagatggattaacgacttaaatataagacgtgaaactataaaaattctagaagaaaacctaggaaaaactcttctggacattggtgtggccatgtttgtgctgcaactgggcagtgccacatttgtggtcacagagcctgtgatcagcgcaatgacaactggggctgccacccatgtggtgacttcacaagtcaaatatctcttgggaatgaaaatgccatatatatccggaccacttggattcttttatatttatgcatatgtttttgaaaacatcaagtctgtgcgactggaagcattgcttttatccttgctgagcattgtggtccttgttcttgttaaagagctgaatgaacagtttaaaaggaaaattaaagttgttcttcctgtagatttagttttggctccaaacacatcgccactccatcaccactacgactgtctctttgccaactttcttgagccaccctgggaggatggacttccagaaggtgccttcaaccaggcagaaggacatttgcgcaggaacataattccctcacctagagctcccccgatgaacatcctctctgcggtgatcactgaagctttcggagtggcacttgtaggctatgtggcctcactggctcttgctcaaggatctgccaaaaaattcaaatattcaattgatgacaaccaggaatttttggcccatggcctcagcaatatagtttcttcatttttcttctgcataccaagtgctgctgccatgggaaggacggctggcctgtacagcacaggagcgaagacacagccatttgcagcccctgacttcaattcagagttgggtgaagcaggtgctgacgcaaaactggagggagggaagttaaatgaaaagaagaaggagaggaaagaggagagaaaaggaaaagaggtgggagaggaggaagaagaaagagagggaaaaggagagaggagggaagaagaaaagaaagaaaatgggaggaggagattgaagagagaacagggaagaggaagaagtaaagagaaaaaggaagaaaagaataaagagagaaaggaggagaaaatagaaaaaaaaagaaggaaagaagaagagagaggaggaagagaaagaagactagaagtgaaggagagagggagaagacaggagaagaagtgggagaaagaaagagaagggagaaggagccaaatggctaaatctgttttctgcagataa

SEQ ID NO: 120395 - DNA, 864 bp, Homo sapiens
atggaaaatgcaagtcatcaagccagtgtgcaggtagagtcattgcaagaacaattgaatgtagtctccaagcaaagggatgaaactgcgctgctttctgcctctcagcaacaagtaaagcagtatgctctgtcactggccaacctgcagatggtactacagcatttccaaaaagaggaaaaatctatgtattctgctgaactacaaaagcaaaaacagcttatagctgaatggaagaaaaaggcagaaagtttggaaagaaaagtgatatcattacaggaacgtttggatgaagcagatgctgcattggattcagcatcaagacttacagaacagttagatctaaaagaagaacaaattgaagaacttaaaaaacaaaatgagttccaacaagaaatgctggatgatgtacaaaagaaattggtgaacttagcaaacagcctagaaggaaaagtggacaaagtcctaatgagaaacctcttcatcagtcatttccacatgccaaaaaatcagcgtcacgaagtgttacggttgatgggcagcatcctgggggtcagaagggaggagatggagcagctgtttcatgacaatcagggcagtgttaccagaaggctgacccctggggactgcatcccctgggctcccctcacctctggctttctgttgggcacagtccgtgggaagcaccagcaaagaccagaggagacaaaagctacagggtttgtccattcagccagtatccgggctgtgccaggcactgtctcaggggtccggggtgtagtggggggcaacagatgccgtgtctacactgagaagcttacaggagtgaggaagcgtcattcctacgtgaagggaatgctctaa

SEQ ID NO: 120396 - DNA, 6461 bp, Homo sapiens
cgagcgagtgtcatggcggccggcgtcgagttggcaggagtaacccacggaactgaggaaagtcattagagctgagaaagaagtggcccaatctggacggtgggaattcgtgggaatgagcagaaggccctccgtaggtgactgtgtcactagaggcgggcccctggtaaaattccaggccaggcctctgcgtttctaggcagaacctggagtcggccttgcctgagaacccagctttgtgttatcgtatcctgtctcgcgaaggcaggcgttcaaggatatttggtcggatcgcccggcggcgctaaacgttttcttttttccgagcggaccgggtcgttctctaaactcgccgcgatgtcgtcctggcttgggggcctcggctccggattgggccagtctctgggtcaagtcgggggcagcctggcttccctcactggccagatatcaaactttacaaaggatatgctgatggagggcacggaggaagtggaagcagaattacctgattctaggacaaaggaaattgaagccattcatgcaatcttgagatcagagaatgaaaggcttaagaaactttgtactgatctagaagagaaacatgaagcatcagagattcaaataaagcagcaatctacaagttaccgaaatcaacttcaacaaaaagaggtagaaatcagccatcttaaagccagacagattgccctccaggatcagttcctgaaactgcagtcagctgctcagtcagtaccttcaggagctggtgtaccagcaaccactgcatcatcttcattcgcttatgggattagtcatcatccttcagctttccatgacgatgacatggactttggtgatataatttcatcccaacaagaaataaaccgactctcaaatgaagtttcaagacttgagtctgaagttggccattggaggcatattgctcagacttccaaagcacaaggaacagataactctgatcaaagtgaaatatgtaaactacaaaatatcattaaggaactaaaacagaaccgaagtcaggaaattgatgaccatcaacatgaaatgtcagtactgcagaatgcacaccaacagaaattgacagaaataagtcgacgacatcgagaagaattaagtgactatgaagaacgaattgaagaacttgaaaatctgttacaacaaggtggctctggagttatagaaactgatctctctaaaatctatgagatgcaaaaaactattcaagttctacaaatagaaaaagtggagtctaccaaaaaaatggaacaacttgaggataaaataaaagatataaataaaaaattatcttctgcagaaaatgacagagatattttgaggagagaacaagaacagctaaatgtggaaaagagacaaataatggaagaatgtgaaaacttgaaattggaatgtagtaaattgcagccttctgctgtgaagcaaagtgatactatgacagaaaaggaaagaattcttgcccagagtggatcagtggaagaagtgttcagactacgacaagcactgtctgatgccgaaaatgaaataatgagattgagtagtttaaaccaggataacagtcttgctgaagacaatctgaaacttaaaatgcgtatcgaagttttagaaaaagagaagtcattactgagtcaagaaaaggaagaacttcagatgtcacttttaaaattgaacaatgaatatgaagtaattaaaagtacagctacaagagacataagtttggattcagaattacatgacttaagacttaatttggaggcaaaggaacaagaactcaatcagagtattagtgaaaaggaaacactgatagccgagatagaagaattggacagacagaatcaagaagctacaaagcacatgattttgataaaagctcagctatcaaaacaacaaaatgaaggagatagcatcatcagtaaactgaaacaagatctaaatgatgaaaaaaagagagttcatcaacttgaagatgataaaatggacattactaaagagttagatgtacagtttgttttgctaattcaaagtgaagtggccctaaatgatttacatttaaccaagcagaaacttgaggacaaagtagaaaatttagtagatcagctaaataaatcacaagaaagtaatgtaagcatccagaaggagaatttagaacttaaggagcatattagacaaaatgaggaggagctttctagaataaggaatgagttaatgcagtctctaaatcaagactctaatagtaattttaaggataccttacttaaagaaagagaagctgaagttagaaacttaaagcaaaatctttcagaattagaacagctcaatgaaaatttaaagaaagttgcttttgatgtcaaaatggaaaatgaaaagttagttttagcatgtgaagatgtgaggcatcagttagaagaatgtcttgctggtaacaatcagctttctctggaaaaaaacactattgtggagactctaaaaatggaaaaaggagagatagaggcagaattgtgttgggctaaaaagaggctgttggaagaagcaaacaagtatgagaaaaccattgaagaactgtcaaatgcacgtaatttgaatacctctgccttacagctggaacatgagcatttaattaaactcaatcaaaagaaagacatggaaatagcagaactcaaaaagaatattgaacaaatggatactgaccataaagaaactaaggacgttttgtcatctagtttagaagagcagaagcagttgacacaacttataaacaagaaagaaatttttattgaaaagcttaaagaaagaagttcaaagctgcaggaggaattggataaatattctcaggccttaagaaaaaatgaaattttaagacagaccatagaggaaaaagaccgaagtcttggatccatgaaagaggaaaataatcatctgcaagaagaattggaacgactcagggaagagcagagtcgaaccgcacctgtggctgaccctaaaacccttgatagtgttactgaactagcatctgaggtatctcaactgaacacgatcaaggaacatcttgaagaggaaattaaacatcatcaaaagataattgaagatcaaaaccagagtaagatgcaactacttcagtctttacaagagcaaaagaaggaaatggatgagtttagataccagcatgagcaaatgaacgccacacacacccagctctttttagagaaggatgaggaaattaagagtttgcaaaaaacaattgaacaaatcaaaacccagttgcatgaagaaagacaggacattcaaacagataactctgatatttttcaagaaacaaaagttcagagccttaatatagaaaatggaagtgaaaagcatgatttatctaaagctgaaacggaaagattagtgaaaggaataaaagagcgagaactggagattaaacttctaaatgaaaagaatatatctttaactaaacagattgatcagttgtccaaagatgaagttggtaaactaactcagattattcagcagaaagatttggagatacaagctcttcatgctagaatttcttcaacttcccatactcaagatgttgtttaccttcaacagcaactgcaggcttatgctatggaaagagaaaaggtatttgctgttttgaatgagaagactagggaaaatagccatctaaaaacagaatatcacaaaatgatggatattgttgctgccaaggaagcagctcttatcaaactgcaagatgaaaataaaaaattgtccactagatttgaaagtagtggccaagatatgtttagagaaactattcagaatttatcacgtatcattcgagaaaaagacatcgaaatagatgcactaagtcagaaatgtcagactttattggcagttttacaaacatccagcactggtaatgaggctggaggtgttaatagtaatcaatttgaggagcttctacaggaacgtgacaagttaaaacagcaagtaaagaaaatggaagagtggaagcagcaggtgatgaccacagtacaaaatatgcaacacgagtcagcccagcttcaggaagagcttcaccaacttcaagcacaggttttggttgacagtgataataattctaaattacaagtggactatactggcctgatccaaagttatgagcagaatgaaaccaaactcaaaaattttgggcaggaattagcacaagttcagcacagcattgggcagctttgcaataccaaggatcttcttttaggaaaacttgatattatttcaccccagctgtcttctgcatcattgcttactccccagtctgcagagtgtcttagagcaagtaagtctgaagtattgagtgaatcttctgaattgcttcagcaagagttagaagagctaagaaaatcactacaggaaaaagatgcaacaattagaactctccaggaaaataaccacagattgtctgattcgattgctgccacctcagagctagaaagaaaagaacacgaacaaaccgattcagaaatcaagcagctaaaggagaaacaagatgttttgcaaaagttacttaaggaaaaagacctcttaatcaaagccaaaagtgatcaactactttcttccaatgaaaatttcactaacaaagtaaatgaaaacgaacttttgaggcaggcagtaacaaacctgaaggagagaatattaattctagagatggacattggcaaactaaaaggagaaaatgaaaaaatagtggaaacatacaggggaaaggaaacagaatatcaagcgttacaagagactaacatgaagttttctatgatgctgcgagaaaaagagtttgagtgccactcaatgaaggagaaggctcttgcttttgaacagctattgaaagagaaagaacagggcaagactggagagttaaatcagcttttaaatgcagttaaatcaatgcaggagaagacagttgtgtttcaacaggagagagaccaagtcatgttggccctgaaacaaaaacaaatggaaaatactgccctacagaatgaggttcaacgtttacgtgacaaagaatttcgttcaaaccaagagctagagagattgcgtaatcatcttttagaatcagaagattcttatacccgtgaagctttggctgcagaagatagagaggctaaactaagaaagaaagtcacagtattggaggaaaagctagtttcatcctctaatgcaatggaaaatgcaagccatcaagccagtgtgcaggtagagtcattgcaagaacagttgaatgtagtttccaagcaaagggatgaaactgcgctgcagctttctgtctctcaggaacaagtaaagcagtatgctctgtcactggccaacctgcagatggtactagagcatttccaacaagaggaaaaagctatgtattctgctgaactcgaaaagcaaaaacagcttatagctgaaatggaagaaataaacgcagaaaatcctggaaggaaaagttgatatcattacaggaatgtttggatgaagcaaatgctgcattggattcagcatcaagacttacagaacagttagatgtaaaagaagaacaaattgaagaacttaaaagacaaaatgagctccgacaagaaatgctggatgatgtacaaaagaaattgatgagcttagcaaacagctcagaaggaaaagtagacaaagtcctaatgagaaacctcttcattggtcatttccacacaccgaaaaatcagcgtcatgaagtgttacggttaatggggagcatcctgggcgtcagaagggaggagatggagcagttgtttcatgacgatcagggcggtgttaccaggtggatgactgggtggcttggaggaggatcaaaaagtgttcccaacacacctttgagaccaaatcagcaatctgtggttaatagttctttttcagaactttttgttaaatttctagaaacagaatctcatccatccattccaccaccaaagctttctgttcatgatatgaaacctctggattcaccaggaagaagaaaaagagatacaaatgcaccagaaagttttaaagatacagcagaatccaggtctggtagaagaacagatgtaaatccgtttttggctcctcgctcggcagctgtaccctctttattaacccagctggacttggacctggtgggcccgggcatcttcttctgaaacccatctcagatgtttttgcccacatttacacctttgccagcgttacctgacaacagtgctggggttgtgctgaaagaccttttaaagcaatagatgattctcaagccagagacaatctagcactttaaagaaaccatgaacactatatgtatgtactttatcacaaagtggcctttggggagaaagtcatgtatttgttcgcaattatgctttctctgaatttaataaaaatattcctaatgcttttag

SEQ ID NO: 120397 - DNA, 5313 bp, Homo sapiens
atggatgacaagagtgaagattccatgtccgtctccaccttgagcttcggtgtgaacagacccacgatttcctgcatattcgactccctaggctggcccaaggacatgttaattagtcagggacagactccacctccccccgagccccagctcttaaccactccagccactcactctggcacctctgttttttcccttggtgaagatgggaaccgctaccatctacgctgctacatgtaccaggcccgggacctggctgcgatggacaaggactctttttctggtagtctgctccatgacatggacgccggtcacctgagcttcgtggaagaggtgtttgagaaccagacccggcttcccggaggccagtggatctacatgagtgacaactacaccgatgtgaacggggagaaggtgcttcccaaggatgacattgagtcgcactgggctggaagtgggaagatgaggaatggtccacagacctcaaccgggctgtcgatgagcaaggtgggcagcatgtggaacctggcgagccccatccccggcaagctctcaagccatgctggctgggagtatagcatcaccatccccccggagcggaagccgaagcactgggtccctgctgagaagatgtactacacacaccgacggcggcgctgggtgcgcctgcgcaggagggatctcagccaaatggaagcactgaaaaggcacaggcaggcggaggcggagggcgagggctgggagtacgcctctctttttggctggaagttccacctcgagtaccgcaagacagatgccttccgccgccgccgctggcgcggtcgcatggagccactggagaagacggggcctgcagctgtgtttgcccttgagggggccctgctggagacccctgagtgctgccttctcagtaatgtcagtgaagtcttcggcatgactgaccagctcagcctggtggtgcccagccagcccctgcacctgggttttagggtacatgtgcacattgtgcagggtggctacaggctggcagtgatcgagaaacccttggccaaaaactacctctctgttgcaggctccctgcagctcgatctcaaccgcatgcccaagccagccaagacagccaagaagtgctccttggaccagctggatgatgctttccacccagaatggtttgtgtccctttttgagcagaaaacagtgaagggctggtggccctgtgtagcagaagagggtgagaagaaaatactggcgggcaagctggaaatgaccttggagattgtagcagagagtgagcatgaggagcggcctgctggccagggccgggatgagcccaacatgaaccctaagcttgaggacccaaggtctgggggtataggccacagtccaggaggcatcccattgcatggccatgtagaagtcacaaagcccacgtggctcagagaggggcacgactcatccaaggccacacacctccacatgatgctgatgctgctggtccaggggccatctcggagtagcacagatgtgaagtacaaagtgcctcatcaagatggggctcccattgccccctacttgggtgcccttctgagagaggcagagcatgtgcattcctgctgggaggaagccttcctgaaggggcttccaaaggcctaccccattccatcccaccccacagatggcctcatcctggggttaacatcagacccgactctgagcttcctgaagtgtgcagcgagggaggaggggtgcactcccgaggagaccacaggaatgccaagcagggaaaaggcgccccgagccaagggctccggcaacgaggatccaatatcggagggtgactccagcccccgtaacaggagagaccgtgaagcatctcagatttctagatgtcaggagcatgtgacagacagtgaagaggacaagaagggggctggatgtggactcaagagggtgctgcagaaggaagtcagcccattgccaccccattgcatctccgaaagccaagccaagagacaaggaagatacaggaacaccttgtcagatctggcacctagggggctaaaccagacacccctggatcactttgcccagaaccctccacatggtcctggaaaggccagagcaatggagcaaatgcaagatgtttctgtgtttcttaagctcccttttgtggctttctgcccctcccttcctcgctgggggaacaatctgttccgggatgtggccccttcactaattgctgttcagatagtttctaaggagggctgtctcctgcacagtaaaagagttaaacttgtgcatccaactggagctgtccttgatgactctcggactctgccgacccgttcctgcagagtggatgactacctgggcttcctccccacttttgggccctgctacatcaacctctatggcagtcccagagagttcacaggcttcccagacccctacacagagctcaacacaggcaagggggaaggtgtggcttatcgtggccggcttctgctctccctggagaccaagctggtggagcacagtgaacagaaggtggaggaccttcctgcggatgacatcctccgggtggagaagtaccttaggaggcgcaagtactccctgtttgcggccttctactcagccaccatgctgcaggatgtggatgatgccatccagtttgaggtcagcatcgggaactacgggaacaagttcgacatgacctgcctgccgctggcctccaccactcagtacagccgtgcagtctttgacgggtgccactactactacctaccctggggtaacgtgaaacctgtggtggtgctgtcatcctactgggaggacatcagccatagaatcgagactcagaaccagctgcttgggattgctgaccggctggaagctggcctggagcaggtccacctggccctgaaggcgcagtgctccacggaggacgtggactcgctggtggctcagctgacggatgagctcatcgcaggctgcagccagcctctgggtgacatccatgagacaccctctgccacccacctggaccagtacctgtaccagctgcgcacccatcacctgagccaaatcactgaggctgccctggccctgaagctcggccacagtgagctccctgcagctctggagcaggcggaggactggctcctgcgtctgcgtgccctggcagaggaggtctatgacacacagctggagaatgtggaggcctttgagggcctgtctgacttttgtaacaccttcaagctgtaccggggcaagacgcaggaggagacagaagatccatctgtgattggtgaatttaagggcctcttcaaaatttatcccctcccagaagacccagccatccccatgcccccaagacagttccaccagctggccgcccagggaccccaggagtgcttggtccgtatctacattgtccgagcatttggcctgcagcccaaggaccccaatggaaagtgtgatccttacatcaagatctccatagggaagaaatcagtgagtgaccaggataactacatcccctgcacgctggagcccgtatttggaaagatgttcgagctgacctgcactctgcctctggagaaggacctaaagatcactctctatgactatgacctcctctccaaggacgaaaagatcggtgagacggtcgtcgacctggagaacaggctgctgtccaagtttggggctcgctgtggactcccacagacctactgtgtctctggaccgaaccagtggcgggaccagctccgcccctcccagctcctccacctcttctgccagcagcatagagtcaaggcacctgtgtaccggacagaccgtgtaatgtttcaggataaagaatattccattgaagagatagaggctggcaggatcccaaacccacacctgggcccagtggaggagcgtctggctctgcatgtgcttcagcagcagggcctggtcccggagcacgtggagtcacggcccctctacagccccctgcagccagacatcgagcaggccttcccatcctttggtaggaaatctaggtggattagagtgatacctttccccaggtttttcctgcgttgtattatctggaataccagagatgtgatcctggatgacctgagcctcacgggggagaagatgagcgacatttatgtgaaaggttggatgattggctttgaagaacacaagcaaaagacagacgtgcattatcgttccctgggaggtgaaggcaacttcaactggaggttcattttccccttcgactacctgccagctgagcaagtctgtaccattgccaagaaggatgccttctggaggctggacaagactgagagcaaaatcccagcacgagtggtgttccagatctgggacaatgacaagttctcctttgatgattttctggatccctatgccatcgtctccttcctgcaccagagccagaagacggtggtggtgaagaacacccttaaccccacctgggaccagacgctcatcttctacgagatcgagatctttggcgagccggccacagttgctgagcaaccgcccagcattgtggtggagctgtacgaccatgacacttatggtgcagacgagtttatgggtcgctgcatctgtcaaccgagtctggaacggatgccacggctggcctggttcccactgacgaggggcagccagccgtcgggggagctgctggcctcttttgagctcatccagagagagaagccggccatccaccatattcctggttttgagtctgaggacacagacctgccctacccaccaccccagagggaggccaacatctacatggttcctcagaacatcaagccagcgctccagcgtaccgccatcgagatcctggcatggggcctgcggaacatgaagagttaccagctggccaacatctcctcccccagcctcgtggtagagtgtgggggccagacggtgcagtcctgtgtcatcaggaacctccggaagaaccccaactttgacatctgcaccctcttcatggaagtgatgctgcccagggaggagctctactgcccccccatcaccgtcaaggtcatcgataaccgccagtttggccgccggcctgtggtgggccagtgtaccatccgctccctggagagcttcctgtgtgacccctactcggcggagagtccatccccacagggtggcccagacgatgtgagcctactcagtcctggggaagacgtgctcatcgacattgatgacaaggagcccctcatccccatccagaactatgctgccatgaagctggtgaagcccttcagctga

SEQ ID NO: 120398 - DNA, 527 bp, Homo sapiens
atgaaactcatggaaacacttaaccagtgcataaacgctggtcatgaaatgacgaaggctatcgccattgcacagtttaatgatgacagcccggaagcgaggaaaataacccggcgctggagaataggtgaagcagcggatttagttggggtttcttctcaggctatcagagatgccgagaaagcagggcgactaccgcacccggatatggaaattcgaggacgggttgagcaacaggctggcaggatcccaaacccacacctgggcccagtggaggagcgtctggctctgcatgtgcttcagcagcagggcctggtcccggagcacgtggagtcacggcccctctacagccccctgcagccagacatcgagcaggccttcccatcctttggtaggaaatctaggtggattagagtgatacctttccccaggtttttcctgcgttgtattatctggaataccagagatgtgatcctggatgacctgagcctcacgggggagaagatgagcgacatttatgtgaaagg

SEQ ID NO: 120399 - DNA, 6887 bp, Homo sapiens
gtggttccaactgttttatactgaaatatgtctgagctgatccaaaaaagcgttgggttgggggagaaggaaatgatggaagtggggtgatctcagagctccatgttagcaactctgggagtgtgggccggtccatctgtctgtctgcccaccctggcaggacaatcaggcctaggaggtctggaggagctcgccgagctgggcggaggaggcaggccagtcccatgctggaggggaccccacggccccttctacagggcaggagagtcctcagctgaagggcttcaccagcttcatggcagcatagttcgggaaggcgtagatgaagatggccaggaacagcagcaggatgaagaggatgatgaagaggatgatggcccaccggaaacgccgccacaggatgaacttcatggtcttgtatggggaggtaaaccacaggaaggaggtgtcggggcgccttgggtcctcaagcttagggttcatgttgggctcatcccggccctggccagcaggccgctcctcatgctcactctctgctacaatctccaaggtcatttccagcttgcccgccagtattttcttctcaccctcttctgctacaacagggccaccagcccttcactgttttctgctcaaaaagggacacaaaccattctgggtggaaagcatcatccagctggtccaaggagcacttcttggctgtcttggctggcttgggcatgcggttgagatcgagctgcagggagcccagaaaatcatcaaaggagaacttgtcattgtcccagatctggaacaccactcgtgctgggattttgctctcagtcttgtccagcctccagaaggcatccttcttggcaatggtacagacttgctcagctggcaggtagtcgaaggggaaaatgaacctccagttgaagttgccttcacctcccagggaacgataatgcacgtctgtcttttgcttgtgttcttcaaagccaatcatccaacctttcacataaatgtcgctcatcttctcccccgtgaggctcaggtcatccaggatcacatctctggtattccagataatacaacgcaggaaaaaccttctggctctccgtggggtgatgttgaagggaggtccaggccgccccagggccttcggaaataggtcgacccacatctgcagcttcccctgctcgatgtctggctgcagggggctgtagaggggccgtgactccacgtgctccgggaccaggccctgctgctgaagcacatgcagagccagacgctcctccactgggcccaggtgtgggtttgggatcctgccagcctctatctcttcaatggaatattctttatcctgaaacattacacggtctgtccggtacacaggtgccttgactctatgctgctggcagaagaggtggaggagctgggaggggcggagctggtcccgccactggttcggtccagagacacagtaggtctgtgggagtccacagcgagccccaaacttggacagcagcctgttctccaggtcgacgaccgtctcaccgatcttttcgtccttggagaggaggtcatagtcatagagagtgatctttaggtccttctccagaggcagagtgcaggtcagctcgaacatctttccaaatacgggctccagcgtgcaggggatgtagttatcctggtcactcactgatttcttccctatggagatcttgatgtaaggatcacactttccattggggtccttgggctgcaggccaaatgctcggacaatgtagatacggaccaagcactcctggggtccctgggcggccagctggtggaactgtcttgggggcatggggatggctgggtcttctgggaggggataaattttgaagaggcccttaaattcaccaatcacagatggatcttctgtctcctcctgcgtcttgccccggtacagcttgaaggtgttacaaaagtcagacaggccctcaaaggcctccacattctccagctgtgtgtcatagaccttcagggtgtcaaaatccttctccaggtaggagccgcacttttccctctcccctatggaggcaaagaatttgctccaccaatcgatgaactcttcctcctggatggggatgaggggctccttgtcatcaatgtcgatgagcacgtcttccccaggactgagtaggctcacatcgtctgggccaccctgtggggatggactctccgccgagtaggggtcacacaggaagctctccagggagcggatggtacactggcccaccacaggccggcggccaaactggcggttatcgatgaccttgacggtgatgggggggcagtagagctcctccctgggcagcatcacttccatgaagagggtgcagatgtcaaagttggggttcttccggaggttcctgatgacacaggactgcaccgtctggcccccacactctaccacgaggctgggggaggagatgttggccagctggtaactcttcatgttccgcaggccccatgccaggatctcgatggcggtacgctggagcgctggcttgatgttctgaggaaccatgtagatgttggcctccctctggggtggtgggtagggcaggtctgtgtcctcagactcatccaggatccttgatgtctcctgcacctcaaaaccaggaatatggtggatggccggcttctctctctggatgagctcaaaagaggccagcagctcccccgacggctggctgcccctcgtcagtgggaaccaggccagccgtggcatccgttccagactcggttgacagatgcagcgacccataaactcgtctgcaccataagtgtcatggtcgtacagctccaccacaatgctgggcggttgctcagcaactgtggccggctcgccaaagatctcgatctcgtagaagatgagcgtctggtcccaggtggggttaagggtgttcttcaccaccaccgtcttctggctctggtgcaggaaggagacgatggcatagggatcagaaaaagagtccttgtccatcgcagccaggtcccgggcctggtacatgtagcagcgtagatggtagcggttcccatagtcgaatatgcaggaaatcgtgggtctgttcacaccgaagctcaaggtggagacggacatggaatcttcactcttgtcatccatcacgccgcccagggccccctcaagggcaaacacagctgcaggccccgtcttctccagtggctccatgcgacggcgccagcggcggcggcggaaggcatctgtcttgcggtactcgaggtggaacttccagccaaaaagagaggcgtactcccagccctcgccctccgcctccgcctgcctgtgccttttcagtgcttccatttggctgagatccctcctgcgcaggcgcacccagcgccgccgtcggtgtgtgtagtacatcttctcagcagggacccagtgcttcggcttccgctccggggggatggtgatgctatactcccagccttgctcatcgacagcccggttgaggtctgtggaccattcctcatcttcccacttccagcccagtgggcactcaatgtcatccttgggaagcaccttctccccgttcacatcggtgtagttgtcactcatgtagatccactggcctccgggaagccgggtctggttctcaaacacctcttccacgaagctcaggtgaccggcgtccatgtcatggagcagagtcttctccggacacacgaaccaatctccagcccaggtccagccggccgaggggcggaagctgtccttgggtagcttgatcttgcccgtgacgtcagaaaacttggggtaggtgaggcccgttgtgccccagttcccaacaagggccaacttagtctcgttctcataggtttcagcaaagacagacagcttcccctcagcaaactggttgaactccttctcatccacagagagcccaaaccacagcttgacccgtatctgcactggcatccgggcgccaggcaccttctccatcggatatttcagaaagattgtctgtagcttcccacaattcttgccacagtagttggcaccccgccgggagaagaggacttggtgggcgggcacccgctggtatgccacacgcttgtctccctgcagcatccagatgacgatgtccggcaggctgttctggggctcctctgccagggcacgcagacgcaggagccagtcctccgcctgctccagagctgcagggagctcactgtggccgagcttcagggccagggcagcctcagtgatttggctcaggtgatgggtgcgcagctggtacaggtactggtccaggtgggtggcagagggtgtctcatggatgtcacccagaggctggctgcagcctgcgatgagctcatccgtcagctgagccaccagcgagtccacgtcctccgtggagcactgcgccttcagggccaggtggacctgctccaggccagcttccagccggtcagcaatcccaagcagctggttctgagtctcgattctatggctgatgtcctcccagtaggatgacagcaccaccacaggtttcacgttaccccagggtaggtagtagtagtggcacccgtcaaagactgcacggctgtactgagtggtggaggccagcggcaggcaggtcatgtcgaacttgttcccgtagttcccgatgctgacctcaaactggatggcatcatccacatcctgcagcatggtggctgagtagaaggccgcaaacagggagtacttgcgcctcctaaggtacttctccacccggaggatgtcatccgcaggaaggtcctccaccttctgttcactgtgctccaccagcttggtctccagggagagcagaagccggccacgataagccacaccttcccccttgcctgtgttgagctctgtgtaggggtctgggaagcctgtgaactctctgggactgccatagaggttgatgtagcagggcccaaaagtggggaggaagcccaggtagtcatccaagtctgaggctttcgaaggcttgacagcacctgcaggctcctcttctatttctcctccaggggcagagattttcgacatactcaggtaggtggtagccacgatgtcattgtgagtcaggcggtcccagtctatgatacgaatcctcattttttcgcacatggagggaaacatggcaggcagtgtgatgttctggttccactgagggttggccgtcttctccaagatcttgctgcacagcattttccccgcaaagctgacctccacaaaggggtccaccaagttcttcttgttactctcgaagccaaagatctgtttcacgttgtccatcacggcatcgtccatctgcggcaagtcctcggcccggaagaccttcaggcagaagtgggctcctcgcagggctacgcctgtgggccggagcaggttgctttcaatgtcctccttgtcttcagaggggtcttttctctccagaggcgcttcgtccccaggccccagcacacaaaggcttgttttcaggtagcctctggccccagcagagaagtcatcagggtctgagagcagcagccacttcctgagataggcgtgccggggctctctgtaaatggtgcccacgtccatccggaactccccgaggagagcatctgtcctgagagaacgagagtctaccaccgtgataaagatgggctcatcaaacagctccccaggagagtcaaacaagttgaagaaaagagtctcattgaagagtgggctgtttcccttgtggatccgcgtccgcttggtctgccctgcagcggtaaccttgaccacaggcttgatgttcacccccggcagctggcgcccctcgatcacctggaccctgatctggaaatcctgcggtttgtctgacagcagctttctagatgtaggcgcacttcgctttcttttgatcccggggtagtggggcggaggacgtgaaggtagtttccttggggtggtgggagcccccgggcctccgctttgatccaggaatggctccgcctcatctccagtgagtccctggtcctctgtgtcttcctctcctcctgtgtctgccactacatccaggtcaggcagagtcggggagggctccagaggagtagggggcgggaacaggggcacagctccaggcagcggtgtgtaggacacctgcaggaccagcgaggcccctgtgggctgcttcttggtgtccagcaggggggcattgaagctggcggacagactaggggtggcgaggacctctcggagtgggaccttggcttcccccaggaacctgttcctccccatcgtctcatggtctttgaccaccacatgaagctcagagccctggtccagggggatgcccttgaggtcccattcaaatccctcattccatacagggttcacgctgttcttgatgactttggttctcttcttcacccctgcaaacaccgcggagcagtaggcatcgctgatgtcggtgtcgggtgtgtggacgttctcggcatagaggatgaagaccctcagcatgcttggcgcgtgtagggccccgtgcgcccagggcgcaaagagggctcggaaaggtcgggagggccgaggcgccgcttgtgggtcccctcgctggagagggctggctgggcgaggccggctcgaatctctggctcctggcttagagcagttgctcttaaaggggaacgggccacccccggctgctccagtgggctaggctgggtccccgccccgcctgcgctcaccccgcttgtcagccggcgttccgagaacaggggcttctgctcatcttccacccccgccgcccttcccgagctccgtcgagctgtaatctaatgctccggctgcggagtctcccaatgacacggcattttgcacctggctgggcggtcga

SEQ ID NO: 120400 - DNA, 927 bp, Homo sapiens
atgcctgaagaccggaattctggggggtgcccggctggtgccttagcctcaactcctttcatccctaaaactacatacagaagaatcaaacggtgttttagttttcggaaaggcatttttggacagaaactggaggatactgttcgttatgagaagagatatgggaaccgtctggctccgatgttggtggagcagtgcgtggactttatccgacaaagggggctgaaagaagagggtctctttcgactgccaggccaggctaatcttgttaaggagctccaagatgcctttgactgtggggagaagccatcatttgacagaaatgggatgcccagagctgacgctgctgcagattgctgcagtctgcagacacacagagccatggacatgactttccctgagacagcctgcagcagggtcatcgtgaattccctgataggcaggataggagaaaaggctcgatgtctggctgcagggggctgtagaggggccgtgactccacgtgctccgggaccaggccctgctgctgaagcacatgcagagccagacgctcctccactgggcccagggaatgggtcaaaaactggtgctacaggtggggagaagacatggggtattcctgacccagagaagcctggccaaccatccaacaacatgaacttggagcccactatgtcaaaggccttggctttgggagctgatggtggacacacacatctgtacatgtacccaggtaatggaaaaccccactcaagctacgaaagggaattcaatggctttacagaaatgaaacacccagatgattggtttcaggtaaaggctgatccagctcctcaatgtgagatcattgagagtttgtgttctcaaggttggcttcagtttaaagctggctccattcatcgtgctgggcttgaagctgctctctga

SEQ ID NO: 120401 - DNA, 897 bp, Homo sapiens
atgcctggccccatgtccctctggctcctcctgctggttctgccactgtccctggagcacagtgatctcagaatttgcttccccgggcaggtggtcagcatggaaagcagctccacgggcttcatctggactgatgtcagagcctggcagacatcaaatcggcatgtttcttcttggagggaacccaggcattctcggatgccccctggggccggcctcatggagcggatccaggctattgcccagaacgtctccgacatcgctgtgaaggtggaccagatcctgcgccacagtctgctcctgcacagcaaggtgtcagaaggccggcgggaccagtgtgaggcacccagtgaccccaagttccctgactgctcagggaaggtggagtggatgcgtgcccgctggacctctgacccctgctacgccttctttggggtggacggcaccgagtgctccttcctcatctacctcagtgaggtcgagtggttctgccccccgctgccctggaggaaccagacggctgcccagagggcacccaagcccctccccaaagtccaggcagttttccgaagcaacctgtcccaccttctggacctgatgggcagcgggaaggagtccctgatcttcatgaagaagcggaccaagaggctcacagcccagtgggcgctggctgcccagcgcctggcacagaagctgggggccacccagagggaccagaagcagatcctggtccacatcggcttcctgacggaggagtccggggacgtgttcagccctcgggtcctgaagggcgggcccctaggggagatggtgcagtgggcggacattctgactgcactctatgtcctgggccatggcctgcgggtcacagtctccctgaaggagctgcagagatag

SEQ ID NO: 120402 - DNA, 525 bp, Homo sapiens
atgaggcgctgccggtgggccgccctggccctggggctgctgcgcctctgcttggctcaggccaacttcgccccgcacttcttcgacaacggggtcggcagcaccaacggaaacatggctctgttcagcctcccagaggacacccctgtaggctctcacgtatacaccctgaatgggacagaccctgagggagaccccatctcctaccacatcagctttgaccccagcactagaagcgtcttttctgttgaccccacttttggaaacatcaccctggttgaagagctggacagagagagggaagatgagattgaagccatcatcagcatttctgatggcctgaatctggtggccgaaaaagtcgtgatcctggtgaccgatgccaatgatgaggcgcccaggttcatccaggagccttatgttgccctggttcccgaggacatacctgctgggagcatcatctttaaggtccatgcagcggacagggacacaggctctggagggagtgtcacctacttcctgcag

SEQ ID NO: 120403 - DNA, 413 bp, Homo sapiens
cttgatggccgctgacctcaaaactctccatggggggtacccctctgcccactgagggggcacctagggagcctaggggtcccgtgaggccctcccaccatggttccccgcctctgcctctccccgcagctccgaccatgaccatccatcctatgagtgctggctgggctcaagcccgggtactttcctccgtgcccaagcaaccctgtaggaaccacatatcctgggccagacgaatgcaggagctgcctcctctggacacagcggtggctctcacctcccttccatcttggcaggatgagtgcatttgctgcgagaaagcagccccgacggcagggccctagggccccaggccaggccaccacgaccgcgaggaaccaagacaacaagcccactcctgaatcacgcctcaa

SEQ ID NO: 120404 - DNA, 2723 bp, Homo sapiens
atgggctcggggcgcgtacccgggctctgcctgcttgtcctgctggtccacgcccgcgccgcccagtacagcaaagccgcgcaagatgtggatgagtgtgtggaggggactgacaactgccacatcgatgctatctgccagaacaccccgaggtcatacaagtgcatctgcaagtctggctacacaggggacggcaaacactgcaaagacgtggatgagtgcgagcgagaggataatgcaggttgtgtgcatgactgtgtcaacatccctggcaattaccggtgtacctgctatgatggattccacctggcacatgacggacacaactgtctggatgtggacgagtgtgccgagggcaacggcggctgtcagcagagctgtgtcaacatgatgggcagctatgagtgccactgccgggaaggcttcttcctcagcgacaaccagcatacctgtatccagcggccagaagaaggaatgaattgcatgaacaagaaccacggctgtgcccacatttgccgggagacacccaaggggggtattgcctgtgaatgccgtcctggctttgagcttaccaagaaccaacgggactgtaaatgtgagataattgggatggcagtgacatgcaactatggtaacggcggctgccagcacacgtgtgatgacacagagcagggtccccggtgcggctgccatatcaagtttgtgctccataccgacgggaagacatgcatcgagacctgtgctgtcaacaacgggggctgtgacagtaagtgccatgatgcagcgactggtgtccactgcacctgccctgtgggcttcatgctgcagccagacaggaagacgtgcaaagatatagatgagtgccgcttaaacaacgggggctgtgaccatatttgccgcaacacagtgggcagcttcgaatgcagttgcaagaaaggctataagcttctcatcaatgagaggaactgccaggatatagacgagtgttcctttgatcgaacctgtgaccacatatgtgtcaacacaccaggaagcttccagtgtctctgccatcgtggctacctgttgtatggtatcacccactgtggggatgtggatgaatgcagcatcaaccggggaggttgccgctttggctgcatcaacactcctggcagctaccagtgtacctgcccagcaggccagggtcggctgcactggaatggcaaagattgcacagagccactgaagtgtcagggcagtcctggggcctcgaaagccatgctcagctgcaaccggtctggcaagaaggacacctgtgccctgacctgtccctccagggcccgatttttgccagagtctgagaatggcttcacggtgagctgtgggacccccagccccagggctgctccagcccgagctggccacaatgggaacagcaccaactccaaccactgccatgaggctgcagtgctgtccattaaacaacgggcctccttcaagatcaaggatgccaaatgccgtttgcacctgcgaaacaaaggcaaaacagaggaggctggcagaatcacagggccaggtggtgccccctgctctgaatgccaggtcaccttcatccaccttaagtgtgactcctctcggaagggcaagggccgacgggcccggacccctccaggcaaagaggtcacaaggctcaccctggaactggaggcagagcaactctttctcctccctgatacacacggccatccaccaccagccagctgtgggctgccctgcctccgacagcgaatggaacggcggctgaaaggatccctgaagatgctcagaaagtccatcaaccaggaccgcttcctgctgcgcctggcaggccttgattatgagctggcccacaagccgggcctggtagccggggagcgagcagagccgatggagtcctgtaggcccgggcagcaccgtgctgggaccaagtgtgtccagtgctccccagggcactactacaacaccagcatccaccgctgtattcgctgtgccatgggctcctatcagcccgacttccgtcagaacttctgcagccgctgtccaggaaacacaagcacagactttgatggctctaccagtgtggcccaatgcaagaatcgtcagtgtggtggggagctgggtgagttcactggctatattgagtcccccaactacccgggcaactacccagctggtgtggagtgcatctggaacatcaaccccccacccaagcgcaagatccttatcgtggtaccagagatcttcctgccatctgaggatgagtgtggggacgtcctcgtcatgagaaagaactcatccccatcctccattaccacttatgagacctgccagacctacgagcgtcccattgccttcactgcccgttccaggaagctctggatcaacttcaagacaagcgaggccaacagcgcccgtggcttccagattccctatgttacctatgatgaggactatgagcagctggtagaagacattgtgcgagatggccggctctatgcctctgaaaaccaccaggagattttaaaggacaagaagctcatcaaggccttctttgaggtgctagcccacccccagaactacttcaagtacacagagaaacacaaggagatgctgccaaaatccttcatcaagctgctccgctccaaagtttccagcttcctgaggccctacaaatagtaaccctaggctcagagacccaatttttt

SEQ ID NO: 120405 - DNA, 353 bp, Homo sapiens
tcattgtatcttcatcgcattgtagtcatcttctgctccttttgctcctgtggctgccaccgccactgctgctccttctctttcttctttcttcttctccttctccttcttcttgttcttctttttcctcctcctcctccttctctttcttgtttcttcttctccttctccttcttcttgttcttctttttcctcctcctcctcctcttctcttattcctcttcctacccctccttcttcctccaacttccttcttctacaagcggaatccaatctgtacatgaaagctgtgagagctactcttatcttggtgccattgcttggcattgaatttgtgctgattccatggcgac

SEQ ID NO: 120406 - DNA, 9449 bp, Homo sapiens
gaggcggccaaggacctggccgacatcgcggccttcttccgatccgggtttcgaaaaaacgatgaaatgaaagctatggatgttttaccaattttgaaggaaaaagttgcatacctttcaggtgggagagataaacgtggaggtcccattttaacgtttccggcccgcagcaatcatgacagaatacgacaggaggatctcaggagactcatttcctatctagcctgtattcccagcgaggaggtctgcaagcgtggcttcacggtgatcgtggacatgcgtgggtccaagtgggactccatcaagccccttctgaagatcctgcaggagtccttcccctgctgcatccatgtggccctgatcatcaagccagacaacttctggcagaaacagaggactaattttggcagttctaaatttgaatttgagacaaatatggtctctttagaaggccttaccaaagtagttgatccttctcagctaactcctgagtttgatggctgcctggaatacaaccacgaagaatggattgaaatcagagttgcttttgaagactacattagcaatgccacccacatgctgtctcggctggaggaacttcaggacatcctagctaagaaggagctgcctcaggatttagagggggctcggaatatgatcgaggaacattctcagctgaagaagaaggtgattaaggcccccatcgaggacctggatttggagggacagaagctgcttcagaggatacagagcagtgaaagctttcccaaaaagaactcaggctcaggcaatgcggacctgcagaacctcttgcccaaggtgtccaccatgctggaccggctgcactcgacacggcagcatctgcaccagatgtggcatgtgaggaagctgaagctggaccagtgcttccagctgaggctgtttgaacaggatgctgagaagatgtttgactggatcacacacaacaaaggcctgtttctaaacagctacacagagattgggaccagccaccctcatgccatggagcttcagacgcagcacaatcactttgccatgaactgtatgaacgtgtatgtaaatataaaccgcatcatgtcggtggccaatcgtctggtggagtctggccactatgcctcgcagcagatcaggcagatcgcgagtcagctggagcaggagtggaaggcgtttgcggcagccctggatgagcggagcaccttgctggacatgtcctccattttccaccagaaggccgaaaagtatatgagcaacgtggattcatggtgtaaagcttgcggtgaggtagaccttccctcagagctgcaggacctagaagatgccattcatcaccaccagggaatatatgaacatatcactcttgcttattctgaggtcagccaagatgggaagtcgctccttgacaagctccagcggcccttgactcccggcagctccgattccctgacagcctctgccaactactccaaggccgtgcaccatgtcctggatgtcatccacgaggtgctgcaccaccagcggcacgtgagaacaatctggcaacaccgcaaggtccggctgcatcagaggctgcagctgtgtgttttccagcaggaagttcagcaggtgctagactggatcgagaaccacggagaagcatttctgagcaaacatacaggtgtggggaaatctcttcatcgggccagagcattgcagaaacgtcatgaagattttgaagaagtggcacagaacacatacaccaatgcggataaattactggaagcagcagaacagctggctcagactggggaatgtgaccccgaagagatttatcaggctgcccatcagctggaagaccggattcaagatttcgttcggcgtgttgagcagcgaaagatcctactggacatgtcagtgtcctttcacacccatgtgaaagagctgtggacgtggctggaggagctgcagaaggagctgctggacgacgtgtatgccgagtcggtggaggccgtgcaggacctcatcaagcgctttggccagcagcagcagaccaccctgcaggtgactgtcaacgtgatcaaggaaggggaggacctcatccagcagctcagggactctgccatctccagtaacaagaccccccacaacagctccatcaaccacattgagacggtgctgcagcagctggacgaggcgcagtcgcagatggaggagctcttccaggagcgcaagatcaagctggagctcttcctgcacgtgcgcatcttcgagagggacgccatcgacattatctcagacctcgagtcttggaatgatgagctttctcagcaaatgaatgacttcgacacagaagatctcacgattgcagagcagcgcctccagcaccatgcagacaaagccttgaccatgaacaacttgacttttgacgtcatccaccaagggcaagatcttctgcagtatgtcaatgaggtccaggcctctggtgtggagctgctgtgtgatagagatgtagacatggcaactcgggtccaggacctgctggagtttcttcatgaaaaacagcaggaattggatttagccgcagagcagcatcggaaacacctggagcagtgcgtgcagctgcgccacctgcaggcagaagtgaaacaggtgctgggttggatccgcaacggagagtccatgttaaatgccggacttatcacagccagctcgttacaagaggcagagcagctccagcgagagcacgagcagttccagcatgccattgagaaaacacatcagagcgcgctgcaggtgcagcagaaggcagaagccatgctacaggccaaccactacgacatggacatgatccgggactgcgccgagaaggtggcgtctcactggcaacagctcatgctcaagatggaagatcgcctcaagctcgtcaacgcctctgtcgctttctacaaaacctcagagcaggtctgcagcgtcctcgagagcctggaacaggagtacaagagagaagaagactggtgtggcggggcggataagctgggcccaaactctgagacggaccacgtgacgcccatgatcagcaagcacctggagcagaaggaggcattcctgaaggcttgcacccttgctcggaggaatgcagacgtcttcctgaaatacctgcacaggaacagcgtgaacatgccaggaatggtgacgcacatcaaagctcctgaacagcaagtgaaaaatatcttgaatgaactcttccaacgggagaacagggtattgcattactggaccatgaggaagagacggctggaccagtgtcagcagtacgtggtctttgagaggagtgccaagcaggctttggaatggatccatgacaatggcgagttctacctttccacacacacctccacgggctccagtatacagcacacccaggagctcctgaaagagcacgaggagttccagataactgcaaagcaaaccaaagagagagtgaagctattgatacagctggctgatggcttttgtgaaaaagggcatgcccatgcggcagagataaaaaaatgtgttactgctgtggataagaggtacagagatttctctctgcggatggagaagtacaggacctctttggaaaaagccctggggatttcttcagattccaacaaatcgagtaaaagtctccagctagatatcattccagccagtatccctggctcagaggtgaaacttcgagatgctgctcatgaacttaatgaagagaagcggaaatctgcccgcaggaaagagttcataatggctgagctcattcaaactgaaaaggcttatgtaagagacctccgggaatgtatggatacgtacctgtgggaaatgaccagtggcgtggaagagattccacctggcattgtaaacaaagaactcatcatcttcggaaacatgcaagaaatctacgaatttcataataacatattcctaaaggagctggaaaaatatgaacagttgccagaggatgttggacattgttttgttacttgggcagacaagtttcagatgtatgtcacatattgcaaaaataagcctgattctactcagctgatattggaacatgcagggtcctattttgacgagatacagcagcgacatggattagccaattccatttcttcctaccttattaaaccagttcagcgaataacgaaatatcagctccttttaaaagagctgctgacgtgctgtgaggaaggaaagggagagattaaagatggcctggaggtgatgctcagcgtgccgaagcgagccaatgacgccatgcacctcagcatgctggaagggtttgatgaaaacattgagtctcagggagaactcatcctacaggaatccttccaagtgtgggacccaaaaaccttaattcgaaagggtcgagaacggcatctcttcctttttgaaatgtccttagtatttagtaaagaagtgaaagattccagtgggagaagcaagtacctttataaaagcaaattgtttacctcagagttgggtgtcacagaacatgttgaaggagacccttgcaaatttgcactgtgggtggggagaacaccaacttcagataataaaattgtccttaaggcttccagcatagagaacaagcaggactggataaagcatatccgcgaagtcatccaggagcggacgatccacctgaagggagccctgaaggagcccattcacatccctaagaccgctcccgccacaagacagaagggaaggagggatggagaggatctggacagccaaggagacggcagcagccagcctgatacgatttccatcgcctcacggacgtctcagaacacgctggacagcgataagctctctggtggctgtgagctgacagtggtgatccatgacttcaccgcttgcaacagcaacgagctgaccatccgacggggccagaccgtggaagttctggagcggccgcatgacaagcctgactggtgtctggtgcggaccactgaccgctccccagcggcagaaggcctggtcccctgtggttcactgtgcatcgcccactccagaagtagcatggaaatggagggcatcttcaaccacaaagactcgctctccgtctccagcaatgacgccagtccacccgcatccgtggcttccctccagccccacatgatcggggcccagagctcgccgggccccaagcggccgggcaacaccctgcgcaagtggctcaccagccccgtgcggcggctcagcagcggcaaggccgacgggcacgtgaagaagctggcgcacaagcacaagaagagccgcgaggtccgcaagagcgccgacgccggctcgcagaaggactccgacgacagtgcggccaccccgcaggacgagacggtcgaggagagaggccggaacgagggcctgagcagcggtactctctccaaatcctcctcctcggggatgcagagctgtggagaagaggaaggcgaggagggggccgacgccgtgcccctgccgccacccatggccatccagcagcacagcctcctccagccagactcacaggatgacaaggcctcttctcggttattagtccgccccaccagctccgaaacaccgagtgcagccgagctcgtcagtgcaattgaggaactcgtgaaaagcaagatggcactggaggatcgccccagctcactccttgttgaccagggagatagtagcagcccttccttcaacccttcggataattcccttctctcttcctcctcgcccattgatgagatggaagaaaggaaatccagctctttaaagagaagacactacgttttgcaagaactagtggagacagagcgtgactatgtgcgggaccttggctatgtggttgagggctacatggcacttatgaaagaagatggtgttcctgatgacatgaaaggaaaagacaaaattgtgttcggcaacatccatcagatttacgactggcacagagacttttttttaggagagttagagaagtgccttgaagatccagaaaaactaggatccctttttgttaaacacgagagaaggttgcacatgtacatagcttattgtcaaaataaaccaaagtctgagcacattgtctcagaatacattgataccttttttgaggacttaaagcagcgtcttggccacaggttacagctcacagatctgttgatcaaaccagtgcagagaatcatgaagtatcagctgttactgaaggacttcctcaagtattccaaaaaggccagcctggatacatcagaattagagagagctgtggaagtcatgtgcatagtacccaggcggtgcaacgacatgatgaacgtggggcggctgcaaggattcgacgggaaaatcgttgcccagggtaaactgctcttgcaggacacattcttggtcacagaccaagatgcaggacttctgcctcgctgcagagagaggcgcatcttcctctttgagcagatcgtcatattcagcgaaccacttgataaaaagaagggcttctccatgccgggattcctgtttaagaacagtatcaaggtgagttgcctttgcctggaggaaaatgtggaaaatgatccctgtaaatttgctctgacatcgaggacgggtgacgtggtagagaccttcattttgcattcatctagtccaagtgtccggcaaacttggatccatgaaatcaaccaaattttagaaaaccagcgcaattttttaaatgccttgacatcgccaatcgagtaccagaggaaccacagcgggggcggcggcggcggcggcagcgggggcagcggcgggggtgggggcagcggcggcggcggggcccccagtggcggcagcggccacagtggcggccccagcagctgcggcggcgcccccagcacgagcaggagccggccctcccggatcccccagcctgtccgacaccacccccccgtgctggtctcctctgcagcctcgagccaggcagaggcagacaagatgtcaggtacgtccacccccgggccctccctgcctccccctggcgcggcccccgaggccggccccagcgcgcccagcaggcggccccccggcgcggacgccgaggggtccgagcgagaagcggagccgatccccaagatgaaggtgctggagagccccaggaaaggcgccgcgaacgcctcggggtcgagcccagacgcccccgccaaggacgcgcgcgctagcctgggcaccctgccgcttgggaagccccgggccggggccgcttcgccgctgaactcgccgctctccagcgcggtcccttctctcggcaaggagcccttcccccccagcagccccctgcagaaggggggctccttctggagctccatccccgcctcccccgccagccgacccggctccttcaccttcccgggggacagcgactccctccagcggcagacaccccgccacgcggcccctggcaaggatactgaccgcatgagcacgtgctcctcggccagcgagcagtccgtgcagtccacccagagcaacgggagtgaaagcagcagcagtagcaacatctccaccatgttggtgacacacgattacacggcagtgaaggaggatgagatcaacgtctaccaaggagaggtcgttcaaattctggccagcaaccagcagaacatgtttctggtgttccgagccgccactgaccagtgccccgcagctgagggctggattccaggctttgtcctgggccacaccagtgcagtcatcgtggagaacccggacgggactctcaagaagtcaacatcttggcacacagcactccgtttaaggaaaaaatctgagaaaaaagataaagacggcaaaagggaaggcaagttagagaacggttatcggaagtcacgggaaggactcagcaacaaggtatctgtgaagcttctcaatcccaactacatttatgacgttcccccagaattcgtcattccattgagtgaggtcacgtgtgagacaggggagaccgttgttcttagatgtcgagtctgtggccgccccaaagcctcaattacctggaagggccctgaacacaacaccttgaacaacgatggtcactacagcatctcctacagtgacctgggagaggccacgctgaagattgtgggcgtgaccacggaagatgacggcatctacacgtgcatcgctgtcaatgacatgggttcagcctcatcatcggccagcctgagggtcctaggtccagggatggatgggatcatggtgacctggaaagacaactttgactccttctacagtgaagtggctgagcttggcaggggcagattctctgtcgttaagaaatgtgatcagaaaggaaccaagcgagcagtggccactaagtttgtgaacaagaagttgatgaagcgcgaccaggtcacccatgagcttggcatcctgcagagcctccagcaccccctgcttgtcggcctcctcgacacctttgagacccccaccagctacatcctggtcttagaaatggctgaccagggtcgcctcctggactgcgtggtgcgatggggaagcctcactgaagggaagatcagggcgcacctgggggaggttctggaagctgtccggtacctgcacaactgcaggatagcacacctggacctaaagcctgagaatatcctggtggatgagagtttagccaagccaaccatcaaactggctgactttggagatgctgttcagctcaacacgacctactacatccaccagttactggggaaccctgaattcgcagcccctgaaatcatcctcgggaaccctgtctccctgacctcggatacgtggagtgttggagtgctcacatacgtacttcttagtggcgtgtcccccttcctggatgacagtgtggaagagacctgcctgaacatttgccgcttagactttagcttcccagatgactactttaaaggagtgagccagaaggccaaggagttcgtgtgcttcctcctgcaggaggaccccgccaagcgtccctcggctgcgctggccctccaggagcagtggctgcaggccggcaacggcagaagcacgggcgtcctcgacacgtccagactgacttccttcattgagcggcgcaaacaccagaatgatgttcgacctatccgtagcattaaaaactttctgcagagcaggcttctgcctagagtttgacctatccagaagttctttctcattctctttcacctgccaatcagctgttaatctgaattttcaagagaaaacaagcaaacataactgatcagctgccggtatgttcatcgtgtgaaattgcattccaagtgagctgtgctcagcagtgcttggacacagagctgcaagctgcgctggggtggaggaccgtcacttacactctgccaaggacggaggtcgcattgctgtatcacagtattttttacggatttctgaaaaaaaaaaaa

SEQ ID NO: 120407 - DNA, 8908 bp, Homo sapiens
gaggcggccaaggacctggccgacatcgcggccttcttccgatccgggtttcgaaaaaacgatgaaatgaaagctatggatgttttaccaattttgaaggaaaaagttgcatacctttcaggtgggagagataaacgtggaggtcccattttaacgtttccggcccgcagcaatcatgacagaatacgacaggaggatctcaggagactcatttcctatctagcctgtattcccagcgaggaggtctgcaagcgtggcttcacggtgatcgtggacatgcgtgggtccaagtgggactccatcaagccccttctgaagatcctgcaggagtccttcccctgctgcatccatgtggccctgatcatcaagccagacaacttctggcagaaacagaggactaattttggcagttctaaatttgaatttgagacaaatatggtctctttagaaggccttaccaaagtagttgatccttctcagctaactcctgagtttgatggctgcctggaatacaaccacgaagaatggattgaaatcagagttgcttttgaagactacattagcaatgccacccacatgctgtctcggctggaggaacttcaggacatcctagctaagaaggagctgcctcaggatttagagggggctcggaatatgatcgaggaacattctcagctgaagaagaaggtgattaaggcccccatcgaggacctggatttggagggacagaagctgcttcagaggatacagagcagtgaaagctttcccaaaaagaactcaggctcaggcaatgcggacctgcagaacctcttgcccaaggtgtccaccatgctggaccggctgcactcgacacggcagcatctgcaccagatgtggcatgtgaggaagctgaagctggaccagtgcttccagctgaggctgtttgaacaggatgctgagaagatgtttgactggatcacacacaacaaaggcctgtttctaaacagctacacagagattgggaccagccaccctcatgccatggagcttcagacgcagcacaatcactttgccatgaactgtatgaacgtgtatgtaaatataaaccgcatcatgtcggtggccaatcgtctggtggagtctggccactatgcctcgcagcagatcaggcagatcgcgagtcagctggagcaggagtggaaggcgtttgcggcagccctggatgagcggagcaccttgctggacatgtcctccattttccaccagaaggccgaaaagtatatgagcaacgtggattcatggtgtaaagcttgcggtgaggtagaccttccctcagagctgcaggacctagaagatgccattcatcaccaccagggaatatatgaacatatcactcttgcttattctgaggtcagccaagatgggaagtcgctccttgacaagctccagcggcccttgactcccggcagctccgattccctgacagcctctgccaactactccaaggccgtgcaccatgtcctggatgtcatccacgaggtgctgcaccaccagcggcacgtgagaacaatctggcaacaccgcaaggtccggctgcatcagaggctgcagctgtgtgttttccagcaggaagttcagcaggtgctagactggatcgagaaccacggagaagcatttctgagcaaacatacaggtgtggggaaatctcttcatcgggccagagcattgcagaaacgtcatgaagattttgaagaagtggcacagaacacatacaccaatgcggataaattactggaagcagcagaacagctggctcagactggggaatgtgaccccgaagagatttatcaggctgcccatcagctggaagaccggattcaagatttcgttcggcgtgttgagcagcgaaagatcctactggacatgtcagtgtcctttcacacccatgtgaaagagctgtggacgtggctggaggagctgcagaaggagctgctggacgacgtgtatgccgagtcggtggaggccgtgcaggacctcatcaagcgctttggccagcagcagcagaccaccctgcaggtgactgtcaacgtgatcaaggaaggggaggacctcatccagcagctcagggactctgccatctccagtaacaagaccccccacaacagctccatcaaccacattgagacggtgctgcagcagctggacgaggcgcagtcgcagatggaggagctcttccaggagcgcaagatcaagctggagctcttcctgcacgtgcgcatcttcgagagggacgccatcgacattatctcagacctcgagtcttggaatgatgagctttctcagcaaatgaatgacttcgacacagaagatctcacgattgcagagcagcgcctccagcaccatgcagacaaagccttgaccatgaacaacttgacttttgacgtcatccaccaagggcaagatcttctgcagtatgtcaatgaggtccaggcctctggtgtggagctgctgtgtgatagagatgtagacatggcaactcgggtccaggacctgctggagtttcttcatgaaaaacagcaggaattggatttagccgcagagcagcatcggaaacacctggagcagtgcgtgcagctgcgccacctgcaggcagaagtgaaacaggtgctgggttggatccgcaacggagagtccatgttaaatgccggacttatcacagccagctcgttacaagaggcagagcagctccagcgagagcacgagcagttccagcatgccattgagaaaacacatcagagcgcgctgcaggtgcagcagaaggcagaagccatgctacaggccaaccactacgacatggacatgatccgggactgcgccgagaaggtggcgtctcactggcaacagctcatgctcaagatggaagatcgcctcaagctcgtcaacgcctctgtcgctttctacaaaacctcagagcaggtctgcagcgtcctcgagagcctggaacaggagtacaagagagaagaagactggtgtggcggggcggataagctgggcccaaactctgagacggaccacgtgacgcccatgatcagcaagcacctggagcagaaggaggcattcctgaaggcttgcacccttgctcggaggaatgcagacgtcttcctgaaatacctgcacaggaacagcgtgaacatgccaggaatggtgacgcacatcaaagctcctgaacagcaagtgaaaaatatcttgaatgaactcttccaacgggagaacagggtattgcattactggaccatgaggaagagacggctggaccagtgtcagcagtacgtggtctttgagaggagtgccaagcaggctttggaatggatccatgacaatggcgagttctacctttccacacacacctccacgggctccagtatacagcacacccaggagctcctgaaagagcacgaggagttccagataactgcaaagcaaaccaaagagagagtgaagctattgatacagctggctgatggcttttgtgaaaaagggcatgcccatgcggcagagataaaaaaatgtgttactgctgtggataagaggtacagagatttctctctgcggatggagaagtacaggacctctttggaaaaagccctggggatttcttcagattccaacaaatcgagtaaaagtctccagctagatatcattccagccagtatccctggctcagaggtgaaacttcgagatgctgctcatgaacttaatgaagagaagcggaaatctgcccgcaggaaagagttcataatggctgagctcattcaaactgaaaaggcttatgtaagagacctccgggaatgtatggatacgtacctgtgggaaatgaccagtggcgtggaagagattccacctggcattgtaaacaaagaactcatcatcttcggaaacatgcaagaaatctacgaatttcataataacatattcctaaaggagctggaaaaatatgaacagttgccagaggatgttggacattgttttgttacttgggcagacaagtttcagatgtatgtcacatattgcaaaaataagcctgattctactcagctgatattggaacatgcagggtcctattttgacgagatacagcagcgacatggattagccaattccatttcttcctaccttattaaaccagttcagcgaataacgaaatatcagctccttttaaaagagctgctgacgtgctgtgaggaaggaaagggagagattaaagatggcctggaggtgatgctcagcgtgccgaagcgagccaatgacgccatgcacctcagcatgctggaagggtttgatgaaaacattgagtctcagggagaactcatcctacaggaatccttccaagtgtgggacccaaaaaccttaattcgaaagggtcgagaacggcatctcttcctttttgaaatgtccttagtatttagtaaagaagtgaaagattccagtgggagaagcaagtacctttataaaagcaaattgtttacctcagagttgggtgtcacagaacatgttgaaggagacccttgcaaatttgcactgtgggtggggagaacaccaacttcagataataaaattgtccttaaggcttccagcatagagaacaagcaggactggataaagcatatccgcgaagtcatccaggagcggacgatccacctgaagggagccctgaaggagcccattcacatccctaagaccgctcccgccacaagacagaagggaaggagggatggagaggatctggacagccaaggagacggcagcagccagcctgatacgatttccatcgcctcacggacgtctcagaacacgctggacagcgataagctctctggtggctgtgagctgacagtggtgatccatgacttcaccgcttgcaacagcaacgagctgaccatccgacggggccagaccgtggaagttctggagcggccgcatgacaagcctgactggtgtctggtgcggaccactgaccgctccccagcggcagaaggcctggtcccctgtggttcactgtgcatcgcccactccagaagtagcatggaaatggagggcatcttcaaccacaaagactcgctctccgtctccagcaatgacgccagtccacccgcatccgtggcttccctccagccccacatgatcggggcccagagctcgccgggccccaagcggccgggcaacaccctgcgcaagtggctcaccagccccgtgcggcggctcagcagcggcaaggccgacgggcacgtgaagaagctggcgcacaagcacaagaagagccgcgaggtccgcaagagcgccgacgccggctcgcagaaggactccgacgacagtgcggccaccccgcaggacgagacggtcgaggagagaggccggaacgagggcctgagcagcggtactctctccaaatcctcctcctcggggatgcagagctgtggagaagaggaaggcgaggagggggccgacgccgtgcccctgccgccacccatggccatccagcagcacagcctcctccagccagactcacaggatgacaaggcctcttctcggttattagtccgccccaccagctccgaaacaccgagtgcagccgagctcgtcagtgcaattgaggaactcgtgaaaagcaagatggcactggaggatcgccccagctcactccttgttgaccagggagatagtagcagcccttccttcaaaccttcggataattcccttctctcttcctcctcgcccattgatgagatggaagcaaaggaaatccagctctttaaagagaagcacactacgttttgcaagaactagtggagacagagcgtgactatgtgcgggaccttggctatgtggttgagggctacatggcacttatgaaagaagatggtgttcctgatgacatgaaaggaaaagacaaaattgtgttcggcaacatccatcagatttacgactggcacagagacttttttttaggagagttagagaagtgccttgaagatccagaaaaactaggatccctttttgttaaacacgagagaaggttgcacatgtacatagcttattgtcaaaataaaccaaagtctgagcacattgtctcagaatacattgataccttttttgaggacttaaagcagcgtcttggccacaggttacagctcacagatctgttgatcaaaccagtgcagagaatcatgaagtatcagctgttactgaaggacttcctcaagtattccaaaaaggccagcctggatacatcagaattagagagagctgtggaagtcatgtgcatagtacccaggcggtgcaacgacatgatgaacgtggggcggctgcaaggattcgacgggaaaatcgttgcccagggtaaactgctcttgcaggacacattcttggtcacagaccaagatgcaggacttctgcctcgctgcagagagaggcgcatcttcctctttgagcagatcgtcatattcagcgaaccacttgataaaaagaagggcttctccatgccgggattcctgtttaagaacagtatcaaggtgagttgcctttgcctggaggaaaatgtggaaaatgatccctgtaaatttgctctgacatcgaggacgggtgacgtggtagagaccttcattttgcattcatctagtccaagtgtccggcaaacttggatccatgaaatcaaccaaattttagaaaaccagcgcaattttttaaatgccttgacatcgccaatcgagtaccagaggaaccacagcgggggcggcggcggcggcggcagcggggcagcggcgggggtgggggcagcggcggcggcggggcccccagtggcggcagcggccacagtggcggccccagcagctgcggcggcgcccccagcacgagcaggagccggccctcccggatcccccagcctgtccgacaccacccccccgtgctggtctcctctgcagcctcgagccaggcagaggcagacaagatgtcagagtgaaagcagcagcagtagcaacatctccaccatgttggtgacacacgattacacggcagtgaaggaggatgagatcaacgtctaccaaggagaggtcgttcaaattctggccagcaaccagcagaacatgtttctggtgttccgagccgccactgaccagtgccccgcagctgagggctggattccaggctttgtcctgggccacaccagtgcagtcatcgtggagaacccggacgggactctcaagaagtcaacatcttggcacacagcactccgtttaaggaaaaaatctgagaaaaaagataaagacggcaaaagggaaggcaagttagagaacggttatcggaagtcacgggaaggactcagcaacaaggtatctgtgaagcttctcaatcccaactacatttatgacgttcccccagaattcgtcattccattgagtgaggtcacgtgtgagacaggggagaccgttgttcttagatgtcgagtctgtggccgccccaaagcctcaattacctggaagggccctgaacacaacaccttgaacaacgatggtcactacagcatctcctacagtgacctgggagaggccacgctgaagattgtgggcgtgaccacggaagatgacggcatctacacgtgcatcgctgtcaatgacatgggttcagcctcatcatcggccagcctgagggtcctaggtccagggatggatgggatcatggtgacctggaaagacaactttgactccttctacagtgaagtggctgagcttggcaggggcagattctctgtcgttaagaaatgtgatcagaaaggaaccaagcgagcagtggccactaagtttgtgaacaagaagttgatgaagcgcgaccaggtcacccatgagcttggcatcctgcagagcctccagcaccccctgcttgtcggcctcctcgacacctttgagacccccaccagctacatcctggtcttagaaatggctgaccagggtcgcctcctggactgcgtggtgcgatggggaagcctcactgaagggaagatcagggcgcacctgggggaggttctggaagctgtccggtacctgcacaactgcaggatagcacacctggacctaaagcctgagaatatcctggtggatgagagtttagccaagccaaccatcaaactggctgactttggagatgctgttcagctcaacacgacctactacatccaccagttactggggaaccctgaattcgcagcccctgaaatcatcctcgggaaccctgtctccctgacctcggatacgtggagtgttggagtgctcacatacgtacttcttagtggcgtgtcccccttcctggatgacagtgtggaagagacctgcctgaacatttgccgcttagactttagcttcccagatgactactttaaaggagtgagccagaaggccaaggagttcgtgtgcttcctcctgcaggaggaccccgccaagcgtccctcggctgcgctggccctccaggagcagtggctgcaggccggcaacggcagaagcacgggcgtcctcgacacgtccagactgacttccttcattgagcggcgcaaacaccagaatgatgttcgacctatccgtagcattaaaaactttctgcagagcaggcttctgcctagagtttgacctatccagaagttctttctcattctctttcacctgccaatcagctgttaatctgaattttcaagagaaaacaagcaaacataactgatcagctgccggtatgttcatcgtgtgaaattgcattccaagtgagctgtgctcagcagtgcttggacacagagctgcaagctgcgctggggtggaggaccgtcacttacactctgccaaggacggaggtcgcattgctgtatcacagtattttttacggatttctg

SEQ ID NO: 120408 - DNA, 1341 bp, Homo sapiens
atggcacttatgaaagaagatggtgttcctgatgacatgaaaggaaaagacaaaattgtgttcggcaacatccatcagatttacgactggcacagagagtacgtaaacatgcattgtgcccgatggagcccagtaagtacaacggggaccagaggggcagctctggttggtgtgcccgcgccccctcttcggaggacattctgcggggagccactgggacccaaggagcccacagacgtctacttaccccacctggagctgaacgcaggccatggggtgtccttgccatggaaaaggccagtaaggaaacaggagagtaataaaacaggacaactcatctttgtctctttctctgaaatccgcatgtttgaagaacgatgggatgaattaatggagaaagtaaatggcagaatcatccactttacactgctgtctcctctccacgtgatcccctgtctacccagacaccctgcacccccagtgcttgacccaaccgcctccttatccttcgatgttccttatcctcaaatgtccttagaaacaagagggtaccgagctcgatttcgtccgcgggagtggcagtgggggctggcagccataaagatgctcctaatgattgttggtaccggcaggcggtaccgacctgagttttcagaattaacaatcagttcccacactgaaggctcccagcttttccctgcagtcacactgaggcctaaggagaaactaaaagcctatgagagagggtggtgctcacttgtgggtggatgtgaagggcttgcagtcactgaagtggggatggctgctgccccctccacggacacatgctctcgtctgtcgcaggctccacccaacctgctgcagttacaacccaggaacctactagttggcagttaccaactagcccctgtggaatttgaggatacgccaattccaaccgactaccagtcgcacaatcgacatcaagctaacagaagggggacaggaccacacgcttcaaacgggaacgagcacggggcacaaggggagaagcgcggccagcgcacaacagcgaaaagcacgcaaccagccccaccaaccccaaaacccagcagaccaccaggcaacaagagcgcaacgacacgccccccgcgcaaccgtacagaccccaagaacgcgacgggcacccggggggaagaacaagacagacgacccggacaggccgccaacaacccccatgcaccacagcgaccaaaaaccgagaagaccggccgcaccaaacacgcaagcgacgacacaaagccgggcacgtgcgccagaagacaatgtaatcactgggcatcaattaaaagcaaccagtga

SEQ ID NO: 120409 - DNA, 404 bp, Homo sapiens
  misc_feature (1)...(404): n = a,t,c or g
tttaaagacacatgcacacgtatgtttattgcagcactattcacaatagcaaagacttggaaccaacccaaatgtccaacaatgtggcacatatacacgatggaatactatgcagccataaaaaggatgagttcatgtcctttgtagggacatggatgaagctggaaaccatcactctcagcaaactatagcaaggacaaaaaaccaaacaccgcatgttctcactcataggtgggacttgaacaatgagaacacacagacacaggaaagggaacatcgcacaccgcggcctgttgtggggtgggggggaggggggagaggggnnnnnnnnntnntnntatgtttaatgacnagttactgggtgccgnacaccaacatggcgcatgtatacataaataacttaa

SEQ ID NO: 120410 - DNA, 1281 bp, Homo sapiens; identical to SEQ ID NO: 119783

SEQ ID NO: 120411 - DNA, 2823 bp, Homo sapiens
atgagaacaaagacacaacataccagaatctcttgggacgcattcaaagcagtgtgtagagggaaatttatagcactaaatgcccacaagagaaagcaggaaagatccaaaattgacaccctaacatcacaattaaaagaactagaaaagcaagagcaaacacattcaaaagctagcagaaggcaagaaataactaaaatcagagcagaactgaaggaaatagagacacaaaaatcccttcaaaaaattaatgaatccaggagctggttttttgaaaggatcaacaatattgatagaccgctagcaagactaataaagaaaaaaagagagaagaatcaaatagacacaataaaaaatgataaaggggatatcaccaccgatcccacagaaatacaaactaccatcagagaatactacaaacacctctatgctaataaactaaaaaatctagaagaaatggataaattcctcgacacatacaccctcccaagactaaaccaggaagaagttgaatctctgaatagaccaataacaggatctgaaattgtgacaataatcaatagcttaccaaccaaaaagagtccaggaccagatggattcacagccgaattctaccagaggtacaaggaggaactggtaccattccttctgaaactattccaatcaatagaaaaagagggaatcctccctaactcattttatgaggccagcatcattctgataccaaagccaggcagagacacaaccaaaaaagagaattttagaccaatatccttgatgaacattgatgcaaaaatcctcaataaaatactggcaaaccgaatccagcagcacatcaaaaagcttatccaccatgatcaagtgggcttcatccctgggatgcaaggctggttcaatatacgcaaatcaataaatgtaatccagcatgtaaacagagccaaagacaaaaaccacatgattatctcaatagatgcagaaaaagactttgacaaaattcaacaacccttcatgctaaaaactctcaataaattaggtattgatgggacgtatctgaaaataataagagctatctatgacaaacccacagccaatatcatactgaatgggcaaaaactggaagcattccctttgaaaactggcacaagacagggatgccctctctcaccactcctattcaacatagtggtggaagttctggccagcgcaattaggcaggagaaggaaataaaggcccaaaatctccttaagctgataagcaacttcagcaaagtctcaggatacaaaatcaatgtacaaaaatcacaagcattcttatacaccaataacagacaaacagagagccaaatcatgagtgaactcccattcataattgcttcaaagagaataaaatacctaggaatccaacttacaagggacgtgaaggacctcttcaaggagaactacaaaccactgatcaaggaaataaaagaggatacaaacaaacggaagaacattccatgctcacgggtaggaagaatcaatatcgtgaaaatggccatactgcccaaggtaatttacagattcaatgccatccccatcaagctaccaatgactttcttcacagaattggaaaaaactactttaaagttcatatggaaccaaaaaagagcccacatcgccaagtcaatcctaagccaaaagaacaaagctgggggcatcacactacctgacttcaaactatactacaaggctacagtaaccaaaacagcatggtactcgtaccaaaacagagatatagatcaatggaacagaacagagccctcagaaataacgccacatatctacaactatctgatctttgacaaacctgagaaaaacaagcaatggggaaaggattccctatttaataaatggggctgggaaaactggctagccatatggagaaagctgaaactggatcccttccttacaccttatacaaaaatcaattcaagatggattaaagacttaaacgttagacctaaaaccataaaaaccctagaagaaaacctaggcattaccattcaggacataggcatgggcaaggacttcatgtctaaaacaccaaaagcaatggcaacaaaagacaaaattgacaaatgggatctaatgaaactaaagagcttctgcacagcaaaagaaactaccatcagagtgaacaggcaacctacagaatgggagaaaatttttgcaacctactcatctgacaaagggctaatatccagaatccacaatgaactcaaacaaatttacaagaaaaaaacaaacaaccccaacaaaacgtgggcgaaggacatgaacagacacttctcaaaagaagacatttatgcagccaaaaaacacatgaaaaaatgctcatcatcactggccatcagagaaatgcaaatcaaaaccacaatgagataccatctcacaccagttagaatggcagtcattaaaaagtcaggaaacaacagggacatggatgaaactggaaaccatcattctcagcaaactgtcacaaggacaaaaaaccaaacaccgcatattctcactcatacgtgggaactgaacaatgagatcacatggacacaggaaggagaatatcacactctggggactgtgacatcagaactccaggttctctggtctttggattctgggacttacagcagtgggccccttgtgttctcaggtttggggcttgagagttacacgatttgctgtcctgagtctgagaccttgggacttggactgaaccacactaccaacttccttagttctccaacttgcagacaacttaatatgggacttcttagcttctaa

SEQ ID NO: 120412 - DNA, 2604 bp, Homo sapiens
atgaacattgatgcaaaaatcctcaataaaatactggcaaacccaatccagcagcacatcaaaaagcttatccatcatgatcaagtgggcttcatccctgggatgcaaggctgcttcaatatatgcaaatcaataaatgtaatccagcatataaacagaaccaaagacaaaaaccacatgattatctcaatagatgcagaaaaggcctttgacaaaattcaacaacgcttcatgctaaaaactctcgataaattaggtattgatgggacgtatctcaaaataataagagctatctatgacaaacccacagccaatatcatactgaatgggcaaaaactggaagcattccctttgaaaactggcacacgacagggatgccctctctcaccactcctattcagcatagtgttggaagttctggcccgggcaatcaggcaggagaaggaaataaagggtattcaattaggaaaagaggaagtcaaattgtccctatttgcagatgacatgattgtatatctagaaaaccccattgtctcagcccaaaatctccttaagctgataagcaacttcagcaaagtctcaggatacaaaataaatgtacaacaatcacaagcattcttatacaccaataacagacaaacacagagcaaaatcatgagtgaactcccattcacaattgcttcaaagagaataaaatacctaggaatccaacttacaagggacgtaaaggacctcttcaaggagaactacaaaccactgctcaaggaaataaaagaggatacaaacaaatggaagaacattccatgctcatgggtaggaagaatcaatatcgtgaaaatggccatactgcccaacgtaatttatagattcaatgccatccccatcaagctaccaatgactttcttcacagaattggaaaaatctactttaaagttcttatggaaccaaaaaagagcctgcatcgccaagtcaatcctaagccaaaagaacaaagctggaggcatcacgctacctgacttcaaactatactacaaggctacagtaaccaaaacagcctgggacatggatgaagctggaaaccatcattctcagcaaactatcgcaaggacaaaaaaccaaacgccgcatgttctcactcataggtgggaaatgaacaacgagaacacctggacacaggaaggggaacatgacacaccggggcctgtcactggataccaacatgagcatgaaacatactccacaaaggagctgttcaacaaggggtcccatgatttcagggccactagtccagaaaaggatattcagtcacggtgcaaaagaagagggtatatgaggacctctttgaagggagctgagagtgagtatcctgatcccaccagcaggaaggaggacatcctgcccttagcaaaacatgctggaatgggtttacagtgggtccgaggacatattctagtgaaagaccaaagccttgccagtcctctaggcacagtcgttatctccctggacaaatgtgtacaagtcactataagataccaagttaaaggaattcacatcattatatctcccagaggacaaagcctagaactttctacattcaagtcagtgaatattggggagtggggaatccatgaattcattatgtggatcaacaaaattgatagactgctagcaagactaataaagaaaaaaagagacaagaatcaaatagacgcaacaaaaaatgataaaggggatgtcaccaccgatcccacagaaatacaaactaccatcagagaatactacaaacacctctacgcaaataaactagaaaatctagaagaaatggataaattcctagacacatacaccctcccaagactaaaccaggaagaagttgaatctctgaatagaccaataacaggatctgaaattgtggcaataatcaatagcttaccaaccaaaagagtccaggaccagatggattcacagccgaattctaccagagatgcagaaaaggtctttgacaaaattcaacaacccttcatgctaaaaactctcgataaattaggtattgatgggacgtatctcaaaataataagagctatctatgacaaacccacagccaatatcatactgaatgggcaaaaactggaagcattccctttgaaaactggcacacgacaaggatgccctctctcaccactcctattcaacatagtgttggaaattctggccagggcaatccggcaggagaaggaaataaagggtattcaattgggaaaagaggaagtcaaattgtccctgtttgcagacgacatgattgtatatctagaaaaccccattgtctcagcccaaaatctccttaagctgataagcaacttcagaaaagtctcaggatacaaaatcaatgtgcaaaaatcacaagcattcttatgcaacaataacagacaaacagagagccaaatcatgagtgaactcccattcacaattgcttcaaagagaataaaatacttaggaatccaacttacaagggacatgaaggacctcttcaaggagaactacaaaccactgctcaaggaaataaaagaggatacaaacaaatggaagaacattccatgctcatga

SEQ ID NO: 120413 - DNA, 1212 bp, Homo sapiens
atggaatactatgcagccatgaaagatgagttcatgtcctttgcagggacatggatgaagctggaaaccatcattctcagcaaactatcacaaggacaaaaagccaaacaccgcatgttctcactcatagaaatacaaactaccattagagaatactataaacacctctacgcaaatgaactagaaaatctagaagaaatggataaattcctcgacacatacaccctcccaagactaaaccaggaagaagttgaatccctgaatagatcaataacaggctctgaaattgaggcaatgattaatagcctaccaaccaaaaagagtccaggaccagacggattcacagccaaattctatcagagcccatcccttactggcaagaatgacaaagagcctgagattttaccctacttccatgctgacttccttgtggttcctggaacgcaccaagcatcccctgtccttatggtcttggggcataagtcatttcctcataggaactctcctccaagcgtctgcatggctaacttctttactcaaaagccaccttctcaatctattcacaacgctgtgaacacccacacggatcctccactgtttctggtgctgctgaaggacagaggattgcttgtcatctggtgccatgagtcacaaggagacgaattgtggcacttggtacttctagattccaagtgctgcttcggcagcatgacacacagaatggaatggtcaggaccctcggctgcaggtctgttggagtttgctggaggtccactccagaccctgtttgcctgggtatcagcagtggaggctgcagaacagcgaatattgctgaacagcaaatgttgctgcctgatcattcctctggaagctttgtctcagaggggtatctggccgtggcagggatccccagtccccaggccctggaccactaccactctgtggcctgttaggaaccaggccacacaacaggagacctccttaatgccttgccagctggaaggaaaagagcctcttgcattgcccacaaaggaagcagagattgaggggagaagaactggagaaattaaaaaagtggaaagagacagcaacacaaataaagaggagctactgctggatttagccttcaaagtctcctcattatttgacaagttagaagaggtagtggaactactagtaattggggaactacaactctatcccagcaagtga

SEQ ID NO: 120414 - DNA, 1965 bp, Homo sapiens
tcagttctcacctatgagtgagaacatgtggtgtttggatttctgtccttgtgacagtttgctgagaatgatggtttccagcttcatccatgtccctacaaaggacatgaactcatcattttttatggctgcatagtcttccatggtgtatatgtgccacattttcttaatccagtctatcattgatggacatttgtgttggttccaagtctttgctattgtgaatggtgccacaataaacatatgtgtgcatgtgtctttatagcagcatgatttataatcctgtgggtatatacccagtaatgggatgactgggtcaaatggtatttctagttctagatccttgaggaatcgccacactgtcttccacaatggttgaactagtttcccatcccaccagcagtgtgaaagtgttcctatttctccacatcctctccagcacctgttgtttcctgactttttaatgattgccattctaactggtttgagatggtatctcattgtggttttgatttgcatttctctgatggcctgtgatgatgagcattttttcatgtgtcttttggctgcataaatgtcttcttttgagaagtgtctgttcatatgctttgcccactttttgatggggttgttttttttcttgtaaatttgtttgagttctttgtagactctggatattaggcctttgtcagatgagtagattgcaaaaatgttctcccattctgtaggttgcctgttcactctgatggtagtttctttcactgtgcagaagctctttagtttaattagatcccatttgtcaattttggcttttgttgccattgcttttgttgttttagacatgaagtccttgcccatgcctatgtcctgaatggtattgcctaggttttcttctagggtttttatggttttaagtctaacatttaagtctttaatccatcttgaattaatttttgtataaggtgtaaggaagggatccagtttcagctgtctacatatagctagccagttttcccaacaccatttattaaatagggaatcgtttacccattgcttgtttttgtcaggtttgtcaaagatcagactgttgtagatgtgtggtattatttctgagggctctattctgttccattgatctatatctctgttttggtaccagtaccatgctgttttggttactgtagccttgtagtatagtttgaagtcaggtagcatgatgcctccagctttgttcttttggcttaggattgtcttggcaatgcaggctcttttttggttccatatgaacttgggcattatggccattttcacaatattgattcttcctatcaatgagcatggaatgttcttccatttgtttgtgtccttttttatttcgttgagcagcggtttgtagttctccttgaagaggtccttcacatcccttgtaagttggattcctaggtattttattctctttgaagcaattgtgaatgggagttcactcatgatttggctctctgtttgtctgttattggtgtagaagaatgcttgtgatttttgcacattgattttgtatcctgagagtttgctgaagttgcttatcagcttaaggagattttgggctgagacgatggggttttctagatatacaatcatgtcatctgcaaacagggacaatttgacttcctcttttcctaattgaataccctttctttctttctcctgcctgattgccctggccagaacttccaacactatgttgaataggagtggtgagagagggcatccctgtgttgtgccagttttcaaagggaatgcttccagtttttgcccattcagtatgatattggctgtgggtttgtcatagatagctcttattcttttgagatatgtcccatcgataccaaatttattgagagtttttagcatgaagggttgttgaattttgttaacggccttttctgcatctgttgagataatcat

SEQ ID NO: 120415 - DNA, 541 bp, Homo sapiens
ctatgagtgagaacatccggtgtttggttttttgtccttgcgatcgtttgctgagaatgatggtttccagcttcatccatgtccctaatttattgagagtttttagcatgaagggttgttgaattttgtcaaaggccttttctgcatctatggagataatcatgtgttttttgtcgttggttctgtttatatgctggattacatttattgatttgcgtatgttgaaccagccttgcatcccatggatgaagcccacttgatcatggtggataagctttttgatgtgctgctggattcggtttgtcagtattttattgaggatttttgcatcgatgttcatcagggatattggtctaaaattctcttttttggttgtgtctctgccaggctttggtatcaggatgatgctggcctcataaaatgagttagggagggttccctgtttttctattgattggaatagtttcagaaggaatggtaccagctcctccttgtacctctggtagaattcggctgtgaatccacctgggcaagaccccat

SEQ ID NO: 120416 - DNA, 520 bp, Homo sapiens
tgcccagacaacccgggagacagaccctggctgggcccgattgttcttctccttggtcaggggtttccttgtctttcttcgtgtccttaacccgcgtggactcttccgctcgggtttgacagatggcagctccactttaggccttgttgttgttggggactttcctgattctccccagatgtagtgaaagcaggtagatttgccttgcctggacttgcctggccttgccttttctttctttctttctttattactttctctttttcttcttcctcttcttcttcttcttcttcttcttcttcttcttcttcttcttcttcttcttcttcttcttcttcttcttcttttttttttgagacagagtcttgctttgtcgcctaggctggagtgaagtggcacgatctcggctcactacaagctccgcctcccaggttcacaccattatcctgcctcagcctcctgaatagctgggactacaggcgcccgccaccatgcctggctattcaggaggctgaggtaa

SEQ ID NO: 120417 - DNA, 603 bp, Homo sapiens
atgagggtcattatccaagaattaggaaccagaacaccaatggaagggggagtggacacttgtgcagctgtatcctgggttttagtggacactccagggccatatataagtcaggaagatgatgtgaaaaccagaagatccaggtattggaaaaggtggtataaaaaccaactaaccactaacaacattaataacaacaacaaaacaaaaatagagttaacccatactcctttggaggcacattctgacactgttgttgacttcatcaccacgtttaatattgttctcaaggggggtcttccctgctacctatgtctaggtatgcaagattccactacaagattccagaacaaatctcagtcagctaaagtctggcagagaaagcagacaatctttgatctaaatgtcagtgatgtttgcaatggttttgaagaaaagattcccacaaagagcactgaccagcttcagagaaggcaactgcctctgtggacccagggaaggaacaagggacttggaatgattaagagcgaagaagaagaagaagaagaagaagaagaagaagaagaagaagaagaagaagaagaagaagaagaagaagaatag

SEQ ID NO: 120418 - DNA, 990 bp, Homo sapiens
atggtagccaatgtcggcggcaaagaatttcaggtttcaaaaacggaaacgaaaagaagaaaagaagaagaagaggaagaagaggaagaagaagaagaagaagaagaagaagaagaagaagaagaagaagaagaagaagaagtagaagaagaagaagaagaagaaatagaagaagtgaagcgacggcaatactcccttgctttcagctcagcaggagcccaagctcagacctatcatgtcagcttcgagactttggccgattaccatcgatggcaacggcaagcatccaaggtgacaaggccaagggagctgcgtgttcccggcggggtggcggccccgtctcccgcggagctgtacctggcgggtttagacggtgcctgcgccgagctcaccacccagaacagggcgcgccgggagctgtgggcgcacgcggcggccacggtctctgtagcggtggggcaccgaggggtcggcactggcggtgaacctaagcgatctggcagcgatgggggccgatccggcctggctgacgctggcattaatgcctggacccacgcctggggtattgacggccaccagctgacggtagaaatcacggaaagcatgatgatggaacacgataccgaaatctttaagcgcattcagatcctgcgtgatatgggcgtgggcttatcggtagatgattttggtacgggcttttccggattatcccgcttagtcagtcttccggtaacggaaatcaaaattgacaaaagttttgtcgatcgttgtctgaccgaaaaacgcatccttgccttacttgaagccattaccagcattgggcaaagcctcaatttaaccgtcgtggcggaaggcgtcgaaaccaaagagcaatttgagatgctacgcaagatccactgtcgcgttattcagggatatttcttttcccgccccctacccgccgaagaaattccaggctggatgagcagcgtgttaccgctgaaaatctga

SEQ ID NO: 120419 - DNA, 444 bp, Homo sapiens
atggagaaggtggacctgcaaactggaagccagatgctagatgatgaagtcaaatcctacaacttccaagatttcaagaagtgtcaaaaaaaaaaaaagaaagaggagggggaggaggaggagggggaggaggaggagggggaggaggaggagggggaggaggaggagggggaggaggaggaggaagaagaagaagaagaagaagaagaagaagaagaagaagaagaagaagaagaagaagaaactttacacattttccaaaaatgcatccgcactgggttcttggaggaagattatgtcaagcaaagctgtcagaggcatttgaaccaaagcaactccatcttaaataggagccggctggaattacctgcatgcaatcctccttcagggccagtgggaatagagactggcaaggaaagcaccactgactttaccagggaatga

SEQ ID NO: 120420 - DNA, 1197 bp, Homo sapiens; identical to SEQ ID NO: 117308

SEQ ID NO: 120421 - DNA, 1395 bp, Homo sapiens
ttaactgcctcctgctgacagagggcgctgttttgaggaaaatggcaatcggagctccctcagaggcctttctaagggttcccagcagaagaggctatcatcagaggctctggttgcattaccatttggcgtttgatggcaatttcttaagttggattccaatttcaactttagaaaaacccgtgacatgtgtgacctgtggcctgtggcagttgtgtcattgcagcaaccataatcgtacaacaaattaccttttagcctttccataaacatttctggaggctggaagtccatgatcaaggtgccaacacagttgattcctcctgaggcctttctccttggcttgaagagggctgcattttcatgtcctcctgtagccttttccctgtataagtgcatccctgttgtctctttccctgttccttcttttggagggcaaattaggacatgattggggttcacatagtatgcgattaacgtctctgagtaatcaggacttccagtaccctgattgtgcctatctgattcttcggggtatccctgctccacaaggagcagtgcttctgctgctgcttcagtacactgctgcttcaataaaagttgctttttaataccactggcttgcccttgaattctttcctgggttaaaccaagaactcttctgggcttagctgtcattttggggcttgcctgtcctgcagcaaattcattgtctctccttaagctggaacattcatcttctcttgccttcacccatgggcagttcttgattattaggagttcagccatgaagggagcttgcaggaatgcttccacacccaagttaaatttgtctgccatctcaatcatagccttatttctttttgcaacctcatcatccttgacaaatcctttgaagtcatgaacaaacttcttgtgtgtcttcttccacatgccattaatgcgatctttggtgacgtcatcctcatcatttacattacatatttcttctaatgctactcctcccacagagccccacccctcaacaggccctggtgtgtgacgttcccctccctgtgtccatgtgttctccttgttcaattcccacttatgagtgagaacatgcggtgtttggttttctgtccttgtgatagtttgctcagaatgatggtttccagcttcatccatgtcccttttttcaaggtttttagcttccttgcaatggtttagaacatgcttctttagctcggagaagtttgttattaccgaccttctgaaggctacttctgtcaacttgtcaaactcattctccacccagttttgttcacttgctggcaaggagttgtgttcctttggaggaaaagaggcattctggtttttggaattttcagcatttcttctctggtttctccccat

SEQ ID NO: 120422 - DNA, 663 bp, Homo sapiens
atggaatactatgcagccataaaaaaggatgagttcatgtcctttgtggggacacggatgaaactggaaaccatcattctcagcaaactatcgcaaggacaaaaaaccaaacaccgcatgttctcactcatagggagcggctctccctccgccgcggtctacacagctgtgcttacagcctgcaccgctggctgggtgcccgccacgcacagaagggcagtaggaacacaaaagggtgtggtggccagggtcccagaacaagtgaaaggggacctgcgagcggggagttttctgaaaactgcacaagccttcttgggcagcgtggtgtcttttcaccaggacgcagggctctgctacactcccccagtgatggcatctgtgcccttgggtgctgttgactcttctccctccagccagcacgagaagggactggagccattgggccgtgggcaagccatcaccggagagagaaccagctgggaaagtaacatgaactacaaggcagctgcagcctgcgtcaccctgaagagagcatccattgctcaactcccaacatggccactgcctgaagatctcattaccactgctgcccacagtgctgtctccctctcctcctttgagtctttgctcaaatgtcactttctcaacaaggccactgactga

SEQ ID NO: 120423 - DNA, 1317 bp, Homo sapiens
atggtgtcccgaatatggtcctggatttctgaggcacagtgcccattgtgtaggcccagtggtacctatgggccaggggaagctgcattattgctatggctttgcattgaggctgctgctgctgctgctgctgctagaagcaccaccactcctatcatcactaatcaccagagcaacacgattgcagaacagaatccaccaagacatgagaatggagatcccaagacttacattattcatgtactcgctgagcaggtcctggagcgcctgccgcacggcgttgcactccgccacgatcctctcgcgccggtcgtctcgcgtgcaggaggagtcggccatcagcgctgcgccgctgatgatgctctccagcctctcctccagggacggccggaacctggcctcgctgaacgtcatggggtccaggataatcttattctgaaagtatcacacacacacacacaaaaatcagcagagaagagagctgtgtcagatcccagcagcaccgttcacagacctcaaccgcttcctccaagcactgtacaccaaagcacgattccttccaacccagacagcagctctgcctactgcctccccagcaccaggcatggattttccagctatacagacagctttgtgcctccgtcggggccctccaaccccatgaaccccaccattggcaatggcctctcacctcagagagtacattaccagcaccttcctacacatgcaggaggaaaaaggaatgctgccttggaatatggagtaccgaggaagtactaccatatgctcaagataactgcttcagattatgaaaaaacgaaaccttttcaagtgggagataaagtaatgggaagtggctggagaaaggtaggaatgcagacagtaaaacagcacagagtgactctgattaagatcttggggaatctgagacatcaggttctgttttaccatgccctccacctagtgcctccttccctctctgcccatgatttagttctggcactttccagtaactgctgtcgtgaagtagacctggcccagttcactttccatctcttatccttgaaggtttatggcatatcaaggttaactggagagaaaagtgggcaggattctcagttttctggattcaatggctatattaccaaacgtagttcctttagcttaaaaaagaagaagaggaagaaagagaagaagaagaaggaggaggaggaggaggaagaagaagaagaagaagaagaagaagaagaagaagaagaagaagaagaagaagaagaagaagaagaagaagaaaacagcctaagcttgacagaataa

SEQ ID NO: 120424 - DNA, 1788 bp, Homo sapiens
atgcaccgctttggtttgcatctgggctccgcgatgtgtcccaagcaccctctcaagaaagcttctgtgtgcaattccccattcactggagctgtttcccgggcgcctaagctaagtgactttctcataatggccactgtttccttcaagaagaagaaggagaaggagaaggaggaggaggaggaggaggggaagaagaagaagaagaagaagaagaagaagaagaagaagaagaagaagaagaagaagaagaagaagaagaagaggaggaggaagaagaagaaggagcagcagctggaaatatttggaaccgtcaatacgaaccaaacctcccaggaaggcgactggggactggagaggattcgacgggcgcgggaagaaagcgctgggggaggaaggtgcagagctagcacgtggtttctgcgagaaccaatggggggctacggtctcgtcacccggccctggacccgggcctaccagcatggcccagaggaaggcgctgtctgggacgctgggcgtctgtcccagagcttgggtctgtctgcggggcctgcagcgacaagacgggaagttcagggtgccgctcctcacccggacctcctcggccccgccccatccgccttcgggatgctgctgagccccgtcacctccacccccttctcggtcaaggacatcctgcgactggagcgcgagcggagctgccccgcggcttcgccacatccgcgggtgcggaagagcccggaaaactttcagtacctgagaatggacgcagagccgcgagggtcagaggttcacaacgctggtggcggcggcggtgacagaaagctggatggttcggagcctcctgggggtccctgtgaggcagtcttggagatggacgcggaacggatgggggagccacagcccggcctgaacgcggcctcgcccctcggcggcgggaccagggtgccagagcgcggcgttggcaacagcggcgacagcgtgcggggtggccgctcggagcagcccaaggcgcggcaacgacggaagccgcgcgtgctcttttcgcaggcgcaggtgctggccctggagcggcgcttcaagcagcagcggtacctgtcagcgcccgagcgcgagcacctggccagcgcgctgcagctcacgtccacgcaggtcaagatctggttccagaaccgacgctacaaatgcaagagacagcgccaggacaagtcgctggaactggctggccaccctctaacgccgcgccgagtagctgtgcccgtcctggtgcgcgatggcaagccctgcctgggccccgggcccggcgcacctgccttccccagcccctacagtgcagcagtgtcgccctactcttgctacggaggctacagcggagcaccctacggcgcaggctacggcacctgctacgcgggcgcgccctcgggtcctgcgccacacacaccactggccagcgcgggcttcggacacggtggccagaatgccaccccgcagggccatctggcagccacgctgcagggtgtcagggcctgtcacccagttaaaggccccgcctgggacgttcttcccccaaaagaagacccctccaccggtcacccaccaagcaacacagggactgaagaacaccaaggctggctggcagtttggggtgtgggagcagtactaaggcgcgtgacttttggggcttcaaccccagaggcccgagaggctcttgcatctgtacgcagcagccccggggcatcggcggtgaatggagatggtgatctagcgggcctaccatcctccaattaa

SEQ ID NO: 120425 - DNA, 495 bp, Homo sapiens; identical to SEQ ID NO: 117054

SEQ ID NO: 120426 - DNA, 948 bp, Homo sapiens
atgaagaggtacccaggagcatgtcaaaaaagaagaagaggaagaggaggaagagtaggaagagagaagaagaagaagaagaagaagaagaagaagaagaagaagaagaagaagaagaagaagaaagaaggagaaggggaaggggaagaggaagaggaagaggaagagggaaaagaaaaaatagatccctctcatcttgagttgaaaatggtcagaaacaagaacacaatgtatgaagtatgcttaatgccaattggaataaaacctcaggtaaatgtaggtgccatgcaatgtattcttgtggcaccttatatttcacctattgtgggagtaatcaatttcaacgaccaggttaattctcaaggaggagggagtaaaatggaagacggaatacatttccgagggaaggttatgttacatgttgggaaacgtaagcaaagagtaaagaaaggtcttgggtatgcctttatcagcagcatgaaaacgaacgaatacactaaattggtaccagtagagtggggtcttgctgaaaagatacccaaaaatgtggaagcgactttggaactgggtaacaggcggagcaaaaagactggtggcattttgcccctgctcctgtggaactttgaacttgagagagatgagttaggttacctggtggaagaaatttctaagcagccaagcattcaacagatgacttgggtgctgttaaaggcatttagatttatacaggaagccgaacctaaaagttcagaaaacttgaacccagacaatgtgatagaaaagaaaaacccattttctgaggggaaattcatgctggctgcagaaatttgcataagtaatgaggagtggaatggcaatgttaatccccaggactatgggggaaaatggctccagggcatggcagaggtcttcacagcaaccccttcaatcacaggcctggaggcctag

SEQ ID NO: 120427 - DNA, 804 bp, Homo sapiens
atgggcaaggacttcatgtctaatacaccccaagcaatggcaacaaaagccaaaattgacaaatgggatctaattgaactaaagagcttctgcacagcaaaagaaactaccatcagagtgaacaggcaacctacagaatgggagaaaatttttacaatccaccaatctgacaaagggctaatacccagaatctgcaaagaacccaaacaaatttacaaggaaaaagcaaacaaccccatcaaaaagtgggttaagaatatgaacagacacttctcagaagaagacatttatgcagccaacaggcacatgagaaaatgctcatcatcactggtcatcagagaaatgcaaatcaaaaccacaatgagataccatctgatgccagttagaagggacatggatgaagctggaaaccatcattctcagcaaactatcacaaggacagaaagccaaacaccgcatgttctcactcaaaggtgggaattgaacaatgagaacacttggacacagggcagagaacatcacacactggggcctgtcaagggtcggaggctggggaagaattcatctagcctatctctggccatgggtaggagtttcaagtttcaggagaaaaaaacaaaaacagaaatcaaaacagccttctctgcctcaagaacagaagcgcaggtcacagcaggaaaacaactctacagagaactgccttctctgccattgtcttcaggaagaaatctgtgtcaggctattggcagtgtaccaccaatggtttcacttcttttggcccagaattacattgtgtgtatttaa

SEQ ID NO: 120428 - DNA, 884 bp, Homo sapiens
ttttgttgtaaaactgtaaaataagcaaggccaaatatttattgtttggcaacacatagagatatatagagttttacatgtaaaattacctataaatgtcaacagcacattgacatggtaaatacgaagttcaaaatgggatatccctggcatggaatagagagctgggatggcggagggccacacgggaagctgcaatagaatttttgatgtttgcttcattctctaggtgatgtgttcactggtgttcatcttatcatgtttttaaattgacaagcatgttacatatacaccacagaatactatgcagccataaaaaatgatgagttcatgtcctttgtagggacatggatgaagctggaaaccatcattctcagcaaactgtcacaaggacaaaaaaccaaacaccgcatgttctcactcataggtgggagttgaacaatgagaacacatggacacaggaaggggaacatcacacaccggagactgttgtgggggggaatggcaaaaaccaagtggagcagagtcctcagtccctgatcatcctggagggaaagaactgcactcttcaatgcaattatacagtgagccccttcagcaacttaaggtggtataagcaagatactgggagaggtcctgtttccctgacaatcatgactttcagtgagaacacaaagtcgaacggaagatatacagcaactctggatgcagacacaaagcaaagctctctgcacatcacagcctcccagctcagcgattcagcctcctacatctgtgtgaggacactggaaggccaggggatcctggcagacacagtcactctcaggcagcagaacaactgtgccaggcttttcaaccatcagtgttctagaaaagagacttag

SEQ ID NO: 120429 - DNA, 591 bp, Homo sapiens
atgattattattaaaactcaaaaactaacagatgctgccaaggttgtggagaaaaagaaacacttatacactgttgttgggaggccaaatggttacaaataccaagaagaagaaggagaagaagaggaagaagaggaggaagaggaagaagaagaagaagaagaagaagaagaagaagaagaagaagaagaagaagaagaagaagaagaagaagaagaagaaaaagaagaagaggaagaagaggaagaagcagaagaaaagaagaagaagaaggaggaggaggaggagaggaagaagaaggaggaggaggagggggaaggggaagaaacagggaacaaggaattacagagtagagacagggatgatctaggtggagaagaaaaagtccagccagtttggccttatggaggacaattctcatatgaaaatctcaagccatgctctttgcaaattgtctgcacatttgtcatagctcacattctccctctgccaatcctgtttcttcccattcttttcacaggtgtggatcctgataaataccttaagactcacattctgtattattttctgcttccggagtacccatcataa

SEQ ID NO: 120430 - DNA, 5339 bp, Homo sapiens
atgaacattgatgcaaaaatcctcaataaaatactggcaaacccaatccagcagcacatcaaaaagcttatccatcatgatcaagtgggcttcatccctgggatgcaaggctgcttcaatatatgcaaatcaataaatgtaatccagcatataaacagaaccaaagacaaaaaccacatgattatctcaatagatgcagaaaaggcctttgacaaaattcaacaacgcttcatgctaaaaactctcgataaattaggtattgatgggacgtatctcaaaataataagagctatctatgacaaacccacagccaatatcatactgaatgggcaaaaactggaagcattccctttgaaaactggcacacgacagggatgccctctctcaccactcctattcagcatagtgttggaagttctggcccgggcaatcaggcaggagaaggaaataaagggtattcaattaggaaaagaggaagtcaaattgtccctatttgcagatgacatgattgtatatctagaaaaccccattgtctcagcccaaaatctccttaagctgataagcaacttcagcaaagtctcaggatacaaaataaatgtacaacaatcacaagcattcttatacaccaataacagacaaacacagagcaaaatcatgagtgaactcccattcacaattgcttcaaagagaataaaatacctaggaatccaacttacaagggacgtaaaggacctcttcaaggagaactacaaaccactgctcaaggaaataaaagaggatacaaacaaatggaagaacattccatgctcatgggtaggaagaatcaatatcgtgaaaatggccatactgcccaagcttccacaacctccaccctcaggcatataaggctataccgcaccctgcttcccttgggaaaacctgatataatcaggacaataacaatgctggtaaactcttcaaagccaacaggaacccagctttgggttgtcagcagccagtatgttcaaagacagatggcttcagattctaagggaatgaacacctgtagtatggtcaaagccaggaaatattcaaagcctctgctggtgacacccaggcaaacagcatctggagtggacctccagcaaactccaacagatcttcagctgagggtcccgactgttagaaggaaaactgacaaacagaaaggaaatccacaccaaaaccccatccatatgtcaccatcatcaaaaaccaaaggacacagttcctcaccagcaacggaacaaagctggatggataatgactttgacgagctgagagaagaaggcttcagacgatcaaattactctgagctatgggaggacattcaaaccaaaggcaaagttgaaaactttgaaaaaaatttagaagaatgtataactagaataaccaatacagagaagtgcttaaaggagctgatggagctgaaaaccaaggctcgagaactacgtgaagaatgcagaagcctcaggagccgatgcaatcaactggaagaaagggtatcagtgatggaagatgaaatgaataaaatgaaggacatggatgaagctggaaaccatcattctcagcaaactatcacaaggacaaaaaaccaaacactgcatgttctcacttataggtgggaattgaacaatgagaacacttggacacaggaaggggaacatcacacactggggcctgtcgtggggtgggaggacgtgggagggatagcattaggagaaacacctaagggcactggcagagttctacttggtgctggccacactgagttccaatgcaaagtcccagaatggctgagctctccttcccccaagcatacagattctctctccgcaccatgtggccactgcctggagatgagggaagggtggtgttggcatttcaagactgtctttgctatcctcttcagtgcctctgtcagcgatatgaagttaaaaccagttgttgaaagtgatacactaacaattgagtctggaccacttgctagtgaagataaaccactttcgtgtggtacaaactctggaaaagaacaagaaataaatgagactctgcctatcacaactgtagctcagagttcagttctacttcatcctcaagaagcagcagccaggattagaatgtcagcaaggcagaaacagataatggaaatagaagagcagaagcaaaagcaattggaattacttgaacaaattgaacagcagaaattaagattagaaactgactgcttcagggctcagctggaagaagaaaaaagaaaaaaaactcaaccgactggggtaggatgcagaaaatctcatcactacataaatcatttgcattcttttagttctctgcctgttaaagttgagtcaggaaaaattcaagaacccttttcagccatgagcaaaagtacagtttccacaagccattctataatcagccaaatgcatgataggcctttgctgccgtcagagaatatcacagcccagcaaggtaatatgaaggccctccaagaacagttagacctacagaagaaagttcttcaggcaactcaggaagctcaggaacagttgcttttgtgcaaacagaaagaagtggaacagcaaacgggcctctcggtattccttcccttggtaactccagattcatctgctttattgccttctgccaaagcagatttggggagaatccaggaatcttcaccaaccaagaataatattgcagtttcctcagaccatcatgtgatctcacaacttcaggataagcgtttgagtctttcacagcctatcctatcacagcaaaataattttaaatttctccaagagcagttgaatattcagaaggatagccttcaggctaggcgagaagcccaggaagtattgtatgtacataaacagagtgaattggatagaagagtatgttccgaacaggctgagccctctttcccatttcaggtagctcagcatacatttacttcactaccatctgctgatacaaaatctggaaaaatacaggagcaacattcatctaagagcgagaaaggacttgtttcatgccaatctgacatccccatatctcaggatgggtctttgagtttcctacagcagttcctacctctacatgatagtttgaagttgctccaagaacagttgactaaacagagggatactcttcaggctaggcatgaagctcaggtggaattacttttacatagacaaagagatttgggggacagtaagtctgggctggtgagctcttcatcctcaccagtggttgttcagcattcagttgcttcacaagcttctgctaaagctgagcctaggagaattcaggagctttatttatctgagaaggagaatgtggatgaatctgagagattccaggaatgtatatcaatcaagagtgacagtaccattcccttaagccatcctaagatcccaagatgtcaggaaagacttttgagagtttcacaacatatgctacctctacaagataatttggaggaacaccaagcatggctagacactgagaaagaagcctttcatttcagccagaaaacccaagaaaatacatcttctgaacaaactggttcatcttcattcataccccagttggtacagctttcatttacttcgttagcttcagctgagtctggcacaatcctggaacctctttttacagagagtgaaagtaaaattttttcaagccaccttcagatcccacaattgcaggataggcttttgaggatatcgcaacttatccagcctcaacaagataatttgaaggcacttcaagaacagttagctacacagagagaagccatcattctagctagacaagaagctcgggaagaattacttttacatcagagtgaatgggagggaagaatatctcccgagcaggttgacacctcttccttacccctagtaccacagcattcattcgcctcattacctcttaatgaatctgaaagaaaccaagaaccatgttcaattaacagtgataatatagtatcctcaggtcactcagagataccaacattgcctgatgggctgttgggtttatcacatcttgttttacctcaacaagataatttgattgcacttgaagaacacttgcatgcacagacagatttccttccttctattgagaaaacccagaaagaattggttttgtcaaaaccatgtaaatttgaggaaaaggtatcttctgagcattttatccagtctcaccatggtgatttgcaggcacttcaacagcagttagatacacagaagaaagccattcgatctatacaggaagtccaagaagaattgcttttgcaaagattaagtgaattggagaaaagggtatcatctgaacaagtttgctcctcttcatttgtatcccagcaagataacttgggacttcagaaacagttggatctacaaagagaagttctgcattatagccagaaagcccaggaaaaattgcttgtacagagacaaacagcattgcagcagcagatacagaaacatgaagagactttgaaggatttctttaaagacagtcagataagtaagcccacagttgaaaatgatttaaaaacccagaagatggggcagctcagagactggtttcctaatacacaagacctagcaggaaatgatcaagaaaatattaggcatgcagataggaacaactctgatgataatcatttggcttcagaagatactagtgccaagcaaagtgggagacatgagacatcaatcaacacatgtacgataagcattggtttggttcggaaaagtttcctctttgtggcaaagctgaactctggacttagcaggcttccctatggtcagtgtgcatttagagtctgccgaagatcatgtactctccactatgtcaaaactgcccatattttgtacaagttaattgcagaggttacaaggggatttggccacctccttaactttttcccacagcacatggcaagcacaaccccccagctggattcagggcacaaaggaaaagattgggagggaagcagagggagatgtgacactgacaaaaaagaaggcaaggtggccacagaggcagagactagagtcacgcagctgcaagtcaaggaatgccagcagccaccagggctgaagcggcaaggaacgggttctcccctggagcctctggagggaggctggccctgccaacaccttgatctgcaacttctttccagcttccagaactgtgagagaagaagttctgttgttctaagccatcaacttgtggtaatttggtatagcagccataggaaaccctatgcaaacagtgaactaaataatgagcggtatttgtag

SEQ ID NO: 120431 - DNA, 3387 bp, Homo sapiens
ctaagggtttccagcagaaggggccatcgtcagaggctctggttgcatgattgtttggagtttgatggcccttttgctggcatgttgggtttttgggttccctttccctgaggccaatcctaagccaaccagtgtaagggctgggaaattaactctttccagtttggaggatgcatccgagggacgtgtcccatagtacagagacacagtcaccatagtgacacaggatttttcttggtcactttgccagtcggagacctctggttggtaacacccctgtccgggttttgctgggcctgggttcatcacaggagatgccccacacttggcctgccagttcatgcccggtctgcagtttgtcatggatcccacggccactgtgactgtgtattcaacctcgccatctggaatggatggcggtgtgttaaccactctttcagccccttgccccagtttggcctgtggctgcaggcctggctcagccccattgctgctttctgttgtgtggggcagctgccctctatgagtgagaacatgcggtgtttggtttttttgtccttgtgataagtttgctgagaatgatggtttccagcttcatccacgtcccgacagaggacataaactcatcatttttttatggcttgcatagtattccatggtggtatatggtgccacattttcttaatccagtctatccattggatgggacattttggggttgggttccaagtctttgctattgtgtgaatagtgccgcagtaaacataccgtgtgtatgtgtctttatagcagcatgatttataatcctttgggtatacacccagtatatacccagtaatgggggtggctgggtcaaatggtatttctagttctagatccctgaggaatcgccacactgacttcctcaatggttgaactagtttacagtcccaccaacagtgtaaaagtgttcctatatctccacatcctctccagcacctgttgtttcctgactttttaatgattgccattctaactggtgtgagatggtatctcattgtggttttgatttgtgtttctctgatggccagtgatgatgagcattttctcatgtgttttttggctgcataaatgtcttcttttgagaagtgtctgttcatatcctttgcccactttttgatggggttgtttgtctttttcttgtaaatttgtttgagttcattgtagattctggatattaccccttggtcagatgagtaggttgcaaaaattttctcccattttgtaggttgcctgttcactctgatggtagtttcttttgccgtgcagaagctcttgagtttaattagatcccatttgtcaattttggcctttgttgccattgcttttggtgttttagacatgaagtccttgcctatgcctatgtcctgaatggtattgcctaggttttcttctagggtttttatggttttaggtctaacacgtaagtctttaatccatcttgaattaatttttgtataaggtgtaaggcaggtatccagtttcagctttctacatatggctagccagttttcccagcaccatttattaaatagggaatcctttccccattgcttgtttttgtcaggtttgtcaaagatcagatagttgtagatatgtggcattatttctgagggctctgttctgttccattgatctatatctctgttttggtaccagtaccatgatgttttggttactgtagccttgtagtatagtttgaagtcaggtagcgtgatgcctccagttttgttcttttggcttagggatgacttggcaatgagggctctcttttggttccatatgaactttaaagtagttttttccaattctgtgaagaaagtcattggtagcttgatggggatggcattgaatctgtaaattaccttgggcagtatggccattttcacgagattgattcttcctcctacccatgagcatggaatgttcttccatttctttgtatcctcttttatttcattgagcagtagtttgtagttctccttgaagaggtccttcacatcccttgtaagttggattcctaggtattttattctctttgaagcaattgtgaatgggagttcactcatgatttggctctctgtttgcctgttattggtgtataagaatgcttgtgacttttgtacattgattttgtatcctgagactttgctgaagttgcttatcagcttaaggagattttggactgagacaatggggttttctagatatacaatcatgtcatctgcaaacagggacaatttgacttcctcttttcctaattgaataccctttatttccttctcctgcttgattgccttggccagaacttccaacactatgttgaataggagtggtgatttttgcaatctactcatctgacaaagggctaatatccagaatctacaatgaactcaaacaaatttacaagaaaaaaacaacccaatcaacgggctaaggatatgaaaagacccttctcaaaagaagacattgatgcagccaacaaacacatgaaaaaatgctcatcatcactggccatcagagaaatgcaaatcaaaaccacaatgagataccatttcacaccagttagaatggcgatcattaaaaagtcagggaacaacaggtgctggagaggatgtggagaaataggaacacttttacactgttggtgggactgtaaactcattcaaccattgtggaagtcaatgtggcgattcctcaaggatctagaactagaaataccatttgacccagccatcccattactgggtatatacccaaaggattataaatcatgctgctataaagacacatgcacacgtatgtttattgtggcactactcacaatagcaaagacttggaaccaagccatatgtccaacaatgatagactggattaagaaaatgtggcacatatacagcatggaatactatgcagccataaaaaatgatgagttcatgtcctttgtagggacatggatgaagctggaaaccatcattttcagcaaactatcgcaaggacagaaaaaccaaacaccgcatgttctcactcacaggtattttagtgcaaaatcagaagagtctgcatcagaggctacagtcatactatacatactcgctgttgaaagtgaatggtccttttggagactcctgggccatatatatgaatcctattcctaaaaccagtcttgaggaagaacagaacctcagggctactgacagcgcctcctctctcattgctcttggaacactaaatagcaatgaaaatggaagacgcacagctacacataactggcagagatccttacaccttatacaaaaattaattcaagatggattaaagacttacatgttagacctaaaaccataa

SEQ ID NO: 120432 - DNA, 2245 bp, Homo sapiens
ggagcaagaggtggttggggggggaccatggctgacgttttcccgggcaacgactccacggcgtctcaggacgtggccaaccgcttcgcccgcaaaggggcgctgaggcagaagaacgtgcacgaggtgaaggaccacaaattcatcgcgcgcttcttcaagcagcccaccttctgcagccactgcaccgacttcatctgggggtttgggaaacaaggcttccagtgccaagtttgctgttttgtggtccacaagaggtgccatgaatttgttactttttcttgtccgggtgcggataagggacccgacactgatgaccccaggagcaagcacaagttcaaaatccacacttacggaagccccaccttctgcgatcactgtgggtcactgctctatggacttatccatcaagggatgaaatgtgacacctgcgatatgaacgttcacaagcaatgcgtcatcaatgtccccagcctctgcggaatggatcacactgagaagagggggcggatttacctaaaggctgaggttgctgatgaaaagctccatgtcacagtacgagatgcaaaaaatctaatccctatggatccaaacgggctttcagatccttatgtgaagctgaaacttattcctgatcccaagaatgaaagcaagcaaaaaaccaaaaccatccgctccacactaaatccgcagtggaatgagtcctttacattcaaattgaaaccttcagacaaagaccgacgactgtctgtagaaatctgggactgggatcgaacaacaaggaatgacttcatgggatccctttcctttggagtttcggagctgatgaagatgccggccagtggatggtacaagttgcttaaccaagaagaaggtgagtactacaacgtacccattccggaaggggacgaggaaggaaacatggaactcaggcagaaattcgagaaagccaaacttggccctgctggcaacaaagtcatcagtccctctgaagacaggaaacaaccttccaacaaccttgaccgagtgaaactcacggacttcaatttcctcatggtgttgggaaaggggagttttggaaaggtgatgcttgccgacaggaagggcacagaagaactgtatgcaatcaaaatcctgaagaaggatgtggtgattcaggatgatgacgtggagtgcaccatggtagaaaagcgagtcttggccctgcttgacaaacccccgttcttgacgcagctgcactcctgcttccagacagtggatcggctgtacttcgtcatggaatatgtcaacggtggggacctcatgtaccacattcagcaagtaggaaaatttaaggaaccacaagcagtattctatgcggcagagatttccatcggattgttctttcttcataaaagaggaatcatttatagggatctgaagttagataacgtcatgttggattcagaaggacatatcaaaattgctgactttgggatgtgcaaggaacacatgatggatggagtcacgaccaggaccttctgtgggactccagattatatcgccccagagataatcgcttatcagccgtatggaaaatctgtggactggtgggcctatggcgtcctgttgtatgaaatgcttgccgggcagcctccatttgatggtgaagatgaagacgagctatttcagtctatcatggagcacaacgtttcctatccaaaatccttgtccaaggaggctgtttctatctgcaaaggactgatgaccaaacacccagccaagcggctgggctgtgggcctgagggggagagggacgtgagagagcatgccttcttccggaggatcgactgggaaaaactggagaacagggagatccagccaccattcaagcccaaagtgtgtggcaaaggagcagagaactttgacaagttcttcacacgaggacagcccgtcttaacaccacctgatcagctggttattgctaacatagaccagtctgattttgaagggttctcgtatgtcaacccccagtttgtgcaccccatcttacagagtgcagtatgaaactcaccagcgagaacaaacacctccccagcccccagccctccccgcagtggaagtgaatccttaaccctaaaattttaaggccacggcttgtgtctgattccatatggaggcctgaaaattgtagggttattagtccaaatgtgatcaactgttcagggtctctctcttacaaccaagaacattatcttagtggaag

SEQ ID NO: 120433 - DNA, 588 bp, Homo sapiens
atggcagagctgctgctccagcctttgctgcagcaagactgtgatggcagctgctccatcccggtgggtccccgaatgcaaccagcagaggcctctctgaccctcaacgtacagatgaaagccacacgtccccctgatggcacagaaaggaacatctcaagattaaacaagaggattctgtacaagcgctggtccttgctctgcctttctgacgctaagctcaaggttacgcagccaaagggggagcattacggaatttcccatgaacgctttcctcctgtgccatcccgccagagtgaccgggaacctccatttgatggtgaagatgaagacgagctatttcagtctatcatggagcacaacgtttcctatccaaaatccttgtccaaggaggctgtttctgtctgcaaaggactgatgaccaaacacccagccaagcggctgggctgtgggcctgagggggagagggacgtgagagagcatgccttcttccggaggatcgactgggaaaaactggagaacagggagatccagccaccattcaagcccaaagtgctggacagctgcagagcacccccgcacgactag

SEQ ID NO: 120434 - DNA, 2436 bp, Homo sapiens
atggacaatcatttaaaccccagcagcagtgttctggaatcctatgtgagagagaaacattcagacactcgtagcagtgttctggaatcctatgtgagggacaaacactcagaacccagctgcagtgttctggaacactatgttagggacaaacattcagaccacagcaggattgttctggaattctatgtgagggacacacattcagaaaacagcaggagtgttttggaatccaacttggaggacaaatattcagaccctcgtagcagtgttctggaatcctatgtgaggagcaaacattcacataatcgtagcagtgttctggaatcctatgtgagggacaaacattcagaacttcataacagtgttcttaaatccaatgtgagggacaaacattcagactgtcgtagcggtgttctggaatcctatgtgagagacaaaccctcagaacacagcaagagtgttttggaatcctatgtgagagacaaatattcagatcctcatagcagtgttctggaatcctatgttagggacaaacattcagactatcgtagcagtgttctggaatcctattgctttggaatcctatgtgagcacaaacattcggaccccagcagcagtgttctggaatcctatttgaggcacaaacattcagaccctcgtagcagtgttctggaatgctatgtgatggagatccattcatactacagcagcagagttctggaatcttgtgtgagggacagacattcagaccacagccggagtgttatggaatcctatattagggacaaacattcagacacttgtagcagttttctgaaaccctatgtcagagagaaacattcggacctcagcagcagcgttctagaatcctatatgaggcacattcattcagaccctcgttgcagtgatctggaatcctatgtgagggacaaacactcagaacacagcaggagtgttttggaatcccctgtgaggaacaaacattcagaccctcataacaatgttctggaatcctatgcgagggaccaacattcagacaatcgtagaagtgttctggaatcctatgtgagggacaaacattcagaaaaccgtagcagtgttctggaatcctatgtgagggacaaacattcaaacaagagcgggagtgttctggaatcctatgttaggaacgacatacatatagactccagcagcattgttctggaatcctatgtgagggacaaacattcacaccccagcagcagcgttctggaatcctatatgagggacaatcattcagatgcttgtagcagtgttctggaattctgtgtgagggacaaactttcagatgctcgtagcagtgttctggaactctgtgtgagggacaaactttcagaccctcgtagcagtgttctggaatcctgtgtgagggacaaactttcagatgctcgtagcagtgttctggaattctgtgtgaggaacaaaccttcagaccctcttagcagtgttctggaatcatatgtgtcggacaaacatttagacctcagcagcactgttctagaatcctatgtgaggagcaatcattcagacactcgcagcggtgttcaggaatccgatgtgagggacaaacactcagaacccagcagcagtgttctggaaccctatttgagggacaaacagtcagatcacagctgtattgttctgaaatcctatgtgaggaacaaacattcagacattcgtaacggtgttcttgaatcctacgtgagggacaaacattcagacgccagcagcattgttttggaatcctatcgggcccgagagggccctgagttggaaccggcgatccatggtaaccggagcccaacccagggactgatgggaaggcacttttgtccgtgggggacccaggccccggttctccggggcgctttttttttttatttcctgccacgggggctttctgcccactttgaggtatccctagtgggcccgagacgctccttgtgttcaaccagtgacgccagggtccccaggcccagagcagaggctgatgggaaggcacattcgtccctgggggacccagtctcggcttctcgacggctcgggtacactcaagaaagtaaatggaaatggcacatacaagaccaggctaagccggaaccaaaacaggtatcatttttaaatgaggatgtgcaaaacttgccagctcagcaaaccactgagcaagtcctgcagataaggaaggaaacctcccctgcccaatggggcaaatcctttaaagaaccaagcccagacgatcagagacatgcttggtttgctgatgattccaccaaatatattgatgggacccgatgctgggaggccgtggcttataatcctgttaaaaacataagcatttctgaggaagggaggggtgttagcagccagctggctgaactagaatctgttctctga

SEQ ID NO: 120435 - DNA, 457 bp, Homo sapiens
tttcgtcctccttgtcctttcctgctgctgactctattgctgggactcacaggagtggcaggtgaggacgagctacaggtgattcagcctgaaaagtccgtatcagttgcagctggagagtcggccactctgcgctgtgctatgacgtccctgatccctttggggcccatcatgtggtttaggggagctggggcaggccgggaattaatctacaatcagaaagaaggccacttcccacgggtaacaactgtttcagaactcacaaagagaaacaacctggacttttccatcagcatcagtaacatcaccccagcagacgccggcacctactactgtgtgaagttccggaaagggagccctgacgacgtggagtttaagtctggagcaggcactgagctgtctgtgcgcgaagcagcgctggctcctactgctccactcctcgtagctctcctcctgg

SEQ ID NO: 120436 - DNA, 425 bp, Homo sapiens
cctgcttctggtgtgcatccagtcaatgaacgtcattgataaacacttgaggaaacacagaggatcacgagtggcgggtgaggaggagctgcaggtgattcagcctgacaagtccgtgttggttgcagctggagagacagccactctgcgctgcactgcgacctctctgatccctgtggggcccatccagtggttcagaggagctggaccaggccgggaattaatctacaatcaaaaagaaggccacttcccccgggtaacaactgtttcagacctcacaaagagaaacaacatggacttttccatccgcatcggtaacatcaccccagcagatgccggcacctactactgtgtgaagttccggaaagggagccccgatgacgtggagtttaagtctggagcaggcactgagctgtctgtgcgcg

SEQ ID NO: 120437 - DNA, 5158 bp, Homo sapiens
tccttcttccaaaatgcttccagcttcccctgtgatcttacttgaaagcacttatcgttagtgattgtcatctgagtcatgtctcctgattatcgatggtccttttggcgagggccacacctcagcacacagtgagcttcacctgcgagtcccacggcttctcacccagagacatcaccctgaaatggttcaaaaatgggaatgagctctcagacttccagaccaacgtggaccccgcaggagacagtgtgtcctacagcatccacagcacagccaaggtggtgctgacccgcgaggacgttcactctcaagtcatctgcgaggtggctggagccctccctggatctgtctgtgccacaaggtcagagcttctgccctgtgctgtttcagttccacccaccttggaggttactcaacagcccgtgagggcagagaaccaggtgaatgtcacctgccaggtgaggaagttctacccccagagactacagctgacctggttggagaatggaaacgtgtccaggacagaaacggcctcaacccttacagaaaacaaggatggtacctacaactggatgagctggctcctggtgaatgtatctgcccacagggatgatgtgaagctcacctgccaggtggagcatgacgggcagccagcggtcagactgagagaaggggctggtgagaagcttccccagactgagctccaaacacctcccctcccaggacatcttcctgcccacaggctcctgttgctcctttgcagagtccttgattctccagagcagtcttcattcatggtcctgagcagaggccatgggatggggctctggggagtgactcatgacacctccctaggattggcatgaggtaagagtctctgggacatagagcaggctctatgtcagtcaacctctctccagtactgtccaaggctcccaggtctgggaaccccaagcacagacgtcagcaacttcctagcagtggcaactgtgtccacttcctctttcacaatggaagatgcacagttcacaatagggttggcactcctatgagaatctaatgctgccactgatctgacaggaggcagaactcaggcgataacgctcactcactggctgctcacctccggctgtgcggcccagttcataacacacattaaagagatgtttgattttctctgttgcccagtcattctcatatcacatgaatcttctttgaagaggtgttaccaatgttatatcatcttgtgctcttggagaaaggtggatgtcattattgatattggaacaggatcctcgcttcaggatggagagccatggcagcactccaaaaggcaacacaaagctgtacatagcatagcagcttataagaaggaggaagattaattcttgaggaaacacagagaatcaggtaaggatgaagaaatgactgctttgtgctcctttccaggagtggcaggtgaggacgagctacaggtgattcagcctgaaaagtccgtatcagttgcagctggagagtcggccactctgcgctgtgctatgacgtccctgatccctgtggggcccatcatgtggtttagaggagctggagcaggccgggaattaatctacaatcagaaagaaggccacttcccacgggtaacaactgtttcagaactcacaaagagaaacaacctggacttttccatcagcatcagtaacatcaccccagcagacgccggcacctactactgtgtgaagttccggaaagggagccctgacgacgtggagtttaagtctggagcaggcactgagctgtctgtgcgcgccaaaccctctgcccccgtggtatcgggccctgcggtgagggccacacctgagcacacagtgagcttcacctgcgagtcccatggcttctctcccagagacatcaccctgaaatggttcaaaaatgggaatgagctctcagacttccagaccaacgtggaccccgcaggagacagtgtgtcctacagcatccacagcacagccagggtggtgctgacccgtggggacgttcactctcaagtcatctgcgagatagcccacatcaccttgcagggggaccctcttcgtgggactgccaacttgtctgaggccatccgagttccacccaccttggaggttacttcacagcccattgagggcagagaaccaggcaaacgttacctggcaggtgagcaatttctacccccggggactacagctgacctggttggagaatggaaatgtgtcccggacagaaacagcttcgaccctcatagagaacaaggatggcacctacaactggatgagctggctcctggtgaacacctgtgcccacagggacgatgtggtgctcacctgtcaggtggagcatgatgggcagcaagcagtcagcaaaagctatgccctggagatctcagcacaccagaaggagcacggctcagatatcacccatgaaccagcgctggctcctactgctccactcctcgtagctctcctcctgggccccaagctgctactggtggttggtgtctctgccatctacatctgctggaaacagaaggcctgactgaccctcagtctctgctgcctcctcctttcttgagaagctcagcctgagagaaggagctggcgagaaccttccccacactcagctccaaacgcctcctctcccaggtcatctgcctgcccacacgctcctgttccaccttcacaagaccatgatgccccaaagcagtgtctctattcacggtcctgagcaggggccatgggattgggctctgggcactgactcatggcacctccctagaaggtgagaaacactccaaatctaaacacaccaggacttctcccatccgtcgccttgggactggccataaaccacagactctctccaggctctcaagagttatcctgtcttctggattcctgcctaccccaactcccccagccttgttgaggttctctactgcctcctgaatacacatgaacccctataccaattttaagaaaaaaatgattctctttcctctttgtccaagcatcctatccctcaaacccaaaaagaaagaagctctcccttctctctctgtgatggagacagtatttcttctagtatcctgcagccttcccagtcctgctgcttgtggtagaaattgctgccacagcccaacattgaggagccctcgatgactgccctttacaactcatattcagttctgcctccaaaatgcatgtgtccacttacatgagatggtaaatgtttaacaatggactttctgaaagggaaaaaccaaaagctgttttgcagtgcttgccaatttctctagtgtaataactcccaacctgaccaatttcagcactgccaacagttaaacaaccagattcgaagattcctgaaatttaacaattggttttcagggcccagtccaagcctgctgctggaaacctcagagttaaatccctattctccacacctctcacctccaccacccctccctgtcccagccagcatcatctctttggggaccactcctctggctttcatttttcagccacagtgattctttggaaaagtcaaatcatatcacttctctgcttcttccccaacacagctgcatggctcccgctctccctccttcaagtctctgctcaatgtcacttcattaaaggcggccttctataaactaccttgtataaaatattatttattttctctatcccggcattctaatttctcttatcctaattaatttttctttagcccttattttgatgagtattatgccgaatacaggcagccctcacttttcatggccagtgcaagattgcaaaaatgactgtgcaacctgaaacccaggaaagcagtctccatagtcaatcagaaaaacaatgatcattctgtgacctttaccattttttgtcaaaatattagaaactctcacactctcagttacaaatgtagaggacaatgaaaatataatgaaataaatatttatttgtgcactacaattcaaagcattagaaacattgagagttcaagtgctgtttctttgtaaaaatgtatccagatgaggttggaagagtgcttgcctttttttgtatatttctaatatggagtgatatagtttggctctgtgtctccatccaaatctcatcttaaattgtaatctgcatgtgttgtgggaatgggacctaggtaggaggtgactgaatacatgggggcggacttcccccttgctgttcttgtgatagtgagttctcataagatctcagtgagttctcatgagatctggttttttgaaagtgtgtggcaagtcccccttcgctctctctctctctctccctcctgccaccatgtgaagaaggtgcctgcttccttttctccttccaccatggttgtaagtttcctgaggcctcccagtcatgcttcctgttaagcctgtggaactgtgagtccaattaaacctcttttattcataaaatatccagtttctggtagttctttatagcagtgtgagaatgggctaatacacggagcaagcattgtttcttttcatttgtttattttatttttatttttttgagatggagtttcacccttattgcccaggctggagtgcaatgtcgtgatcttggctcactgcaacccccgcctccagggttcaagtgattctcctgcctcagcctcctgagtagctgggattacaggcatgtaccaccacacccagctaattttgtatttttagtagagatggggtttctccatgttgatcagactagtcttgaactcccgacctcaggtgatccacctgtcttggcctcccaaagtgctgggattacaggcatgagccaccatgcctagccagcaagcatcatttctattataccttggtgttttgccatctttctaagtttggactagcttccaacatcttatcccttgaattttcaatattgtggaatcactccagaagatcctttcatgtgaagttttttgctggcatttcaacctttgggacatcttcagcccttttattaccactcctctcccatttgtggcagtttgcgtttactacctccctctggctgcctatctgaagttcctgcatcagggtctacattgccacagtcaactatttgtacttctagaattc

SEQ ID NO: 120438 - DNA, 2981 bp, Homo sapiens
atggagcccgccggcccggcccccggccgcctcgggccggtgctctgcctgctgctcgccgcgtcctgcgcctggtcagcttccaggcagctccctgcagttcaggtgctccgcggggatgttacctgtggctctgaccatgtctttctgttggcctacatcaaacacctggctgtcgccggcaggcgggctctgaaggctactgtgcatgttcaccaaaggacccttctccgaccaggaggctgtggttcagtccctggcaaacgagcagtgacgctgattagcaagtgctccgatgggcagcctgcctttcctggggcaccggctgggaacaccaacacctttcttgtctgcagttgtggattcccggacctgcaaagcagtagggggcctgagagagccctctgtgctttcatccagtgccttatggtgcggccagaagaacagagagaaaaaaactggccgggcccacgcgggagatccatggcaaggcccggctggaacgccaagcctcctgtggtccaggccaaggcttttaaaaactgggctgtgctggaactttccactgtttcagccagaaatctgacaggatcccgaattccccgggaaaacactaaagtaatactaataggaaccatctgggttctctgcttcctgggctcagcacttggtgtgtgtgaccctggtggtactcacagccacctggcgatgcacgtcgttatcttcggacccgttggatctaacaaccctagtattgttatcatcatcatcatcatcagacccattctacagataaagagccagaggtccagagtgggcgagacattccctggagtctcatgggtagcagagttggaatccaaatcaaaacatactttcagccagtgccaggcactgctccaaccctggggaagaaaactcagttcctgctctcaaaggacttataacctgcttctggtgtgcatccagtcaatgaacgtcattgataaacacttgaggaaacacagaggatcacgagtggcgggtgaggaggagctgcaggtgattcagcctgacaagtccgtgttggttgcagctggagagacagccactctgcgctgcactgcgacctctctgatccctgtggggcccatccagtggttcagaggagctggaccaggccgggaattaatctacaatcaaaaagaaggccacttcccccgggtaacaactgtttcagacctcacaaagagaaacaacatggacttttccatccgcatcggtaacatcaccccagcagatgccggcacctactactgtgtgaagttccggaaagggagccccgatgacgtggagtttaagtctggagcaggcactgagctgtctgtgcgcgccaaaccctctgcccccgtggtatcgggccctgcggcgagggccacacctcagcacacagtgagcttcacctgcgagtcccacggcttctcacccagagacatcaccctgaaatggttcaaaaatgggaatgagctctcagacttccagaccaacgtggaccccgtaggaggagagcgtgtcctacagcatccacaagcacagccaaggtggtgctgaacccgcgaggacgtcaactctcagtcattctggtaggggcccacagtcaccttgcagggggaccctcttcgtgggactgccaacttgtctgagaccatccgagttccacccaccttggaggttattcaacagcccgtgagggcagagaaccaggtgaatgtcacctgccaggtgaggaagttctacccccagagactacagctgacctggttggagaatggaaacgtgtcccggacagaaacggcttcaaccgttacagagaacaaggatggtacctacaactggatgagctggctcctggtgaatgtatctgcccacagggatgatgtgaagctcacctgccaggtggagcatgacgggcagccagcggtcagcaaaagccatgacctgaaggtctcagcccacccgaaggagcagggctcaaataccgccgctgagaacactggatctaatgaacggaacatctatattgtggtgggtgtggtgtgcaccttgctggtggccctactgatggcggccctctacctcgtccgaatcagacagaagaaagcccagggctccacttcttctacaaggttgcatgagcccgagaagaatgccagagaaataacacaggacacaaatgatatcacatatgcagacctgaacctgcccaaggggaagaagcctgctccccaggctgcggagcccaacaaccacacggagtatgccagcattcagaccagcccgcagcccgcgtcggaggacaccctcacctatgctgacctggacatggtccacctcaaccggacccccaagcagccggcccccaagcctgagccgtccttctcagagtacgccagcgtccaggtcccgaagaagtgaatgggaccgtggtttgctctagcacccatctctacgcgctttcttgtcccacagggagccgccgtgatgagcacagccaacccagttcccggagggctggggcggtgcaggctctgggacccaggggccagggtggctcttctctccccacccctccttggctctccagcacttcctgggcagccacggccccctccccccacattgccacatacttggaggctgacgttgccaaaccagccagggaaccaacctgggaagtggccagaactgcctggggtccaagaactcttgtgcctccgtccatcaccatgtgggttttgaagaccctcgactgcctccccgatgctccgaagcctgatcttacagggtggggaggagaaaatcccacctcccctgacctccaccacctccaccaccaccaccaccaccaccaccaccactaccaccaccacccaactggggctagagtggggaagatttcccctttagatccctgccccttggcctcacctctccctcccact

SEQ ID NO: 120439 - DNA, 408 bp, Homo sapiens
atggtcatgctggagccagaatggggaactctggaagaggaggaggattcaggggagcaactgcaatctctgaagcttcaccaacctggtgagatttcagaataccaagagagtgacaaaggagtagagtggtactcaatagaatggatggaagttagatgtaacgcctgcttcactggaggtgtcaggggaccgtccttattggacagcaagcctagcattgaatgccccagaggagcccgaaacctcccaggcttggtgcaggaaggagagcccttcagcgaggaagctacacttttcaccaaggaactggtgctgcagcgagaggcagcctctatcttgcccacagtgcacgacagtgcaggaactctcctggagctgagccaccgctgggatggccgcagttga

SEQ ID NO: 120440 - DNA, 2926 bp, Homo sapiens
ggcggagatcgcgtctctttcgctccgtgtccgctgctgctcctgtgagcgcccggcgagtccgtcccgtccaccgtccgcagctggtagccagcctgcccctcgcctcgactccctttcaccaacaccgacacccacattgacacctccagtccggccagccgctccactcgttgcctttgcatctccacacatggcgtcctcgcgcagagcggcggctcctccgggggacccgcggtccccaccgtgcagcggggcatcatcaagatggtcctctcagggtgcgccatcattgtccgaggtcagcctcgtggtgggcctcctcctgagcggcagatcaacctcagcaacattcgtgctggaaatcttgctcgccgggcagccgccacacaacctgatgcaaaggatacccctgatgagccctgggcatttccagctcgagagttccttcgaaagaagctgattgggaaggaagtctgtttcacgatagaaaacaagactccccaggggcgagagtatggcatgatctaccttggaaaagataccaatggggaaaacattgcagaatcactggttgcagagggcttagccacccggagagaaggcatgagagctaataatcctgagcagaaccggctttcagaatgtgaagaacaagcaaaggcagccaagaaagggatgtggagtgaggggaacggttcacatactatccgggatctcaagtataccattgaaaacccaaggcactttgtggactcacaccaccagaagcctgttaatgctatcatcgagcatgtgcgggacggcagtgtggtcagggccctgctcctcccagattactacctggttacagtcatgctgtcaggcatcaagtgcccaacttttcgacgggaagcagatggcagtgaaactccagagccttttgctgcagaagccaaatttttcactgagtcgcgactgcttcagagagatgttcagatcattctggagagctgccacaaccagaacattgtgggtaccatccttcatccaaatggcaacatcacagagctcctcctgaaggaaggtttcgcacgctgtgtggactggtcgattgcagtttacacccggggcgcagaaaagctgagggcggcagagaggtttgccaaagagcgcaggctgagaatatggagagactatgtggctcccacagctaatttggaccaaaaggacaagcagtttgttgccaaggtgatgcaggttctgaatgctgatgccattgttgtgaagctgaactcaggcgattacaagacgattcacctgtccagcatccgaccaccgaggctggagggggagaacacccaggataagaacaagaaactgcgtcccctgtatgacattccttacatgtttgaggcccgggaatttcttcgaaaaaagcttattgggaagaaggtcaatgtgacggtggactacattagaccagccagcccagccacagagacagtgcctgccttttcagagcgtacctgtgccactgtcaccattggaggaataaacattgctgaggctcttgtcagcaaaggtctagccacagtgatcagataccggcaggatgatgaccagagatcatcacactacgatgaactgcttgctgcagaggccagagctattaagaatggcaaaggattgcatagcaagaaggaagtgcctatccaccgtgttgcagatatatctggggatacccaaaaaagcaaacgagttcctgccttctcttcagcggacaggtcgttctgaagctgtggtggaatacgtcttccagtggttctcgtctcaaactctatttgccaaaggaaacttgccttatcaccttcttgcttgcaggcattgaatgccccagaggagcccgaaacctcccagggcttggtgcaggaaggagagcccttcagcgaggaagcttcacttttctaccaaggaactggtgctgcagcgagaggtggaggtggaggtggagagcatggacaaggccggcaactttatcggctggctgcacatcgacggtgccaacctgtccgtcctgctggtggagcacgcgctctccaaggtccacttcaccgccgaacgcagctcctactacaagtccctgctgtctgccgaggaggccgcaaagcagaagaaagagaaggtctgggcccactatgaggagcagcccgtggaggaggtgatgccagtgctggaggagaaggagcgatctgctagctacaagcccgtgtttgtgaccgagatcactgatgacctgcacttctacgtgcaggatgtggagaccggcacccagttccagaagctgatggagaacatgcgcaatgacattgccagtcacccccctgtagagggctcctatgccccccgcaggggagagttctgcattgccaaatttgtagatggagaatggtaccgtgcccgagtagagaaagtcgagtctcctgccaaaatacatgtcttctacattgactacggcaacagagaggtcctgccatccacccgcctgggtaccctatcacctgccttcagcactcgggtgctgccagctcaagccacggagtatgccttcgccttcatccaggtgccccaagatgatgatgcccgcacggacgccgtggacagcgtagttcgggatatccagaacactcagtgcctgctcaacgtggaacacctgagtgccggctgcccccatgtcaccctgcagtttgcagattccaagggcgatgtggggctgggcttggtgaaggaagggctggtcatggtggaggtgcgcaaggagaaacagttccagaaagtgatcacagaatacctgaatgcccaagagtcagccaagagcgccaggctgaacctgtggcgctatggagactttcgagctgatgatgcagacgaatttggctacagccgc

SEQ ID NO: 120441 - DNA, 448 bp, Homo sapiens
ggaccaggactacaagtacgacagtacctcagacgacagcaacttcctcaacccccccagggggtgggaccatacagccccaggccaccggacttttgaaaccaaagatcagccagaatatgattccacagatggcgagggtgactggagtctctggtctgtctgcagcgtcacctgcgggaacggcaaccagaaacggacccggtcttgtggctacgcgtgcactgcaacagaatcgaggacctgtgaccgtccaaactgcccaggaattgaagacacttttaggacagctgccaccgaagtgagtctgcttgcgggaagcgaggagtttaatgccaccaaactgtttgaagttgacacagacagctgtgagcgctggatgagctgcaaaagcgagttcttaaagaagtacatgcacaaggtgatgaatgacctgcccagctgcccc

SEQ ID NO: 120442 - DNA, 648 bp, Homo sapiens
atgtttaacctgacaatctttagtcttcaacgaaaggctaaattggatactgttgaggaggaaaattccacagatggcgagggtgactggagtctctggtctgtctgcagcgtcacctgcgggaacggcaaccagaaacggacccggtcttgtggctacgcgtgcactgcaacagaatcgaggacctgtgaccgtccaaactgcccagaggtgctgaagagctgtcagagccacactcaaagcttaactgaagcactcacatttcctttccttctggcctctggttaccgaaaacatttgctgaaaattgctgtcccactcaagaactgtcaaagggtaacccgaaaacacccccctcataaaatatgcccacagcccactcccctgagggaggtggatgatgttgacaaacaccttggaacaaaaccacccaagatcgatcaaaccacagctgacctgcagatttatgatccccgaacagcaaaggaagcactcaagtccaggatgggaatgagcttggctggtttgagtttacagaatggccagcgaagctgttggggagagaaggagggaagaaccataggtgatgaggatgaagagacaggaatagccaaagaaaaagtcacgaaaaggcattctgaaatctaa

SEQ ID NO: 120443 - DNA, 297 bp, Homo sapiens
atgccaaaagcaattgaaacaaaagcaaaatttgacaaatgggatctaattaagctaaagagcttctgcaaagcaaaagaaactatcaacagagtaaacagacagccaacaggatgggagaaaaattttgcaaactatgcatctgacaaagctcaggcctctggatcacccttcacccccactgccaactacaattggttagctctgagtccacagttgccagagaaaagggctctcagcaccagactagcattcaacgacccaagcaacctgcctctaagagaaaaggccatgtga

SEQ ID NO: 120444 - DNA, 463 bp, Homo sapiens
cgagaacgtcctttgggagtagaggggcagggagcatacgcaagggattccaggtgcaggtaaaaggtggcactagttcaaggttttgctgactcagtctggtagtcagagttttcagttataagacagttcaaggcagggcctggaggattggatcagtttagggacaggtcaaaggctggcttagagaccttagaggcaggttgcttgggtcgttgaatgctagtctggtgctgagagcccttttctctggcaactggggactcacagctaaccaattgtagttggcagtgggggcgaagggtgatccagaggcctgagctgcagagggcacaagagagaaaagatgtcttagaaagagctttgagaacatgccttggctgctggcagggaccttggatggggtattctacacccggaagtgcctgcctgccatcctctagtggctgccttgctccatttc

SEQ ID NO: 120445 - DNA, 1602 bp, Homo sapiens
atggcgaatgctgcacgcctgggtcccgctcccagtcgcagtttcctcaccccagaggtcaccctgacccggaaacagtacccagagcagctgtcgggcgtcgagggaggtctggtggaagggcgaaaggaaggagaatttgctacacagacctgtctccaaggaaagtttggagaagaaataggaagtgaccaatttggaggctgcgttatgtttcatgctcctgtacctggtgctaacatggtaactgggagaatagaatatgtagaggtattccatgctggccaggctttccggttggggcgatatccaatacattggcacctgcttggagacttacagtttaaatcttatgtaagaggctgtgcaattcaccaggcctataacagagctgttactattcataacacacaccatcttctggttgagaggaatattatatatgatattaagggaggagcattttttatagaagatggtattgaacatggcaatatcctccagtataacttggcagtatttgtacagcaaagtaccagtcttctgaatgatgatgtgaccccggctgcattttgggtcaccaacccgaacaataccatacgacacaatgctgttgctggtggcactcactttggcttttggtaccggatgaacaaccaccctgatgggccatcctatgacagaaacatttgtcaaaaaagagttccccttggcgaattttttaacaatactgtccattctcaaggttggtttggaatgtggatctttgaggaatatttccccatgcaaacgggatcttgtacatctacagtgcctgcgcctgcaatatttaactcacttactacttggaattgtcaaaaaggagctgaatgggtcaatggaggtgcccttcagttccataactttgtgatggtgaataactatgaggctggaattgagactaagaggatcctggctccttatgttggagggtggggtgaaaccaatggagcggtgattaaaaatgccaaaatagtcggccatcttgatgaactgggaatggggtctgcattttgcacagcaaaaggcctggttctcccatttagtgaaggcttgactgtctcttctgtgcactttatgaactttgaccgtcccaactgtgtagctttgggagtgacatccatctctggagtttgtaatgacagatgtgggggttggagtgcaaagtttgttgacgtccagtattctcacacaccgaacaaggctggctttcgctgggaacatgaaatggtaatgattgatgttgatggctcacttacagggcacaaaggacataccgtcattccacacagctcattgctagacccttctcattgtactcaggaagctgagtggagcattgggttccctggatcagtctgtgatgcttcagtcagctttcaccgtttagcgttcaaccagccttctccagtatctctgcttgaaaaggatgtggttctttcagactcttttgtcaaagccatcctgggctatatgaggcccacaggcagcagactggacaaggttgctcgagaaattataaacaaatatagagtgacagaaaatatcagcagtgccttgtaa

SEQ ID NO: 120446 - DNA, 564 bp, Homo sapiens
atgcccaccagcgaggatgcactgctgcaagtccaggtgcaacagtggagcatctttaatgtccagccgggctctggcttgcaagaatgtgggagtgcaggcattcttccagtgccctgtgctttgaaaaatacgcagaaaagccagaattatggagggcagcctcctgggcttgtgggtgttgggcaggtggagggagacgtatggaatcttctggtctccaggcagctgtgcagtgcaccggtcgtgctccgggggtacacagcccagcccagggtcgccccggccatgtgcccccagcaccagcccctgggccttttatatgtttctgggatgctgcctgtcttccagtgccatcaggaaaggctcggggagctgggcctcactggacgccatacccctcccgctgggacagtgcagttcgaggagcccagggtgattgacctgtgggacctggcgcagtccgccaacctcacggacaaggagctggaggcgttccgggtgaagaagcatctgcaggacctgtccggcaggatctccagagctcggcacaacgaactctga

SEQ ID NO: 120447 - DNA, 2226 bp, Homo sapiens
agcacgctcgcctcctcggagggtcagggtggtttctggcgggggccccgggcgctgatactgctgctgctcttcctcgggccctgccacgctcgaagccacgacggcaagtactcgcgggagaagaaccagcccaagccgtccccgaaacgcgagtccggagaggagttccgcatggagaagttgaaccagctgtgggagaaggcccagcgacaggaaaggtacccgtgccggcgacgacgccgtgtgaagcaggtggcggccggcaccccgagggtgttcctgaaaacacctgaaatgggtgttttcgaactatgccgaccatctgggcctcattatctcatctcaaatgcaggagtcagattagatctgctcaatagtccagttttaagcattcctgagtctttgagagggaaagtaaatgatttgcagaataagaaggaacttttggaacgaaaagggagaggagaaacaggactcgccaggccaatgcatgacctcacagcagctcaaggcgggtacggctgtgcccttgtccacggagctcaggtggaaggagctggggcacagggctgggctgggacagtgcatgccacctgccgtggtgagacaggtacagcgtgccaggaagccttggtcaccgccacagcctgctcctcatgccaaagagggcagacccgggcccctcaaggccagcacacacttgagagcatgggcctgaattgcctgccccagggtgctgcttctggctcagaccatcactgtgggcctcgcatctcagacctcccgggcagtgcagcacgaacctcccggtggccagcctcctccgagctgcatcttcctcccgtgaggctggccgagctccacgctgatctgaagatacaggagagggacgaactcgcctggaagaaactaaagcttgacggcttggacgaagatggggagaaggaagcgagactcatacgcaacctcaatgggcactggcgggcagaggacgcacaccaggacggtggtgtgaacaagtgggatatccccactgtggtgggggtgggggtggctgccatcgcacttgttgctgtcaaactgtttttcctcccaataaatataagatgtgtgctgtcagaaagccctgccaccctgcacagtctgcaggtggcctctgtcctgtggtccttagagtttttgccctatggcagcagatctccagtggtcatccaggaaacagtcatcttggccaagtatggtctggacggaaagaaggacgctcggcaggtgaccagcaactccctcagtggcacccaggaagacgggctggatgaccccaggctggaaaagctgtggcacaaggcgaagacctctgggaaattctccggcgaagaactggacaagctctggcgggagttcctgcatcacaaagagaaagttcacgagtacaacgtcctgctggagaccctgagcaggaccgaagttcacccgggaccacaagatggcgtggcgagcacggggagggaacactcacctatggaaaccttgttccaggaggagctcaagcacttcgaagccaaaatcgagaagcacaaccactaccagaaagcagctggagattgcgcacgagaagctgaggcacgcagagagcgtgggcgaccggcgcagcgtgtgatccgcaagcccgcgagaaagcacgccctgcttggaagggcggaccaaaggagctgggctaccacggtgaaagaagcatcttcaggaccctgtccggcaggattctccagagctcggcacaaacgaactctgaaggcattggggagcccagcccggcagggaagcaggccagcgtgaaggacctgcgcctcttggccgtggcattttccgtggacagcccgccgtcatggtggctggggctggcacggttggtctagtgagtgtgaggattgtgttgctggtggactgcaggcgctgccggtcgcgacacagggcttggaggtggtagcatttgggtctgagatcggcccagctctgactgaaggggcttggcttccactcagcatcagcgtggcagtcaccaccccagtgaggacctcgatgtccagctgctgtcaggtctgatagtcctctgctaaaacaacacgatttacataaaaaatcttacacatctgccaccggaaataccatgcacagagtccttaaaaaatagagtgcagtatttaaaccaaaaaaaaaaaaaaaaaa

SEQ ID NO: 120448 - DNA, 373 bp, Homo sapiens
gacttttttgacaattctgcccaggttaccattgcaggcattccatgtgatattagacacgtgtctcccaggaagattgagtgcaccactcgggctccaggaaaagatgtgaggctcaccacccctcagccaggcaatcgagggcttctttttgaagttggagatgctgttgagggactggaactgactgaagccaccccagggtacaggtggcagattgtccctaatgccagttctccatttgggttttggtcacaggaaggacaacctttcagagcacggctcagtgggttctttgtggctccagagacaaataattacactttctggattcaggcagacagccaagcttccttgcatttcagatggtcag

SEQ ID NO: 120449 - DNA, 1515 bp, Homo sapiens
atgtcaaagcttgatcgtaggagaggaaagaatgagataaagctaaattctgaggactatgtgtcatattactgtaggaaggctcttagctttattcaggtgcttagtgacattgcacttctagctccagccagctgtatggccagtggcgtccagaagagaccatggtctagaaagcataactgccctcaagatattgttatagctactggaagaaacccccaaactgcccgccttcattcaatgggcaatcgagggcttctttttgaagttggagatgctgttgagggactggaactgactgaagccaccccagggtacaggtggcagattgtccctaatgccagttctccatttgggttttggtcacaggaaggacaacctttcaggtatgttgtaggaaaagtgggagcccacatcaaaagcacctttgctaacctagatgtccctgtacaaatttctgctcatcaccttcaccagctcttacagaataatgccgatgacttcacatccaggtacctcaatgccagtgacttcactgtgaaggaggatctatacacttgctacgaacacgtgtggaccttgtcctggtccactcagattggggatttgcccaattttatcagggtctctgatgaaaaccttactggagtgaatcctgctgcagccacgcgtgtggtatatgatggtggagtttttcttggacccatatttggagacatgttggctactgccaaccagcatactcaggtggttgtgcgagtgaatgatgtaccagctcattgcccaggttcctgctctttccagtacctccaagggtcaactccctgtgtccattctgtgtggtactccattgatggtgacatcaacctaatgatttacattaccggaactggtttctctggtgactcccagttcttgcaggttacagtgaacaaaacgagttgcaaagttattttctcaaaccagaccaatgtagtctgtcagacagatttgctacctgttggaatgcatcggatcttgatgttggtgagaccctctggtcttgccatcagtgccactggagaagacctcttcctaaatgtgaaacctagactggatatggtggagccttccagagctgcggatattggagggctctgggccaccatccgaggctctagtttggaaggtgttagcctgatattatttggatcttactcgtgtgccatcaatgtcgctacaagcaattcaagcagaattcagtgcaaagttccacccagggggaaagatggacgcattgtgaatgtgactgtgatcagaggggactattctgcagttcttcccagagcatttacatatgtctcttccttaaatccagttattgtgactctgagcagaaacataagcaatatagcagcctctggtgctgtcaacactattcatgatttacctggaagtaacagtacatccagagatttagtaatccaagactttcagctgggaaacttctcccaaatggtagtagcaatataa

SEQ ID NO: 120450 - DNA, 268 bp, Homo sapiens
ctaggcctgcacagggtcaggatcatcaatatcactgtcttctacctccacatcttgtcccactggaaggtcttcaggggcaaaaacatgcatggagctgtcatctcctatcataacaaagccttcttctggaataccttcatctttacctgcatctttgttacctgcatcttgcaaataagcaagagttaactttaacctggtataaggagtaatgtaccttttttcttccttcagtttaaaatccattccaccaaaacctggccgt

SEQ ID NO: 120451 - DNA, 626 bp, Homo sapiens
atgaaagtacaaagtgaaggagcagcaagttatccagaagatgtagataagaccattgatgaaggtggccacactaaacaacagattttcaatgtagatgaagtggcattctattggaagaagatgccatctaggactttcatagctagagaggagaagttaatgccaagcttcaaagaacaggttgtgattctcttattagggggcagtagcaacaaaagatgctgtcatttgaaggtgaaagtcatccaggacacaatcaagcaaaataagttcaagtccctaacatctcatggccagaagctcaaagaccctgaagaacaaggtgaggctccaggaaagtatctacagcactgcttagccttcgcctacacacttaaatacccggcgcttccgctagctagatgtgggccttcttgggttatggtcagggcaacaacattggaaagcctgccaagagacggagttgagataagtaagaaaaactacaaaaggaaatgaaatgcttgggcacttttcttggagacagaaagagctttagacttttctgggacacaacaggtgtccagagagcatcactgaaaatctggccaggttttgtgatcccttaacccccttttttggaa

SEQ ID NO: 120452 - DNA, 2568 bp, Homo sapiens
atggcccctgaacagggcagagtatccattcttcagacactcttcatagaataccatggttattctatatttgtcgttaagggtgatctgccagattgcgaagctgaccaactcctgcagatgattagggtccaacagatgcatcgaccaaaacttattggagaagaattagcacaactaaaagagcaaagagtccataaaacagacctggaacgagtgttagaagcaaatgatggctcaggaatgttagacgaagatgaggaggatttgcagagggctctggcactaagtcgccaagaaattgacatggaagatgaggaagcagatctccgcagggctattcagctaagtatgcaaggtagttccagaaacatatctcaagatatgacacagacatcaggtacaaatcttacttcagaagagcttcggaagagacgagaagcctactttgaaaaacagcagcaaaagcagcaacagcagcagcagcagcagcagcagggggacctatcaggacagagttcacatccatgtgaaaggccagccaccagttcaggagcacttgggagtgatctagcgttgttgctcacacaaagcctgtttggtagtctcttcacatggacgcgtgtgacatttggtgctgaagacccgggacaggaggactccttcaggagacgggtcccctgtccttgccctcactccgtgaggagatccacctacgacctcgggtcctcagaccaaccagcccaaggaacatctcatgaatttcaaatcgggctgctcctcaccaggctgagccaggtcccaattcttcctcagcctccggtcccccaccctataatccttttatcaccccctcctcacaccgtgtctggcttacagtttctttctgtgactagccctcccctacctgcccaacaatttcttcttaaagaggtggctggagctgaaggcatagccaaggttatccccacctgcccagttcccttattaggccaagacattttaaccaaattatctgcttccctgattattcctggactacagccacatctcattgccacccttcttcccaacccaaagcctccttcgcctcttcctctcgtatcccccaaccttaacccacaagtatgggacacctccactccctccctggcaaccgatcaaacacccattactatcccattaaaacctaatcacccttacctggctcaatgccactattccatcccacaactggctttaagaggactgaagcctgttatcactcgcctgctacagcatgggcttctaaaacctataaactcttcttacaattctcccattttacctgttcaaaaaccggacaagtcttacaggttacctcaggatctggatcttatcaaccaaattgttttgcctatccaccctgtggctagcccccacattattcctgataccacacctgacccccatgactgtatctctctaatccacctggcattcactccatttccccatacttccttctttcctattcctcaccctgatcacacttggtttattgatggcagttccacctggcctaatcgccattcaccagcaaaggtgggctatgctatagtagtatcttccacatctatccttgaagctaccgctctgcccccctccactacctctcagcaagctgaactcattgccttaactcgagccctcgctcttgcaaaaggactacatgtcaatatttatactgactctaaatatgccttccatatcctgcaccacaatgctgttatatgggcagaaagaggtttcctcagtacgcaaaggtcctccatcattattgcctccttaataaaaactcttctcaaggccgctttacttccaaaggaagctggagtcattcactgcaagggccatcaaaaggcatcagatcccatcgctcagggcaatgcttatgctgataagacaaaattcctcgatttggccttcccacctctcagactgtcctttacttgtcaaatcacccaagcagtttctcaggctcttggtattcaatggaaccttcataccccttaccgtcctcaatcttcaggaaaggactggacagtatttttacctcttgcccttcacagaattagagcccgtcctcgagaagctacagggtacagtccatttgaacttttatatggacgcactttcttgctcagccccaacctcgttccagacaccagccctctaggcgactatcttccagtcctctggcaggctagacaggaaatccaccaggctgctaatcttctcttgtctactccagattcccaactatatgaagacaccctagctggacgatcagttcttattaagaacctgacccctcaaactctacaacctcgatggactggaccctacttagtcatctatagtaccccaactgccgtccgcctgcaggatcctccccactgggttcaccgttccagaataaagctgtgcccatcggacaaccagcctaatctctcttcttcctcctggaagtcacaagtactccccactacttcccttaaagtcactctcatttctgaagaacagtaa

SEQ ID NO: 120453 - DNA, 2553 bp, Homo sapiens
atgaataaacttaaaaacatcctggtagatgaaaaatcagggtctttgtgtcaacctcctatctcatcgtgtgataaagaatgcctgtttgcagatgacatgattgtatatttagaaaaccccattgtctcagcccaaaaactccttaagctgataagcaacttcagcaaagtctcaggatacaaaatcaatgtgccaaaatcacaagcattcctatacacgaataacagacaaacagagagccaaatcatgagtgaactcccattcacaattgcttcaaagagaataaaatacctaggaatccaacttacaagggatttgaaggacctcttcaaggagaactacaaaccactgctcagtgaaataaaagaggacacaaataaatggaagaaccttccatgctcatggataagaagaatcaatatcgtgaaaatggccatgctgcccaagcggctgaagactgacgctgcccgatcacctcggaagcctcctggactatcacagacgctttgggtaactcttacagtggaggctcccttattaggtcgagacattttaactaaattttctgcttctctgactattcctgggctacagccacacctcattgctgccttttcccccagttcaaagcctccttcacctcctccccttgtatctccacaccttaacccacaagtatgggatacctctactccctccttggcgaccgatcatgcaccccttaccatctcattaaaacctaatcacccttaccctactcaacgccaatatcccatcctgcagcacgctttaaaaggattaaagcctgttatcactcacctgctacagcatggccttttaaagcctataaactccccttacaattcccccattttatctgtccaaaaaccggacaagccttacagctccttcaggtatgtatactcactctttgttgagtctcccacaattaccattgttcctggtccagacttcaatctggcctcccacattattcctgatactacacctgacccctatgactgtatctctctgatccacctgacattcactccatttccccatgtttccttctttcctgttcctcacccttttcacacttggtttattgatggcagttccaccaggcctaattgccacacaccagcaaaggcaggctatgctatagtatcttccacatctatcattgaggtcaccactctgccccactccactacctctcagcaagccgaactcattgccttaactcggaccctcactcttgcaaagggactatgcgtcaatatttatactgaccccatatcctgtaccaccatgctgttttatgggctgaaatgtttcctcactatgcaagggtcctccatcattaatgcctctttaataaaaactctactcaaggccgctttacttccaaaggaagctggagtcatacactgcaagggccctcaaaaggcatcagatcccatcgctcaggacaacacttatgctgataaggtagctaaaaaagcagctagcgttccaacttctatccctcacagcagtttttctccttctcatctggtcactcccacctactcccccactgaaacttctacctatcagtctcttcccacacaaggcaaatggttcctggaccaaggaaaatatctccttccagcctcacaggcccattctattttgtcatcattttgtaacctcttccatgtaggttacaagccactagcccgcctctcagaacttctcatttcctttccatcgtggaaatctatccttaaggaaatcacttctcagtgttccatctgctattctgctactcctcagggattgttcaggccccctcccttccctaaacatcaagcttggggatttgtccccacccaggactggcaaattgacttcactcacatgcctcaagtcgggaaactaaaatacctcttggtctgggtagacactttcactggatgggtagaggcctttcccacggggtctgagaaggccactgtggtcatttcttcccttttgtcagacgtaattcctcggttttgccttcccacctctatacagtccaataacggactggccatgattagtcaaatcacccaagcagtttctcaggctcttggtattcagtggaaactttgtaccccttaccatcctcaatcttcaggaaaggtaaaatgggctaatggtcttttaaagacacacctcaccaagctcagcctccaacttaaaaaggactggacagtacttttacctcttgcccttctcagaattcgggcctgtcttcggaatgcgacaggatacagcccatttgagctcctgtatagatgctcctttttattaggccccagtctcattccagacaccagaccaacttggactgcgcccccaaaaacttggcatccctactatcttctgtctagtcatactcctattcaccggtctcaactactcatacatgccctgctcttgtttacactgccggtttacactgtttctccaagccaccacagctgatatctcctggtgctatccccaaaccgccactct

SEQ ID NO: 120454 - DNA, 1098 bp, Homo sapiens
atgctggtgactgagaaggggcatggaacagaaaaaaggggtatgaacagttggcctgatgctgtagtccaagaaggagtctgtgcaaggactcagatagtggcagctgaaggagcaattgaagatggaggcaaggcagctttgtcccagaagatgaggactggtgatgagctggtgaatatcaatggcactccattatatggctcccgccaagaggccctcattctcatcaaaggctccttccggattctcaagctgattgtcaggagcagccaagtaagactgctccaagagaaacagacactcccaggttattgccgaaggaaatatttgcaagatccaggaagtgagacgcaaggaggatacacagggaggggagaaggacccagagagcctgttgctgccacccctgcttgcccccgggcccacagaaattcaacttattacaatatttctgtggccaaggcagagctgctgaacaaactgaaagaccaacctgagatggcagagattggcctaggagaggaggaagttgaccatgaactggctcaaaaaaagatacagcttatcgaaagcatcagcagaaaactttctgtcttgcgggaggcccagcgagggctgctagaggacatcaatgccaattctgcccttggggaggaggtggaggccaacttaaaagccgtctgcaaatccaatgaatttgaaaagtaccacttgtttgttggggacctggacaaagtggtcaacctgttgctgtcactctctggacgactggcccgggtggagaatgctctgaacagcatcgattcagaggccaaccaggagaagttggtactgatagagaagaagcagcagctgacggggcagttggcagatgccaaggagctgaaggagcacgtggaccgccgggagaagttggtgtttggcatggtctcccgctacctgcctcaggaccagctccaagattaccagcactttgtcaagatgaaatctgctctcatcattgaacagcgagagctggaggagaagatcaagctcggggaagagcaactcaaatgtctcagggagagtctactcctggggcccagcaatttctaa

SEQ ID NO: 120455 - DNA, 1044 bp, Homo sapiens
  misc_feature (1)...(1044): n = a,t,c or g
atggctcattccaagactagcttttcatgggcaacccctttccatccttgccttgagaacccagcactggacttgtcaagctaccgagcaatttcttctcttgacctccttggagacttcaaacatgctttgaaaaaatcagaggaaacttcagtttatgaggaggggagctcccttgcctccatgccccacccactgcgcagccgtgccttctcagagagtcacatcagcttggcgccccaaagcacccgggcctgggggcagcataggagggagctctttagcaaaggtgatgagacccagtcggatcttctcggagccaggaagaaggcctttcctcctcctcgccctcctcctcccaactgggagaagtacaggctctttcgtgcagcccagcagcagaagcagcaacagcagcagcagaagcaacaggaggaggaggaggaggaggaagaagaagaagaagaggaagaggaagaggaggaggaggaggcagaggaggaggaagaggagctgccaccccagtatttcagttcagaaacctctggttcctgtgctctcaatcctgaggaggtcctagagcagccacaacccctcagctttggccacctggagggctcgagacagggttcacaaagtgtcccagcagagcaagaatcctttgcactccattccagtgatttcttgcctccaataaggggtcacttgggatctcaacctgagcaggctcagcccccttgctactatggcattggtgggctttggaggacatcgggacaggaagccactgaatccgccaaacaagagtttcagcacttttcgcctccttcaggggccccaggaatccctacctcttactcagcttattacaatatttctgtggccaaggcagagctgctgaacaaactgaaagaccaacctgagatggcagagattggcctaggagaggaggaagttgaccatgaactggctcnnnnnnnnnnnnnnnnnnnttttttattaaggggcccgaagctttttccctttaagggggggaaattttaa

SEQ ID NO: 120456 - DNA, 898 bp, Homo sapiens
ctagatagttatcttcttcccatagaaggctgtttggtctacattgaaaagctgttgtgtagtgtagccacctttatcaattttcttagctagatcttctggataacttgctacagcttctgcatcagcacttgctgcttcaccttgcacttttttggaaacagcttcttttcttttctttcttttcttttttttagatggagtctcgctgcgtcgcccagcctcagtgacactgccttcttggatttcttgcccaccatccccaccactggctgtttgtgtgctgtcccaccttttatgctctcctggatctttctgacatttacctccttcttgacttttgagttcttgcccattccataaacattggttgacactttctccagtgtaagactgaaggaacactagaaaggggccgtaagactgatcatcaagccggtcatggtggcgtgtccccgtggtctcagctactcgggaagctgaggcaggaggatctcttgagccttgggatgattcatagttccaaacagctttttcctccagctcctcttgtctttctgttgttttgggtttccttgctatattttgaatgtccacacacgtgtcctgcctttccttcacagccatggggtgtcttcctttgccatactgtctaggctcagacagtgttcctttcaatgtggtcttgtctgtgagattccaactgagactgaagttctctgcatccctagcacttagcactgtgttaagttgttttcccctgtgaccaggactcaaaatctcagtcaccttttgcttcactctctgtattctcattagtccatctgcaacacctcccttcccagtgagtctggaatctgtactgcctccaccctggtccaggccccattcacataat

SEQ ID NO: 120457 - DNA, 991 bp, Homo sapiens
ggatgcctctctgattgttcacccacgtttcaaagctgtcacaccatacagggacgcctgccttggtccttcacccttagcggcaagtcccgctttcctgggggaggggcaagaaaccctcaaccccttctccttcacccttagtggggagtcccgctttcctggggcaggggcaactgtttcatcattcaataaaactccccaacttgctcactcattgattgccagcatatcctcattcttcttggatgctggacaagaatttgggacccaccaagagcagacacccagaaagtctgcctcacaggccttctgccctcactggcagagggcagccaccactcacaaaagggccaggggccaactgagtggccaaccagatcctgcactcacttgctcacatgctccttcctgcaaggaattgagtgtagcaggccaagtagacatggcaaccctgctaattccatattccctaagacacaagaatattgaaattatggcaattaataaccctacggtgacctctaagttttcaaatggaagaaagaatctcatttatctgactttaaacctaaagctagaaataattaagcttaagagccccaacagtcccccaagccaaagcctaatccagagcaagcccctaactctcttcaactctataaaggctgagacagataaagaagctgtagaagaaatgattgaagccagaagaggttggttcatgaggtttaagaaaagaagctgtctccgtaatataaaagtgcaaggtgaagcaacaagtgctgatgtagaagcagtagcaagttatccagaagatctagccaagataattgataaagatggctatactaaacaacaaattttcaatgtagatgaagtagccttatattggaagaagattccatctaagacttttatagctttagagaaaatgtcaatgtttgacttcaaagcttcaaatgtcaagctgactccagttagggactaa

SEQ ID NO: 120458 - DNA, 906 bp, Homo sapiens
atgcattttccctgtggagttccattaatagagcctcttgggtacacacagtatatccgagaagaaattttagaagaagttctgggaaaactgatgagtgtagaactctatccacagaagaacctaacaggctgccaccaggaagctcaatggctggatttccactcctatttcaaagctgctttgcctgtatctgcttcagataaagatttcctatgggaagatggggatgcttccagggtggtgacagtagtgaggggtgaggaatcggccaaagctaagaagctcctgaaaagagctcccagacttttacttctgcccctcctcccactcttatcagcacccagaagtatcttaggccagcagttatgcctcctacaagtggccaaaaacccatatgttgtcaatctgccattaaactacacattcaaaaaatcactaactgatctgaaagctccccacaaagcagaagagctgaaattctttgagcccctgaatactggaactgaaatgttggtaaaatatcaagcctgcatcccagatctcccctgggtgaatctaggttcacagctcccctactcagaggctctcggctcctccctctgcggctgcaggctgctctctctgtccctgcccgctggcctagtgggtggtgacacagcacggtgcattcctgcaggcaggctcaggcccctgtgtagttggcttgacccaggcaagctcctgcacttgtcgctgaagagcaagggctcaggtgggcgttccggtgcgggaaccttgcaggaaggcaatcagtcggtttgtattcaagctgaaaagccccctctgaagcctgcgatccagacacaaagcgggatgaatgtgcttcgctgcagagcgtacagctgggttattgactgggactga

SEQ ID NO: 120459 - DNA, 676 bp, Homo sapiens
agccatctagaccagcgtggtggaattcttccaagctatgttaaagaaaccagtggtgacggaggtcagaacgcccacaaatacctggagtggcctgggtttttctaaatccatgccagctgaaactatcaaggagttgagaagggccaatcatgtgtcctataagcccacaatgacaaccacttatgagggctcatccatgtccctttcacggtccaacagtcgtgagcacttgggaggtggaagcgaatctgataactggagagaccgaaatggaattggacctggaagtcatagtgaatttgcagcttctattggcagccctaagcgtaaacaaaacaaatcaacggaacactatctcagcagtagcaattacatggactgcatttcctcgctgacaggaagcaatggctgtaacttaaatagctctttcaaaggttctgacctccctgagctcttcagcaaactgggcctgggcaaatacacagatgttttccagcaacaagaggtcagtcattatttattttcccaagtatctttgttttgattgtgtgtatgatgacttctagaatgaaatcacttattgacctatgagtatgctttcatgagcatttattcaagtctcatagcttgtccttgctactaagaaaaatgtcatctcatttcttatttagag

SEQ ID NO: 120460 - DNA, 2921 bp, Homo sapiens
gactgttaaagattcactccagtcagtccagtccgcagcaggccgtcctgacgattcccagccagctcaaaccactcagcgtaaacacatctggaggggtgcagacgatcctgatgcctgtgaataaagtggttcagtcattttctaccagcaagccacctgccattctgcctgtagctgccccaactccagttgtccccagctctgctccagcagctgttgcaaaaggtgaagatgccagctgcttttctgcaaagtctgtggagcagtactatggctggaacattggaaaaaggagagccgctgagtggcaaagagcaatgacaatgcgaaaagtcttacaagaaatcctggagaagaatccgagatttcaccacctgactcccctcaaaaccaagcacatcgctcactggtgccgctgtcatggctacaccccaccggaccctgagagcctgaggaatgacggggactccatcgaggacgtgctgacccagatcgacagcgagcccgaccatgggtctcttggagacggaaagtcctcttccgttggccccacagctgttgtaacactgcttgcctgtcatttagagtgcccatcatcattctcctctgctgacaacctctgccgcaaactggaggacctgcaacagttccagaaaagggaacccgagaatgaggaggaggtggacatcctcagcctctccgagccagtgaagataaacatcaagaaggagcaggaagagaaacaagaggaagtcaagttctacctgccaccaaccccagggtctgaatttattggggatgtcacacagaagggaggtatgcttgtttggagagaggctgtttctaaagcagcgatacgaacaaacggctttcttctgcttttccagattgggatcaccctgcagcccgtggcactccacaggaacgtgtatgcgtccgtggtggaggacatgatcctgaaggctacagaacagctggtgaatgatatcctgagacaggctttggcagttggataccagacagcttctcacaacaggtattactatctctgcagtctgtggtgtgaggcttacacctctttcctaacagttgaattgcccatgaaggtgttttatacttacatcaatccagtaggagatggaggatcaaagacatgtgatacaatggtttttaatcatcctgctatcaagaaatttttggaatcaccatctaggtcatcatctcctgccaatcagagagcagaaacaccatcagccaatcattcagaaagtgattctttatctcagcacaatgacttcttatctgacaaagataataacagcaatatggatatagaggaaagactctcaaacaacatggagcagagaccaagccgaaatactggaagggatacttctagaattactggctcccataaaacagaacagcggaatgctgatctcacagatgagacttcacgactttttgtaaagaaaacaatagtagtgggcaatgtgtccaagtatatacctccggataagagggaagaaaatgaccagtcaactcataagtggatggtatatgtccgagggtcccgtagagaacccagcattaatcattttgtcaagaaggtttggttcttccttcatcctagctataaaccaaatgaccttgtggaagttaggtacaagatagtggtgactagatatgtgctaggctcagggcgtgataaagggactgtgaagatgagcacggggccttggctttgggaaaccaaaaaggtcttcctgcccttgagaataaaatacctaggaatccaacttacaagggatgtgaaggacctcttcaaggagaactacaaaccactgctcaaggaaataaaagaggatacaaacaaatggaagaacattccatgctcatgggtaggaagaatcaatatcgtgaaaatggccatactgcccaagactgagaggggtgaggaagcttcagaggaaaagtatgaagctagcagatgttggttcgtgaggtttaaggaaggatgccgtctccataacatacagttgcaaggtgaagcagcaagtgctgatggagaagctgcagcaagttatccagaagatccagctaagatcattgatgaaggtggctacaccaaacaacatattttcactgtatatgttgtcggtggctatgatgggcaaaacagacttagcagcgtagaatgttatgattccttttcaaatcgatggactgaagttgctccccttaaggaagccgtgagttctcctgcagtgactagctgtgtaggcaaactgtttgtgattggtggaggacctgatgataatacttgttctgataaggttcaatcttatgatccagaaaccaattcttggctacttcgtgcagctatcccaattgccaaaaggtgtataacagctgtatccctaaacaacctgatctatgttgccggtggactgaccaaggcaatatactgttacgatccagttgaagattactggatgcacgtacagaatacattcagccgtcagagaggagagcttggtgtttttgtggtgccaagtgcaggattcccagctagcactgaagctgaacgacacactccgttttatgctttgccatcttcattggaaagaacacccaccaaaatgactacatcccagaaagttaccttttgttcccatggcaattcagctttccagccaatagcatcaagctgcaaaattgttccacaaagtcaggttcctaatcctgagtcacctggaaaatccttccagcccatcaccatgagctgcaagattgtgtcagttcttctaagcagtgttatgtttaacaaaaggaagtttatcactgttgattggcaaagctgtcacaaggcaaaaacaaagctcattcatacggaaatgaatggaggagataaatga

SEQ ID NO: 120461 - DNA, 2391 bp, Homo sapiens
atgcaaggtgaagcagcaagtgctgatgtagaagctgtagcaagttatccagaagatctagctatgaaaattgatgaagactccaccatgatgagtaatcggaggtgcaaggaaaatagagacctgaaggtgcagcgcctgtttcaacaggaccggggcaaccggggctctggacagatgtgttctggtgactgccagtctaagatcaagagtttcaaggtgaaaaaaaaaacaaaacccagcgcattaaaccaagtacgaggcccgtctaagcgtggatccctgggcgactgcattggtcacatgcccacgaagccagccctgccccaaagcaagagattcagtaaggttctggttcccacactgaaattctgcctcctaaatcagattcagactccaattcccaaaatctgttccaaacacattcatggcctaacccttgagaaagagaacttcaagctccacttgcctcctttcagatatatccgagaagaaattttagaagaagttctgggaaaactgatgagtgtagaactctatccacagaagaacctaacaggctgccaccaggaagctcaatggctggatttccactcctatttcaaagctgctttgcctgtatctgcttcagataaagatttcctatgggaagatgggattgaaaggattgaaagaagaattcccagacacaatcagatctacagttcacttggctcaactcagcaaactatcactgaaagggacacaaaagaagtatttgcaggaactataaaactgcactgtctggcatcaggaacaaagcatgaagggaaactgcccaaggatcccccaccttcctttaaagatagtccaattccatttcggtctctccagttatcagattcgcttccacctcccaagtgctcacgactgttggaccgtgaaagggacatggatgagccctgtaaacagacaaagccagataaggaaatatttaatcagggttgtcttcctcttgtgttgatgtttgatatgaaggaagaaattgaagtagatccacaattcattgcgcagttgatggaacagcttgatgtcttcatcagtattaaaccaaagcccaaacagccaagcaagtctgtgattgtgaaaagtgttgagcgaaatgccttaaatatgtatgaagcaaggaaatgtctcctcggacttgaaagcagtggggttaccatagcaaccagtccatccccagcatcctgccctgccggcctggcatgtcccagcctggatatcttagcttcagcaggccttggactcactggactaggtcttttgggacccaccaccttatctctgaacacttcaacaaccccaaactcactcttgaatgctcttaatagctcagtcagtcctttgcaaagtccaagttctggtacacccagccccacattatgggcacccccacttgctaatacttcaagtgccacaggtttttctgctataccacaccttatgattccatctactgcccaagccacattaactaatattttgttgtctggagtgcccacctatgggcacacagctccatctccccctcctggcttgactcctgttgatgtccatatcaacagtatgcagaccgaaggcaaaaaaatctctgctgctttaaatggacatgcacagtctccagatataaaatatggtgcaatatccacttcatcacttggagaaaaagtgctgagtgcaaatcacggggatccgtccatccagacaagtgggtctgagcagacatctcccaaatcaagccccactgaaggttgtaatgatgcttttgttgaagtaggcatgcctcgaagtccttcccattctgggaatgctggtgacttgaaacagatgatgtgtccctccaaggtttcctgtgccaaaaggcagacagtggaactattgcaaggcacgaaaaactcacacttacacagcactgacaggttgctctcagaccctgaactgagtgctaccgaaagccctttggctgacaagaaggctccagggagtgagcgcgctgcagagagggcagcagctgcccagcaaaactccgaaagggcccaccttgctccacggtcatcatatgtcaacatgcaggcatttgactatgaacagaagaagctattagccaccaaagctatgttaaagaaaccagtggtgacggaggtcagaacgcccacaaatacctggagtggcctgggtttttctaaatccatgccagctgaaactatcaaggagttgagaagggccaatcatgtgtcctataagcccacaatgacaaccacttatgaggcagcttccttccagctcttcaagcaagtgagccatacggccactcacacagctgctctcgataaaggattaatggcttaa

SEQ ID NO: 120462 - DNA, 481 bp, Homo sapiens
atgctggagacgtgcgcatcggaggtcaggtacagcgccaagtacacgttccagggcctggccacagggctgcaggtcccgcccaaggagcatgttaagtttatacagattctccctttcagctgctcaatgctagatttctcatttgacggctctgaggagttcgatattaacgcttttgaggacatcattgctttctatgaaagcaagaagtgctccagtggggatcctctagagtcgagcctggcggtgcgggtgtctgggtatgttgtaggcggctggccgggtgctggtgaagcgagaaatcttggtggaggttctgaccaaaagaaaaacggtgaccgtcaacgacaagcttatccttccctacagcctcagcgaggtatgtccgctcagtatcaccaggacatacaaggcacaaaactgcgtggagtcgagacacacgcacgtacgaggaggctaccactatgaagctcggtaa

SEQ ID NO: 120463 - DNA, 3819 bp, Homo sapiens
atgggtcactttaagtttgtgggtaaattcctgaatggtccatttaaaggaagtggtgcgaaagcagggaactcagtctgccagtttcagaaattcaacaagaacggttttgatccttttctaaggaatataaacaaaatgtcagtcagaaaaagaaaagatcaagatatatacaaatatagaaatatcttaggtgcagaggtcatagagcatgaagaccaggatcctccttatccagcacaatcaaaaactgcaggacctgctaatacaacctgggcccatgaccctaatatcttcacaacaaagatgttagaaactgagaataagttagcccctgatcctactatcaatacaataaagggtttagatacaaagaatagtttaaaagaaaatctaccaaatgtatctttaccaagcatcaaaggagaatcatcaagggctggaaatgtacaggcaaacacatgtcacctctcgaagtctttaaattttaccccccatatagaatatttaaaacaatcaatgatactcaagtcaattttaagtgaaaatctgcaagacctttcagacaaattattttctaaaccagaagttagtatgaacagtgaagcaagagagaaaagtagttctccacttctaagcattcatgataaatcatcaagtagtatggaagacaacgtattggaaaaaaaacaagatttaaacaactggctttcagaaaaagacattttaaattcaaagactactttaagtcaaataattaaaaatattcctgcagattcattttcagaaggtagtcaaataattgaaaatattcctgcagattcacttttagaaggtggtcaagtaattaaaaatattcctgaatattcactttcagaagggggtcagataattaaaaatattcctgcagattcatttttagaaagtggaccaggacaatctccagaggtagaagaacatgtctctaaaaaacacttcgaagctgatgagagagattttccaattaaaaaaaatagtagtaccaaaaagaaacatttaataagcgaagtacctaactccaaatcaggttcaagtggcactgtacatgactacattatgaggcaaatattcactgcaccaatattctcagaattggagatagaagtgaaagagccaagtgaaacaccaatgaacttggaaaatcaattacctacaccttggaagagaagtttgtcatcacatattctatttcatgaagaaaatgctgatgaaatagaattgccacagcccagatctgctacaagccagataatacaagcatttcctatagatacacttttagaatctgggataatcaaagtgatagaattagataaagaacaccataagagttctttgctgggtacggggatcacttctcctaaaggaaacctaaaggattcccaagagtattattcagaaatcagaagcgagacagaacctctttctgagcagagtatacccatcattcccaaagacactacttctgttagtagagctgaatttatacaggaagaccaaaatatgttcccacaagattcaagttattattcaatagcaaataaagaactgtatttgccaagaaatggtcagaggctttgtaaagacaaaaatgatctcagttctactttagaaagtttaactaactcattaatggataaacttagtgaatcagatgaaataatgttaaaatcctttttaaaaaacatcttcaatgtttttttcaaatataatcattctgaaagaagaggacaaccagaaaaagaattagaaagactaattcaaccttcttttacaagtgacacagaacaccttgaagaactccaagaggattttgataaagcagacaaattagacagaaaacctattttgagtccaaagttgcgtgtgtttctagaagaactctcagagtcagaagtaaaacatttaaaatctgaattaagtaaacaaatccagcattaccttgtagaaagactttcagaatcaggacatatcaccaaggaggacttaccaaaaatctatcaaaatctgtatctgatgaatgagaaagcagagcagaaagggccaaacagttttcaggggaaatattctgaaactgtgaaagaaatcatgtcttttgtcaacaatttcaatcatcatttcatagataaacatttggaaataaagctgagatcttttttaaaagagattctccaaaactatttcctaaaaaacatttcagaaagcagtttatttaatgagacagcatctgagactatatacccaaacatatcttctctaaggactaaaagtgtctcaatatcttttcatgaactagaacaagatatttcaaaggggagttttggtagaaggtttgaaataaacatgaaatatcctttaagtaaatctctacaaaactatctgatagctttatcagaaaatgaattattacatctaaaagctgatttaagcaaacacctccagagtctttttatagaaaaactttcaaaatcaggactaatgacaaaaaagcaattagaagggatcaaccagcatataaatttgcttaattctagttctataccattaaaatatataaaaacacatttaccttttagagatgactgtcactttgtggagaagcattcagaaaagcaaaataaatattcaagaattgttcaacaaaccactttacaaacggtttctgaggataaacttagagaagcagaattgattcgagagaaagaaaagaaatattttcccttacagaatttaaagggaaattcatctttaattaaggaacagaaaagttattacactaaggaagaagctaaaacaccaagtttaatcaaagtacaaccttcttccaatgaaaatatccaggcaagtccattaagtaagtcatcagaaatacttacagatatactgcttaagaaactaaggaaagaacatgtattcacgcagcttcctcaagcagaaaattctgttcataaaacagagattcaagacccatatagttggggtggtaaatcaaaaataactcaatcaaaagcttggtgtgaaaagacactgaaaatgaagtcccttgatagaaaggagcatgtaaacatctataaatggactgttcaggaaaaacctgaagcagtattaacatcgtatccaagaattcctaatgccagaatgccaagggaagatgagtacttaaacagaatcactttcccttcctggcaaagtagcactttaactcatttcaatacagagactggggaaaaatcaaaattagaagaccagtattgtcagacattgaaaggaaataataacaataataaaaagcatttagtaacatttgcacaatacaaaaaagaaatacaaactctttatataaaaccagatgaaatttgcagtgaaaaatgtgccaagttccctgaaatacagtcattccaatataaggttgtagaagatgagaaaaacttgaaaccacacctcttcccagaattatttaagatagaagatctaaaacccaaggattgttcagataaatttgaggatttacatgacatgacctcatttacacaccttaaaaaagtaaaatcaagatcaaggcttttaggaaaaagctcagatgatatccataaccatgccagacactctgcaagaccatatactgctccggaggttaacaagcaacgagaaagctacagtggaaagtttacaagtcgtcgaatggtttcatcaggcttagttcatataaatgataaaacatcagattatgaaatgcataaaatgcggccaaaaaaaattaaaagaggatattgaaaaaaa

SEQ ID NO: 120464 - DNA, 2694 bp, Homo sapiens
ccctaggacacctttctaaaaagactccctgtggtgttcagaatcactcctacagtcaggttctccacaatggatctcagtgctgcaagtcaccgcatacctctaagtgatggaaacagcattcccatcatcggacttggtacctactcagaacctaaatcgacccctaagggagcctgtgcaacatcggtgaaggttgctattgacacagggtaccgacatattgatggggcctacatctaccaaaatgaacacgaagttggggaggccatcagggagaagatagcagaaggaaaggtgcggagggaagatatcttctactgtggaaagctatgggctacaaatcatgtcccagagatggtccgcccaaccctggagaggacactcagggtcctccagctagattatgtggatctttacatcattgaagtacccatggcctttaagccaggagatgaaatataccctagagatgagaatggcaaatggttatatcacaagtcaaatctgtgtgccacttgggaggcgatggaagcttgcaaagacgctggcttggtgaaatccctgggagtgtccaattttaaccgcaggcagctggagctcatcctgaacaagccaggactcaaacacaagccagtcagcaaccaggttgagtgccatccgtatttcacccagccaaaactcttgaaattttgccaacaacatgacattgtcattactgcatatagccctttggggaccagtaggaatccaatctgggtgaatgtttcttctccacctttgttaaaggatgcacttctaaactcattggggaaaaggtacaataagacagcagctcaaattgttttgcgtttcaacatccagcgaggggtggttgtcattcctaaaagctttaatcttgaaaggatcaaagaaaattttcagatctttgacttttctctcactgaagaagaaatgaaggacattgaagccttgaataaaaatgtccgctttgtagaattgctcatgtggcgcgatcatcctgaatacccatttcatgatgaatactgactgccgggagttcctgaacagatttttcactcccatgagtgccaagacggtgcaatgggtagtcccctagatgtgaaaatgaagagagagggttttaccatcctgagaagaaataatgatggaaacatgtttaatgtttgtgcagtgtaaatgactttgactcagtcacattgaagtaaaaatattaaaatctgttgaaataactcttaggaaattatcaactaattttttcagatcagtatcttctagattccagacagaaaaaaattacacttcagaaaagacatcaaaggcaacatatgacaacaagtaatttatgaatctgggtagtagcgttggtaatctgagttctttaagggttcacaggacaacgaagtgcatgtggcagtgtgctggcagtggccttgaggctttggaccattggttacaaaacagacacagccaagataagatccacacacacattattaacaaggaagtgatttgctgcaccttgagttgagaggactacatgtagaaaagtcttaaaatagagctaaacaccacagtggtcaacaaagccatcataatgttggtgtttgtttccctccaatgtatgtatgtttagtttttatccaacctgaggaatgaaaacttaactggatctctcttgcatccttaaagggcctgagtctcaacatggctgctgatccatacttacacatcttactgtcaatcttgcctacattgattatagaaccactattacgtgaaaaggcttgaaacaaccaacatatacaaataaaaccctgccttgtaaaatagtaaaagagaagccatatattggcttttcttcttaacttgggagatatattgaaacaaggtgctttataagattattgtacttaagactttaatagtgttacttggatagcttatatgaattttgagaattttatatgaattttgagaaagcaagttcaaaagaactctggtaattttcctgtatgtacaatttaaagagtgaataagattattagaattcagcaatagagatatatctattttcaattcaactacagaaatatattttattggccgggtgcggtggctcatgcctataatcccagcactttgggaggccaaggtgggcagatcaggaggtcaggagatcgagaccatcttggctaacaaggtgaaaccccgtctctactaaaaatacaaaaaattagccaggcgcggtggcgggggcctgtaatcccagctactcaggaggctgaggcagaagaatggcatgaacccgggaggaggagcttgcagtgagccgagatagcgccactgcagtccggcctgggtgaaagagcgagactccgtctcaaaaacaaaaaaaaaaaagaaaagaaatatattttattcattcacattaggtcactgtcatactgtcataggctgagagagttcttcaaaaattatgttttcccaagatcagttgcttatagataatgttcaatgacctcaagacatatatttttgagaaattatcattttaaaaaatttggtctatactgattgttttcactgattccaatattattacttataacactgacctctggaaaatattttgttcacaagaaataataaagtataatgatttgttgcatc

SEQ ID NO: 120465 - DNA, 708 bp, Homo sapiens
atgagttttggaggggacaaaaataatcaaaccatagcaaatgaaaaatcagtgttcagggaacaggatatgctcattcttatgtttaacacccctaagggagcctgtgcaacatcggtgaaggttgctattgacacagggtaccgacatattgatggggcctacatctaccaaaatgaacacgaagttggggaggccatcagggagaagatagcagaaggaaaggtgcggagggaagatatcttctactgtggaaagatgcaggtgtcagctgtacagagtgagaggacagtgcacacaagacagccaggagatgaaatataccctagagatgagaatggcaaatggttatatcacaagtcaaatctgtgtgccacttgggagacaccagttgcaagttcaggcctccagaaacttctgaccaatcagcttcaagttggggtttccgcagccccctcttcgggttcagttaatttgctagagcagttcacagaactcagggaaacatttacaggtttttgcatttctgacaatggatggccccacctggacctgccaaccagtcctgtggccccaacccaggaacttacccaccataagagggcagctttgattccctatgatttcatctctgacccaaccaatcagtatgcccctaccttaggcccctgctcatcaaaagatcctgggaaaaaccctaatctttga

SEQ ID NO: 120466 - DNA, 638 bp, Homo sapiens
ggattttttacgagattacaatctagaaacttattggcaatcagatgggtcccagcctcatttagtgaacatccaattcagaagaaaaacaacagtgaagacattatgtatttatgcagactacaaatctgatgaaagctatactccaagcaagatctcagtcagagtaggaaataattttcacaaccttcaagaaattcgggtggcagcgttcctccctctgaaactaagacgtctaggccagcagaacgtaatgtcgtgggaacaggaagcaaaaatgttgccagtggatcaccaggggtgatggtggtaccattttcacttccaccccttgattcctggaactgtgaatcctggctatgggagaaactgtaccatatattggaccctgattcagagcatacacagccttctggagaactttgccccagtcctgcaaagtattgtcatctagttggcattgtgattgtgacttcaaaaggctattccaccattctgtctatccagctgcttcaggatgatggggaacatggtaatttgcctgagaaaagtgaagagtgtattgtagctttatttttaatagcgcaaacctggaaacaacccaaatatacgacagctgaatggataaacaatgtgtg

SEQ ID NO: 120467 - DNA, 912 bp, Homo sapiens
tcagtgaagtggggcctgttgagatattccttctaaagtgaaagataagttgctgcatttgacccatcttacaaccacgaaagagccacaatgcttagtgggcctatttggatttttggatgtaacacattcctcatttgggagtgttactctggcccatttattgagcgacctgaacagctgccagttttgaatggggtccagaacagaaggctctgcaacaggtccaggcagctgttctgctgctctgccacttgggccatatgacccagcagatccaatggtgcttgaggtgtcaatggcagatagggatgcatcaccccatgatccactagcaaaatttttgtttcctgttcccatgacattacattctgctctcctagaggtcttagttccagagggaggaacgctgccaccaggagacacaacaacaattccattaaattggaagttaagattgccacctagacactttgggttcctcctacatttaagtttacaggctgcaggctcaacaccatgtggaagctgccaaggcttggggcttccaccctctgaagcaacagcctgagatgtaccttgacctcttttagtcacgactggagtggctgggatgcaggacaccaagtcattagaccccatggctttgcagggtacaacacctgtggctgttttcataggctgatgctgagtgcctgtggtttttccaggcaaatggtgcaagctgtcaatggatctaccactctggggtctggaggatgacagccttcttcttacagctccactaggaagtgccccactggagattctgtgcgggggctccaacttcacattttccctctgcattgtcctagcagtttctccatgagggctccacccccgcagcaaacttctgcctgaacattcaggcat

SEQ ID NO: 120468 - DNA, 685 bp, Homo sapiens
atgagcctggtgcagtggctcacagctgttattctggcactttgggaggccaagatatggagagcagatggtcaacattctcctcataaccttccagggaatggaagatacccgttgaagccctcccaggtcacaaaacctaagccttgtgcctactggaaagaagaagcagtggagtccttgacagaagcagtggtgctggaacctggtgctaggcgctgggccaagcactttacatactgtgtgttatgtaatcttcacagcaatatgaggctcactgggttagaattaaaaagaggaaagcaggttacctcatggagaagagacagtgaccagatcatgcccagagtacctgaccatggaagaacctcatttgtcctttgccctgaacgtagtgcaggacagtggacctggaaccacagtcccccaaactttgaaacacttgaacattttaaggagaaactttgccttctaagaaaggggcactttctcaagaatgagagcagcgaggttaaaagcatgatgcgtagctttcctggcagcttgtactactttcaactctgggaccacatcctggaaaacgaagagtttatgaagtgtttagatggaaatatagttagttgggaagaagacgtctggcttgtcaacaagatcatcccaactgttgacaggacactgcgctgct

SEQ ID NO: 120469 - DNA, 1362 bp, Homo sapiens
atgaagactctgcagtctacacttctcctgttactgcttgtgcctctgataaagccagcaccaccaacccagcaggactcacgcattatctatgattatggaacagataattttgaagaatccatatttagccaagattatgaggataaatacctggatggaaaaaatattaaggaaaaagaaactgtgataatacccaatgagaaaagtcttcaattacaaaaagatgaggcaataacaccattacctcccaagaaagaaaatgatgaaatgcccacgtgtctgctgtgtgtttgtttaagtggctctgtatactgtgaagaagttgacattgatgctgtaccacccttaccaaaggaatcagcctatctttacgcacgattcaacaaaattaaaaagctgactgccaaagattttgcagacatacctaacttaagaagactcgattttacaggaaatttgatagaagatatagaagatggtactttttcaaaactttctctgttagaagaactttcacttgctgaaaatcaactactaaaacttccagttcttcctcccaagctcactttatttaatgcaaaatacaacaaaatcaagagtaggggaatcaaagcaaatgcattcaaaaggtttgtcctcactggaatagacacttactccggatatgggtttgcctatactgcatgcaatgcttctgccaagactaccatcgtggactcacagaatgccttatccaccatcacagtatgccatacagcattgcctctgatgaaggcactcactttacggctaaagaagtgcagcaccaagattcatgggtccaggaatcaaggggtggaagtggaagtggaagtggcaccactcaccatcacccctagtgttccactagcaaaatttttgcttcctgttcccatggcattatgttctgctggcttagaggtcttagttccagagggaggaacactgccaccaggagacacaacaacaattccattaaactggaagttaagattgccacctggacactttgggcttctcctacctttaagtcaacaggctaagaagggagttacagtgttggctgggatgactgacccagactatcaagatgaaatcattctactacttcacaatggaggtaaggaagaatatgcatggaatagcagagattcattacggcttctcttagtattaccaagccctgtaagtaaggttaatgggaaactacgacagcccaatccaaacaggactacaaatggcccagatccttcaggaatgaaggtttgggtcgctccatcaggaaaaaaacacgaccccctgaggtgcttgctgaacgcaaagggaatacataatgggtag

SEQ ID NO: 120470 - DNA, 7715 bp, Homo sapiens
gtaggaggaacccaaagtgtccaggtggcaatcttaacttccagtttaaggagatcgatgttgtgtctcttggtggcagcgttcctccctctggaactaagacctctaggccagcagaatgtaatgtcgtgggaacaggaagcaaaagttttgctagtggatcattaggggtgatggtaagaaaatgtattcttattatctctttcaatgtctcatgtatagtaggttatagaaataaaccatttgaaaaatactaccaatggagatttgctgggctgcctcttaatggtcaccttttggtcaatatggctacagaagaagctgaagcatcaatatggagagcagatggtcaacattctcctcataaccttccagggaatggaagatacccgttgaagccctcccaggtcacaaaacctaagccttgtgcctactggaaagaagaagcagtggagtccttgacagaagcagtggtgctggaacctggtgctaggcgctgggccaagcactttacatactgtgtgttatgtaatcttcacagcaatatgaggaggaggaggaggaagcccccccccaagaagaagaagaagaagaagaaaaagaagaagagtagtaggaggaggaggaggaggaggaagaagaagaggaagaagaagaagaagaagaagaggaggaggaggaggcagcagcagcagcagcagctatgtaaagaagataaaactaaaaccaaaataaggcactttctcaagaatgagagcagcgaggttaaaagcatgatgcgtagctttcctggcagcttgtactactttcaactctgggaccacatcctggaaaacgaagagtttatgaagtgtttagatggaaatatagttagttgggaagaagacgtctggcttgtcaacaagatcatcccaactgttgacaggacactgcgctgctttgttcctgaaaatatgacaattcaagaaaaaagtacaactgtttcacaacagatagatatgaccactccatcccaaattactggagtaaaaccacaaaatactgcacattcctctacactattgtctcaaagcatacctatatttgcaactgattacacaaccatatcatattccaatacaacatctccacctctggaaacaatgactgcacaaaaaatcttaaagacactggtagatgagacagctacatttgcagtggatgttttatcaacttcatcagccatctctctgcctacccagagtatatccatagacaatactaccaattccatgaaaaaaacgaaatctccatcttcagaaagcacaaagacaacaaaaatggttgaagccatggctactgaaatctttcaaccacctacaccttctaatttcctatccacatccagatttaccaagaattcagttgtatctacaacttcagcaattaaatctcagtcggctgttacgaagacaacatctttattttcaactattgagtcaacatctatgtctacaacaccttgtctcaaacaaaaatccacaaatactggggcactccctatctccacagctggccaggagttcattgaatctacagctgccggaactgtaccttggtttacagtggaaaagacttcacctgcatctactcatgttgggactgcatcatcattcccacctgagcctgtgctcatctccacagctgctccagtagattctgtatttcctagaaaccagacagcatttccattggcaacaactgatatgaaaatagcatttacagtccattcattgactctcccaactaggcttattgagaccacacctgccccaaggacagctgaaacagaattgacatctacaaattttcaggatgtctctttacccagagtggaagatgccatgtctacttccatgtcgaaagagacctcctctaagaccttttctttcttaacatccttttcatttactgggactgagagtgtacagacagttattgatgctgaagctacacgtacagccttaactcctgaaatcacacttgcatctacagtggctgaaactatgctttcctccacaatcacaggacgagtttacacccagaatacacctacagctgatggacacttgcttactttgatgtccactagatcagcttccacatccaaggcacctgagtcaggtcccacatccacaactgatgaagctgcccatctgttctccagcaatgagaccatttggacttctaggccagaccaggccctgctggcatctatgaacacaaccaccatactcacatttgtgcctaatgaaaattttacatcagcatttcatgagaatactacttatacagaatatttatccgcaactaccaatatcaccccactgaaagcatctccagagggcaaaggtaccactgccaatgatgctactacagccagatatacaacagctgtatccaaattgacatcaccatggtttgctaatttctccatagtttctggaaccacatccataaccaatatgcctgaatttaaacttaccactttactactaaaaacaatacctatgtctacaaaacctgcaaatgaacttcctttgacaccaagggagactgttgttccatcagtagatataatatctactcttgcttgcattcaaccaaatttttctactgaggaaagtgcttctgagaccacacaaacagaaataaatggtgcaattgtatttggaggtacaacgacccctgtaccaaagtcagcaacaacacaaagattaaatgccactgtgacaagaaaagaagcaacttcccattatcttatgagaaaatcaactatagcagcagtggctgaggtttctccattttcaacaatgctggaagtgacagacgaatcagcacaaagggtgacagcttctgtcactgtttcctcttttcctgatatagaaaagctaagtaccccattggataataaaactgcaacaactgaggtgagagaaagttggcttttgacaaaattggtgaaaaccacacctaggagttcatacaatgaaatgacagaaatgtttaattttaaccacacctatgtagcacattggacttcagagacatctgagggaatttcagctggatctcccacttctgggagcacacatatattcggtgaacccctgggtgcttctaccacaaggatatcagaaaccagtttctccactacccctacagacaggacagctacgtccttgtctgatggtatcttacctccacagcctacagctgctcattcctcagcaacccctgtgcctgttactcatatgttctcattgccagttaatggcagttctgtggtggctgaggagactgaggttaccatgtctgagccttctacactggccagggctttttctacatctgtgctctcagatgtctcaaatctatcctcaactacaatgaccacagcattggtaccacctttggatcagactgcttccacaaccattgttattgtgcctacccatggagacttgattcgtaccacttcagaggccacggtaatctctgtcaggaagacatccatggcagttccttctctgacagaaacaccatttcattcactgagactctccactcctgtgacagctaaggctgagaccacccttttctctacctcagttgatacagtaaccccatctacacacactcttgtctgctcaaaacctccccctgacaacattcctcctgcgtcctccactcatgtgatctcaactacgtctacaccagaagcaactcaaccaatatctcaagtagaggagacttctacctatgctctcagcttcccatatactttcagtggtggtggagttgttgccagcttggctactggcaccacagagacctctgttgttgatgagaccacaccctcacacatctctgccaataagttgactacttcagtaaacagtcacatttcttcatctgccacatatcgtgtacacacaccagtgtccatccagttggtgactagcacctctgtcttatcttccgacaaagaccagatgaccatatccctgggaaaaacccctagaactatggaggtgacagaaatgtccccatcaaagaattcttttatttcatactcccggggtactccatctttggaaatgacagatacaggatttcctgagaccacaaaaatttccagtcaccaaacacattcgccttcagagattccacttgggactccctctgatggaaatttggcttcatctcccacttctggaagcacacagattacaccaaccttgacctcaagtaacacagtaggtgttcacattccagaaatgtctaccagtcttgggaaaacagctctcccctcacaagctctgacaatcaccacttttttgtgtcctgaaaaggaaagcacgagtgcccttccagcatatactcccaggactgtggaaatgatagtaaactccacctatgtgactcactctgtctcatatggccaggatacttcatttgtagataccacaacttccagctcaacaaggatatcaaatcctatggacatcaatacaactttttcacacttgcattcacttaggacacaacctgaggtgacttcagttgcctctttcatttctgaaagcacacagactttccctgagtccttgtctctttccacagctggactatataatgacggttttacagttctctccgacaggatcactacagccttttctgttccaaatgtacctacaatgcttcctagagaatcctctatggcaacgtccactcctatttaccagatgtcctcattgccagttaatgtaactgccttcacctccaaaaaagtttctgacactcccccaatagtgataactaaatcttctaaaacaatgcatccaggttgtttgaaaagtccctgtacagccacttctgggcctatgtctgagatgtcctcaataccagttaataactctgctttcacacctgcaacagtctcttctgacacttccacaagagttgggttattctctactttattgtcttcagttacccccaggactactatgaccatgcaaacatctacattggatgtcacacctgtgatatatgctggggctacttcaaaaaacaaaatggtttcctctgctttcactacagaaatgatagaggcaccttccaggatcacacctacgacctttctctctccaacagagccaactttgccctttgtaaaaaccgttcccaccaccattatggctgggatagtgactccatttgtaggcaccactgccttctctccactcagttctaagagcactggagctatttcctccattccaaagaccacattttcaccatttctatcagcaactcaacagtcatcacaagcagatgaggctacaactttgggcatattatctgggattactaacaggtccctatctactgtgaacagtggtacaggggtagctctcacagatacttattccagaatcactgttcctgaaaatatgctttcacctactcatgcagatagtctccatacttccttcaatattcaggtttccccatctctgactagctttaagagtgcttctggacccacaaaaaatgttaaaacaaccaccaattgcttttcttctaatactagaaagatgacttccttgttagaaaagacttccttaacaaactatgccacatctttgaatacccctgtttcataccctccatggaccccatccagtgcaactctaccctctttgacatcatttgtttattcacctcatagtactgaagctgagatctctactccaaagacctctcctcctcccacatcccaaatggttgaatttccagttctgggaacaagaatgacatctagtaatacccaacctctgcttatgacttcctggaacatacccacagctgaaggttctcagtttccaatttccaccactattaatgtacctacatccaatgagatggaaacagagactctacaccttgttcctgggcctttgtcaacattcacagcctctcagactggtctagtatctaaagatgtcatggcaatgtcatcaattcctatgtcaggaattcttcctaaccatgggctttctgagaacccttcattatcaacatctttaagagctatcacttccacattggctgacgttaagcacacatttgagaaaatgaccacatctgtaactcctgggaccacactcccatcaattctttctggtgccacttcaggatctgtaatttcaaagtcacccattctgacatggctcttatctagtctcccttctggctcccctccggcaactgtatctaatgcccctcatgttatgacttcctctacagtagaggtgtcaaaatcaacatttctgacatctgacatgatatcagcgcacccattcactaacttgacaacactaccctctgctactatgagcaccatactcacccgaaccattcctacacctacactgggtggtatcactactggcttcccaacttctctccctatgtctataaatgtcacagatgacattgtgtacatttccacacaccctgaggcatcctccagaaccacaataactgccaaccccaggactgtgtctcatccttcatccttcagcagaaagactatgtcaccttctacaactgaccacactctatctgttggtgccatgcctctgcctagctctacaataacatcttcatggaacagaattccaactgcatcatcaccctctactttaattattcctaagcccacactggactcccttctaaatataatgactactacatccactgttcctggagcctcatttccactcatatccactggggtgacatatccttttacagcaactgtgtcttcaccaatatcgtccttttttgaaacaacttggctggactccacaccttcctttctatctacggaagcatcgacttcgcctactgccaccaagtccacagagcctggaaattgcaaagctgatgaaacagcctctaaatacaaagggacctataagtggctattaaccaaccctacggagacagcccaaaccagatgcataaaaaatgaggatggaaatgccacaagattctgttcaatcagcatcaacacgggcaaatctcagtgggaaaagccaaagtttaaacaatgcaaattgcttcaagaacttcctgacaagattgtggatcttgctaatattaccataagtgatgagaatgctgaggatgttgcagagcatattttaaatttgataaatgaatccccagccctgggtaaagaagagacaaagattattgtttctaaaatatcagatatttcacaatgtgatgagataagtatgaacctaactcatgttatgttacaaataatcaacgttgttttggaaaagcaaaacaattccgcctctgatctgcatgaaataagcaatgaaattctgaggataattgagcgtactggtcacaagatggagttttctgggcagatagcaaatctgacggtggccgggctggctttggctgtgctgcggggggaccacacgtttgatggcatggctttcagcattcactcctatgaagaaggcacagaccctgagtctcatttacctaccatggctccttcccatcatttcggctccaggcactttactcaggcctcagtggaggaactacagttctccctctaccggaggtgttga

SEQ ID NO: 120471 - DNA, 726 bp, Homo sapiens
atgaatttggagtttgagaaagacatgatctttgtgttctggaatgggcattctagatttcacaagatagatgaagagaatgaggcaaacttgctagcagtcctcacagagacactagacagtctccctgtggatgaagacggattgccctcatttgatgcgctgacagatggagacgtgaccactgacaatgaggctagtccttcctccatgcctgacggcacccctccaccccaggaggcagaagagccgtctctaactgagaattcatggagcaataaagcgaagagtatttgtcaacagcaaaagccacaaagacgtccctgctcggagcttctcaaatatctgaccacaaacgatgaccctcctcacaccaaacccacagagaacagaaacagcagcagagacaaatgcacctccaaaaagaagtcccacacacagtcgcagtcacaacacttacaagtttgtttttataaatgtgccatatcttccagtgaccccaagggttccccatttgagaacaagactattgaacgcaccttaagtgtggaactctctggaactgcagagccagtgcaccactggactcacagaagatgctcatcactgatgttctataggtgtttctgggattcctgtgacaatataaaaggcaacaagtgcatagtgacaaatgccaaagagatgcagaaaccacaagatggaggactcgcctttggcaaataa

SEQ ID NO: 120472 - DNA, 531 bp, Homo sapiens
atgacccttattgatcatgagtttaaaggagtgaagttgcagaccttcccggtgagtgttacagctcatgaaggcagtgtggacccaaagagactgggcgccgaggagcagggggcggcgctcatcggggaggctccggccgcacaggagcccacagtgggggtgggaggctcgggcatggcgggctgcaggtccggagccctgccccgcgggaaggcagctaaggctcggcgagaaattgagcgcagcgccgaacattttaatagaatatgtttaaaactcactgaaacactatttgaggcaagtaccctaggaagccagcaggaagcatgcccatctgtgcccttggagacaggcctgcagactgcacaccctaaagaaccctttacttgccctactgaacaaggtcttggaggcagccagcctgtcaaggtccagacaggatccacagctgccctagtacctggtaacaggtttgccaaacaaagaactaactgcagacccaccaaaagccgcatcaaccagctttga

SEQ ID NO: 120473 - DNA, 530 bp, Homo sapiens
atgaacaacttgagacgcgctgccttaagagctgtaacactcaccgcgaaggtctgcagcttcactcctgagccagcgagaccacgaaccccaccagaaggaagaaactccgaacacatccgaacatcagaaggaaaaaactccggacacgccgcctttaagaactgtaacactcaccgtgagggtccacggcttcattcttgaagtcagtgagaccaagaacccaccaattccagacacaaaactgagaggcggaggttgcaagggttcggtctcgctggctttaggagtgaagctgcagaccttcgccgtgagtgttacagctcataaaggcagtgtggacccaaagacccttgggtggtcgatgggactgggcgccgtggagcaggaggtggtgctcgtcggggaggctccggccgcacaggaaccaatggagtgggtgggaggctcaggcatgggggctgcaggtcccggagccctgccccgcgggaaggcagctaaggcccggcgagaaatcgagcacagcgccg

SEQ ID NO: 120474 - DNA, 649 bp, Homo sapiens
atgaggggcttagcacctaggccagcggctgcggagggtgtgctgggtccccccatcagtgctggcccactggcgctgcgctcgatttctcgccaggccttagctgccttcccgcggggcagggttcgggacctgcagcccgccatgcctgagcctccccacgactccccgcctcttcccatcgaccacccaagggctgaggagcgtgggcgcacggtgccggactggcaggcagctccacctgcagccccagtgcgagatccactggatgaagccagctgggctcctgagtctgcttcactcctgagccaccgagaccacgaaccccaccagaaggaagaaacttcgaacacttccgaacataaggaacaaactccggacacgacgcctttaagaactgtaacactcacggcgagggtccacggcttcattcttgaagtcacactggaagtcctagccagagcaatcagagaagagaaagaaacaaagggcatccaaatcagtaaagaggaatttaaactgtcactgtttgatgctgatatgattgcttaccttgaaaaccctaaagactcctccagaaagctccaagaactgataaaagaattcagcaaagtttccagatacaaaattaatgtacacaaatcagtag

SEQ ID NO: 120475 - DNA, 990 bp, Homo sapiens
atggtgttttacactgacaatttcattccaattgtctcctgggagacacagaccatgtacaggaatccatcttcatccttctcactctgctacaatgctgtgtctgttcaccgccaggaggaaggcttgattagcactgagctggaaggaccttctaatgatcttgatgagctcactcaggttgatgtggtccagtacaaggaacattgctttatccaggacgggaagctgcttctcagccttgtatcgttctgttactaccaagattttgggtggatgctgctctcggagaagtcaaacttctactctttgttcaaagccattttcaatgtggatgactccgtggttgatctggagaccctggcagccttatatgaaaacctatttaaaactgtgctctcctgtaaatctgtcattgatcctacctctctcttgagttatggcgcagggacagtttctggtccagcagcccctggtagtctgcatcctagggcctgtcaggctagagatgatgagctgctggagcctttaacaggaggctattacgtggttatacgtaaaagcaggaacaagtacatcgtgttggaacacaaagaaggcccgtgtggctggagtttagtgggcaggaggggtgagtggtgtgagagaagactggaaaggcagaagtggttaaatcagtttgtacggcatgagtatgaggttggatttgattccaagaggaatgaagatgaaataacagagtgctgtgacctatgcggcaggtggagacaaaggaagaccaagagtggaagcagagaaacctgcttgatatgggccagaacacaccagcatccattgagtaaagtgcagactgcaaggcctctcaggaatttaagtactacctcacacctcctgagaacctggtttctggaggcagcccttgaaagacgactctattttgatcagcaggaaataatggggggaatgcggtatgaagaaattatccagtga

SEQ ID NO: 120476 - DNA, 927 bp, Homo sapiens
atggtaggagatgagtttggaagtgtaattgaggcgaggcagggaatgagcttaacaaccaggccaaggagtttagacttcgccgagtgtttaaaggaagatattggagccattttcaatgtggatgactccgtggttgatctggagaccctggcagccttatatgaaaacagagcccaagaggatgagctggttaaaataagaaagtattacgagacatccaaagaagaagaactgaagctgctggataaacctgagcaccagctaaatcacaacaccgtcattcctgtgacctgttgcatgcagcaggatgaccctgctgccgggaaaagcagcgctgagatttgtgctgttggatacagccaaccctctcaatctagagatgaggcaagtgtagaaaatgaagcagaaatggagctatcagatcagggttaccagtcagccctagaaacttccaaggttctccggcttgcactggagttccatgccttgtcccttgggtcctctagaaacgggtccccaacccctgggccacagactggtaccagcccatggcctgttaggaaccaggccacacagcaggagatgggaccatctagttgcaggaagctagagggaccatcagggctcccactaatcctagattatgttctatatgttagaagtctgacatgggactcacaggctaaactcaaggtgctgacagggctgtactcccttttagaggctctagggagaatctgttccttgccttttccacttctagaggcttcccacattccttggctcacggcccacttcctccatcttcaaagccagcgacattacatctctctgatcattcttacgtcgttatatctccctctgatcatagccagggaaagtcctcagcgtttaaagactgactttaaagattcatgtgattag

SEQ ID NO: 120477 - DNA, 438 bp, Homo sapiens
atgtctcttacctctgagctcagtgccctggtctacctggtttactactgcacagagcttggcacttgtggaaagacaaatggggacccagattgtgaagcctctgctcctgcgctgaccctgagctgcctggaggagcttagtcaggagaccaaggccaggatggaggaagaagcctacagcaagggattccaagaaggtctaaagaagaccaaagaacttcaagacctgaaggaggaggaggaagaacagaagagtgagagtcctgaggaacctgaagagatgaaattatgggtagccatccccatgaagaggcccaagacaaagagagttgactcgaagccctggagtgagtttcttacaagaacagggacagggaggacacacggaatagagggcaaactcagctcagtggcaaaggcctcatctccctcctga

SEQ ID NO: 120478 - DNA, 150 bp, Homo sapiens
atgttggaaggagaccaaggagatgaaggacacgaaggagacgaaggagatgaagaagacaaagaagacgaagatgaagacgaagaaaaagaagaagaagaagaagaggaagaagaagaaagcatattgtgtctcattttaaactgctag

SEQ ID NO: 120479 - DNA, 1110 bp, Homo sapiens
atgtggatcaattatacctatttttggaactatgaatgtgatgcactttctgcatatgtggctctgtgcaacaagtttgatatctgtattcagtggagaacacctgattactgctccctgagttgcccagaggggaaggaatatcaaccctgtgtgcgaccttgtgaagcaagaacatgcctgaaccaatggttctatggacacacttcctgtttgaatctaagagaagactgtgtgtgcaaagttggaactattcttcacaggccacattcagcccagtgcattccagagaaagagtgtgcatgcactgatagtgaagaccaaccccgcactgctggggagatttggaatgggggcattgatgaatgcactctatacaaatgtttggagaatggaagcattatccctatagaacctgactgtgatgaagagcccacgccagtttgtgaacgagaagctgaagttgtcatgggcatcattgataaatggacctgctgttcaaaggaagtttgtggatgtgacacgactttgtgtgaaactagcattccaacatgtacaaatagtcaaaaattgattgttggccacagtcctctttcttgctgtccacagtacaaatgtgaatgtgacccattgaaatgccccagtatttcaacaccagaatgcagagaagatcaattcatgattcaagttcgacaggaagaaccttgttgtttttcccctttttgtgtttgtgaatcttgcaccaaacctgttccactatgtcatgatggggaatttctcacagtagatcttaatagcacacacttctgttgtcctcagtattactgtggcaaacgagaagaaagaatatgccagaaagtgatcattaaatcggtcataaggaaacaggactgtatgagccaaagccctataaatgttgcatcttgtgacggcaaatgcccatcagctaccatatataacatcaatattgaaagtcacctaagattctgcaagtgttgtcgtgaaaatggagtacgaaacttgtctgtgcctctgtattgctcaggaaatggcactgaaattatgtacactctccaggaacccatagactgtacatgccagtggaattaa

SEQ ID NO: 120480 - DNA, 914 bp, Homo sapiens
tgcccattgaaagcaaatttcggaacatctggataatgtccaccccgagccgattcaagaaggacaaagagatcatagccgagtatgaaagtcaagtcaaagaaattcgagctcaactggtagaacaacaaaaatgcctggagcagcaaacggagatgcgagttcagcttctccaggatctgcaagatttcttccgaaaaaaagctgaaattgagacggaatattcccggaatctagagaagttagcagaaaggttcatggcaaaaacaagaagcactaaggatcatcaacaatacaagaaagaccagaacctgttgtctccagtgaactgctggtatttgctcctgaaccaagtaaggagagaaagcaaagaccatgcaaccttgagtgacatctatctgaacaatgtgattatgcggttcatgcagataagtgaggattctaccaggatgtttaaaaagagcaaagagattgcattccaacttcatgaggatttaatgaaggttcttaatgagctttatacggtgatgaaaacataccatatgtatcatgcagagagcatcagtgcagagagcaagctgaaagaggccgaaaaacaagaggaaaagcaaattgggagatctggtgatccagtcttccatattcgactagaggagagacatcaacggcgaagctctgtaaagaaaattgaaaaaatgaaagaaaaagttattaaaaaggtggaaaatcagcattttcttatggttcaacttaacacatgttctcaagatgactattttgaagggaaactctcaggtgcgtggggaaagccaccagggccaccttcagctgaaccccaggaacctaacacagccacagtacctccctccaggtcacagcctctctttgggcaagctgtctctctggcggcttga

SEQ ID NO: 120481 - DNA, 162 bp, Homo sapiens
atgcacaagcgcatccatggagtgggcttcaagaagcgtgcccctcggacactcaaagagattcagaaatttgccatgaaggagatgggaactccagatgtgcgcactgataccaggctcaacaaagctgtctgggccaaaggaataaggaatgtcccataa

SEQ ID NO: 120482 - DNA, 1086 bp, Homo sapiens
tgcgataccccaattgacgccttagttgccggcttgtaaataccgggtcgacccacgcgtccgggcgccttctccttgcttctgggggtcgaggccttgctcccgctgagcgggaaaagaatccaggcccttccacgcgcgtgtgggtgcgggggccccgaagagctcgaggttccccgctaggtctccgctggggcaggaaccggaatcatgggtgggaccaccaagcacccgccgggtcaccttcgaggcggacgagaatgagaacatcaccgtggtgaagggcatccggctttcggaaaatgtgattgatcgaatgaaggaatcctctccatctggttcgaagtctcaagcggtattctggtgcttatggtgcctcagatgctattaactgagtacttggatatgaaaaatactcgtacggcctctgaaccatcagctcaactaagctatgccagcactggacgagagtttgcagccttttttgccaagaagaaacctcaaaggccaaaaaattctcttttcaagttcgaatcgtcctcccatgccatcagtatgagcgcctatctgcgagaacagagaagggagctctatagtcggagtggagaactgcaaggagaagaggctaggctgccaagagtgaaaggaaatgatgataacagaacatacattattgcaggaggtttccagctggagaggaagccactttttctgagcacatggctgagtaaagagcaaggaagcagaatgcccagatggaatcagggctatgccagcaagcacaaagatagtagaaggaaaaggctttaccgcgaatcgacgagttacgaaaagcctggtaaagtgaaagcatacaaatgtgctgtgccacgttatctgaatgcctatcaccagagtgccccctacctacacattagacgtgtgtacccagaagtcaatgattgttccttgactgtgtctaaccgacagtacatcaagagaaggcatggatggctgatccaaactgggtcaccacagatcctccaacctcggaaattggatttgggcccaaatgatgacagcttagcccttgctgacctaccgtaa

SEQ ID NO: 120483 - DNA, 1245 bp, Homo sapiens
atggcacaagaactacgtgacacatgcacaagcttcagtagccgattcgatcaagtggaagaaagggtaatggtgattgaagatcaaattaatgaaatgaagcaagaagagaagtttagagaaaaaagagtaaaaagaaacaaacaaagcctccaagaaatatgggactatgtgaaaagaccaaatctacgtctgattggtgtacctgaaaaaaatctagaagaaacggataaattcctggacacatacaccctcccaagactaaaccaggaagaagttgaatctctgaatagaccaataacagactctgaaattgaggcaataattaatagcttaccaaccaagaaaagttcaggaccagatggattcacagctgaattctaccagaggtacaaggaggagctgcctggcagagacacaacaaaaaaagagaattttagaccaatatccctgatgaacatcgatgcaaaagtcctcaataaaatactggcaaaccgaatccagcagcacatcaaaaagcttatccaccatgatcaagtgggcttcatccctgggatgcaaggctggttcaacatacacaaatcaataaacgtaatccagcatataaacagaaccaaggacaaaaaccacatgattatctcagtagatgtagaaaaggcctttgacaaaattcagcagcccttcatgctaaaaactctcaataaattaggtattgatgggacatatctcaaaacaataagagctatttatgacaaacccacagccaatatcatactgaatgggcaaaagctggaagcattttctttgaaaactggcacaagagagggatgccctctctcaccactcctattcaacatagtgttggaagttctggccagggcaatcaggcaggagaaagaaataaagggtattcaattaggaaaagaggaagtcaaattgtccctgtttacagatgacataattgtatatctagaaaaccccatcatctcagcccaaaatctccttaagctggtaagcaacttcagcaaagtctcaggatataaaatcaatgtgcaaaaatcacaagcattcttacacaccaataacagacaaacagagagccaaatcatgagtgaactcccattcacaattgctacaaagagaataaaatatctaggaatccaacttacaagggatgtgaaggacctcttcaaggggagctacaaaccactgctcaacgaagtaaaaaaggacacaaacaaatag

SEQ ID NO: 120484 - DNA, 2118 bp, Homo sapiens
atggggagaaaccagagcagaaaagctgaaaattctaaaaatcagagtgcctcatctacaccaaaggatcacagcgcctcgccagcaacggaacaaagctggatggggaatgactttgatgagttgacagaattaggcttcagaaaatcggtaatgacaaacttctcccagctaaaggaggatgttcgaacccatcacaaagaagctaaaaacctagaaaaaagattagacaaatggctaactagaataaacagcatagaggagaccttaaatgacctgatggagctgaaaaccatggcacgagaactacgtgacacatgcacaagcttcagtagccgattcgatcaagtggaagaaggggaaatacaaactaccatcagagaatattatgaacacctctacgcaaataaactagaaaatctagaagaaatggataaattcctggacacatacactctcccaagactaaaccaggaagaagttgaatccctgaatagaccaataacaggttctgaaattgaggcaataattaatagcctaccaaccaaaaaaattccagggccagacagattcacagccaaattctaccagaggtacaaagaggagctgagtaacctgatccactacctgggactgagccatcacctgctggcactgaattttatcattgtttcttttggcaaaaaaagcgcgtggtcttctgcccaagtgaaggtgaccgacacagactttgatggtgtggaagtcagagtgtttgaaggccctccgaagcccgaagagccactgaaacgcagcgtcgtttatatccacggaggaggctgggccttggcaagtgcaaaaatcaggtattatgatgagctgtgtacagcaatggctgaggaattgaatgctgtcattgtttccattgaaagacaggctgtctggagccagcagctccttgccttgaggccctctagagtgggtagtggcgtcatggctttgctattctttcatgtggattatggcactggggaaggtttttatctgaggaagctgggacatagctttgagcaccagcagcagagagcagatatatttatgtatgctttatttggctgtaccacccatgaatttcctcctgattcttggctttctgtgtctagatattacaaaattttgatatacttcttaggtgaatttcaagctactttgaaagttcatcttatgccaggtgtacagagtaggattccaaaggactctgatcttgcgaagtggggccagttggagaagccccagaagtatccccgagggcctgctctaggccgtctggaaaacttagcttcccttttatacaggctagttccaaaggtttattttcctgagcaaattcatgatgttgtacgggccacaaagtatttcctgaagccagaagtcttacagaagtatatggttgatccaggcagaatttgcatttctggtgacagtgctggtggaaatctggctgctgcccttggacaacagtttactcaagatgccagcctaaaaaataagctcaaactacaagctttaatttatccagttcttcaagctttagattttaacacaccatcttatcagcaaaatgtgaacaccccaatcctgccccgctatgtcatggtgaagtattgggtggactacttcaaaggcaactatgactttgtgcaggcaatgatcgttaacaatcacacttcacttgatgtggaagaggctgctgctgtcagggcccgtctaaactggacatccctcttgcctgcatccttcacaaagaactacaagcctgttgtacagaccacaggcaatgccaggattgtccaggagcttcctcagttgctggatgcccgctccgccccactcattgcagaccaggcagtgctgcagctcctcccaaagacctacattctgacgtgtgagcatgatgtcctcagagacgatggcatcatgtatgccaagcgtttggagagtgccggtgtggaggtgaccctggatcactttgaggatggctttcacggatgtatgattttcactagctggcccaccaacttctcagtgggaatccggactaggaatagttacatcaagtggctagatcaaaacctgtaa

SEQ ID NO: 120485 - DNA, 843 bp, Homo sapiens
atggcaaagccagttcagctccagaaaaacacacaaaaggagtgcgttttcacagatgttctcaatgatcttggtggtctctgtcccataggagcaccctacttagacctgctctttccccttgaaccacagtctgaatcgaagtcccaggccccactggctggtaaagcaaggatcacagctccttgccagcaatggagcatgactgatgagttgacagaagtaggcttcagaaggtcagtaataacaaacttctctgagctaaaggagaatgttcaaacccattgcaaggaagctaaaaaccttgaaaaaagattagacgaatggctaactagaataaacactgtagagaagaccttaaatgacctgatggagttgaaaacaatggcacgagaacttcgtgattcatgcacaagcttcaatagccgatttgatcaagtggaagaaagggtatcagtgattgaagatgaaattaatgaaataagattcaccaaggttgaaatgaaggaaaaagtgttaagggcagccagagagaaaggtcgagttacccacaaaggaaagcccatcagactaacagtggatctctcagcagaaaccctacaagccagaagaaagtgggggccaatattcaacattcttaaagaaaagaattttcaacccagaatttcatatccagccaaactaagcttcataagtgaaggagaaataaaatattttacagacaagcagatgctgagagattttgtcaccaccaggcctgcgttacaagagctcctgaaggaagcactaaacatggaaagaaacaaccggtaccagcccctgcaaaaacaggccaaattgtaa

SEQ ID NO: 120486 - DNA, 2112 bp, Homo sapiens
atgcgtgcatttgtggttttgatggatgtctccaaattgccctctgaaagaggcggtcctggtttacgttccaaccagcagcatatgcgaatgtttctcaccagtgtggacagaggctccgtgtccttgctggctgatgctgtggccgctgccacacctcaaggcaccaagtcccagccccgtggcccctccaacctggcagccgacctcagggtggcagaagaatcttctggtatggagaacctctttttaaagatgtcatttgactccatcaggcctgcccaggatggtcagtgcacaccggagatctcgatggtcaccccctccccaggatggtcagtgcacactggagatctcgatggtcaccccctccccaggatggtcagtgcacaccggagatctcgatggtcaccccctccccaggatggtcagtgcacaccggagatctcgatggtcatcccctccccaggatgctcagtgcacaccggagatctcgatggtcaccccctccccaggatgctcagtgcacaccggagatctcgatggtcaccccctccccaggatgctcagtgcacaccggagatctcgatggtcaccccctccccaggatggtcagtgcacaccggagatctcgatggtcaccccctccccaggatggtcagtgcacaccggagatctcgatggtcaccccctccccaggatgctcagtgcacaccggagatctcgatggtcaccccctccccaggatgctcagtgcacaccggagatctcgatggtcaccccctccccaggatggtcagtgcacaccggagatctcgatggtcaccccctccccaggatggtcagtgcacaccggagatctcgatggtcaccccctccccaggatggtcagtgcacaccggagatctcgatggtcaccccctccccaggatgctcagtgcacaccggagatctcgatggtcaccccctccccaggatgctcagtgcaccgtggagatctcgatggtcaccccctccccaggatggtcagtgcacaccggagatctcgatcgtcaccccctccccaggatgctcagtgcacaccggagatctcgatggtcaccccctccccaggatgctcagtgcacaccggagatgtggggaccctaccaagatgagatgatggagtcccagctcctgaaatccagagcctggtgcgtcccaaagcaaggaaaggcgtctgcggtcacagtcaacgcggactccagtgccagccgagggaaaggggtcttccctgcagagagccgcacccacctccccctcaaccggggccagcgaaactcagaatcttacctgggaacacaagctcagggaatacgaaacttaattaaggccaggaagctcagtgaaccaccgagctgggttctgcataaagatggcgagaaacagagcagaaaagctgaaaattctaaaaatcagagcacctcttctcctccaaaggaatgcagcttctcgccagcaatggaacaaagctggatggagaatgactttgacaagttgacagaagtacacttcagaagatcggtaataacaaacttctccaagctaaaggaggatgttcgaacccatcgcaaagaagctacaaaccttgaaaaaagattagacgaatggctaactagaataaacagcatagagaagaccttaaatgacctgatggagctgaaaactatggcacgagaactacgtgacacatgcacaagcttcagtagccaattcgatcaagtggaagaaggggtatcagtgattgaaaatcaaatgaatgaaatgaagcaagaagagaagtttagagaaaaaagagtaaaaagaaacaaacaaagcctccaagaaatatgggactatgtgaaaagaccaaatctacgtctgattggtgtacctgaaaaaaatctagaagaaacggataaattcctggacacatacaccctcccaagactaaaccaggaagaagttgaatctctgaatagaccaataacagactctgaaattgaggcaataattaatagcttaccaaccaagaaaagttcaggaccagatggattcacagctgaattctaccagaggtacaaggaggagctg

SEQ ID NO: 120487 - DNA, 651 bp, Homo sapiens
atggcacgagaactacgtgactcatgcacaagcttcagtagccgatttgatcaagtggaagaaagggtgtcccagctgtatttcagctcctcagggaagctgtgttcctcgctgcctcctcacctcttctcctgtgtggagagagcctttcaccagctcttccgggaacagcggcctcagtgtttcatcctcaggctcaaggatgagaaagacgccgagacaggggctctcacccattctagacacaaggatgagaagggcgtcaaggtgggggctccaacccattctagacacaaggatgagaaaggcaccgaggcaggggcttccacccattctaaactcaatgatgagaaaggctctgagacacgggctctcatccattctagacacaaggatgagaaaggcactgaggcgggggctccaacccattctaaactcaaggatgagaaaggcgctgagacaggggctctcacccattctagacatgaggatgagaaaggctctgagacaggggctctcacccattctagacacaaggatgagaaaggcgctgagacaggggctctcacccattctagacacgagggtgataaagatgctgagacaggggctctcatccattctaaactcaaaggaagagaaagacgctga

SEQ ID NO: 120488 - DNA, 1542 bp, Homo sapiens; identical to SEQ ID NO: 119740

SEQ ID NO: 120489 - DNA, 1662 bp, Homo sapiens
ttatttaagaatgttgaatactggcccccactctcttctggcttgtagagtttctgccgagagatccactgttagtctgatgggcttccctttgtgggtaacccgacctttctctctggctgcccttaacattttttccttcatttcaactttggtgaatctgacaattatgtgtcttggagttgctcttcttgaggagtatctttgtggtgttctctgtatttcctgaatttgaatgttggcctgccttgctaggttggggaagttctcctggataatatcctgcagagtgttttccaacttggttccattctccctgtcactttcaggtacaccaatcaggtgtagatttggtcttttcacatagtcccatatttcttggaggctttgcttttgtttctttttactcttttttctctaaacttctcttcttgcttcatttcattcatttggtcttcaatcactgataccctttcttccagttgatcgaatcggctactgaagcttgtgcatttgtcacgtagttctcgtgccatgtttttcagctccatcaggtcatttaaggacttctctacattggttattctagttagccatttgtctaatctttttttcaaggtttttagcttccttgcaatgggttagaatatgctcctttagcttggacaagtttgttattactgagcttctgaagcctacttctgtcaactcatcaaagtcattttccatccagctttgttctgttgctgtcgaggagctgcggtcctttgtgagctgtctgttggcccctactgggaggtgtctcctagttaggctgttaaaccagtcatctgtgtaccgagggtaaggataggggtcgttgctgctgaagtcgtaacttgcttcggcattaacagggacatagtgttgcagatcagaaatgcccctgtgaggcatctgagctacaggcttggggcagctccatcctgcattcccttgatccccagtggagagcagggagcggaggttggtgaggatgtgacgctgagaactagctgacttctcctgttgtgtcctctttctttgatcaccgacagcaaaggtcacaaaatatggcccaccagctaaatcagcccatggcctgtttttgtaagtaaagttgtatcggaacacagccacatccatttgtttatgaattgccagtcgctgcttttgcactttggttccagccatggtgctgtgatagttggaggccaggtccgggtggagatagtcaatcccatcatccataattccaatggtaacacctttccctgtgtatcccagctcccaggcttcagccacattcaaatcaaggccaggagtgccatcagcttgcccagtattgatcagataccactgctttgtaaaaagaggatcgttcatgttgatgtcgatctcattgatgtctctgtaacctcgcttttttcggtcaaatccttcctgctgcaaagccatctttacctctgggccctggcctgggtcatccttgtcactgttatcttcctggggagggtagaggatctgaggcatttctggggtgtgctcacagagatgcactgccttcccattattatcaacatccctgctggagcacagcgtgcatttgttacgcgtgctgaaccgacactgacacatcgtcat

SEQ ID NO: 120490 - DNA, 894 bp, Homo sapiens
tagtggtagaaagacaggaacattgtttctcacttcataccgggtaatttctacttctactttaatctgctgattaactctacatttgttttccttgaaatgaagaaaacttaaacattgacttttgaagtgtttttaaacgtgcgctttgggattttccacactatgaaggcccgcctgtgggatacagagcctcacctgtgcgatatggagccccacctcttggatatggaaccccacctctcggatatggagccccacctctcggatatggagccccacctgcaggaaatgaaggcccgcctgcgggatacagagcctcacctgctggatcaggagccaggcctcaggaatccagggaaaaggtggtgcccagaagcttggagatgccaggaaccatagggccccaaagagggagtcacagccctggcttggagagctcccaggtctgggcttcccaaagggctgcagctcttcttttcttctctttgcccacaacatgttgagcaaggggcatgtctcaaccctgtttgtgttacaggtcttttagcctcatttccaggaagctctcaccccaacttggaaggggggggtctcgcgcttgtccctggcttttgccttctccatggagcatgcagccctggccatgcctagttgctgcagccagcgtgatggcagcagctgctccagatggcctgctgctgccatcattaatatgtagttatttagcacagtcggtgagtctcttttttgtctgttaaattctgttgctataatttaatatctatgacagtcaatagttatagataggtagtgcatgcccctgactgtttttgttgaccattgttgtatgaccctcacattggaagtaattaacatatatattacctgtat

SEQ ID NO: 120491 - DNA, 240 bp, Homo sapiens
atggggtcgctgagaagatcaaatgagaccaagagcaatgctaagtgtggtcttagtaaacatgtgaacgagctctatgtcgatgacccagacaaggacagcggtggcaagatcgacgtcagtctgaacatcagtttacccaatctgcactgcgagtgtagtaggtactcaaaaaagtatttgttgagcaaatttggattgctaacagatgccaacactgtgctgctgacagcaaggtga

SEQ ID NO: 120492 - DNA, 1034 bp, Homo sapiens
atgctttgtgaagtattattgagggaggagggggcaattataagtgccaattttgaagttccccagcggttcagtaaccaaggagctgacattgatgcatgtgttgataaagctgcaaacattcaaaatgagattaacaaagattttgagcaaagggaaggatatggagtaatagtactaaatcccaatgaaaacctatattgaagtagaaaagccgaagatacacgtacagtcatcatctgatagttcagatgaaccagcagaaaaacgggaaagaaaagataaagtttctaaagaaacaaagaagcgacgtgatttctatgggaagtatcgtaacccccaaagagaaaaagaaatgatgcaatcgtatatcagagtagatgccactgagagtgaaccaaagagttttatctttatgagtgaggatgctttgacaaatccacagaaactgatggttttaattcatggtagtggtgttgtcagggcagggcagtgggctagaagacttattataaatgaagatctggacagtggcacacagataccgtttattaaaagagctgtggctatatggctgcagggaccaaaaacatataacacaatacccaagtgccttcggatacctggaaagccttcccaggaagtagaatactatatctggggaaaatattcttcaaacacaaaggagagagaaataacaactttcccagacaaacaaaagctgagtgattttatccacaccagacgtgttctacaagaaatgctaaaggaagtcagagagtggggtaactgctccttacttgaacttacaactaaagcccctgtttttagtgttatggcctacccttacattccaaggttttccaagataactggtgccccaatttctgagtatttctggacttctatggcagtctttgtggaatcaggagacagagtgaccaatctctcagctacaaacaatgcagggaaggcagtaggacctgaatgcagctcatctactatgtggacactaagaaaaacctgttccaaag

SEQ ID NO: 120493 - DNA, 1131 bp, Homo sapiens
atgctagctgactgcaaaaactttgattcgtcagacctgatttccgacctcgcgggcgattgccaacgtcaacggcaaatcagctgcggtagtttgctcaaccggacacgccagcgctattgttcccgtcaatcggcccttgctgtcaaacaacggcgttgcacaaaaggcccagttccagagtacctgtttgaaatgttgatcggccatcgtttgcggatcgccattacggctgagaatgcaggcggtttcatcgaggataaacagcgcacactctcgcggtgccatatattcccaggcatcttccagcgcagcctgcccgagcgtcagcatcgctttcttacgccgataaatagaagcaaatgtcagttgatacgaaccctgctaagtaccctgtgtactccaaaatgtggtccaggattcaagcatcggattgttctgtgcaagagcagtgacctttctaagacattcccagctgcacaatgtccagaggaaagcaaacctcctgtccgcatccgctgcagtttgggccgctgccctcctcctcgctgggtcacaggagactggggccagtcgactctagagatccccgacctggtcgaagacggcgggacttttgccgaaacggtagagctggcgcaggccattgaagcggcgggcgcgaccattatcaacaccggcattggctggcatgaagcacgtattccgaccattgccacgcccgtgccgcgcggcgcatttagctgggtcacgcgcaaactgaaaggccacgtctcgctgccgctggtaaccaccaaccggattaacgatccgcaggttgccgacgatattctctcgcgcggcgatgccgatatggtatcgatggcgcgaccgtttcttgctgatgcggagctgctgtcaaaagcgcaatcgggacgagccgatgagatcaacacttgtattggctgcaatcaggcctgtctcgatcaaatcttcgttggcaaagtcacctcgtgcctggtgaatcctcgcgcctgccacgaaaccaaaatgccaatccttcccgccgtgcagaaaaaaaatctggcggtggtcggtgcgggacctgctgggctggcgtttgccattaacgcggcggcgcgtgggcatcag

SEQ ID NO: 120494 - DNA, 691 bp, Homo sapiens
atgcatctagctcctgtacgtggacgaccttctgctggaacactccacggcagtcgggtgcgcaaaagggatggatgccctgctctgggacctggtgcacaagaagaaagcggagatctgcagacagcagggactgatatcactgttgatagtgcagagaaaccctccataattaagttttctgtaaaagccttcatgttttctgagcagaatgtacgaggtgtgccatcccaaaaccagctgctaccctgtccttttaatagttgtgagcccttaaaagaaacaggaattgctcactcggggagctcagttgttggagacgtgagtcttgccgaagctcctggtcgaataaagcccttccttctttaacccggtgtctgaggggttttgtctgcggcctgtcctgctacaaggggtcatcctagagataatatggagtccaggagaagtaaatcacaatatgatctgtgtttccctcttttacacccttttcatctccaatgaagatgaaatcacatcaagataataaggtcagccagttggatatggtggaaagaaaatagagatcctctttgcaataggctatgctttgctctaaagaaagctcatgtttttctatatagacctttaaaaattctccccatgccactgtttcctcaaataattggccagctatgcagagctggttact

SEQ ID NO: 120495 - DNA, 786 bp, Homo sapiens
atgtgccagctccataggcagcacgcttggcacggcgcgcccaaacatttccccttcgggcggcaaacgggaaacgcgcgcccactgcgcacacgccgtaccagtgaccacctttctcccagtacagtccaaaaaccccaactatgctactcttccttgccatctgagctattcatctgtattccttataatatcctttataataatgagtacatatcagtggtggcattagattttcataggagcacgaaccttattgtcaactacacatgtaagggatctaggttgcgtgctccttatgagaatccaatgcctaatgatctgagagatgccctgcccagagaggaggaatctagagaggcagtctggctacagcggctttgccaggctgtgatgggctctgcccagttcaaacttcctggtggctttatttataacgtgtggggaaaaccacctactcaagccccagaaatggcggacacctctccccccaccaagctggagcatctcaggtcaactttagactgctgtgctggcagcgagaatttcaaaccagtggatcttatcttgctggtctctgtggggtgtactccaaaatgtggtccaggattcaagcatcggattgttctgtgcaagagcagtgacctttctaagacattcccagctgcacaatgtccagaggaaagcaaacctcctgtccgcatccgctgcagtttgggccgctgccctcctcctcgctgggtcacaggagactggggccagctctctcccacaagagagaaataa

SEQ ID NO: 120496 - DNA, 1527 bp, Homo sapiens
atggaaagtttggacacagagacaagcacatggggagaatgccacaggaagattagaggtatggtgccacaagtcaaagaacttgcagaagaaaagatacccacgcaaaaaaaaacagagcacaacgtccctctgcttattgtcgcggtcttctcgcctatgttccctttctccctatcctgtccaaccagggtagtcctcagagttccttatccattggggtacctttgtttcgtagacaaccctggtacacttgtacgttgccggggaatccgccttgcgcctgagttggctgtgggagtctctctcctcattcctattaggtctattccaggcatatcctcactcactgccggttggtatctcaatccagctgcattctttgttctggaatcattccaaacagggaaggatacttctgaactgaatcaaaaccaaaatcagagtatccagaaatccaagccaggtcaaaaacaaaaccaaagtatcaagcaatccaagtcaagtcaaaaacaaaaaccaaagtgccggtacaggcagaccgtgggtgatcaggccacgcttccactcaaatggagtgggcaagttccaaagactagtcttaccaagtttcagatgtccagactccaagtgccagttccttcccggtgttcagccactgcgttgatcgtccacgggggcctgccacgtgctcctctggcgaggcgttccaccaggccaattgcctacccaggagtgctctcaggatccgcatcggccaagctggctggagtgccccatagggatgctccacagggcaggcctaagccacctaaggggctgcctcgaccgtccgactgtctgttaatcacctcgcttcccggtcagggaaccaagaaatgtagcagaacaagccacgggcaaaacccctcagacaccgagttaaagaaggaagggctttattcggccaggagcttcagcaagactcacgtctccaacagccgagctcctatttcattcatttttatatctctccagtctagtgtagttcctgtaggagatctggaaatgtttctctgtactccaaaatgtggtccaggattcaagcatcggattgttctgtgcaagagcagtgacctttctaagacattcccagctgcacaatgtccagaggaaagcaaacctcctgtccgcatccgctgcagtttgggccgctgccctcctcctcgctgggtcacaggagactggggccagtgttctgctcagtgtggccttggacagcagatgagaactgtgcagtgtctctcctacaccggacaggcatctagtgactgtctagaaactgttcggcctccatcaatgcagcagtgtgaaagcaaatgtgacagtacccccatttctaatactgaaggtccgtcatcccaatatggttatgggaaacacatatttcgggcgtttagcaggaatccaccaacagttactatattggccctcactatgcctaggacaattaaaatagggcccgaccaaacgttaacaaccaattaa

SEQ ID NO: 120497 - DNA, 10175 bp, Homo sapiens
atggggagaagacggaggctgtgtctccagctctacttcctgtggctgggctgtgtggtgctctgggcgcagggcacggccggccagcctcagcctcctccgcccaagccgccccggccccagccgccgccgcaacaggttcggtccgctacagcaggctctgaaggcgggtttctagcgcccgagtatcgcgaggagggtgccgcagtggccagccgcgtccgccggcgaggacagcaggacgtgctccgagggcccaacgtgtgcggctccagattccactcctactgctgccctggatggaagacgctccctggaggaaaccagtgcattgtcccgatttgtagaaatagttgtggagatggattttgttcccgtcctaacatgtgtacttgttccagtgggcaaatatcatcaacctgtggatcaaaatcaattcagcagtgcagtgtgagatgcatgaatggtgggacctgtgcagatgaccactgccagtgccagaaaggatatattggaacttattgtggacaacctgtctgtgaaaatggatgtcagaatggtggacgttgcatcggacccaaccgctgggcttgtgtttatgggttcactgggccacagagtgaaagagattacaggacaggcccgtgtttcactcaggtcaacaaccagatgtgccaagggcagctgacaggcattgtctgcacgaagactctgtgctgtgccaccactggacgggcgtggggccatccctgtgagatgtgtccagcccagcctcagccctgccgacggggtttcatccccaacatccgcactggagcttgccaagatgttgatgaatgccaggctatcccagggatatgccaaggaggaaactgtatcaatacagtgggctcttttgaatgcagatgccctgctggtcacaaacagagtgaaactactcagaaatgtgaagacattgatgagtgcagcatcattcctgggatatgtgaaactggtgaatgttccaacaccgtgggaagctatttttgtgtttgtccacgtggatatgtaacctcaacagatggctctcgatgcatcgatcagagaacaggcatgtgtttctcgggcctggtgaatggccgctgtgcacaagagctcccggggagaatgacgaaaatgcagtgctgctgtgagcctggccgctgctggggcatcggaaccattcctgaagcctgtcctgtcagaggttctgaggaatatcgcagactttgcatggatggacttccaatgggaggaattccagggagtgctggttccagacctggaggcactgggggaaatggctttgccccaagtggcaatggcaatggctatggcccaggagggacaggcttcatccccatccctggaggcaatggcttttctcctggcgttgggggagccggtgtgggggccgggggacagggacctatcatcactggactaacaattctgaaccagacaatagatatctgtaagcatcatgctaacctttgtttaaatggacgctgtataccaactgtctcaagctaccgatgtgaatgcaacatgggttataagcaggatgcaaatggagattgtatagatgttgatgaatgcacatcaaatccctgcactaatggagattgtgttaacacacctggttcctattattgtaaatgtcatgctggattccagaggactcctaccaagcaagcatgcattgatattgatgagtgcatccagaatggggttctttgtaaaaacggtcgatgcgtgaactcagatggaagtttccagtgcatttgcaatgccggctttgaattaactacagatggaaaaaactgtgttgatcatgatgaatgtacaactaccaacatgtgtttgaatggaatgtgcatcaatgaagatggcagcttcaagtgcatctgcaaaccaggatttgtcttggctccaaatgggcgttactgtactgatgttgatgaatgccagaccccaggaatctgcatgaatgggcactgcatcaacagtgaagggtccttccgctgtgactgtcccccaggcctggctgtgggcatggatggacgtgtgtgtgttgatactcacatgcgcagtacctgctatggaggaatcaagaaaggagtgtgtgtgcgtcctttccccggtgcagtgaccaagtccgaatgctgctgtgccaatccagactatggttttggagaaccctgccagccatgccctgcaaaaaattcagctgaattccacggcctttgtagtagtggagtaggtatcactgtggatggaagagatatcaatgaatgtgctttggatcctgatatatgtgccaatgggatttgtgaaaacttacgtggtagttaccgttgtaattgcaacagtggctatgaaccagatgcctctggaagaaactgtattgacattgatgaatgtttagtaaacagactgctttgtgataacggattgtgccgaaacacgccaggaagttacagctgtacgtgcccaccagggtatgtgttcaggactgagacagagacctgtgaagatataaatgaatgtgaaagcaacccatgtgtcaatggggcctgcagaaacaaccttggatctttcaattgtgaatgttcgcccggcagcaaactcagctccacaggattgatctgtattgacagcctgaaggggacctgttggctcaacatccaggacagccgctgtgaggtgaatattaatggagccactctgaaatctgaatgctgtgccaccctcggagccgcctgggggagcccctgtgagcggtgtgaactagatacagcttgcccaagagggcttgccaggattaaaggtgttacgtgtgaagatgttaatgagtgtgaggtgttccctggcgtttgtccaaatggacgctgtgtcaacagtaagggatcttttcattgcgagtgccctgaaggccttacgttggatgggactggccgtgtatgtttggatattcgcatggagcagtgttacttgaagtgggatgaagatgaatgcatccaccccgttcctggaaagttccgcatggatgcctgctgctgtgctgtcggggcggcttggggcaccgagtgtgaggagtgccccaaacctggcaccaaggaatacgagacactgtgcccccgcggggctggctttgctaaccgaggggatgttcttactgggcggccattttacaaagacatcaatgaatgcaaagcatttcctgggatgtgcacttatgggaagtgcagaaatacaatcggaagcttcaaatgccgttgcaatagtggctttgctctagacatggaggaaagaaactgcacggacatcgacgagtgcaggatttctcctgacctctgtggcagtggaatctgcgtcaatacaccgggcagctttgagtgcgagtgcttcgaaggctatgaaagtggcttcatgatgatgaagaactgcatggacattgacggatgtgaacgtaaccctctcctttgtaggggtggcacctgtgtgaacactgagggcagctttcagtgtgactgcccactgggacacgagctgtcaccatcccgtgaggactgtgtggatattaatgaatgctccctgagtgacaatctctgcagaaatggaaaatgtgtgaacatgattggaacctatcagtgctcttgcaatcctggatatcaggctacgccagaccgccagggctgtacagatattgatgaatgtatgataatgaacggaggctgtgacacccagtgcacaaattcagagggaagctacgaatgcagctgcagtgagggttatgccctgatgccagatgggagatcgtgtgcagacattgatgaatgtgaaaacaatcctgatatctgtgatggcggccagtgtaccaacattcctggagagtatcgctgcctctgctatgatggcttcatggcttccatggacatgaaaacatgcattgatgtcaatgaatgtgacctaaattcaaatatctgcatgtttggggaatgtgagaacacaaagggatccttcatttgccactgtcagctgggttactcagtgaagaaggggaccacaggatgtacagatgtggatgagtgtgaaattggtgctcataactgcgacatgcatgcctcatgtctgaatatcccaggaagcttcaagtgtagctgcagagaaggctggattggaaacggcatcaagtgtattgatctggacgaatgttctaatggaacccaccagtgtagcatcaatgctcagtgtgtaaataccccgggctcataccgctgtgcctgctccgaaggtttcactggtgatggctttacctgctcagatgttgatgagtgtgcagaaaacataaacctctgtgagaacggacagtgccttaatgtcccgggtgcatatcgctgcgagtgtgagatgggcttcactccagcctcagacagcagatcctgccaagatattgatgaatgctccttccaaaacatttgtgtctctggaacatgtaataacctgcctggaatgtttcattgcatctgcgatgatggttatgaattggacagaacaggagggaactgtacagatattgatgagtgtgcagatcctataaactgtgtcaatggcctatgtgtcaacacgcctggtcgctatgagtgtaactgcccacccgattttcagttgaacccaactggtgtgggttgtgttgacaaccgtgtgggcaactgctacctgaagtttggacctcgaggagatgggagtctgtcttgcaacaccgagatcggggtgggcgtcagtcgctcttcatgctgctgctctctgggaaaggcctggggaaacccctgtgagacatgcccccctgtcaatagcactgaatattacaccctgtgtcccggaggtgaaggcttcagacctaaccccatcacaatcattttagaagacattgacgaatgccaggagttaccaggtctctgccagggtggaaactgcatcaacacttttgggagcttccagtgtgagtgcccacaaggctactacctcagcgaggatacccgcatctgtgaggatattgatgagtgttttgcacatcctggtgtgtgtgggcctgggacctgctataacaccctgggaaattacacctgcatttgcccacctgagtacatgcaggtcaatggaggccacaactgcatggacatgagaaaaagcttttgctaccgaagctataatggaaccacttgtgagaatgagttgcctttcaatgtgacaaaaaggatgtgctgctgcacatataatgtgggcaaagctgggaacaaaccttgtgaaccatgcccaactccaggaacagctgactttaaaaccatatgtggaaatattcctggattcacctttgacattcacacaggaaaagctgttgacattgatgaatgtaaagagattccaggcatttgtgcaaatggtgtgtgcattaaccagattggcagtttccgctgtgaatgccctacaggattcagttacaatgacctgctgttggtttgtgaagatatagatgagtgcagcaatggtgataatctctgccagcggaatgcagactgcatcaatagtcctggtagttaccgctgtgaatgtgccgcgggtttcaaactttcacccaatggggcctgtgtagatcgcaatgaatgtttagaaattcctaacgtttgcagtcatggcttgtgtgttgatctgcaaggaagttaccagtgcatctgccacaatggctttaaggcttctcaggaccagaccatgtgcatggatgttgatgagtgcgagcggcacccatgtggaaatggaacttgtaaaaacaccgttggatcctataactgtctgtgctacccagggtttgaactcactcataataatgattgcctggacatagatgagtgcagttccttttttggtcaggtgtgcagaaatggacgttgttttaatgaaattggttctttcaagtgtctatgtaacgaaggttatgaacttaccccagatggcaaaaactgtatagacactaatgagtgtgtcgcccttcccggctcttgctctcctggtacctgtcagaatttggagggatccttcagatgcatctgtcccccagggtatgaagtaaaaagcgagaactgcattgatataaatgaatgtgatgaagatcccaacatttgtctttttggttcctgtactaatactccagggggcttccagtgcctctgcccccctggctttgtactatctgataatggacggagatgctttgatactcgccagagcttctgcttcacaaattttgaaaatggaaagtgttctgtacccaaagctttcaacaccacaaaagcaaaatgctgctgtagtaagatgccaggagagggctggggggacccctgtgagctgtgccccaaagacgatgaagttgcatttcaggatttgtgtccatatggccatggaactgtccctagtcttcatgatacacgtgaagatgtcaatgagtgtcttgagagcccaggcatttgttcaaatggtcaatgtatcaacaccgacggatcttttcgctgtgaatgtccaatgggctacaaccttgactacactggagtacgctgtgtggatactgatgagtgttcaatcggcaatccgtgtggaaatggtacatgcaccaatgttattgggagttttgaatgcaattgcaatgaaggctttgagccagggcccatgatgaattgtgaagatatcaacgaatgtgcccagaacccactgctgtgtgctttacgctgcatgaacacttttgggtcctatgaatgcacgtgcccgattggctatgccctcagggaagatcaaaagatgtgcaaagatctggatgaatgtgctgaagggttacacgactgtgaatctaggggcatgatgtgtaagaatctaatcggcaccttcatgtgcatctgccctcctggaatggcccgaaggcccgatggagaaggctgtgtagatgaaaatgaatgcaggaccaagccaggaatctgtgaaaatggacgttgtgttaacattattggaagctatagatgtgagtgtaatgaaggattccagtcaagttcttcaggcactgaatgccttgacaatcgacagggtctctgctttgcagaggtactgcagacaatatgtcaaatggcatccagtagtcgcaatctcgtcactaagtcagaatgctgctgtgatggtgggcgaggctggggccaccagtgcgagctttgcccacttcctggaactgcccagtacaaaaagatatgtcctcatggcccaggatatacaactgatggaagagatattgatgaatgtaaggtaatgccaaacctctgcaccaatggtcagtgcatcaataccatgggctcattccgatgcttctgcaaggttggctacaccacagacatcagtggaacctcttgtatagaccttgatgaatgctcccagtccccgaaaccatgcaactacatctgcaagaacactgaggggagttatcagtgttcatgtccgagggggtatgtcctgcaagaggatggaaagacatgcaaagaccttgatgaatgtcaaacaaagcagcataactgccagttcctctgtgtcaacaccctgggggggtttacctgtaaatgtccacctggtttcacacagcatcacactgcttgtatcgacaacaacgaatgtgggtctcaacctttgctttgtggaggaaagggaatctgtcaaaacactccaggcagtttcagctgtgaatgccaaagagggttctctcttgatgccaccggactgaactgtgaagatgttgatgaatgtgatgggaaccacaggtgccaacacggctgccagaacatcctgggtggctacagatgtggctgcccccaaggctacatccagcactaccagtggaatcagtgtgtcgatgagaatgaatgctccaatcccaatgcctgtggctctgcttcctgctacaacaccctggggagttacaagtgcgcctgcccctcggggttctccttcgaccagttctccagtgcctgccacgacgtgaatgagtgctcgtcctccaagaacccctgcaattacggctgctctaacacggaggggggctacctctgtggctgcccccctgggtattacagagtgggacaaggccactgtgtctcaggaatgggatttaacaaggggcagtacctgtcactggatacagaggtcgatgaggaaaatgctctgtccccagaagcatgctacgagtgcaaaatcaacggctatcctaagaaagacagcaggcagaagagaagtattcatgaacctgatcccactgctgttgaacagatcagcctagagagtgtcgacatggacagccccgtcaacatgaagttcaacctctcccacctcggctctaaggagcacatcctggaactaaggcccgccatccagcccctcaacaaccacatccgttatgtcatctctcaagggaacgatgacagcgtcttccgcatccaccaaaggaatgggctcagctacttgcacacggccaagaagaagctcatgcccggcacatacacactggaaatcactagcatccctctctacaagaagaaggagcttaagaaactggaagagagcaatgaggatgactacctcctaggggagcttggggaggctctcagaatgaggctgcagattcagctctattaaccgttcacagacttgggcccaggctcaaatcctagcacagccagtctgcagaagcatttgaaaagtcaaggactaattttaaagaggaaaaataataataactcttgtttctttcctccctgtcttagactttgaatgttgaccctcacagggagggataatttagactctggtatggccaaagatttgagctcaaaggcaaccgtggttactgtattttttatataacttcattttaaaatatattaaaagaaacctaaatgttcaagatatcagcatatggcactaaatgcacaaaaataatgtgagcttttttttttttttcctgttagcagtctgtaacactttgggtattttgctatagttgctaattaaaaaaatatagatgtttatttatttttaatgcagtaatatatggagaaatgaacaaactatgtaaacaaaaagggaaactcacttgtttttctttagatttataaatttgagctattttttttagaggtgctttttaaaaatccaatagatacaagagatgtttcctttggttttctgccagtcatccagctgatacacacctgatcgattttaaagaaagccacacagagctgaatcgggcagtgctaatcaataatttaaaagacatgaatgtcattagatcctttataacgtagatcgaagccaaagcagctcatttgtgacaacatttcatatcaccagacacaccaggcaacagaagttgaagcacaaccactgtagcaaaataccttgactgcttgtgagaccattagcattgcaggccaaaccgtactgtatttccttctcataacctcaaggaaccatatgtgctacccacaacacctcattcttacccagggtgcgctgcgtcctcatggtactgtaggcagctgaagaaccgccgttcccttgaaagggaacacctggcattctgtggtgtttcgtgctgtcttaaataatggtgcatttattatgttcaagttatttcaggattgccatatgtgcaaacaaatcatgcaatgcagccaaggaatatatgttgttgttgttgttttaaacccattttttttttagaattttcattaatactgtagttatacaccatatgcctcattttatcatagcctattgtgtatgaaagatgtttgtacaatgaattgatgtttagtttgctttagtcatttaaaaagatattgtaccaggatgtgctattaagagcacgtatccattattcttctcaacccaagaacctgtttcctggaccagtgaccaaacctcatatgtgaaatggccaaagcacatgcaggctcctggttgttcctctcaaacctgtgctgaccaaagattagtaaccagttatacccagtattttgaggttttattgtttttttaataactaaaaaaaaactcgtgccgaattc

SEQ ID NO: 120498 - DNA, 645 bp, Homo sapiens
atggcactcctacctgttacctctggcaactctgccccaaggaagtgcagagctgctactggcccaagagcccaggcagttcagcagtgcagtgtgagatgcatgaatggtgggacctgtgcagatgaccactgccagtgccagaaaagatatattggaacttattgtggacaacattacaggacaggcccgtgtttcactcaggtcaacaaccagatgtgccaagggcagctgacaggcattgtctgcacgaagactctgtgctgtgccaccattggacgggcgtggggccatccctgtgagatgtgtccagcccagcctcagccctgccgacggggtttcatccccaacatccgcactggagcttgccaaggggctcaggcccagggagatccaaattctgtctctgagcctctggctggagttatcggagatcctgcaggaaggccccacccactgaggaaggatgggtcagggttagacctgaagaggcactctggcctcagactgccacagccagtgtgttgggctgtgaggacaagtcttgggaccaagccatccaacctccctggctccagcaggggaaaagcacagccgggagctatagaaatggatgcagcccttccccgtgcccagagagcttag

SEQ ID NO: 120499 - DNA, 552 bp, Homo sapiens
atgaaaacagcgagtaaatcctatgccagcaacttgaggtatccaggttctctcactaggactgaccaggcagttggtgcaacccatggagtgaagctgcagaccttcacagtgagtgtcacagctcttaaaggtggcacggctggagttgttcattccttccagtgggttcgtggtcttgctggcttcaggagtgaagctgcagaccttcaccactcaggagcccagctggcttcacctagtggatcacacgccagggccgtgggtggagctgcccaccagacccacaccacgtgcccacactcagcccttgggcagtccatgggactgggcgctgtggagcagggggtggcacctgtcgtggcaggagcccacagtgggggtcacagtgctgtcgatatcaccaaggtggctagaagacatcgcatgtctccttttcctctgacatctatggacaaagcctttatcacagtcctggagatgactccggtgcttgggacagaaatcatcaattaccgagttaacatcttcccaatccgttctccaatttga

SEQ ID NO: 120500 - DNA, 434 bp, Homo sapiens
tatctaaagtaggtatgtacagaaagagttgaatagcaaaagtgtaaatcatgtaatcattgtgagatttttgggtttgtcacaactgagaaatattgctgatggtggatggtcctcaagtgtgaaaatgttccttgtgaattgcttgtatccaaaatatacacacagcattaagggctggtttttattttttattttttccaatcctcttttcttctcaaggtgtccaagtcacacagaaccacagaatctcacaggtgtctcagaattccttctcctgggactctcagaggatccagaactgcagcctgtcctcgcttggctgtccttgtccatttacctggtcacagtgctggggaacctgctcatcatcctggctgtcagctctgactcccacctccacacccccatatacttcttccagttctcgtgcc

SEQ ID NO: 120501 - DNA, 2925 bp, Homo sapiens
atgaatacatcacaattattagaaatagccaaccaggtgtttgtaaacagggctgcagtaagccttgaggaaaaccgcaaagagaatggacatcaggcccggcgaaacaccgacctggttgtcagctgcagcaatcagaggggtcaggagtcactggaaaagttgttaggccggtatttctacatctcgcatttgtcagccctcgccaaaaccatgaggcagcggtttgttacctgccgacaccataatgcgaggcaaggtccagctgttccgcccggcatacaagcttatgcagcagcccccattgaagatctgcaggccattaggaacaatatcacagcgggtgtttacacaccctgcgatattggaggtaatatcatcctctgccccctggcatattaccaacgatatcaaacaggggtggtgtacaccccttgtgatattgggagtattatcatcctctccacctccgggtgtccaagtcacacagagccacggaatctcacaggtgtctcagaattcctcctcctgggactctcagaggatccagaactgcagcctgtcctccctgggctgtccctgtccatgtatctgctcacggtgctgaggaacctgctcatcatcctggctgtcagctctgactcccacctccacacccccatgtacttcttcctctccaacccgtcatgggctgacatcgctttcacctcggccacagttcccaagatgattgtggacatgcagagtggtgtggtggtgtcagtgatgtacactgtggtcacccccatgctgaaccctttcatctactgcctgagaaacagggacattcaaagcgccctgtggaggctgcgcagcagaacagtcgaatctcatgatctgttccatcctttttcttgtgtgggtatccactgtcaggtctctgagcttgatgctgtcatgtcccttgacaccgcttccggggcttttcggtggatggcttttggggtggaagtggcagccccagcttaccagccatcatgctcatgtccgggatctcagtcctctggggaaggggccagaaaaggctggagcagccgaagtctttcggaaacagtatctgcggtatattcagggctgactcaggaaagaagatgccagccccagagtcccacctccaccgttggttccatcataatgaatggatccaatatggcaaatacatcaccgagtgtaaaatccaaagaggaccaggggttaagtgggcacgatgaaaaggaaaacccatttgcagagtacatgtggatggagaatgaagaggatttcaacagacaggtggaggaggaactgcaggagcaagacttcttggaccgctgcttccaagagatgctggatgaagaagaccaagactggtttattccctcacgagacctgcctcaggccatgggacagttgcaacagcagttaaatggactgtcagtcagtgaaggtcatgattctgaagatattttggtccatgggcgcaggtccctgagcccacagcttcgcgggggtctggccgagcatgcgtcacaacctacgcggccaagagcagtgcgcacgcgcaacctaacgcgggactgccagcaacttccgggcgtttacaggcaggcaggatccaggaggacgggaggggccgctgcggaccgcagtcgctccacctggaggagacaccagaaggaagacagcctgagggacgcagccatccccggctcctaccggcgccccgccccgcgcatgcgcacgcgcacagggagtcagctggctgcgcgggaggtcacgggaagtggggcggtgcccagacagctggagggaaggaggtgtcaggcggggagagacgcaaacggcgggaccagcagcgacggtagcagcagcatggccgcgatctatgggggtgtagaggggggaggcacacgatccgaggtccttttagtctcagaggatgggaagatcctggcagaagcagatggactgagcacaaaccactggctgatcgggacagacaagtgtgtggagaggatcaatgagatggtgaacagggccaaacggaaagcaggggtggatcctctggtaccgctgcgaagcttgggcctatctctgagcggtggggaccaggaggacgcggggaggatcctgatcgaggagctgagggaccgatttccctacctgagtgaaagctacttaatcaccaccgatgccgccggctccatcgccacagctacaccggatggtggagttgtgctcatatctggaacaggctccaactgcaggctcatcaaccctgatggctccgagagtggctgcggcggctggggccatatgatgggtgatgagggttcagcctactggatcgcacaccaagcagtgaaaatagtgtttgactccattgacaacctagaggcggctcctcatgatatcggctacgtcaaacaggccatgttccactatttccaggtgccagatcggctagggatactcactcacctgtatagggactttgataaatgcaggtttgctgggttttgccggaaaattgcagaaggtgctcagcagggagaccccctttcccgctatatcttcaggaaggctggggagatgctgggcagacacatcgtagcagtgttgcccgagattgacccggtcttgttccagggcaagattggactccccatcctgtgcgtgggctctgtgtggaagagctgggagctgctgaaggaaggttttcttctggcgctgacccagggcagagagatccaggctcagaacttcttctccagcttcaccctgatgaagctgaggcactcctccgctctgggtggggccagcctaggggccaggcacatcgggcacctcctccccatggactatagcgccaatgccattgccttctattcctacaccttttcctag

SEQ ID NO: 120502 - DNA, 1302 bp, Homo sapiens
aaattgtggagatctgattcctagatttcgactgcccttacggatcggctcacataacgggcctgcgtttttggctgccatggtacagaaaacggcaaaggtattggggatcacacggaaactgcatgccgcctcccagcctcagagttccggaaaggtgtccaagtcacacagagccacggaatctcacaggagcctgagaactcctcctcctgggactctcagaggatccagaactgcagcccatcctcgctgggctgtccctgtccatgtatctggtcacggtgctgaggaacctcctcatcagcctggctgtcagctctgactcccacctccacaccccaatgtgcttcttcctctccaacctgtgctgggctgacatcggtttcacctcggccatggttcccaagatgattgtggacatgcagtcgcatagcagagtcatctcttatgcgggctgcctgacacagatgtctctctttgccatttttggaggcatggaagagagacatgctcctgagtgtgatggcctatgactggtttgtagccatctgtcaccccctgcactacccagtcatcatgaatcctcaccttggtgtcttcttagatttgggggcctttttcctcagcctgttggattcccagctgcacagttggattgtgttacaattcaccttcttcaagaatgtggaaatctccaattttgtctgagacccatctcaacttctcaaccttgcctgttctgacagtgtcatcaatagcatattcatatatttagatagtattatgtttggttttcttcccatttcagggatcctttggtcttacgctaacaatgtcccctccattctaagaatttcatcatcagataggaagtctaaagccttctccacctgtcgctctcacctggcagttgtttgcttattttatggaacaggcattggcgtgtacctgacttcagctgtggcaccacccctcaggaatggtgtggtggcgtcagtgacgtatgctgtggtcacccccatgctgaaccctttcatctacagccagagaaacagggacattcaaagcgccctgcggaggctgcgcagcagaacagtcgaatctcatgatctcttgcatcctttttcttgtgtgggtaagaaagggcaagcacattaaatctctacttctgcaaatcctgcctcttagtcacattatttttgtgggcttgatgggcttttattcctttccgcatttcctttgtgaatattgctttcttcgttatgcctttaactgggaatggggtgaggattctgggat

SEQ ID NO: 120503 - DNA, 1537 bp, Homo sapiens
ccctggctttgctcctctttctgggaaggggttgcccggctgtgctgccaccatgtcttttcgactttctggtggatccaggaggatctgctcgcgaactgggtctggtaggctgtccggtggaggaacaggcttcgtggctgggaatgtgtgtgttggatcgggagcaagaagcagcttttcttgtactcttgagggcatctcttctggaggaagcttctgcaatagcggtggagggttgggaagtggtgcctgtgctggttttcttggcaatgagcacagcctcctctctgggaatgaaaaggtgaccatgcagaatctcaacgaccgcctggcatcctacctggaccatgtgcatgctctagaggaggccaacgcagacctggagcagaagatcaagggctggtacgagaaatgtgagcctggctcttcccgggaacacgatcatgactatagcagatacttctcagtcatagaagatcttaaaaggcagattatttctgcgaccatctgcaatgccagcattgttctacaaaatgacaatgccagactgaccgctgatgacttcaggctgaagtatgaaaatgagctggctctgcaccacagtgttgaggccgacaccagtggtcttcgcagagtgttggatgaactgaccctttgtacaaccgacctggagatacagtgtgagaccctcagtgaggaattgacctacctcaaaaaaagtcatgaggaggaaatggaagtcttgcaatatacagctggggggaacgtgaacgtggagatgaatgcaaccccaggagtggacctaactgtcctgttgaacaacatgagggctgagtatgaggacttggctgagcagaaccgcaaagatgctgaagcctggttcaacgagagggtaggtctatggcaaattacaaagggcttgctcaggagacaatcaggccagtcactaaccctttcgacaattacacttcagagtgcaacgctgcaacaacagatttccgatcatgagggagcagccacagcagccagaaatgagctgaccgaattaaaacgcaatctgcaaaccctggaaatagaacttcagtccctcatggctgtgaaacattcctatgaatgctccttggctgagactgaaggaaattactgcaatcaactccagcaaattcaggatcagataggggtgatggaggaacaactgcaacagattcgaacagaaacagaaggccagaagctggagtatgaacagcttcttgatgtaaaaatatttttagaaaaagaaattgacatttattgcaacttactagatggagaagaaagagacacagaagaagccacacccactcacacacctggtaatggcccatcatctacagatcttgaaatggactctcatcccagtgccagctctatggaccaaggttctacagacagtccagtcaacccagagactacacagaatccacagctactacagcccctggtaacagacctatcaactatagaccccactgtggactcagcaatagccatgtga

SEQ ID NO: 120504 - DNA, 953 bp, Homo sapiens
  misc_feature (1)...(953): n = a,t,c or g
atggtggtcacgcctgtaatcgcagctacttgggaggctgaggcgggaggttgcttgatcccagagtttgagaatgcaccccgcgctccgccagcaggagcgcacacgcaggtgcaaggagctggcacctgggcacacacctggccacacacctgtgcagagccggtggcaggccctcccggcgcaggaatggcgtgcccccagctgccgccacttctgcttttggtgctggtggtgctgctgaaagctggtgtgaattacaatactccctttacagttccgaatcccgaccccgcactggagccccacttcccacagccccggaacggagcccttgcctccactgaccagaccttggagccccctggcccagctcctagagggggaagaggagagacccccaacaaggggacaggagggtcactgtgccaatcctgtcatcaccctcctgtggatgtacaggcagtgctcaataaatgcttcgaggctgatgaggctgctggctcagggtgcgtgggttcctcaagggggggatttctgagttctaagaccaagtctccatctgagactcccaaattgctccccacctcccatccctgtttttttttgatgatgatgtttgattgtttgttttaataccaatgaaccactacgtctgccatnnnnnnnnnnnnnngggggggcccgttttaaaggatccttcggggggcccaaagttaacccgggcttgcaacgtaaaagttttttccttatagggggccgaattaaaacctacctgggaatttttggaagggacctttattttgggggggggacatattggcccaacctccctacaaaaatttaaggctttagggaaaaaataaaattttaaagggtatagggggtaaaacaacctgcatatccttgctgttggaaagttttctttacggagtttgattaatgaaaatttt

SEQ ID NO: 120505 - DNA, 1040 bp, Homo sapiens
caggtgaggtgggctttgttcagctcccagaggtaacaagcgggggtggagtagagaacatggacactgcttccttttgcctgctgcgcatttaccagccggatgagcttgtcaaggttcttgaaccacatgttggcattctcatattggaagtccgagcccatggtcatcacagtgtggttggtgcggtaataccggccctgggcagtggccacatttaggaagtaatcgaccagctccttggcgttgtactcggggctgcgagggtcctccaccagcggctgatcgacacacagcacatcccagcacagattccttggcgggttgtaaccattgggaagcacaccagtgaagaggtccgcggtcgggggcttcaggctggtgctggcccgccacacctgctccatctccagcttctgcatccgtacccacttatcttgataatcaaggcgcccaaagaagaagccgtcgaagcccatctgcgcaaacagcgaggcctgctcccgagagtggccgaaggggtcaatgtgccaggccacacggggtcgcccatcattgccaaatgtgtcctccagaaagcgcagcccaagtgtcatctggtccacgatggcaccgtagtgggtggctgcctcatcgttcatcacccagccaccattggcgaactccaggcgcccctggcgcacaaggtctcgcacgacttcctgtgtggcatttgtctgctggtgccaccaacgggagaagaaggcaatctccacgtaaatgaagcgacgggtgggatcttccagcaaggcagagatgaccgagtccaggatgtactgcacaccggcgtgctggatgtcattcttgattccataaaagtactggtccacggttttgagccagcccacgtcatcatgtgtgtgaggcagcaggtgcacgttcagcatgttcggctgcactgtggggcatgtctcgtatcccccggcccgagcaccggcagccgccagcaacaaaaggaaaaagcagagaggcgggagcggtggccgcagggcgcgggacat

SEQ ID NO: 120506 - DNA, 1662 bp, Homo sapiens
gcaactcaggcaagggtcaggactgaaggggtggcgggccggaacatgggtggaatgcctgtgctcagttatccccgcacctctccacccacacccgcagcccccacccgggccacccactctcccttggccacacctgccgggtgccacgatgaccgtcacctacacagcccgagtggcgaacgcccgcttcggtggcttctcccagctgctgctactgtggcgtgggagcatctacaaactcctgtggcgagagctgctctgcttccttgggttctacatggcgctgagtgctgcctaccgtgctggattacagctttgtgctgccgaagggcagaagcgctacttcgagaagcttgtgatttattgtgaccatatgccagcctcatccctgtctccttcgtgcttgctgatgctcctgtcagaggagaagcagagcctggcgcaagagaatgcagggctgcgggagcggatgggccggcctgaaggcgagggtaccccaggtctcactgccaagaagctgctgctgctgcaatcccagctggagcagttgcaggaggagaacttcagggctctggtgagacctaggccccaggccctcatcctccaggcggaaatcatccaccttgtcaggaagttctggactccaaattcttcaggcccagaggccaaagtaatatacgacatatggtttgctatgggaaccagttccaatacaccaccatccccagccggattggaatatgaagtgtttatcaaaaaccacctaaatcgcccttgccttgatcgtaaacaacctggcggcttcaggcttgggccctatgcagtatttcactctcaccactacgggtcctggtatgtgcgccggtattaccgcaccaaccacactgtgatgaccatgggctcggacttcaatatgagaatgccaacatgtggttcaagaaccttgacaagctcatccgctggtaaatgcgcagttctggaccggttacttttccagtcggccggccctcaaacgctacgagcgcctcagctacaacttcctgaggtgggtgtgcaaccagctggaggcgctggtgggcctggcggcccaacgtgggaccctataggctccagagacagtgcacccctctagctgggccaatggagggggagtgggtactgtttgtaccaggtgggagtgtcccctttagaggtgtgtctgtgaagaatgaacatctgcccgaatccatgccaaatgcaggacaaggttttgtgtccccaagcttgtgtgtcatggcaatgctgagagtatctgagaccttactccaccaagttcggctcggaacgaccaagcccaacttccaggcggccattcgggggcctggtgaatgttatcccctgcccatggcccgttccccgggggcgccttgggaggggaacccccggggtttaagactggccgatggcaagtttctcccaagacggcccaaggatgatgaagaaacaagagtgaagggggatcttggacccttccccctaggtgcccccccacgaattgttcttttccttgacgggtgccgggaacgcactccttgcccccctgggacccacgacgatagggacgttaccacagttccactggcgtgtccccaattttcccaggacggctcgcccgggtga

SEQ ID NO: 120507 - DNA, 579 bp, Homo sapiens
atggctcgtggtcccaagaagcatctaaagcaggtagcagctccaaagcattggatgctggataaattgactggtgtgtttgctcctcatccatccaccagtccccacaagttgagagagtgtctccccctcatcattttcataaggaacagacttaagtatgccctgacaggagaggaagtaaagaagatttgcatgcagcggttcattaagatcgatggcaaggtccgcactgatataacctaccctgctggattcatggatgtcatcagcattgacaagatgggagagaatttctgtctgatctgtgacaccaagggaatccctcatctggtgactcatgatgctcgtaccatctgctaccctgatcccctcatcaaggtgaatgacaccattcagattgatttggagactggcaagattactgacttcatcaggttcgacactggtaacctgtgtatggtgactggaggtgccaacctgggaagaattggtgtgatcaccaacagagagaggcaccctggatctcttgacgtggttcacatgaaagatgccaatggcaacagctttgccacttga

SEQ ID NO: 120508 - DNA, 974 bp, Homo sapiens
tcagtgtggtggaattcaacgcagccatggctcgtggtcccaagaagcatctgattctgtgtggcagctccaaagcatgtggatgctggataaattgaccggggtgtttgctcctcgtccatccaccggtccccacaagttgagagtagtgtctctcccgcatcattttccctgaggaacagacttaagtatgccctgacaggagatgaagtaaagaagattttgcatgcagcggttcattaaaatccgatggcaaggtccgaacttgatataacctaccctgttggtattcatggatgtcatcaagcattgacaagaccgggagagaatttcccgtcctgatctatgacaccaagggtccgcttttgctgtacatcgtattacacctggaggaggcccaagtaccaagttgtgcaaaagtgagaagagatctttgtggggcacaaaagggaatccctcatctggtgactcatcgatgcccgcaccatcccgctaccccgatccccctcatccaaggtgaatgattaccattcagattggatttagaagactgggcaagatttacttgattttcatcaaagttcgacaactggtaaacctgttgtatgggtgactgggagggtgcttaaccttagggaaggaattgggtgttgatccaccaacagaggaggagggcaccctgggatcttttttgaccgttggttccacgttgaaaagatgcccattggcaaccagcttttggccacttcggattttcccaacattttttggttattgggcaagggcaacaaaccatggatttctctttccccgaggaaagggtccccgcctcaccattgcttgaagagagagacaaaagactggcggccaaacagagcagttgggtgaaatggggtccctgggtgacatggtcagatcttttggtaccgtaattaaaaaatattggtggcagattaatagcaaaaaaaaaaaaa

SEQ ID NO: 120509 - DNA, 246 bp, Homo sapiens
atgtctcccgcaaagaagggtggcgagaagaaaaagggcccttctgccatcaacgaggtggtgacccaagaacataccatcaacattcacaagcgcatccatggagagggcttcaagaagcgtgctcctcgggcactcaaagagattcggaaatttgccatgaaggagatgggaactccagatgtacgcattgataccaggctcaacaaagctgtctgggccaaaggaataaggaatgtcctatag

SEQ ID NO: 120510 - DNA, 766 bp, Homo sapiens
ccagccaacctgccgatagtgctgttcctgctacctctggcaaagtctatggaacgccagagactgaactcacctaccccactaacatagaggctgcccctttggctgaagaggaacatgcgtcctcggccacttcaatcactgagtgtgacaaactttcttcctttgccacatcagtggctgaggaccaatctgtggcctcacttacagctccccagacagaggagacaggcaagagctccctgctgcttgacacagtcacaagcatcccttcctcccgtactgaagctacgcagggcttggactatgtgccatcagctgaagacaagggcttcaaatcaccaccctgtgaggacttctctgtgactggggagtcagagaagagaggagagatcatagggaaaggcttgtctggagagagagctgtggaagaggaagaggaggagacagctcacgtagagatgtctgagaaactttgcagtcaatatggaactccagtgtttagtgcccctgggcatgccctacatccaggagaaccagcccttggagaagcagaggagcggcgccttagcccagatgacagcacagtgaagatggcttctcctgcaccatctggcccacccagtggcacccacacaccgtttcatgagtccccagtggaagaaaagtctgagccccaagactttcaggaggcagactcctggggagacactcagcgcacaaccagtgtgggcaaaagaaaagctgctgaggaattacgatgcct

SEQ ID NO: 120511 - DNA, 744 bp, Homo sapiens
atggctggtcccttctcccgtctgctgtccgtccgcccgggactcaggctcctggctttggccggagcggggtctctagccgctgggtttctgctccgaccggaacctgtacgagctgccagtgaacgacggaggctgtatcccccgagagttttattgtgggaaacctttgtcatgggatttgggaccgtccaatcagtggaatatcatcaggtggaggaacccttgaaggtaactccaagtagccgggaggcttttgagggtcgggatttggagctccagggcaaggcccctgagaaggagacctcgttattcctaagcagcctgaccgcacttgcagaagccgctgagcatgtctctgacatccaggatgagacaatccctggctactcagagactgagcagagcatctcatatgaggagatccgtgatgagccggaggagcgcccagctccgcccagatttcatacaagtacatatgccctgcccgggcctgaaggtgctggcccattcgaagccagccactctgccgatagtgctgttcctgctacctctggcaaagtctatggaacgccagagactgaactcacctaccacactaacatagtggctgcccctttggctgaagaggaacatgtgtcctcggctctgtcaatcactgagtgtgacaaactttcttcttttgccacatcagtggctgaggaccaatctgtggcctcacttacagctccccagacagagtag

SEQ ID NO: 120512 - DNA, 8643 bp, Homo sapiens
  misc_feature (1)...(8643): n = a,t,c or g
gggggagacctcatcctacagagtggcacctactcatatgaaaacttggcccaggtccttcacaaccccgagatttcccaattgctcagcaatagagaccctgggatacaggccttccttaccgtgtcctgcttaggggaaggtgattggagccacctgggattatccagttcncaagagaccctgcacctccggctaaaccctgagcccactctgcccaccatggacggcgtggctgagttctccgagtatgtctctgagactgtggacgtgccatccccatntgacctactagagccccccacctcagggggcttcctcaagctctccaagccttgttgctacatcttcccaggtggtcgnggggactctgccctctttgctgtcaatggtttcaacatcctggtggatggtggctctgatcgcaagtcctgtttgtggaagctggtacggyacttggaccgcattgactcggtgctactcacacacattggggcagacaacctgccaggcatcaatggactactgcagcgcaaagtggcagagctagaggaggagcagtcccagggctctagcagttacagcgactgggtgaagaaccttatctctcctgagcttggagttgtctttttcaacgtgcctgagaagctgcggcttcctgatgcctcccggaaagccaagcgtagcattgaggaggcctgcctcactctgcagcacttaaaccgcctgggcatccaggctgagcctctatatcgtgtggtcagcaataccattgagccactgaccctcttccacaaaatgggtgtgggccggctggacatgtatgtcctcaaccctgtcaaggacagcaaggagatgcagttcctcatgcaaaagtgggcaggcaatagtaaagccaagacaggcatcgtgctgcccaatgggaaggaggctgagatctccgtgccctaccttacctctatcactgctctggtggtctggctaccagccaatcccactgagaagattgtgcgtgtgctttttccaggaaatgctccccaaaacaagatcttggagggcctagaaaagcttcggcatctggacttcctgcgttaccctgtggccacgcagaaggacctggcttctggggctgtgcctaccaacctcaagcccagcaaaatcaaacagcgggctgatagcaaggagagcctcaaagccactaccaagacggccgtgagcaagttggccaaacgggaggaggtggtagaagagggagccaaggaggcacgttcagagctggccaaggagttagccaagacagagaagaaggcaaaagagtcatctgagaagcccccagagaagcctgccaagcctgagagggtgaagacagagtcaagtgaggcactgaaggcagagaagcgaaagctgatcaaagacaaggtagggaaaaagcaccttaaagaaaagatatcaaagctggaagaaaaaaaagacaaggagaaaaaagagatcaagaaggataggaaagagctccagaaggatgaaggaaggaaggaggataaaaaggatgcccggaaggaggagaagaggaaagattccagccctgagctcaggaagatttccaagccagacctaaagccctttactcctgaggttcgtaagaccctctataaagccaaggtccctggaagagtcaaaatagacaggagccgtgctatccgtggggagaaggagctgtcttctgagccccagacacccccagcccagaagggaactgtaccactcccaaccatcagtgggcacagggagctggtcctatcctcaccagaggacctcacacaggactttgaggagatgaagcgtgaggagagggctttgctggctgaacaaagggacacaggactaggagataagccattccctctagacactgcagaggagggacccccaagtacagctatccagggaacaccaccctctgttccagggctgggacaagaagaacatgtgatgaaggagaaagagcttgtcccagaggtccctgaggaacaaggcagcaaggacagaggcctagactctggggctgaaacagaggaagagaaagatacctgggaggaaaagaagcagagggaagcagagaggctcccagacagaacagaagccagagaggaaagtgaacctgaagtaaaggaggatgtgatagaaaaggctgagttagaagaaatggaggaggtacacccttcagatgaggaggaagaggacgcgacaaaagctgagggtttttaccaaaaacatatgcaggaacccttgaaggtaactccaaggagccgggaggcttttgggggtcgggaattgggactccagggcaaggcccctgagaaggagacctcgttattcctaagcagcctgaccacacctgcaggagccactgagcatgtctcttacatccaggatgagacaatccctggctactcagagactgagcagaccatctcagatgaggagatccatgatgagccggaggagcgcccagctccacccagatttcatacaagtacatatgacctgcccgggcctgaaggtgctggcccattcgaagccagccaacctgccgatagtgctgttcctgctacctctggcaaagtctatggaacgccagagactgaactcacctaccccactaacatagtggctgcccctttggctgaagaggaacatgtgtcctcggccacttcaatcactgagtgtgacaaactttcttcctttgccacatcagtggctgaggaccaatctgtggcctcacttacagctccccagacagaggagacaggcaagagctccctgctgcttgacacagtcacaagcatcccttcctcccgtactgaagctacgcagggcttggactatgtgccatcagctggtaccatctcacccacctcctcactggaagaagacaagggcttcaaatcaccaccctgtgaggacttctctgtgactggggagtcagagaagagaggagagatcatagggaaaggcttgtctggagagagagctgtggaagaggaagaggaggagacagcaaacgtagagatgtctgagaaactttgcagtcaatatggaactccagtgtttagtgcccctgggcatgccctacatccaggagaaccagcccttggagaagcagaggagcggtgccttagcccagatgacagcacagtgaagatggcttctcctccaccatctggcccacccagtgccacccacacaccctttcatcagtccccagtggaagaaaaatctgagccccaagacttccaggaggcagactcctggggagacactaagcgcacaccaggtgtgggcaaagaagatgctgctgaggagacagtcaagccagggcctgaagagggcacactagagaaggaagagaaagttcctcctcccaggagcccccaggcccaggaagcacctgtcaacattgatgaggggcttacaggctgtaccattcaactgttgccagcacaggataaagcaatagtctttgagattatggaggcaggagagcccacaggcccaattctgggagcagaagcccttcccggaggtttgaggactttaccccaagaacctggcaaacctcagaaagatgaggtgctcagatatcctgaccgaagcctctctcctgaagatgcagaatccctctctgtcctcagcgtgccctccccagacactgccaaccaagagcctacccccaagtctccctgtggcctgacagaacagtacctacacaaagaccgttggccagaggtatctccagaagacacccagtcactttctctgtcagaagagagtcccagcaaggagacctccctggatgtctcttctaagcagctctctccagaaagccttggcaccctccagtttggggaactaaaccttgggaaggaagaaatggggcatctgatgcaggccgaggatacctctcaccacacagctcccatgtctgttccagagccccatgcagccacagcgtcacctcccacagatgggacaactcgatactctgcacagacagacatcacagatgacagccttgacaggaagtcacctgccagctcattctctcactctacaccttcaggaaatggggaagtacttacctggggcgatcaccaagccctgaatgaacacattctgacacctgatagctccttctccaagagtcctgagtctttgccaggccctgccttggnggacattgccataaagtgggaagataaagttccagggttgaaagacagaacctcagaacagaagaaggaacctgagccaaaggatgaagttttacagcagaaagacaaaactctggagcacaaggaggtggtagagccgaaggatacagccatctatcagaaagatgaggctctgcatgtaaagaatgaggctgtgaaacagcaggataaggctttagaacaaaagggcagagacttagagcaaaaagacacagccctagaacagaaggacaaggccctggaaccaaaagacaaagacttagaagaaaaagacaaggccctggaacagaaggataagattccagaagagaaagacaaagccttagaacaaaaggatacagccctggaacagaaggacaagaccctggaaccaaaagataaagacttggaacaaaaggacagggtcctagaacagaaggagaagatcccagaagagaaagacaaagccttagatcaaaaagtcagaagtgttgaacataaggctccggaggacacggtcgctgaaatgaaggacagagacctagaacagacagacaaagcccctgaacagaaacaccaggcccaggaacaaaaggataaagtctcagaaaagaaggatcaggccttagaacaaaaatactgggctttgggacagaaggatgaagccctggaacaaaacattcaggctctggaagagaaccaccaaactcaggagcaggagagcctagtgcaggaggataaaaccaggaaaccaaagatgctagaggaaaaatccccagaaaaggtcaaggccatggaagagaagttagaagctcttctggagaagaccaaagctctgggcctggaagagagcctagtgcaggagggcagggccagagagcaggaagaaaagtactggagggggcaggatgtggtccaggagtggcaagaaacatctcctaccagagaggagccggctggagaacagaaagagcttgccccggcatgggaggacacatctcctgagcaggacaataggtattggaggggcagagaggatgtgtccttggaacaggacacatactggagggagctaagctgtgagcggaaggtctggttccctcacgagctggatgtccagggggcccgcccacactacactgakgaacgggaaagcactttcctagatgagggcccagatgatgagcaagaagtacccctgcgggaacacgcaacccggagcccctgggcctcagacttcaaggatttccaggaatcctcaccacagaaggggctagaggtggagcgctggcttgctgaatcaccagttgggttgccaccagaggaagaggacaaactgacccgctctccctttgagatcatctcccctccagcttccccacctgagatggttggacaaagggttccttcagccccaggacaagagagtcctatcccagaccctaagctcatgccacacatgaagaatgaacccactactccctcatggctggctganatcccaccctgggtgcccaaggncagacccctccccnctgcacccctctccccagctcctggtccccccacacctgccccggaatcccatactcctgcacccttctcttggggcacacccgagtatgacagtgtggtggctgcagtacaggagggggcagctgagttggaaggtggnccatactcccccctggggaaggactaccgcaaggttganggggaaagggaagaagaaggtagggctgaggctcctgacaaaagctcacacagntcaaaggtaccagaggccaggaaaagccatgccaccacggagcctgagcagactgagccggagcagagagagcccacaccctatcctgatgagagaagctttcagtatgcagacatctatgagcagatgatgcttactgggcttggccctgcatgccccactagagagcctccacttggagcagctggggattggcccccatgcctctcaaccaaggaggcagctgccggccgaaacacatctgcagagaaggagctttcatctcctatctcacccaagagcctccagtctgacactccaaccttcagctatgcagccctggcaggacccactgtacccccaaggycagagccagggccaagtatggagcccagyctcaccccacctgcagttcccccccgtgctcctatcctgagcaaaggcccaagcccccctcttaatggtaacatcctgagctgcagcccagataggaggtccccatcccccaaggaatcaggncggagtcactgggatgacagcactagtgactcagaactggagaagggggctcgggaacaggcagaaaaagaggcccaatccccaagtcctcctcaccccattcctatggggtcccccacattatggccagaaactgaggcacatgttagccctcccttggnctcacacctggggnctgcccgacccagtctggacttccctgcttcagcctttggcttctcctcattggarrcagctcccccacagstgccctctccagctgaaccccgctcggcaccctgtggctcccttgccttctctggggatcgagctctggctctggctccaggaccccccaccagaacccggtatgatgaatacctggaagtgaccaaggcccccagcctggattcctcactgccccagctcccatcacccagttctcctggggnccctctcctctccaatctgccacgacctgcctcaccagccctgtctgagggctcctcctctgaggctaccacgcctgtgatttcaagtgtggcggagcgcttctctccaagccttgaggctgcagaacaggagtctggagagctggacccaggaatggaaccagctgcccacagsctctgggacctcactcctctgagcccagcacccccagcttcactggacttggccctagctccagctccaagcctgcctggagacatgggtgatggcatcctgccgtgccacctggagtgctcagaggcagccacggagaagccaagccccttccaggttccctctgaggattgtgcagccaatggcccaactgaaaccagccctaaccccccagnccctgccccagccaaggctgaaaatgaagaggctgcggcttnccctgcctgggaacgtggggcctggcctgaaggagctgagaggagctcccggcctgacacawtgctctcccctgagcagccagtgtgtcctrcagggggctccgggggcccacccagcagtgcctctcctgaggtcgaagctgggccccagggatgtkccactgagcctcggccccatcgtggggagctctccccatccttcctgaacccacctctgcccccatccatagatgatagggacctctcaactgaggaagttcggctagtaggaagaggggggcggcgccgggtaggggggccagggaccactggggkkccatgscctgtgactgatgagacacccccnacatcagccagtgactcaggctcctcacagtcagattctgatgtnccgccagaaactgaggagtgtccgtccatcacagctgaggcagccctcgactcagatgaagatggagacttcctacctgtggacaaanctgggggtgtcagtggtactcaccaccccaggcctggccatgacccacctcctctcccacagccagaccnccgcccatcccctccccgccctgatgtgtgcatggctgaccccgaggggctcagytcagagtctgggagagnagagaggctacggnagaaggaaaaggttcaggggcgagtagggcgtagggccccaggtaaggacaagccagtgtcccctgnacggcgtctggntcttcggggaaaacgctcacccacccctggtaaagggtctgnagatcgagtatcccggnccccanctcgatcacgnagtancacaagccaggtcaccccagcagaggaaaaggatggacacagccccatgtccaaaggyctagtcaatggactcaaggcaggaccamtggccttgagttccaagggcagctctggtgcccctgtatatgtggatctcgcctacatcccgaatcattggagtggcaagactgctgacctygacttcttccgtcgagtgcgtgcatcctactatgtggtcagtgggaatgaccctgccaatggcgagccaagccgggctgtgctggatgccctgctggagggcaaggcccagtggggggagaatcttcaggtgaaggtgactctgatccctactcatgacacggaggtgactcgtgagtggtaccaacaaactcatgagcagcagcaacaactgaatgtcctggtcctggctagcagcagcaccgtggtgatgcaggatgagtccttccctgcctgcaagattgagttctga

SEQ ID NO: 120513 - DNA, 7863 bp, Homo sapiens; identical to SEQ ID NO: 116211

SEQ ID NO: 120514 - DNA, 1699 bp, Homo sapiens
ggagaggaggaggaggaaactaacgattccctgcccacccccacacccagcaccaccaacaggtgggcaagcttgccgagaaaacgcagagggcatcctgtgagcagcaaacacatctgagcctggaaaagacgcagagaagtaaaagatcaaagtctgattggcaccggctcccattccggctccagcctccaatccgacccccatttcggctgcagcctcggacctagcatccggccctcggtctatccgggtgcatcctccctccctgttccggatcttatcttgcgccagcgcctaactccaggataccgaaaccaggcctaaagccatggctggtcctatctcccgtctgctgtacgaccgcacgggactcaggctcctgggctttggccggagcggggtctctagccagctgggtttttgctccgaccggaacctgtacgagctgccagtgaacgacggaggctgtatcccccgagcgctgagtacccagacctccgaaagcacaacaactgcatggccagtcacctgaccccagcagtctatgcacggctctgcgacaagaccacacccactggttggacgctagatcagtgtatccagactggcgtggacaaccctggccaccccttcatcaagactgtgggcatggtggctggagatgaggagacctatgaggtatttgctgacctgtttgaccctgtgatccaagagcgacacaatggatatgacccccagagcaatgaagcacaccacggatctagatgccagtaaaatccgttctggctactttgatgagaggtatgtattgtcctctagagtcagaactggccgaagcatccgaggactcagtctgcctccagcttgcactcgagcagagcgacgagaggtggaacgtgttgtggtggatgcactgagtggcctgaagggtgacctggctggacgttactataggctcagtgagatgacagaggctgaacagcagcagcttattgatgaccactttctgtttgataagcctgtgtccccgttgctgactgcagcaggaatggctcgagactggccagatgctcgtggaatttggcacaacaatgagaagagcttcctgatctgggtgaatgaggaggatcatacacgggtgatctccatggagaagggtggtaacatgaagagagtgtttgaaagattctgccgaggcctcaaagaggtggagagacttatccaagaacgtggctgggagttcatgtggaatgagcgtttgggatacatcttgacctgtccatctaacctgggcactggacttcgggcaggagtgcacatcaaactgcccctgctaagcaaagatagccgcttcccaaagatcctggagaacctaagactccaaaaacgtggtactggaggagtggacactgctgctacaggcggtgtctttgatatttctaatttggaccgactaggcaaatcagaggtggagctggtgcaactggtcatcgatggagtaaactatttgattgattgtgaacggcgtctggagagaggccaggatatccgcatccccacacctgtcatccacaccaagcattaactccccatcgccagctgatgactcaagattcccaggagttttgctcattctaatgatggcccattctacttgctctggacctgcccccgcatcccctgcctccatcctagt

SEQ ID NO: 120515 - DNA, 429 bp, Homo sapiens
  misc_feature (1)...(429): n = a,t,c or g
ctaaatatgtattgtgggaagattacagggaatcagcacatgggttctggtgaggatntacagggaaataacctccatacccggagaagcaggggctcttttggtccagggtgggtcatgcaattccaggtgtaattttgcctccactagttgcaccacctggtgttccaggtgtacctggtttgcttccagagattgtcactgctgtggctgaggctgcatcggtgtgtttactcacagggctactggtagttgaggcagcagatactgttggggtccctgattttccaaaactggtgtttccaatgtctgcttccccaggggtgctgctacctggagctccaggagttgctccaggtgataccacaggtgtgcctgagactgctgtgttaccagggccagtgtccccagtacctgatgttccagcgg

SEQ ID NO: 120516 - DNA, 513 bp, Homo sapiens
atgctgaacttctcaggcacacctgtggtatcacctggagcaactcctggagctccaggtagcagcacccctggggaagcagacattggaaacaccagttttggaaaatcaggcaagtctggacatgactccttaacagttctcaaccctgccttcctcagaaggaccccaacagtatctgctgcctcaactaccagtagccctgtgagtaaacacaccgatgcagcctcagccacagcagtgacaatctctggaagcaaaccaggtacacctggaacaccaggtggtgcaactagtggaggcaaaattacatctggatggtccagcagtggcaccagcacgggctcttcaaatacaccagattgcagtcaagaagttgtccccaatcctcttgcagcaaatagagatatcactgagcccatgtatgaattcttgcttattcactgtacccatcaggagaaatctcttgagacctcactcagagtgcacatccttaccacagtacaaggctaa

SEQ ID NO: 120517 - DNA, 630 bp, Homo sapiens
atgctggcagtcctcagagccctcgcttgcacctcccctgcctgggctcccactttggcggcatttgaggagcccttcagcccccacctgcactgtgggagcccctttctgggctggccaaggctggagcccactccctcagcttgcagggaggtgtggagggagaggcgcgagcgggaaccggggctgcgtgcggcgcttgcgggccagctggagttccggagcagccagccagccccgctggccccgaggaatgagggacttagcacccgggccagtggctgcggagagtgtactggatcccccagcagtgccggcccaccggcgctgtgctcgatttctcgccgggccttagctgccttcccgcggggcagggcttgggacctgcagcccgccatgcctgagcctcccacccactccatgggctcctgtgctgcccgagcctccccgacgagcaccaccccctgctccacggcgcccagtcccaacgaccacccaagggctgacgaatgcgagcgcacggcgcaggactggcaggcagctccacctgcagccctggtgcaggatccactaggtgaagccagctgggctcctgagtctggtggggacgtggagaacctttgtatctag

SEQ ID NO: 120518 - DNA, 3411 bp, Homo sapiens
tcatttctttttcccagtgttttttttgtgttcatgcgtttctgttttgctagttatattctttttccgagatgaggtattaggaacaactgcactagaaggtccacttgtagctggtttgctgcttgctttagtgctctttaaggtagctggtggtgttgggaggatctttgcaggtgtatacgtatttaaagatactttttttctcattattggactggaacgtaaagctgtagaggctacagtaggattctgcttctgttccacaagagttcttggtgttctcaggtaattagcattttcagatacaacatcatttgtagccgtcttcctagatcttggaagtggagacttcctgtgtatatgaattggctctgataccattggtttaaacaatatcacagctcgatcaacttcatctcttttagaagtatgtggttcatcatcattatcaattttaaaaggtctcctgccttcattctctctggaagctggtctatatccatagccagatggcaaatttttgtcttcttcacaacctttggctcccggactaaagtgtaattcaacatgaaagcgttcttctgaggaaagatccttattaggatcctcataaagcatgataacaatctgagtcatgtagttgagctcattgacaacgtttaaataatccatagctcgtttccactgttcatcctttgattcattgcataaggcaccatagcgaagaatagacagcaaagaatgtacatgactttcactggtaaaatataatctagtacgaacatgacgttcaggagacagaacacctctagaatacacaggatgaagtttatttacagtgtcatcatcttgtgtcctctgaaggtctgagcgaatttttctaaccagaggagtacagtagcctttggcaatctccagtttttcagctttagttataccatattcctgagggataacaatatctgctaatgccttcgaaagcctatataattccattgtgttttctaatttcaaggaaccattatgctggacatcatattttatacagtcatatatgtcagggattttactaatatcatatcttccattctttgttttaaagtctttctctaacttggaccatctacgtagcataagctccaatgtttcactatggtaaagctgaatatctgatgatttaggatcttccattcgatgtctgatttgagaagtcaaactctgaattaaggaataaactttatcacaggtcttcacagggtttttaattaaatgcattgatttgataagagaaatgcttccagatggagtaagcttttcataatcttcagcagtaaaatctctgtctttctgaagtatttcatgaagccttgccttcacacgttgctgacaactgctcagagagtcactatcactatccaaaagaccgttcatatttgcacttttcaccatttgaacaagaatgggtgtaagctctccttccaaagctaaaagcccctttgcaaaagcagctgcagtcatctggactcgtccttcatcagaggcatatattttgaggtcatgtctgtaggtgctatgtaatctaagtaaaccacaaccaggaaatcctgcataatctccttgacctccaggatacatacacctgaaggctcttccaagttcttcagcctggaccctgcctgcaggagttaattcacctccccattttagaaccaaaagtaaagatggttcttctcttcggctgtcctcctcttcactagatgttttaggacaaccatgagggagataggtcaactgaaccttacgatttattccagaaaaatgaccatacatctctaatacagtcttaagttgttcaagttttggcttgttttcttcaatttcagaatcattattttgccctagctccataagaagctgtcgtgcaatatctagcacttcttccattttcattttttgttttggtgttcgatccccatgacgtataacagctatgacacatctaagttccatcatagttccagatgtagttggtacaattgggatatcttcagcttctaagggtattgaccatggaatatgaaattgtggagcaagttctcgcattacaatatttccaagtatttttgcacagtcatcataatacttcatggaatttttcacaaaactgaagccattgacatcacagacataggactgtccattggcccgtaacaaatcaaagccacaaactgtttgcttaaaagcaaggcagactttccaagcaattaatttctctcgtgcattgagaataacagggtatcttacttcttttccttcactgtctcgttccaccttgccatcaagtgctggagattttcgagcttcagcatgggcataatctggacccactgtataaaccttaacatcagtaccatctgtgggcataaactcttcatatatatatgagcctgtttttcgtacattgctttctggagaataaacactacttctactgccaatctttctaaagagtctttgacttccaccaccagcagaagttgggtaataaatgtaaacattgtgatcttctgcactgactggcttttctacaaatggcttttgaaaaacttccccatttacttctacatgatcttccccttcaatcagattacattccactccatgggctcctgtgcggcccgagcctccccaacgagcaccaccccctgctccacggcgcccagtcccatcgaccacccaagggctgaggagtgcgagcacacggcgcgtgactggcaggcagctccacctgcagcccgcgaagatctgcagcttcacacctgagcccagcaagaccaagagcccaccgggaggaacgaacaactccagacgcgctaccttaagagctgtaacactcaccgcgaaggtctgcagcttcactcctttgggattatttgggtcacggttcaaaatagcataacgaggaagtaaaataccttcagcttgaagaatactatatacttctctcctatcttgtatgagatactgcatattcaagtcattgattacaaatggattcctgagttttgcataggcaaccgctttgtccagtggaaatcctttagaatggaaagaaataagacaatcacataaaggccagttttccactggttcattcaaaataacctcctcttcaaatactactactgtgatatatttaaataaggagatccgttcaagaatttccttcattggtttggatttggatttctttgccatggaacatattccaaccacaatctgcctttctggtggagaatcatcttcctcctcatcgtcttcatctgcatggtggaagaaatgtcgataatttccaggatttatttctgtatcttctggtccaacgaagaatctgggggcttcactcat

SEQ ID NO: 120519 - DNA, 1713 bp, Homo sapiens
atgtgggatgtggagggtgctggaggagccagtgatgaagcccaggtttctagcttagcaactgagaggtggctgctgctgctactcatggagacagggacctcagaggaggaacaggtttgcctccgagctcctccctatcaattaggaagaatcaagctattgttaggccagaataaactctggctgtcctttggagggctggccaaggctggagcccactcccttagcttgcagggaggtgtggagggagagacgcgagcgggaaccggggctgcgtgcagcgcttgcaggccagctggaattccgggtgggcgtgggcttggcgggcccctcactcggagcagccggccagccctgctggccccgggtaataagggacttagcacccgggccagtggctgcggagggtgtactgggtcccccagcagtgccagcccaccggcgctgcgctggatttctcaccgagccttagctgccttcccgaggggcagggctcgggacctgcagcccgccatgcctgagcctcccacccactccatgggctcctgtgcggcccaagcctccccaacgagcaccaccccctgctccacggcgcccagtcctatcgaccacccaagggctgaggaatgcgagtgcagggcgcatgactggcaggcagctccacctgcagccctggtgccggatccactaggtgaagccagctgggctcctgagtctggtatctctgatgaatatataacacctatgtttagtttttataaaagtattggggaactgaaaatgactcaagaggagtatgctctgcttacagcaattgttatcctgtctccagcctgggcaacagagcgacaccctgtcttcaaaaaaagagaaagaaaaaaacccagtaactgcctggagggagttataaaggctgcagcggaacttgctgtgggtttaccctggaacttgggaaagtttcatacaggagatggtacttctgctgggcttcaagggatagccccaaattcagtgggtccaggtcagccagctcccgagtggatgtggggttgggagcggctcttaacagaccaggataaaactcagggaagcgccttcagctgcaccgcaacattccaggacgctcagaagcaattattacaggcgaggttcattcacctctcaggcctgtgggaacaacaggacgggctgtggctttcgaactggctgtcgctgaaaggccagatcggaggacctgctctgactgaaccacttcgcctttcagtgaacagagggacttggccaccgaagctccgagacgcccggaggcgcagcgctggacgcgctgacaggcgagcgcccacgggtcgcgtgcttcccggcagcccgggggcggggcctcagaccacgcccccgccttatgattggtcccttcgaaacaggcggcggccagcggctactgaccctgaggcccaggcggcggcggcagcggcggcgtccatgcagggtctagaacgcccacatgtgcggaactggggaatagagctggagaccctgcgcgatgccttccgcccacaaccctcagtttggaggactgcccggggagaggctggcaaaagaaagggaaggcttgtagagtgccttggaagtcagaggaaagttttggagggcgtgctcctctatgcagtcacccgtggttcctttcctaatcttttcacaccgagggattga

SEQ ID NO: 120520 - DNA, 801 bp, Homo sapiens; identical to SEQ ID NO: 116843

SEQ ID NO: 120521 - DNA, 1275 bp, Homo sapiens
atggggcaggcctgccagaacctctctgggaagtctgatgatcttcctggggatcttgcaatccgaggaagcccagggccagaccccagggatgaatctagtcaggctctcagacctattcccggccactcctcagggaaaccagctgaatccacgtttgacttgtaccaacagccgccccactacaatctggaaaggattcagtggagagcatggataaaaatctattactcggtggtatttccctacgagcctgtggtgttcagtgtcagctccagcgctagccctgggctccttgcagacaccaagcacactgggccacaggccagtttgagaactgccgctttagagaaactcaccaagaaagagacagaaaaccaccagcagcagcaacagcagcaacagtccaggcaacacctgggccatgaaagagaaaaggcttctgtggagggtgagactactttggacttcacagaaggggttgtagtttcaaatgtatctctaaacatttcaccaaatggcactggggaaggtgtaatgcaggaggaaaaggacagctccacatgcgaaggcagagaaatagaaaagtacagagtatgttcagggtgccacatgcggacacagcagaagcaggccatcgaaactagaaagaattcttctcatccctacaccccagaagaggccataaaacccagctatgagccactcattccagcagagtcctccctgtacctggaagaaaagaatgttcttatcctcagagaggtgtggagggagaggcgcgagcgggaaccggggctgtgtgcggcgcttgtgggccagctggagtttcgagtgggcttgggcttggcgggccccacactcagagcagccggccagccctgctggccccaggcaatgagggacttagcacccaggccagtggctgcggagggtgtactgggtccccccagcagtgccagcccaccggcgctgcgctcgatttctcaccgagccttagctgccttcccgcggggcagggctccagacctgcagcctgccatgcctgagcctcccacctactccatgggctccggtgcggcccaagcctccccgacgagcagcaccccctgctccacagcgcccagtcccatcgaccacccaagggctgaggagtgcgagcgcacggcgcgggactggcaggcagctccacctgcagccctgttgcaggatccactaggtgaagccagctgggatcctgagtctggtggggaggtggatagtctttatgtctag

SEQ ID NO: 120522 - DNA, 444 bp, Homo sapiens; identical to SEQ ID NO: 120298

SEQ ID NO: 120523 - DNA, 457 bp, Homo sapiens
atgggcttggtgggcctgcactcggagcagccggccggccctgccggcccaggcagtgagagacttggcacccgggccagcggctgcagagggtgtactgggtcccccagcagtgccggcccaccggcgctgtgctcgatttcttgccgggccttagctgccttcccgctgggcagggctcgggacctgcagcccgccatgcctgagcctcccacccactccatgggctcctgtgcggcccgagcctccccgacgagcaccaccctctgctccacggcgcccagtcccatcgaccacccaagggctgaggagtgccagcgcatggcgcgggactggcaggcagctccacctgcagcccggacatatgtagagtgtgtcggtcagaaggaacacctgagaaaccgctttatcatccttgtgtatgtactggcagtattaagtttatccatcaagaatg

SEQ ID NO: 120524 - DNA, 422 bp, Homo sapiens
ctttctaaagagtctttgacttccaccaccagcagaagttgggtaataaatgtaaacattgtgatcttctgcactgactggcttttctacaaatggcttttgaaaaacttccccatttacttctacatgatcttccccttcaatcagattacattccactccatgggctcctgtgcggcccgagcctccccaacgagcaccaccccctgctccacggcgcccagtcccatcgaccacccaagggctgaggagtgcgagcacacggcgcgtgactggcaggcagctccacctgcagcccgcgaagatctgcagcttcacacctgagcccagcaagaccaagagcccaccgggaggaacgaacaactccagacgcgctaccttaagagctgtaacactcaccgcgaaggtctgcagcttcactc

SEQ ID NO: 120525 - DNA, 1410 bp, Homo sapiens
atgcatttaattaaaaaccctgtgaagacctgtgataaagtttattccttaattcagagtttgacttctcaaatcagacatcgaatggaagatcctaaatcatcagatattcagctttaccatagtgaaacattggagcttatgctacgtagatggtccaagttagagaaagactttaaaacaaagaatggaagatatgatattagtaaaatccctgacatatatgactgtataaaatatgatgtccagcataatggttccttgaaattagaaaacacaatggaattatataggctttcgaaggcattagcagatattgttatccctcaggaatatggtataactaaagctgaaaaactggagattgccaaaggctactgtactcctctggttagaaaaattcgctcagaccttcagaggacacaagatgatgacactgtaaataaacttcatcctgtgtattctagaggtgttctgtctcctgaacgtcatgttcgtactagattatattttaccagtgaaagtcatgtacattctttgctgtctattcttcgctatggtgccttatgcaataccaatgattctcagaatgaagatggaggaatggtgaaggagatggaatcaaaggatgaacagtggaaacgagctatggattatttaaacgttgtcaatgagctcaactacatgactcagattgttatcatgctttatgaggatcctaataaggatctttcctcagaagaacgctttcatgttgaattacactttagtccgggagccaaaggttgtgaagaagacaaaaatttgccatctggctatggatatagaccagcttccagagagaatgaaggcaggagaccttttaaaattgataatgatgatgaaccacatacttctaaaagagatgaagttgatcgagctgtgatattgtttaaaccaatggtatcagagccaattcatatacacaggaagtctccacttccaagatctaggaagacggctacaaatgatccggccagcctggccctggacaatgagggacttagcacccgggccagtggctgcggagggtgtactgggtcccccggcagtgccagcccaccggcgctgcgctggatttctcaccgagccttagctgccttcccgcagggcagggctcgggacctgcagcctgctatgcctgagcctcccacccactccatgggctcctgtgcggcccgagcctccccaacgagcaccaccccctgctccacggcgcccagtcccatcgaccacccaagggctgaggagtgcgagcacacggcgcgtgactggcaggcagctccacctgcagccctggtgcgggatccactgggtgaagccagctgggctcctgagtctggtggggaggtggagagtccttatgtctag

SEQ ID NO: 120526 - DNA, 654 bp, Homo sapiens; identical to SEQ ID NO: 114690

SEQ ID NO: 120527 - DNA, 964 bp, Homo sapiens
tttgttgtgacagtttaggttcttcataaactttgataactgtgttagttataactgatggagtcaactgatggtgaaaacgaagagcctcccaactgtacacgattgttttatttcccccaaggagtccaaaaggcagatgcagatagcgggcaagtgctcgagctattttctcgctcactaccttctggataagtctttctggataagactcagcatggcttgtggtcggcagcaagttatagaacccccagagaaggatccagagaccccgcggccccttcccgccctgtgccgtcacctccccgcttccccgcgtctccctggacacctgagccttcgtccgcgcggggagccgctttggtggcacgccgggagctcgcccagacccggccccggccacgagggccccgaacccggtggggcagtcccgccacctgcgcgcggcctcctccagagggcggctcttcctccgcagaacccgggaccggaagttccctcggcgccccaggctcagcaggcgactcctcggcgccatcgctgtcgctggaatcagccgcgcgctgccgaaaagtccttttcggccggcgctgtgctcgatttctcgccgggccttagctgccttcccgcggtgcagggctcgggacctgcagcccgccatgcctgagcctcccatccactccatgggctcctgtgctgcccgagcatccccgacgagcaccaccccctgctccacggcgcccagtcccatcgaccacccaagggctgaggagtacgagcgcacggcgccggactggcaggcagctccacctgcagccccggtgcgggatccactaggtgaagccagttgggctcctgagtcagaaggaagaaactccaaacacatctgaacatcagaaggggcagaccccagacgcgccaccttaagagctgtaacgctcaccgcgagggtccgcagcttcat

SEQ ID NO: 120528 - DNA, 838 bp, Homo sapiens
cttgagctaggcacagggtgctgattggtgtgtttacaatccctgagctagatatactctccacatccccaccagactcaggagcccagctggcttcacctagtggatcccgcaccagggctgcaagtggagctgcctgccagtcctgcgcggtgcgctcgcattcctcagcccttgggtggtcgatgggactgggcgcagactcaggagcccagctggcttcacctagtggaacccgcaccagggctgcaggtggagctgcctgccagtcccacgccatgcgcttgcattcctcagcccttgggtgatcgatgggactgggcgccatggagcagggggtggtgctctttggggaggctcgggccgcacaggagcccatggagtgggtgggaggctgaggcatggcgggctgcaggtccagagccctgccccacgggaaggcagctaaggctcggtgagaaatcgagcgcagcgccagtgggctggcactgctgggggacccagtacaccctccgcagccactggcccgggtgctaagtctctcattgcccgcggccagcagggctggccggctgctccgagtgcagggcccgccaaacccacgcccacggggaactccagctggcccgcaagcgccgcaggcagctccggttcctgctcgcgcctctccctccacaccttcctgcaagctgagggagtgggctccagccttggccagcccagaaaggggctcccacagtgcagcagcaggccgaagggctccccatcccccgacttccagaagagtggatttctttgcctttcctcgggcaccaaggagagcattcgggtatggcat

SEQ ID NO: 120529 - DNA, 2234 bp, Homo sapiens; identical to SEQ ID NO: 117270

SEQ ID NO: 120530 - DNA, 1608 bp, Homo sapiens
ctagtagttttctacgtactgcacacttgtacctgtagatgtgcttgaaattggtgcacctgaagcctgttcccctgaagcgtgctcacctgaaggctgttcacccgaggcctgctcaccagaaggctgttcaccggagccatgttcacctgaaggctgttcatctgaaggctgttcacctgactcaagctcactcaaaggctgttctccggagaggtgttcacctgaaggctgttctcctgaaggctgctcacctacagtatgctcaccttcagcatgttcagtcgcagcgggctcacctgaagcatgctcactctcagcatgttctccagaagtgtgctcggccacagtgtgcttgcttgaaccatgctcactggaaccatgctcacttaaagtgttcaggcctgaagaagtctcatataaagcctcagcatcagaagggttttcaagtgaaaagaactcacctggaagttgctgaactgaagtttgatgatagaggtgggggactagcttaatgccagtgcccactgcttcgtacaggttggggtacttgtaggtatgagcaggacgggtctgggcagtatggcttgctgcctgggaagatgttcccataatgaggcattttggcccttgttcccgcagaatgtgatgctgatgttccttggactgaaattcggagaaatctggacaagcttcagagaggagctcccattccattagcctctcgcagtttatatagcagaaatcctttcctgacctccgcaggcccagaccactggtccattctgcatgaactatcccttcctggaggctggtgaagcctacacgggcaccagaaggcctctcaagtttgtgctgactggccctcacaacctcagagctcagggcacaggagcgagtgccatcttcccagaccatgcgggggcctccactgttaaaaccctgttcaggcagcaacttccaggactcatcgcccaggaggaagagcagagccacactcagtgccaatagcttgtccatcgtcctcaggaaggaggtcctggaagcaggctgccactgaaaggccagctttcccaggctttggctctctcctagcccagactcaggagcccagctggcttcacctagtggatcccgcaccggggctgcaggtggagctgcctgccagtcccatgccgtgcgctcgcattcctcagcccttgggtggtcgatgggactgggcgccctggagcagggggtggtgctcgtcggggaggctttctctctggctgcccttaacatttttttcttcatttcaattttggtgaatctgacaattatgtgtcttggagttgctcttctcaaggggtatctttgtggtgttctctgtatttcctgaatttgaatgttggcctgccttgctagattggggaagttctcctggataatatcctgcagagtgttttccaacttggttccattctccccgtcactttcaggtacaccaattagacgtagattttgtcttttcacatagtcccatatttcttggaggctttgttcatttctttttattcttttttctctaaacttctcttcatgcttcatttcattcatttcatcttccat

SEQ ID NO: 120531 - DNA, 807 bp, Homo sapiens
atggggccttctgattgctgcttgagtgcgctggctcctgagggtattaaaccatcagctattaatgctggtggctctgagcagggcacctggatgggcttgctgcagagcaagggcgaggccagcctgtgggcctgggcagggccaggacggagaaggagctcaggacgttcagaatcccagacagcacgggtcctgtcggctgtgcccctgcccagggatgtccccaactctctccgaatctgtgcctctgctcagaatctcaggttccagtttccaccttacaactcattgctcccagctgccttcctgcggggcggggctcgggacctgcagcccgccatgcctgagcctcccacccactccatgggctcctgtgcagcccgagcctccccgaagagcaccaccccctgctccacggtgcctagtcccatcgaccacccaagggctgaggaatgcgagcgcacggcacgggattggcaggcagctccacctgcagccccggtgcgggatccactagcagtctttagctctggttaccggcagaagcccatctctgtctgcagtcttggacactgcacctgggacaggtgtctgttacccagagctgctgtagccaccaacagagctttgagtgcaggcttcacaggacctccccacgcagaagccaccgtgggcttcaggttaggaggtgacaaggctgtcagggccgtgattgcaaagctgtctccatcacatcccctgctgctccttgcaggaagacacagagtccatttcccatcccatgaaatcgggctgcttccatga

SEQ ID NO: 120532 - DNA, 390 bp, Homo sapiens; identical to SEQ ID NO: 120302

SEQ ID NO: 120533 - DNA, 363 bp, Homo sapiens; identical to SEQ ID NO: 120303

SEQ ID NO: 120534 - DNA, 1513 bp, Homo sapiens; identical to SEQ ID NO: 120304

SEQ ID NO: 120535 - DNA, 3594 bp, Homo sapiens; identical to SEQ ID NO: 116845

SEQ ID NO: 120536 - DNA, 1635 bp, Homo sapiens
gtaggcctttcttacctggacactactgtttgttctggatatgctaaccactttaaagacgttgatgattctaaacactcattcaggctggccaaggccggagcccactacctcagcttgcagggaggtgtggagggagacgcacgagcgggaaccggggctgtgtgccgtgcttgcgggccagctggggttccgggtgggcgtgggcttggtgggccccacactcggagcagccggccagccctgctggccccaggcaatgggggacttagcacccgagccagtggctgcggagggtgtactgagtgccccagccgggctggcccaccggcactgcgcttgatttctcgccgggccttacctgccttcccatggggcagggctcgggacctgcagcctgccatgcctgagcctcccacccactccatgggctcctgtgcggcccgagcctccccgatgagcaccaccccctgctccacggcacccagtcccatcgaccacccaagggctgaggaatgtgagcgcacggcacaggactggcaggcagctccacctgcagccccggtgtgggatccactaggtgaagccagctgggctcctgagtctggaactaacatttccattacacctggaaatgccacatttgtgacccgggtgcagggacaggcttggtttgcctcatgtatcactggtcatgatatgtctagtttaaaaacttccagtgtcgtggtattaaggagacaatctgaggcacttctaccagccaatttgacatgcaattggcaagattcttctgcccttgccaccttagaaagtgccctgtcccaggtcagacacaaaagattcacatttacacttatggtctttacaggctcagccatagacattatggcaactgttagcattgctgttgtatctattactgaatcagtacaaacaactgcttttgtagataatctggccaaaaatatatgtgatgaacttctcctacaggacatggatgaagctggaaaccaacattctcagcaaaataacacaagaacagaaaaccaaacaccacatgttctcactcataagtgggagttgaacaatgagaacatacggatacagggaggggaacattacatactggggcctgttggtggcagggatgagaagacgctgttgctgaggacttactgtttaaagtcacaagaaggagcagacacaaaatgcagaaataagcacaacaaagagacacagaaacagtccaagtctctggtatactcttccaccctgaatcctgagaaactcttagtgtgtaagagactgtctcttgaactaactcggccagaaaacactctcagatgcactaacatagggaagctaaaagcagtcgcggggggtatgtctgcagcttcaggaatatatctggaaacagacacacaaccctaccccctgaaacaggaattaaaagaaattaaagaatgtgtaggcaaaaactcagttgtagtggtgtttctggtaagaaagaagcttagtgtttcccagtatgcatttgcacgttgtttggatgctaagcactccacctcagagaacgttgagatagcggggaagctcagaatccagtcatttgaagtaggaaaacaactctga

SEQ ID NO: 120537 - DNA, 565 bp, Homo sapiens
tcagcttgcagggaggtgtggagggagaggcatgagcgggaaccggggctgcgtggggcgcttgcgggccagctggagttccgggtgggtgtgggcttggtgcgccctgcactcggaggagccggccagcccggcgctgcgctcgatttctcgccgggccttagctgccttcccgcggggcagggctcgggacctgcagcccgccatgcctgagcctcccaccccctccgtgggctcctgtgcggcccaagcctccccgacgagcgccgccccctgctcgatggcgcccagtcccatcgaccacccaagggctgaggaatgcgtcgcacggcgcgggactggcaggcatgatgaactgatagttgcattgccattcatgatgatcccctggcattcgtccattcagccattcaccattcacccattcaactggaattttggttgaatgccggaattgtgtccacaaattgtggatggatagttggttggctggctggatggctggctggatggctggctggatggatggtgaatggctggcggcggttcggttgctttgaagcat

SEQ ID NO: 120538 - DNA, 450 bp, Homo sapiens
ccctcactcacactgctggaaggttaaagtcgacttcacgctagtttaaggaaatagctaacgctgataaccatgtcccaagcactgctctaagttcccaatgtgtccggaattggtgggttcttggtctcactgacttcaagaatgaagccacggaccctcgcgttttagactatgctaaaaacagcctcaggaccttcagcactgatcaacaatcctgggcatgggctgaccgacagttttcacccagagagtgaagatcatggaggagccatcttaaattcgcgcccagcgcaggctcccaggaatccttatgtcaccgatctcaattcagccaatgtgacaaacacagcagtaattaagtctagagagctaaacacacctcaaaaagaattgtctcttggtatgagtggaatggaataaaatacatggaaacccaaaaaaaaaaaa

SEQ ID NO: 120539 - DNA, 965 bp, Homo sapiens
aggaggcttggaagagagtcaggactttagccacttcctgggagtaaaagagcctcctccacttatgtcagtagaacccacatggagaccattaagaagccttcctgtacctctcggccaggtatcagtggaccctgagtggggagctggaactcctacccccactcaacagcccccttcaggtatgaaaggaggccaagggtgtaacctggactttcactactgtgtccggaattggtgggttcttggtctcactgacttcaagaatgaagccgcggaccctggccgagtgaagctgcagacctttgcagtgagtgttacagctcttaaggcagagcgtctggagttgttcattcctcccggtgggctcgtgatatcgctgggctcaggagtgaagctgcagaccttcacagtgagtgttacagctcttaaggcagagcatctggagtcgttccttactcccggtgggctcgtgatctcgctgggctcaggagtgaagctgctgcagatcttcgaggtgactgttatagctcataaaagcaacgtggacccaaaaaactcaggagcccagctggcttcacctagtggatcccgcaccagggctgcaggtggagcggcctgccagtcctggtgccgtgcgcctgcactcctcagcccttgggtggtcgatgggactgggcgccgtggagcagggggtggcggtcgtcggggaggctcgggccgcataggagcccatggagggggtgggaggctcaggcatggcgggctgcaggtcccgagccctgccccgcgggaaggcagctaaggcccagcgagaaatccagcacagcgccgggccggccggctgctccgagtgcggggcccgccaagcccacgcccacccagaactccagctggcccgcaagcgctgcgcgcagccccggttcctgctcgcgcctctccctccacacctccctgcaagctga

SEQ ID NO: 120540 - DNA, 1152 bp, Homo sapiens
atgaagccacggaccctcgcggtgagtgttacagctcttaaaagcagcgtggacccaaacaactcaggagcccagctagcttcacccagtggatcccgcaccagggctgcaggtggagctgcctgccagtcccgtgccgtgcgctcgcactcctcagcccttgggtggtcgatgggactgggcgccgtggagcagggggtggtgctccttggggaggctcgggccgcacaggagcccatggagtgggtgggaggctcaggcatggcgggctacaggtcccgagccctgccccgcgggaaggcagctaaggcccggccaacaccctttggtcacatgaataaaagtcaagccctttctttgctcattgctcagcctctgggtattaatctgctgagctggtggccacctaaatacaatcgtcctgttcccctcattggtctctccggtctcctgattccagccacattttgcctgggggagacccgtgactccaggcatgctatcaggacaacttcaacccgaggggagatcagctctcccgcaacctggtgccgctctctgacagcacaacagaacctaaggggctacaggatgattcaaggaacagtgtgctacaggacctcggtagcccaccagtggctagaaaacaatgcactggaaggcacccttaatgtcctggcatatgcacagggccagttcccagaagcagacccgcactgggacccaaacaaggaagcccaactacagcaactgcagaggtaccaagaggcactcctgcaagttttgagaaaaggagagaaaaaggcattcaatatgggaaacatttcagaggtgcttcagagagcagatgaaagctgtagccagttttatgagagactctatgaggccttccagctttgcagtccatttgaccctgaggctactgagaaccagtgcatggtaaacgcagtgtttgtagggcaaacccagggagacatcaggcgaaagctgcaaaagctagagtgtttcactggcatgaatgtcactcaggttttagaagtggccaccaaggtgtacactaactgtgaggaggagactcagggaaaaggccaatttgctggtggcagcacttatggaaaggggggcgaatgtcccaagacgaagtggatgtag

SEQ ID NO: 120541 - DNA, 2850 bp, Homo sapiens
atgagaaaattttgcaggggcagagatattgagaaacacagcatccagttctacccactcctgggaccctcttttactgtcttcgttaagcatcttctgcatataacttgtggcctgcagcacctggctaagatcttcctccactccctccctgggagactgcacagcctagctgggaaagtcaaagccatcaaggacccagaaaatgttacaagggctcctcaaaagccagcaagtgccagaaccaccacccaagcagctggttgcagagccgactccccgttcttaaagggcctgagcctatgggaccggaagagctccacagtctgcctgtctctggtggtggaagaccactctcagaagcgcgggctgaggcttgcacacagtcagattcccgcgcagcacgtgcacagacccacctctgctcagagtgagcctaaggtaggagcaggagagagagcatgtcttaagagagaaagccaccttcatgaacagacgctcacctgctccattaatgccaagagcagccagccagccctgctggcccggggcaatgggggacttagcacccgggccagtggctgcggagggtgtaccgggtcccccagcagtgccggcccaccggcgctgtgctcgatttctcgccgggctttagctgccttcccacggggcagggctcgggacctgcagcccgccatgcctgagcctcccacccactccatgggctcctgtgcggcccgagcctccccgacgagcaccaccccctactccacggcgcccagtcccattgaccacccaagggctgaggaatgtgagcgcacggcgcaggactggcaggcagcttcacctgcagccccggtgcgggatccactaggtgaagccagctgggctcctgagtctggaactaacatttccattacacctggaaatgccacatttgtgacccgggtgcagggacaggcttggtttgcctcatgtatcactggtcatgatatgtctagtttaaaaacttccagtgtcgtggtattaaggagacaatctgaggcacttctaccagccaatttgacatgcaattggcaagattcttctgcccttgccaccttagaaagtgccctgtcccaggtcagacacaaaagattcacatttacacttatggtctttacaggctcagccatagtcattatggcaactgttagcattgctgttgtatctattactgaatcagtacaaacaactgcttttgtagataatctggccaaaaatatatgtgatgaacttctcctacaggacatggatgaagctggaaaccaacattctcagcaaaataacacaagaacagaaaaccaaacaccacatgttctcactcataagtgggagttgaacaatgagaacatacggatacagggaggggaacattacatactggggcctgttggtggcaggttgccaacatccaaactcgctgttgattgccagctcctgctccttgcagcagcccagcatgctctctgctggtgccaaaatacccttccaccaaaccccgctaacttctggaactgtcctagagggtttcctaccctagcaagtgagcttgcctatgtcagccctaaccttgctcttgtcattcagctgagccagaggaaaaaatttgagctattctggggtggtctacagagaaccatcttctttcccttcagtgttctcagaatattgactgttgatgaacaagccaatgatgtgagtgtggctgcagcaaggacccttcaaattttcagagatgacatgattgtatatctagaaaaccccattgtctcagcccaaaatctccttaagctgataagcaacttcagcaaaatctcaggatacaaaatcaatgtacaaaaatcacaagcattcttatacaccaacaacagacaaacagagagccaaatcatgagtgaactcccattcacaactgcttcaaagagaataaaatacctaggaatccaacttacaagggatgtgaaggacctcttcaaggagaactacaaatcactgctcaaggaaataaaagaggatacaaacaaatggaagaacattccatgctcatgggtaggaaaaatcaatatcgtgaaaatggccatactgcccaaggtaatttacagattcagtgccatccccatcaagctaccaatgactttcttcacagaattggaaaaaactactttaaagttcatatggaaccaaaaaagagcccacactgccaagtcaatcctaagtcaaaagaacaaagctggaggcatcacactacctgacttcaaactatactacaaggctacagtaaccaaaacagcatggtactggtaccaaaacagagatatagatcaatggaacagaacagagccctcagaaataacgctgcttatctacaactatctgatctttgacaaacctgagaaaaacaagcaatggggaaaggattccctatttaataaatggtgctgggaaaactggctagccatatgtaggaagctgaaactggatcccttccttataccttatacaaaaatcaattcaagatggattaaagacttaaatgttagacctaaaaccataaaaaccctagaagaaaacctaggcattaccattcaggacataggcatgggcaaggacttcttgtctaaaacaccaaaagcaatggcaacaaaagacaaaattgacaaatgggatctgattaaactaaagagcttctgcacagccaaagaaactaccatcagagtgaacaggcaacctacaaaatgggaaaaaattttcgcaacctactcatgtgaaaaagggctaatatccagaatctacaatgaactcaaataa

SEQ ID NO: 120542 - DNA, 1162 bp, Homo sapiens
ttacatcaagcatattacatgagctgctggtaaacagtacagacaatcatggcctacagctgagcagatgctgatgctgatgctgatgctgatgctgatgctggattcttggttcaaggagcagagaaaaggaaaactaaaagctccccgcacactagcactgttgtcaaggaacgtgatcactactgtctttgctccatggagctgaacgcctgaggtatggcctgctgacattccagtggcaaatcctgcccctcgtcctgttgccttttcctgctggctcagcagtatgccatctccacctggatacctgatggcctcgtactgctctacacccaaaatgttcaaagtaggatcaccattcaaaacagatcttccctcaacacccccacttctatcgtgaatgccacaattcttctcccctgcctgggctcccactttggtggcatttcaggagcccttcagcccctccactgcactgtgggagcccctttctgggctggccaaggccagagcccactccctcagcttgcagggaggtgtggagggagaggcacgagcgggaactggggctgcatgcggcgcttgcgggccagctggagttccgggtgggtgggggcttggtgggccccgcactcggagcagccagccagccctgctggccccgggcaatgggggacttagcacctgggccagtggctgtggagggtgtactgattcccccagcagtggctggcccacctgcgctgtgctcgatttctcgtggggccttagctgccttcccgcggggcagggctcgggaactgcagcccgccatgcctgagcctcccacccactccatgggctcctgtgcagcacaagcctccccgacgagcaccaccctcctactccacggcgcccagtcccatcgaccacccaagggcaatcagcgccgtcaaaacagaccattcagctctaccaatcagcaggatgtgggtggggccggataagagaataaaagcaggctgcggagccagcagtggcaacccgctggggtccccttccacagtgtggaagctttgttctttcattctttgcaataaatcttgctgctgctcactctttgggtccacgctgcttttatgagctgtaacactcaccgcgaaggtctgcagcttctctc

SEQ ID NO: 120543 - DNA, 1038 bp, Homo sapiens
atgacgaagacaaagggaaagaggagaggcacccgatatacgttctctaggccttttagaaaacatggagttgttcctttggccacgtatatgcgaatctataagaaaggtgttattgtagacatcaagggaatgggcactgttcaaaaaggaatgcctcacaagtgtcaccatggtaaaactggaagagtctacaatgttacccagcatgctgttggcattgttgtaaacaaacaagttaagagcaagattcttgccaagagaattaatgtgcgtattgagcacattaagcactctgagagctgggatagcttcctgaaatacatgaaggaaaatgatcagaaaaagaaagaagccaaagagaaaggtacctgggttcaactgaagtgccagcctgctccacccagagaagcacactttgtgagaaccaatgagaaggagcctgagctgctggaacctattccgacactggatagggaattccccccattacaagcaaaccctggggtgactgctggtcatggaaacaagccaccaaagaattatggaagccccttgttggagatgtcctcactgttctcccggaactgccctccagggcactgtgctctcaccctgaccacacacccctctccccagcacccctgccagcccctggcgagccaggtgccaggagccaacagtatgaattacgccccagaccaggaaagacaactaacaactcacagcgaagctctgtttacactggtattgatccagggctgcggtgactcggaggccatggagagccagactgccttgcagaagctgccccatcgtggggagcccagccagctctccccagaggagaagcgagacctgcagcttcatcctcacaccagccagcttgagggtcagagggtcgccatcaggaagggggccccaagggcagatggagctcactacagtggtgaaggggccattggagaagaggccaggccacagaattctgcctgctggaaacactgggtcttcacggtcaacaaagcatcctcatga

SEQ ID NO: 120544 - DNA, 673 bp, Homo sapiens
atccttaattaaattaatcccccccccccgccctttcggccggaaccgccatcttccagtaattcgccaaaaatgacggaccacaaaggggaaagaggagaggcaacccgatatatgttctctaggcccttttagaaaaccatggagttgttcctttgggcccccatatatgccgcatctcataggaaaggtgatattgtagacactcaagggaatggggtactgttcaaaaaagggaattgcccccacaaagtgttacccatggccaaaacctggaaggagtcttaccaatgttaccccagcatgcttgttggccatttgttgtaaaccaaccagttttagggcaaagttttttcccaagagaattaatgtgccgtattgagcacatttaagcactcctaagagcccgagataagcttcctgaaaccgttttgaaggaaaatgattcagaaaaagaaagaagcccaaatgagaaaggtacctggggttccaacttaaagcgccaccctggctccaccccagaagaagcacactttgtgagaacccaatggggaaggagcctggagcttgctggaaccctattccctatgaatttcatgggcataataggtgttaaagaaataaaataaaagacctctggactatttaaaaaaaaaaaaaaaaaaaggccagg

SEQ ID NO: 120545 - DNA, 1023 bp, Homo sapiens
atggggaaacaccagcgcaagaaggctgaaaattcccaaaaccagaacacctgtcctcctccaaacgatcacaactcctcaccagcaagggaacaaaactggatggggaatgagtttgatgaactgacagaagtaggcttcagcaggtgggtaagaacaaactcctcggagctaaaggagcatgttttaacccaatgcaaggaagctaagaaccttgaaaaaagaataaccgatgtagagaagaacataaatgacctgatggagctgaaaaacacagcacaagaactttgtgaagaatacacaagtatcaacagccaaatcgatcaagcagaagaaaggatatcagagattgatgatcaacttaatgaaataaggcgtaaacacaagattagagaaaaaagaataaaaaggaatgaacaaagcctccaagaaatatgggactatgtgaatagaccaaatctacatttgattggtgtacctgaaagtgacagggaaaatggaaccaagttggaaaacactcttcaggatattatccaggagaacttccccgacctagcaagacaggcgaacattcaaattcaggaaatacagagaacaccacaaagatactcctcaagaagggcaaccccaagacacgtaatcatcagattctccaaagttgaaatgaaggaaaaagtgttaagggcagccaaagagaaagccaccttcaatagcacatggtatgaccagagggctcttctggagacaaatcagggtaaaacaaagctcagtgccaatgttgcaaatgcaaactgcagagacctgccagggccaacacatggagcaattactcaaaagaaacacaccgagaaaaaggcaatgaatgacaataggaacctaataaggaaaagtgtgttcgccaatggattcatctttgctcataaacaagctgcctgttggttcatgtcctacatgaatgtatttcagaaagaaatggattggaagccaagagttgtatcaacaggctctgaggcgaggcactga

SEQ ID NO: 120546 - DNA, 423 bp, Homo sapiens
aaaatgcaaaagctgctaaaagtgagagtgaccaggcttgttctggatccctatttattaaagtattttaataagcggaaaacctactttgctcacgatgcccttcagcagtgcacagttggggatattgtgcttctcagagctttacctgttccacgagcaaagcatgtgaaacatgaactggctgagatcgttttcaaagttggaaaagtcatagatccagtgacaggaaagccctgtgctggaactacctacctggagagtccgttgagttcggaaaccacccagctaagcaaaaatctggaagaactcaatatctcttcagcacagtgaagcgggagtggaagaaggatctaaagggaaaaactgacatgtttatgttatggaaaaagaaatttttctaagtttcatcacataaaaaaa

SEQ ID NO: 120547 - DNA, 427 bp, Homo sapiens
  misc_feature (1)...(427): n = a,t,c or g
aatacaggcttgattgaaagaattctgaccagtggctggtcattannnnnnnnnnnnnnnnnnnnnnnnnnnnnnnnnnnnnnnnnnnnnnnnnnnnnnnnnnnnnnnnnnnnnnnnnnnnnnnnnnnnnnnnnnnnnnnnnnnnnnnnnnnnnnnnnnnnnnnnnnnnnnnnnnnnnnnnnngtttccgaactcaacggactctccaggtaggtagttccagcacagggctttcctgtcactggatctatgacttttccaactttgaaaacgatctcagccagttcatgtttcacatgctttgctcgtggaacaggtaaagctctgagaagcacaatatccccaactgtgcactgcggaagggcatcgtgagcaaagtaggttttccgcttattaaaatactttaataaatagggatccaacgaaa

SEQ ID NO: 120548 - DNA, 348 bp, Homo sapiens
atggagatggtgaaagtcaatctggagtgtaatgccaagctgtacaggcatggcaccaacatctgctcagctcctggtgagggcttcagggagcttccaatcataggagaaggtgaagaggagccagcatatcacatgtgcacaattggggatatcgtgcttctcaaagctttacctgttccacgaacaaagcatgtgaaacatgaactggctgagattgttttcaaagttggaaaactcgtagatcctgtgacaggaaaaccttgtgcaggaactacctatctggagagtccattgagttcggaaaccacccaggtattagccacaatcaacatcctgcattcctaa

SEQ ID NO: 120549 - DNA, 335 bp, Homo sapiens
aactgtaagagcctacaatgttccccagcatgctgttggcattgttgtaaacagacaagttaagggcaagattcctgccaagagaattaacgtgggtattaagcactttaagcactctacaagctaagagaatttcctgaaacgcatgaaggaaaatgatcagaaaaagaaggaagccaaagagaaagttacctggattcaactgaagcaccagtcagctccacccagagaagacaatgtgagagaaccaatgggaaggagcctgagttgctggaaccacttccctatgaattcatgcataatacatatatacacatatatgtgtgtgtacatat

SEQ ID NO: 120550 - DNA, 711 bp, Homo sapiens
  misc_feature (1)...(711): n = a,t,c or g
cgccacaatgacgattacaaagggaaacaagacaggcaccccatataagtactctacgtcttttagaagacacggagttgttcctttggccacatatatgccaaactataagaaaggtgatattgttgacatcaagggaatgggtactgctcaaaaaggaatgccccacaagtgttaccatggcaaaactggaagagtctacaatgttacccagcatgctgttggcattgttgtaaacaaacaagataagggcacgattcttgccaagagaattaatgcgcgtattgagcacattaagcactctaagagccgagatagcttcctgaaacgtgtgaaggaaaatgatcagaatatgaaagaagccccagagaaagggtcctgggatcaactaaagcgccagcctgctccacccagagaagcacactttgtgagaaccaatgggaaggagcctgagctgctggaacctatttcctatgaattcatggcataataggtgttnnnnnnnnnnntaagggacctctgggctcctaaaaaaaaataaaaacccccaaaaataaaaaaagcagctttttttgaggggccccattatttgatcccggggggggtggttaaaacacgggggggtggggaaaacccggggttcccccactattatccccttggggagaaaggagtgatctaacatcggtgcgcccctgtaacaactccccc

SEQ ID NO: 120551 - DNA, 536 bp, Homo sapiens
catcatctcatcaaagagagttaaaagtagggatgttctctgcatggcctcttctgatatgattaattgattgtaaattaagtaatcaaggcatactttgttgatttgtcatatctgggtaaaaggtttatggtttatttaataaatgaaactgcaaaatcagttttctacatttctgttatatttttgttaaagcacttaaaagaatttctgctctgtccaggggcaagattcttgccaagagaattaatgtgcgtattgagcacattaagcactctaagagccgagatagcttcctgaaacgtgtgaaggaaaatgatcagaaaaagaaagaagccaaagagaaaggtacctgggttcaactaaagcgccaggtaagaatttggtgtatatttcattggttctgagagcactttaaggttgagatttaacacatcacataattattctattccctttttttttcctttaatagcctgctccacccagagaagcacactttgtgagaaccaatgggaaggagcctgagctgctgc

SEQ ID NO: 120552 - DNA, 553 bp, Homo sapiens
acgcctgaggcaccgcgctgtaatttccgggtccacccacgcgtccgcagtaattcgccaaaatgacgaacacaaatttaaataggagaggcacccgatatatgttctctaggccttttagaaaacatggagtggttcctttggccacatatatgcgaatctataagaaaggtgatattgtacacatcaagggaatgggtactgttcaaaaaggaatgccccacaagtgttaccatggcaaaactggaagagtctacaatgttacccagcatgctgttggcattgttgtaaacaaacaaggtaagggcaagattcttgccaagagaattaatgtgcgtattgagcacattacgcactctaagagccgacatagcttcctgaaacgtgcgaaggaaaatgatcagaaaaagaaagaagccaaagagaaagaagttcccatggagcccaccgtgtacatgtctgaaaaggggaggacactttttcctggggagcctgccaatcacataaagaacaaaaggcttctgtgctggaccctgcctgcttatctgtgcag

SEQ ID NO: 120553 - DNA, 964 bp, Homo sapiens
ctacgcgtggctcccgggcgctacgtgttcgacagacttgaaccgcgaccttgtggcctcagaggtcgttcattgggaccgtggggagactctctaacctgtttgaggtccattggcatgggcgggttaaaccatgttctgccagacggggagcagcgtgcgccgggtcgggcctgggccgtgggctgagaaccggactgcgatgttgcggccctgcggggggacatttgcgagaaagacgagactgagtcgcttgggtaattcgccaaaaatgaacgaacaacaaaggggaaagaggagaggcaccccgataataatgttctctaagggccttttaagaaaacatggaagttgttcctttggcccacatatttatgcgaaatctataagcaaaggtgatattgttagacatccaaggggaatggggtaccttgttccaaaaagggaattgcccccacaaagttgttacccatggccaaaacctggaaggagtcttaccaatgttaccccagccatgcttgttggccatttgttgtaaaacaaacaagtttaagggcaaagattcttgcccaagaggaatttaatgtggcgtatttgagcaccatttaggcacttcttaaggagcccgagattagcttccctgaaaacgtgtggaagggaaaatggatccaggaaaaaggaaaggaagcccaaaggaggaaaggttacctgggggtttcaacttaaaaggcgccaccttggcttcccaccccaggaggaagccacatttttgttgaaggaacccattgggggaagggagccttgagcttgcttggaaccctatttcccctattggatttcatggggcattaataggtgttaaaaaaaaaaataaaaaggaccctctgggctacaaaaatgtttctcttcattgagtagaagtgtggtgtcctctcccccaaagaaatatttaaagcaaaaaaaa

SEQ ID NO: 120554 - DNA, 492 bp, Homo sapiens
atggcatccatggattacagtacctatagccaagctgcagcgcagcagggctacagtgcttacaacacccagcccactcaaggatatgcacagaccacccaggcatatgggcaacaaagctatggaacctatggacagcccattgatgtcagctatacccaggctcagaccactgcaatctatgggcagaccgcctatgcaacttcttatggacagcctcccactgagccacctggaagagaagaaagcaacaagcttcctgcctgccagaagccaaatgctagtgcaaaaacccacatcaagccttccaactccccaccaaaactgatccatggggcccggaaacaaaacagcaactgtgtccaccttgtggttacaaacataaaacccttcaatctccctacccctgaagacaaaggttctaaaatccaacaacctcaatgctatggacaaaacaccaaatccctctctaataacacgtacctcctctaa

SEQ ID NO: 120555 - DNA, 2388 bp, Homo sapiens
agtcgacccacccgtccgcggacgttgagagaacgaggaggaaggagagaaaatggcgtccacggattacagtacctatagccaagctgcagcgcagcagggctacagtgctttacaccgcccagcccactcaaggatatgcacagaccacccagcaggcatatgggcaacaaagctatggaacctatggacagcccactgatgtcagctatacccaggctcagaccactgcaacctatgggcagaccgcctatgcaacttcttatggacagcctcccactggttatactactccaactgccccccaggcatacacgccagcctgtccagggggtatggcactggtgcttatgataccaccactgctacagtcaccaaccacccaggcctcctatgcagctcagtctgcatatggcactcagcctgcttatccagcctatgggcagcagccagcagccacttgccctacaagaaccgaggattgaaaacaagcccactgagactagtcaacctcaatctagcacagggggttacaaccagcccagcctaggatatggacagagtaactacagttatccccaggtacctgggagctaccccatgcagccagtcactgcacctccatcctaccctcctaccagctattcctctacacagccgactagttatgatcagagcagttactctcagcagaacacctatgggcaaccgagcagctatggacagcagagtagctatggtcaacaaagcagctatgggcagcagcctcccactagttacccaccccaaactggatcctacagccaagctccaagtcaatatagccaacagagcagcagctacgggcagcagagttcattccgacaggaccaccccagtagcatgggtgtttatgggcaggagtctggaggattttccggaccaggagagaaccggagcatgagtggccctgataaccggggcaggggaagagggggatttgatcgtggaggcatgagcagaggtgggcggggaggaggacgcggtggaatgggcagcgctggagagcgaggtggcttcaataagcctggtggacccatggatgaaggaccagatcttgatctaggccctcctgtagatccagatgaagactctgacaacagtgcaatttatgtacaaggattaaatgacagtgtgactctagatgatctggcagacttctttaagcagtgtggggttgttaagatgaacaagagaactgggcaacccatgatccacatctacctggacaaggaaacaggaaagcccaaaggcgatgccacagtgtcctatgaagacccacccactgccaaggctgccgtggaatggtttgatgggaaagattttcaagggagcaaacttaaagtctcccttgctcggaagaagcctccaatgaacagtatgcggggtggtctgccaccccgtgagggcagaggcatgccaccaccactccgtggaggtccaggaggcccaggaggtcctgggggacccatgggtcgcatgggaggccgtggaggagatagaggaggcttccctccaagaggaccccggggttcccgagggaacccctctggaggaggaaacgtccagcaccgagctggagactggcagtgtcccaatccgggttgtggaaaccagaacttcgcctggagaacagagtgcaaccagtgtaaggccccaaagcctgaaggcttcctcccgccaccctttccgcccccgggtggtgatcgtggcagaggtggccctggtggcatgcggggaggaagaggtggcctcatggatcgtggtggtcccggtggaatgttcagaggtggccgtggtggagacagaggtggcttccgtggtggccggggcatggaccgaggtggctttggtggaggaagacgaggtggccctggggggccccctggacctttgatggaacagatgggaggaagaagaggaggacgtggaggacctggaaaaatggataaaggcgagcaccgtcaggagcgcagagatcggccctactagatgcagagaccccgcagagctgcattgactaccagatttattttttaaaccagaaaatgttttaaatttataattccatatttataatgttggccacaacattatgattattccttgtctgtactttagtatttttcaccatttgtgaagaaacattaaaacaagttaaatggtagtgtgcggagtttttttttcttccttcttttaaaaatggttgtttaagactttaacaatgggaaccccttgtgagcatgctcagtatcattgtggagaaccaagagggcctcttaactgtaacaatgttcatggttgtgatgttttttttttttttttaaaataaaattccaaatgtttaat

SEQ ID NO: 120556 - DNA, 696 bp, Homo sapiens
atgcctgcgaagaagaagactgggcagccccctaaagtaagaaacattgaacatccaaccatttgcgagagcctaaagtttcgcaaactttttacacggcagctcacttcccagagagagcattccaagcggcaaaggcaaaagttgcagatctcttacaccccagccttacaagtcacacagcaacctagccatgatacaaggagagtggaaatagattctgcctctcagtgggaagctaaactctactataattgggttatggttaattctaagcttaggaaactagataatgcaatacaagactgcacaaatacagtgaagctcaatgacacctatttaaaagcctgcttgagaagagctcagtgttacatgaacaccaaacagtatgaagaagcagtgcacaattatgaaaaagtgtatcagacagagaaaacaaaagaacacaaacagctcctaaaaaatgcacagctgaaactgaagaagagtaagaagaaagattactacaagattctgggagtggacaataatgcctctgaggacgagaccaagaaagcttatcacaaatgggccttgatgcaccatccagattggcacagtggaggcagtgctgaggttcagaaggaggaggggaagttcaaggaaattggagaggcctttaccatcttctctgatcccaagaaaaagactcgctag

SEQ ID NO: 120557 - DNA, 826 bp, Homo sapiens
aactgtacacagaagccctggggatagaccccaacaatataaaaacaaatgctaaactctactgtaatcggggtacggttaattccaagcttaggaaactagatgatgcaatagaagactgcacaaatgcagtgaagcttgatgacacttacataaaagcctacttgagaagagctcagtgttacatggacacagaacagtatgaagaagcagtacgagactatgaaaaagtataccagacagagaaaacaaaagaacacaaacagctcctaaaaaatgcgcagctggaactgaagaagagtaagaggaaagattactacaagattctaggagtggacaagaatgcctctgaggacgagatcaagaaagcttatcggaaacgggccttgatgcaccatccagatcggcatagtggagccagtgctgaggttcagaaggaggaggagaagaagttcaaggaagttggagaggcctttactatcctctctgatcccaagaaaaagactcgctatgacagtggacaggacctagatgaggagggcatgaatatgggtgattttgatccaaacaatatcttcaaggcattctttggcggtcctggcggcttcagctttgaagcatctggtccagggaatttcttttttcaatttggctaatgaagggcaaccacccagaacccagaaaatgcagattcactcagtttaatcttgaatgtggaaacagttcacctcctcccttcatcacgtctccgtgtgcttagagcagtttcgttttctcagttggatgccctgtgtctctgtgagtggggtggagcaaagggttgtat

SEQ ID NO: 120558 - DNA, 434 bp, Homo sapiens
atgatactgaatagaggaaagttgaaagcagtccctctgagaactggaacacaacaaggatgcccactgtcaccactcctcttcaacacagtattggaagtcctagccagagtaatcaggcaagagaaagaaataaaggacatccaaatgggtaaagaggaaatcaatctgtcactgtttgctggtgatagaattgtttcctttgaaaacccaaaagactcctccagaaagttcctagaactgataaaagaattcagcaaagtttccagatacaagattaatgtacacaaatcactagctcttgtatacaccaacagtgacctagtggagaatcaaatcaagaactcaaccccttttacagtagctgcaaaaataataaaatacttagaaatatacctaatcaataacatgaaagacctctacaaggaaaacta

SEQ ID NO: 120559 - DNA, 443 bp, Homo sapiens
  misc_feature (1)...(443): n = a,t,c or g
gcctgcaggaattcggcacgagcnnnnnnnnnnnnnnnnnnnnnnnnnnnnnnnnnnnnnnnnnnnnnnnnnnnnnnnnnnnnnnnnnnnnnnnnnnnnnnnnnnnnnnnnnnnnnnnnnnnnnnnnnnnnnnnnnnnnnnnnacatctggtgcccaacatggaggcttttctctagggtgaaggtacgctcgagcgtggtcattgaggacaagtcgacgagagatcccgagtacgtctacagtcagccttacgacatttgaagttctacaatgaacccatcggagatgcaaagaaaagggcctccgcggagatggtaacaccagtcacatggatggataatcctatagaagtatatgttaatgatagcgaatgggtacctggccccacagatgatcgctgccctgccaaacctgaggaagaagggatgatgataaatatttc

SEQ ID NO: 120560 - DNA, 2651 bp, Homo sapiens
gtctcctgcctgcctttctgctgctctgttcagactctcacttcctgcagttctgcagtcagtttgccccacgcaagacccaaggatctgggtctgtgaataatattcaagccaacatcattgccaagaaatccaacaaccacttaatgaagaagaatgatcagaagttcaaggacctgccacagatggccggtcatcccatccatcatcaggctcaggggccccccggagccaagaacccacaggagcagcagaggagacccatggggcagacgactctcccagcagagcaggaggaatccagggtgaaatgcaagaactgcggggcctttgggcactcagccaggaacaagacctgccccattaagaggtggagtggggcccttcctctgcaggtcctgggctcacacaaggagaaggagaacctgaaaccagcaaaggcccagctaccctttacgactccagggccctttacgacgaatgacagagaaaaggagcgaagtccaagttctacaatgaacccatcagagatgcaaagaaaagcatctccacggagatggaaacaccacaatcaaacaccatcgattcacaaggtgaacaaaatggtgatgtcagaagaacagatgaagttgccatccaccaagaaagcagagccgccgacttgggcacaattaaagaagctgacacagttaccaaaaaaaagcctagagaacgacaaaggtgacacaaactccagagaacacgctgcttgcagctttgatgattgtatcaacggtggggcagctgcagctaattatacctactgggcctatgtgcctttcccgcccttaattcgggcagtcacatggatggataatcctattgaagtatatgttaataatagtgcatgggtacctggacccacagatgatcgttgccctgacaaacctgaggaagaaggaatgatgataaatatttccactgggtatcgttatcctcctatttgcctagggagagcaccagcatgtttaatgcctgcaatccaaaattggttggtagaagtacctactgtcggtaccaccagtagattcacttatcacacgggtctattgacattcagggatgtggccatagaattctctcaggaggagtggaaatgcctggaccctgctctagaggactcttatactagacgaaaagcaaacagttgtggaaaaccttataaatgtaatgaatgtggcaaggcgttcactcagaattcgaaccttacaagtcataggagaattcatagtggagagaagccttacaaatgcagtgagtgcggcaaaacctttactgttcgttcaaatctaactattcatcaggtcatccatactggagaaaaaccttacaaatgtcatgagtgtggcaaggtcttcaggcacaattcataccttgcaactcatcggcgaattcatactggagagaaaccttacaagtgtaatgagtgtggaaaagcctttagaggacattcaaacctaactacccatcagttaattcatactggagaaaaaccgttcaaatgtaatgaatgtggcaagctcttcactcaaaattcacaccttataagtcattggagaattcacactggagagaaaccttacaagtgcaatgagtgcggcaaagcctttagtgttcgttcaagcctagcaatccatcagacaatccacactggagaaaaaccttacaaatgtaatgaatgtggcaaagtctttagagtgggcaggggagtgtccattggcaccacctgcctcttgagtgtcttccaggtgatcacggtcagctccaggaaatccagagcctccccagagaacagagctacgcagagcatcctcatcctggccccgcccacctctcggggatctggcccaggtcccgcttctgtcctgcgccgattggcacagacccggaagcggatggcgtggactgaaagttgcacggcggcgtgtgcgtttcctagttgtctggtgctgctatataggggacgtggggtccccacagacctgcaggttccggcccctcttttctcaacccagagcaaattgaaacgtccgggctcaagaacaaaatcaagccttgcaactcatcagagaattcacactggggagaaaccatacaagtgtaatgaatgtggtaaagtcttcagtcagacttcaagccttgcaaggcattggagaattcatactggagagaaaccttacaaatgcaatgaatgtggtaaggttttcagttacaattcacaccttgcgagtcatcggagagttcatactggagagaaaccttacaagtgtaatgagtgtgggaaagcctttagtgtgcattcgaacttaactacccatcaggtcatccatactggagagaagccttacaaatgtaatcaatgtggcaaaggcttcagtgtgcattcaagcctaactacccatcaggtcatccatactggagaaaaaccttacaaatgtaatgagtgtggcaaatcctttagtgtgcgcccaaacctcactagacatcagataatccatactggaaagaaaccttacaaatgtagtgattgtgggaagtcctttagtgtgcgcccaaacctcttcagacatcaaattatccatactaaggagaaaccttataaaagaaattaa

SEQ ID NO: 120561 - DNA, 360 bp, Homo sapiens
gacaagtcgacgagatttccgagtacgtctatagtcagccttgtgacatttgatgttctacaatgaacccgtcggagatgcaaagaatagcacctccacggagacagagacaccgcagtcgagcaccatcggctcacaagatgaacagaatggtgatgtcagaagaacagatgaagttgccatccaccaagaaggcggagccgccgacatgggcacaattaaagaagctgacacagttagctaaaaaaaagcctagagaacacaaaggtgacacaaactccagagaacatgctgcttgcagctttgaagactgtatcaacagtgtctgcaggtgtacccagcagctccgaagagagcgac

SEQ ID NO: 120562 - DNA, 3658 bp, Homo sapiens
gagatagggaaaaaccgccttagggctggaggtgggacctgcgggcagcaatactgctttgtaaagcattgagatgtttatgtgtatgcatatccaaaagcacagcacttaatcctttacattgtctatgatgccaagacctttgttcacgtgtttgtctgctgaccctctccccacaattgtcttgtgaccctgacacatccccctctttgagaaacacccacagatgatcaataaatactaagggaactcagaggctggcgggatcctccatatgctgaacgctggttccccgggtccccttctttctttctctatactttgtctctgtgtctttttcttttccaaatctctcgtcccaccttacgagaaacacccacaggtgtgtaggggcaacccacccctacatctggtgcccaacgtggaggcttttctctagggtgaaggtacgctcgagcgtggtcattgaggacaagtcgacgagagatcccgagtacatctacagtcagccttacgacatttgaagttctacaatgaacccatcagagatgcaaagaaaagcacctccgcggagacggagacatcgcaatcgagcaccgttgactcacaagatgaacaaaatggtgacgtcagaagaacagatgaagttgccatccaccaagaaggcagagccgccaacttgggcacaactaaagaagctgacgcagttagctacaaaatatctagagaacgacaaaggtgacacaaactccagagaacacgctgcttgcagctttgatgattgtatcaatggtggtaagtctccctatgcctgcaggagcagctgcagctaattatacctactgggcctatgtgcctttcccgcccttaattcgggcagtcacatggatggataatcctattgaagtatatgttaataatagtgcatgggtacctggacccacagatgatcactgcccctgccaaacctgaggaagaaggaatgatgataaatatttccactgggtatcgttatcctcctatttgcctagggagagcaccagcatgtttaatgcctgcaatccaaaattggttggtagaagtacctactgtcggtaccaccagtagattcacttatcacacgattgacttgatgacagagaaatgggttgttctcgcctctgtggaggttcttctgcgatttcctctgaagccaggagaggatccgaccgcccgctatgtctcaaataaaaaatgccaaccttcagtggactggcccaccacaatttcacagagacgtggataccaagagaagtggaaatccaaccatcatttaatgaagaagaatgatcggaagttcaaggacctgccacagatggcccgtcattccgtccatcatcaggctcagaggccccccggagccaaaaacccacaggagcagcagaggagacccatggggcagacgactctcccagcagagcaggaggaatccagggtgaaatgcaagaactgcggggcctttgggcactcagccaggaacaagacctgccccattaagaggtggagtggggcccttcctctgcaggtcctgggctcacacaaggagaaggagaacctgaaaccagcaaaggcccagctaccctttacgactccagggccctttacgacgaatgacagagaaaaggagcgaagtccaagtccccagcagcagcagagcgaagctccgacgcagacatttcccagaactccccaagagaaaatgcaggaagcctggaaggagccagcagaagattgtttgttcctgagggacctcccagccctgaagacaaacatcagtgacagacatcagtggcagaatggcctcccggtgatcacggtcagctccaggaaatccaggtgggcaaaacttaaagagaaagcccccaagcatgttggcttttctgttctcctgtgctggatcgtgtgcatgttggtaaacatcatctttcccatgtatgtgactggcaaatggaactacacaaacatcacagtgaacgaggatttgggatactgttctgggggaggcaacaacaaaatcgcacagacactgcgtgcaatgttgttatcattccctgatgtgttgtgtctggggctcatgctctgggtcagcagctccatggtttgcatcctgcacaggcacaagcagcgggtccagcacattgataggagcgatctctcccccagagcctccccagagaacagagctacgcagagcatcctcatcctggccagttaccaaaaggtaaagaaaaacttcgtgcaatgtgattgcttctccctatgggaagcctgttcagataacctggaatttgaacctgaagaaaagtgtttatattttgtaggtatctcttccaaatgcacaatgaaggagttctcatcaacagcacaaggcaatacagaagtgatccacacagggacattgcaaagacatgaacgtcatcacattggagatttttccttccaggaaattgagaaagatattcataactttgagtttcagtggcaagaagatgaaagaaatggccatgaagcacccatgacaaaaatcaaaaaattgatgggtagtacagagcaatatgatcacaggcatgctggaaacaagcctattaaatatcagcttggatcaagctttcattcacatctgtctgaactccacatatttcagcccaaagggaaaattaataatcaagtggagaagtctatcaacgatgcttcctcggtttcaacagcccaaagaatttcttgtaggcccaaaacccatatatctaataactatggggataattttctgaattattcattactcacacaaagacaggaagtacgcatgagagaaaaatctttccaatgtattgagagtggcaaagcctttaattatagctcactcttaaggaaacatcagattattcatctaggagagaaacaatataaatgtgatgtatgtgacaaggtctttattcggaagcgataccttgcacgccatcgtagatgtcacactggtgagaaaccttacaagtgtaatgagtgtggcaagtccttcagtcagatgtcatcccttacatatcatcatcgacttcatactggagagaaaccttacaaatgtgaagaatgtgacaaagctttcagacacaattcagcccttcaaagacataggagaattcatactggagagaaaccacataagtgtaatgagtgtggcaagacctttagtcagaagtcataccttgcatgccatcgtagcattcatactggaaagaaaccttacgaatgtgaagaatgtgacaaagctttcagtttcaaatcaaaccttgaaagtcataggataactcatactggagagaaaccatacaagtgtaatgattgtggcaagaccttcagtcatatgtcaacccttacatgccatcgtagacttcatactggagagaaaccttacaagtgtgaagaatgtgatgaagctttccgtttcaaatcaagtcttgaaagacataggagaattcataatggagagaaactgtacaaatgtaatgagtgtggcaagaccttcagtcaggagttatcccttacctgccattgtagacttcatagtggagagaaaccttgcaagtgtggagaatgtgacaaggcttacagtttcaaataa

SEQ ID NO: 120563 - DNA, 249 bp, Homo sapiens
atggggaagactgggcagagcaggttgtcaaggaggacttaccaaggtcagatcaaactctgggaggctaaagtggaagaggttgacagatcttgtgattcagatgaagattatgaagccagtggacgaagtctgttatccacacattatactatcgttatccatcccaaagaccaaggtccaacttacctcctaattggatccaagcatgaaaaggtattcaaagacttattggttgatttagaatga

SEQ ID NO: 120564 - DNA, 249 bp, Homo sapiens; identical to SEQ ID NO: 120563

SEQ ID NO: 120565 - DNA, 279 bp, Homo sapiens; identical to SEQ ID NO: 117663

SEQ ID NO: 120566 - DNA, 363 bp, Homo sapiens
ggaaaagaagaaagtccagcacaattctacgagagactgtgtgaggcctatcacatgtatactccctttgatcccgatagccctgaaaatcaacgcatgattaacatggctttagttagtcaaagcgcagaagacattagaagaaaactgcagaaacaggctgggtttgcagggatgaacacatcacaattattagaaatagctaaccaggtgtttgtaaacagggatgcagtaagccataccggtgctgaacattcggtagtaaccggcccagtcgcccccttatccaaaaagactattgacatcatcggagccatgggagtttcagcaaaacaagctttctgcttgccccggacttgtact

SEQ ID NO: 120567 - DNA, 245 bp, Homo sapiens; identical to SEQ ID NO: 119932

SEQ ID NO: 120568 - DNA, 429 bp, Homo sapiens
gttgatgaccttctgctgggacaccccacggcagtcgggtgtgccacgggaacggatgccccacaccggcacctggaggactgtgggtataaggtgtccaaaaaaaaagctcagatctgccaacagcagcatgatgcgaggcaaggtccagccgttccgcccggcatacaagcttatggagcagccccctttgaagatctccaggtagacttcagagagatgccaaagtgtggaggtaacaagtatgtactagttcttgggcgtacctactctgggtgggtggaggcctatccaacacgaactgagaaaactcgtgaagtaacccctgtccttcttcgagatctgattcgtagatttcgaccgcccttatggatcggctcagacaacgggcctgcatttttggctgccttggtacagaagacggcaaag

SEQ ID NO: 120569 - DNA, 895 bp, Homo sapiens
aagggatttaatggagactatggggttactatgacaccagggaaatgtagaacttattttgaaatagattggtcaaaattagaagtgggttggccatcagaaggaaacctggagaggtcccttgtttctaaggtatggcacaaggtaactggtaagtcaggacactcagaccagtttccatacatagccacttggttacagctggtgctagaccccccacagtggctaagagggcaggcagcagcagtgctagtagcaaagggacagattgccaaggaaggatcctactccacccgccgagggaaatcaactcctgaagttctgtttgacccaacatcagaagatcccttgcaggagatggaaccagtgatcccagtggtgccctccccttaccagggaaagatgctccccactcttgagcccacagtccttgtgcctccacaagacaaacatatccctaggccacccggagtagacaagagaggaggtgaagcctcgagagaaacccctacattggcagctcgtttaagacccaaaactgggatacaaatgcccctgagagagcagtggtatactgggatagatgaggatggtcacatggtggagagaggacatcagcaagcttcaaccttggtgggcttggggaattcctgcactgacttagaggctcaaaaagcagcatctgacctcttccaggcctcaatcacagcccccctgttccctcaagcacctggtcttgtacctacttattctaaagaagaaaaagactttctccaggcagagggaggacaggtgataaaggaaggatgggttcggttaccagatgggagagtagctgtgccacagatgctaggagctgcagttgtactggctgttcatgaaaccacccatctag

SEQ ID NO: 120570 - DNA, 4953 bp, Homo sapiens
catggcctgtgctgtggtttcagagaagcacaaggcaggaagcaagaggcatttagcacaggctcatggtgagatgctgtcaggtatcacctacattaagtttgtcaaagtccctggggaactggttactgcaaagatggctgaaataagagagcagtgtgtggcaggcccccgtggaggatcaacgcagtggctgaacaccgggaaggaactggcacttggagtctggacatttgaaacttgggagagaggctcaccacttttgagtccacggggcttgcacctccacaagacaaacatccctaggccacccagagtaggcaagagaggaggtgaagcctcgggagaaacccctcccttggcagctggtttaagacccaaaacggggatacaaatgcccctgagagagcagtggtatactggaatagatgaggatgggcacatggtggagaggcgtgtttttgtgtaccagcccttcttctctgccgacctcctcaactggaaaaacaataccccatcctatactgaaaagccgcaagctctaattgatttgctccaaactattatccagacccataaccccacttgggctgattgccaccagttgctcatgttcctctttaacacagatgaaaggcggagagtgctccaagcagcaactaagtggctagaggaacatgcaccggctgattaccaaaacccccaagagtatgtaaggacccagttaccgggaaccgacccccagtgggacccaaatgaaagagaggatatgcaaaggctaaaccgatacagggaagctctcttggaaggattaaagaggggagcccagaaggccacaaacgtggccattcagggaaaagaagaaagtccagcacaattctacgagaggctgtgtgaggcctattgtatgtatactccctttgatcccaatagtcctgaaaatcagcgcatgattaacatggctttagttagtcaaagtgcagaagacattagaagaaaactgcagaaacaggctgggtttgcagggatgaacacatcacagttattagaaatagctaaccaggtgtttgtaaacagggatgcagtaagccctaaggaaaaccgcagagagaatgaacatcaggtccggcgaaatgccgacctgttagctgcagcaatcacaggggtccccccaaagaggcaagggaaggggggccccgggaaagaaattcagcctggttgtcagagcttgcagcgtaatcagtgtgcttattgtaaagaaataggacattggaagaacaaatgccctcagctaaaaggaaaacaaggtgactcggagcaggaggatccagacaaggaggaaggggccctgctcaacctggcagaaaggacccccaaagagcctatggtcaggatgacagttgggggtaaagacattgattttcttgtagataccggtgctgaacattcggtagtaaccaccccggtcagccccttatccaaaaagactattgacataattggagccacaggagtttcagcaaaacaagctttctgcttgccccggacttgtactgtaggaggacataaagtgattcatcagtttttgtacatgcctgattgtcccttgcccttgttgggaagggacttgcttagcaaactgagagccactatctattttacagagcatggctctttgctgctaaagttacccggaacgggagtcattatgacccttatggtaccccgagaggaggaatggaaacttttcttaactgagtcgggccaagagataagaccagctctggctaagtggtggccaagagtgtgggcagaagacaaccctccagggttggcagtcaaccaagcccccgtacttatagaagttaagcctagggcccagccggttaggcaaaaacagtacccggtccccagagaagctcttcaaggtatccaggtccatctcaagtgcctaagaacctttggaattatagttccttgtcagtctccatggaacactcccctcctgcctgttcccaagcctgggaccaaggactacaggccggtacaggatttgcgcttggttaatcaggctacagtgactttacacccaacagtacctaactggtacacattgctggggttgctgccagctgaggacagctggttcacctgcttggacctgaaagatgctttctttagcatcagattagcccctgagagccagaagctgtttgcctttcagtgggaagatccggagtcaggtgtcactactcagtacacttggatccggcttcccaaagggttcaagaactcccccaccatcttcggggaggcattggctcaagacctccagaagtttcccaccagagacctaggctgcatgttgctccagtacgttgatgacctttttctgggacaccctacggcagtcaggtgcgccaagggaacagatgctctactccggcacctggaggactgtgggtataaggtgttcaagaaaaaagttcagatctgccgacagcaggtacgttacttgggatttactatccggcagggggagtgcagcctgggatcaaaaagaaagcaagtcatttgtaatctaccggagcctaagaccagaaggcagagccctgtcaagcatgactgtgtagaagtgttggactcagtttactctagcagacctgacctccgggaccagccttgggcatcagtagactgggtactatacgtggatgggagcagcttcatcaacccacaaggagagagatgtgcagggtatgcggtggtaactctggacactgttgttgaagcccgatcgttgccccagggcacttcagctcagaaaactgaactcattgctttaatttgggccttagaactcagtgaagcacctgatcttgtacctacttattctaaagaagaaaatgactttctccaggcagagggaggacaagtgatggaggaaggattgattcggttaccagatgggagagtagctgtgccacagctgctaggagctgcagttgtactggctgtccatgaaaccacccatctaggtcaggaatcacttgaaaagttgttaggctggtatttctacatctcgcatttgtcagcccttgccaaaacggtgacccagcggtgtgttacctgccgacagcataatgcgaggcaaggtctagctgttccacctggcatacaagcttatggagaagccccctttgaagatctggatccaggtggacttcacagagatgccaaagtgtggagatttggactgcctttatggatcggctcagataacgggccggcatttgtggctgacttggtacagaagatggcaaaggtattggggatcacatggaaactgcatgctgcctaccggcctcagagttccggaaaggtggagcagatgaatcggactatcaaaaatagtttagggaagaacaaaaaggacccagtttatcttcagaagggggaagccaacccctcctgtgctgccggtcactgtaacccactagaactaataattaccaatcccctagatccccgttggaaaaacggagaacgtgtaaccctggggattgatgggacagggttaaacccccaagttgccattttaattagaggggaggtccccaagcgctctcccaaaccagtatttcaaaccttttatgaggagctgaatctgccagcaccagaacttccaaaaaagacaaaaaatttgtttctccaattagcagaaaatgtagctcattcccttaatgttacttcttgttatgtatgcgggggaaccactatcggagaccgatggccttgggaagcccgagagttggtgcctactgatccagctcctgacataattccagttcagaaggcccaagctagcaacttctgggtcttaaaaacctcaattattggacaatactgtatagctagagaagggaaagactttatcatccctgtaggaaagcttaattgtataggtcagaagttgtataacagcacaacaaagacaattacttgttggggcctaaaccacactgaaaagaagccatttagtaaattttctaagttaaaaactgcttgggctcatccagaatctcatcaggactggatggctcccgctggactatactggatatgtgggcacagagcctatattcggttacctgataaatgggcaggcagttgtgttattggcactattaagctgtgctttttcttattacccataaaaacgggtgagctcctaggtttccccatctatgcctcccaagaaaagagaggcatagttataggaaactggaaagataatgagtggccccctgaaaggatcatacagtattatgggcctgccacatgggcacaagacggctcatggggataccgaacccccatctacatgctcaatcggatcatacggttgcaggccatcttaaaaataattactaatgaaactggcagagctttgactgttttggcttggcaagaaacccaaatgaggaatgctatctatcagaatagactggccttggactacttgctagcagctgaaggaggagtttgtggaaactttaacttaaccaattgctgcctacaaatagatgatcaaggacaggtggttgaaaacatagtcagggacatgacaaaggtggcacatgtgcctgtacagattaaactgtacacgagtttaatcctgagtctttatttggaaaatggtttccagctatgggaggatttaaaaccctcatgaagtacatctaactgtcctaagaataaagataaggatgaagaccaatctgaactgcttactgctgacagagggggctgttttggggaaatggcagtcagaactccctcagaggcctatctaaaggttcccagcagaagaagccatcgtccaaagctccggttgaatgactgtttggagtttgatggcctgaaggcaagaacagacaaactgggctatta

SEQ ID NO: 120571 - DNA, 459 bp, Homo sapiens; identical to SEQ ID NO: 117661

SEQ ID NO: 120572 - DNA, 801 bp, Homo sapiens; identical to SEQ ID NO: 119933

SEQ ID NO: 120573 - DNA, 1761 bp, Homo sapiens; identical to SEQ ID NO: 117672

SEQ ID NO: 120574 - DNA, 1342 bp, Homo sapiens
tcagaggatccagaactgcagccggtcctcgctttgctgtccctgtccctgtccatgtatatggtcacggtgctgaggaacctgctcagcatcctggctgtcagctctgactccccgctccacacccccatgtgcttcttcctctccaaactgtgctgagctgacatcggtttcaccttggccatggttcccaagatgattgtgaacatgcagtcgcatagcagagtcatctcttatgagggctgcctgacacggatgtctttctttgtcctttttgcatgtatggaagacatgctcctgactgtgatggcctatgactgctttgtagccatctgtcgccctctgcactacccagtcatcgtgaatcctcacctctgtgtcttcttcgtcttggtgtcctttttccttagcccgttggattcccagcattttttcccaccagttacaggcatagggtttttcctcagtaggcttcttgccctgtagcataaggtctgatttgctaatgaagggtttctcacattcaacacattcatagggtttctctcctgtgtgtgtctgctgatgtttagtgaagtcagactttctacagcaagttggctgtcctacctgagttatcatgtggtctgaaagtttgtccctcacacaggattccagaacactcctactgtggtctgaatgtttgtccctcacacaggattccagaatactgttgctgggttctgagtatttgttcctcacataggattccagaaaactgctatgagggtccgaatgtttgcccttcaaatagtattccagaacactgctgctggtgtctgaatgtttatttctcacaaaggattccagagcactgctaggagtgtctgaatgcttgtccctcacataggattccagaactctcctgctgtggtctgaatgtttgtaccccatgtagtactcaagaacactgctgctggggtctgaatgtttgtccctcccataggattccagagcactgctaggagcatctgaatgcttgtccctcacataggattccagaactctcctgctgtggtctgaatgtttgtaccccatgtagtactcaagaacactgctgctggggtctgaatgtttgtccctcacataggattccagaacactgctgctctgtgtcttcttcgtcttggtgtcctttttccttagcccgttggattcccagctggcagttgtttgctgatttgatggaacaggcattggcatgtacctgacttcagctgtgtcaccaccccccaggaatggtgtggtggcgtcagtgatgtatgctgtggtcacccccatgctgaaccttttcatctgcagc

SEQ ID NO: 120575 - DNA, 2379 bp, Homo sapiens; identical to SEQ ID NO: 117674

SEQ ID NO: 120576 - DNA, 554 bp, Homo sapiens
gcacctgatcttgtacctacttattctaaagaagaaaatgactttctccaggcagagggaggacaagtgatggaggaaggattgattcggttaccagatgggagagtagctgtgccacagctgctaggagctgcagttgtactggctgtccatgaaaccacccatctaggtcaggaatcacttgaaaagttgttaggctggtatttctacatctcgcatttgtcagcccttgccaaaacggtgacccagcggtgtgttacctgccgacagcataatgcgaggcaaggtctagctgttccacctggcatacaagcttatggagaagccccctttgaagatctggatccaggtggacttcacagagatgccaaagtgtggagatttggactgcctttatggatcggctcagataacgggccggcatttgtggctgacttggtacagaagatggcaaaggtattggggatcacatggaaactgcatgctgcctaccggcctcagagttccggaaaggtggagcagatgaatcggactatcaaaaatagtttagggaa

SEQ ID NO: 120577 - DNA, 620 bp, Homo sapiens
tgataactcaggtaggacagccaacttgctgtagaaagtctgacttcactaaacatcagcagacacacacaggagagaaaccctatgaatgtgttgaatgtgagaaacccttcattagcaaatcagaccttatgctacagggcaagaagcctactgaggaaaaaccctatgcctgtaactggtgggaaaaaatgctgggaatccaacgggctaaggaaaaaggacaccaagacgaagaagacacagaggtgaggattcacgatgactgggtagtgcagagggcgacagatggctacaaagcagtcataggccatcacagtcaggagcatgtcttccatacatgcaaaaaggacaaagaaagacatccgtgtcaggcagccctcataagagatgactctgctatgcgactgcatgttcacaatcatcttgggaaccatggccaaggtgaaaccgatgtcagctcagcacagtttggagaggaagaagcacatgggggtgtggagcggggagtcagagctgacagccaggatgctgagcaggttcctcagcaccgtgaccatatacatggacagggacagggacagcaaagcgaggaccggctgcagttctggatcctctga

SEQ ID NO: 120578 - DNA, 1086 bp, Homo sapiens
tcacggaccaagaactaccagccggtacaggatttgcgcttgcttcatcaagctaaactgactttccatccaacagtacctaacccgtccacattgttggggttcccgccagctgaggacagctggttcacctgcttggacctgaaagatgctttctttcctatcagattagcccctgagaggcagaagctgtttgcctttcagtgggaagatccggagtcaggatggcccccctgttggagggccttggcagcaactgccctgctagtacaagaagcaaataagctgactcttgggcaaaaactgaacattaaggcctcccgtgctgtcgtgactttaatgaatactaaaggacatcattggctaacgaatgccacactcaccgactaccagactttgctctgtgaaaatccccgtataaccattgaagtttgtaacaccctccaccccgccaccttgctcccggtatcaaagagccctgtcaagcctggttgtgtagaagtgttggactcaattgactctagcagacctgacctctgggaccagccttgggcatcagtagactgggaactatacttggatgggagcagcttcttcaacccccaaggagaggtggagggtatgcaggggggacaccagcgagcttccaccttgctgggtttgcggaattcccgcgctgactcagaggctcgaaaagcagcatcttcccccttctgggcatcagggctccctcaagcacctgatctgggacctacttcttctaacgaagaaaaggactttctccagcatgatatgaggcaaggtctagctgttctgcccggcataagagcttctggagcagccccctttgaaggtctccaagtggacttcacagagatgtcaaaatgtggaggtaacaagtatgtagtagttcttgggcatacctactctgggtgggaggaggcctatcaaacacgaacagagaaatctcgtgaagtaacccctgtgcttcttcgtgatctgattcctagatttcgacggcctttagggatcggctcagacaacgggcctgcgtttttggttgccttggtacagaagacggcaaag

SEQ ID NO: 120579 - DNA, 3118 bp, Homo sapiens
gggagagaggctcaccacttttgagtccacggggcttgcacctccacaagacaaacatccctaggccacccagagtaggcaagagaggaggtgaagcctcgggagaaacccctcccttggcagctggtttaagacccaaaacggggatacaaatgcccctgagagagcagtggtatactggaatagatgaggatgggcacatggtggagaggcgtgtttttgtgtaccagcccttcttctctgccgacctcctcaactggaaaaacaataccccatcctatactgaaaagccgcaagctctaattgatttgctccaaactattatccagacccataaccccacttgggctgattgccaccagttgctcatgttcctctttaacacagatgaaaggcggagagtgctccaagcagcaactaagtggctagaggaacatgcaccggctgattaccaaaacccccaagagtatgtaaggacccagttaccgggaaccgacccccagtgggacccaaatgaaagagaggatatgcaaaggctaaaccgatacagggaagctctcttggaaggattaaagaggggagcccagaaggccacaaacgtggccattcagggaaaagaagaaagtccagcacaattctacgagaggctgtgtgaggcctattgtatgtatactccctttgatcccaatagtcctgaaaatcagcgcatgattaacatggctttagttagtcaaagtgcagaagacattagaagaaaactgcagaaacaggctgggtttgcagggatgaacacatcacagttattagaaatagctaaccaggtgtttgtaaacagggatgcagtaagccctaaggaaaaccgcagagagaatgaacatcaggtccggcgaaatgccgacctgttagctgcagcaatcacaggggtccccccaaagaggcaagggaaggggggccccgggaaagaaattcagcctggttgtcagagcttgcagcgtaatcagtgtgcttattgtaaagaaataggacattggaagaacaaatgccctcagctaaaaggaaaacaaggtgactcggagcaggaggatccagacaaggaggaaggggccctgctcaacctggcagaaaggacccccaaagagcctatggtcaggatgacagttgggggtaaagacattgattttcttgtagataccggtgctgaacattcggtagtaaccaccccggtcagccccttatccaaaaagactattgacataattggagccacaggagtttcagcaaaacaagctttctgcttgccccggacttgtactgtaggaggacataaagtgattcatcagtttttgtacatgcctgattgtcccttgcccttgttgggaagggacttgcttagcaaactgagagccactatctattttacagagcatggctctttgctgctaaagttacccggaacgggagtcattatgacccttatggtaccccgagaggaggaatggaaacttttcttaactgagtcgggccaagagataagaccagctctggctaagtggtggccaagagtgtgggcagaagacaaccctccagggttggcagtcaaccaagcccccgtacttatagaagttaagcctagggcccagccggttaggcaaaaacagtacccggtccccagagaagctcttcaaggtatccaggtccatctcaagtgcctaagaacctttggaattatagttccttgtcagtctccatggaacactcccctcctgcctgttcccaagcctgggaccaaggactacaggccggtacaggatttgcgcttggttaatcaggctacagtgactttacacccaacagtacctaactggtacacattgctggggttgctgccagctgaggacagctggttcacctgcttggacctgaaagatgctttctttagcatcagattagcccctgagagccagaagctgtttgcctttcagtgggaagatccggagtcaggtgtcactactcagtacacttggatccggcttcccaaagggttcaagaactcccccaccatcttcggggaggcattggctcaagacctccagaagtttcccaccagagacctaggctgcatgttgctccagtacgttgatgacctttttctgggacaccctacggcagtcaggtgcgccaagggaacagatgctctactccggcacctggaggactgtgggtataaggtgttcaagaaaaaagttcagatctgccgacagcaggtacgttacttgggatttactatccggcagggggagtgcagcctgggatcaaaaagaaagcaagtcatttgtaatctaccggagcctaagaccagaaggcagagccctgtcaagcatgactgtgtagaagtgttggactcagtttactctagcagacctgacctccgggaccagccttgggcatcagtagactgggtactatacgtggatgggagcagcttcatcaacccacaaggagagagatgtgcagggtatgcggtggtaactctggacactgttgttgaagcccgatcgttgccccagggcacttcagctcagaaaactgaactcattgctttaatttgggccttagaactcagtgaaggtgactcttaaatttgagaaacattggaatagtggattaattcggagtagcggtttttgtgatccacagatgaagcacagagaaaaggatagagatggagacacaaaaacattgatctcccaagctgtagagactgggtctcctttgggaatatctacaactaccaactgcacaacaaagtagtaagtgcagcttcgaatttgtcttgtggtaggccacgatcctgtgcccacaaggacagtgcacaggtcatccgagcacacggctgagcccggtaggcaaaggaaggaaggtccaggtcacagggcagcgaggcccagcacaatgaaggagaatggaaacacaccacacctcaattagaatgggatccaattcttttacaaaaatttttttctgattacaaaatttaagggaaaaagggaaagttcttccttcctacagactgacatgtaataaatggagatggaacacacaaaaaaaaaaaaaaaaa

SEQ ID NO: 120580 - DNA, 3735 bp, Homo sapiens
gaaatgactaacaaggtcacgggggagtgtactccccctgcaatactggcagtaatctcgtcctccccaaacctggatgtgagcgacaagatcacagagggggtgtacacaccctgcgacattggaagtaatatgatcctctccccacctggatattgggaaagatatcacagcgcggaggatccagaactgcagcccatcctcgctgggctgtccctgtccatgtatctggtcacggtgctgaggaacctcctcatcagcctggctgtcagctctgactcccacctccacaccccaatgtgcttcttcctctccaacctgtgctgggctgacatcggtttcacctcggccacggttcccaagatgattgtggacatgcggtcgcatagcggagtcatctcttatgcggactgcctgacacggatgtctttcttggtcctttttgcatgtgtagaagacatgctcctgactgtgatggcctatgactgttttgtagccatctgtcgccctctgcactacccagtcatcgtgaatcctcacctctgtgtcttcttagtttcggtgtcctttttccttagcctgttggattcccagctgcacaggatccttttgtcttactgtaaaattgttccctccattctaaggatttcaacatcagatgggaaatataaagccttctccacctgtggctctcacctggcacttgtttgcttattttatggagcaggcattggcgtgtacctgacttcagctgtgtcaccaccccccaggaatggtgtggtggtgtcagtgatgtacactgtggtcacccccatgctgaaccctttcatctacagcctgagaaacagggacattcaaagcaccctgcggaggctgctcagcagaacagtcgaatctcatgatctgttccatcctttttcttgtgtggggaagcgcaaatccaaccaagaatgtgataccacacatttggatggatgtgataaacaaacaagcattggtgaaactagagggaaggagtacaccctgtgtgacagtaggagtaacctcacccaaggatataaggaacaaatacagaggatgcacacgtgttgtgacattagcagtaacatccatttaggatattacgaatattaccacaatgtgaataccccctgtgatattaggagtaacatccccctacaatattgggaaccatatcacacggtgtacaccccctgtgacattagagggaggcccatgaaccgaggaagcaggtggccatctgtggcagctgtcacagcccagcataaagctaagcacttctacttattatatcattcaaaagctgcctcagcctgcaagggcagtaattccccaaagcaggctccagggcccaaggaaagccctcggcagggaaacattgagtgtcaggcacagggaatcaggccatcgggtcacctggacaccgtaaggctccaagagctgccccctctccaccaggaggaactgacttaccaaggtgacagtctagagactgcttgcccaattaaagccatgatccccaatctcacactccaactacgggaggacattcaaaccaaaggcaaagaagttgaaaactttgaaaaaaatttagaagaatgtataactagaataaccaatacggagaagtgcttaaaggagctgatggagctgaaaaccaaggctcgagaactacgtaaagaatgcagtagcctcaggagccgatgccatcaactggaagaaagggtatcagcaatggaagatgaaatgaatgaaatgaagtgggaagggaagtttagagaaaaaagaataaaaagaaataagcaaagcctccaagaaatatgggactatgtgaaaagaccaaatctacgtctcattggtgtacctgaaagtgacggggagaatggaactaagttggaaaacactctgcaggatatcgtccagaacttccccaatctagcaaggcagaccaatgttcagattcaggaaatacagagaacgccacaaagatactcctcgagaagagcaactccaagacacataattgtcagattcaccaaagttgaaatgaaggaaaaaatgttaagggcagccagagagaaagaaatacaaactaccatcagagaatactacaaacacctctacgcaaataaactagaaaatctagaggaaatggataaattccttgacacatacactctcccaagactaaaccaggaagaagttgaatctctgaatagaccaataacaggctctgaaattgtggcaataatcaatagcttaccaaccaaaaagagtccaggaccagatggattcacagccgaattctaccagaggtacaaggaggaactggtaccattccttctacaactattccaatcaatagaaaaagagggaatcctccctaactcattttatgaggccagcatcatcctgataccaaaggctggcagagacacaaccaaaaaagagaattttagaccaatatccttgatgaacgttgatgcaaaaatcctcaataaaatattggcaaaacgaatccagcagcacatcaaaaagcttatccaccatgatcaagtgggcttcatccctgggatgcaaggctggttcaatatacgcaaatcaataaatgtaatccagcatataaacagagccaaagacaaaaaccacatgattatctcaatagatgcagaaaaggcctttgacaaaattcaacaacccttcatgctaaaaactctcaataaattagaattggaaaaaactactttaaagttcatatggaaccaaaaaagagcccgcatcgccaagtcaatcctaagccaaaagaacaaagctggaggcatcacactacctgacttcaaactatactacaaggctacagtaaccaaaacagcatgcctggccccacaccacagtccatcaactcctgctccaggtggaaacctcagaaacccacaaagctcggacctgctccaggtcaccaagcagcagggccaggcactggcaatccaacgagaagccccactacatcgcattccagctcctgaagccattccctggtattttcagccccagccggccacacagctcggatctcctcctgtggatccccccagctctgcgatgatggcagaagagcacacagatctcgaggcccagatcgtcaaggatatccactgcaaggagattgacctggtgaaccgagaccccaagaacattaacgaggacatagtcaagaacgcctgccttcttcagaaaaacaaacacccatttgccccccggctcaggctacacaacacccagaggaaccagatgcccaccagccctacaaacacttgttccaggtttgtgctcatcagggacaccctgttgcacaaagaagaaactgacctggtggattttgaagacgtgatcgcagagcctgtgggcacctacagctttgacggcgtgtggaaggtgagctacaccaccttcactgtctccaagtactggtgctaccgtctgttgtccacgctgctgggcgtcccactggccctgctctggggcttcctgttcgcctgcatctccttctgccacatctgggcggtggtgccatgcattaagagctacctgatcgagatccagtgcatcagccacatctactcactctgcatccgcaccttctgcaacccactcttcgcggccctgggccaggtctgcagcagcatcaaggtggtgctgcggaaggaggtctaa

SEQ ID NO: 120581 - DNA, 1863 bp, Homo sapiens; identical to SEQ ID NO: 117677

SEQ ID NO: 120582 - DNA, 1461 bp, Homo sapiens
atgcggggacacttcacctgcgtcgaccttctcaactggaaaaacaatacaccgccctataccgaaaagccacaagccctaactgatttgctccaagctgttatccagacccacaaccccacctgggctgattggcgccagttgctcatgttcctctttaacagcgaagaaaggcggagagtcctccaagcagcaactaagtggctagaggaacatgcaccagctgattatcaaaacccccaagagtatggaaggacccagttgccaggaaccgacccccagttggacccacatgaaagagaggagatgcaaaggctaaaccgagacagggaagctctcttggaaggattaatgaggggagctcagaaggccacaaatgttaacaagctctctgaggtcattcagggagaagaagaaagtccagcacaattctacgagagattgtgtgaggcctatctccgtcaaagcgcagaagacatgagaagaaaactgcagaaacaggctgggcttgcagggatgaatccatcacaattaccagaaatagctagccaggtgtttgtaaacaaggatacaccacggaccaaggactaccggccggtacaggatttgcgcttgctccatcaagctacactgactttacatccaacagtacctaacccgtccacattattggtgttgccgccagctgaagacagctggttcaccttctggaacctgaaagacgctttctttcctatcagattagcccctgagaggcagaagctgtttgcctttcagtgggaagatccggagtcagagagccctgtcgagcctgattgtgtagaagtgttggattcagttgactctagcagacctgacctccgggaccaagcttgggcatcagtagactgggaactatacgtgtatgggagcagcttcttcaacccccaaggagagagaggttgcagtaaaaacaggggtaccataagcaaccacctctttcctcaacgatgtgatgaaagcaaaagccaagtatcttcatgtatccaacgtaaaaatataaaaagttacccccgtcggctgcagttggagctatggcggcggcagctgtcactgggcctagcccggggtgtggacctggggactccccagaagggcccgagggggaggctcacggagcgtcggcggaaggcacacaggatgttaaagctttacaacggcctctcggaaggggaggcggtgagactcctcgcggggaccgaccccctggaccccactgatctgaacggggcacacttcaacccggaagtttacctagacaagctgcctagagagtgccctctggcccagctgatggacagtgagacggacatggtgcagcagatccgggctctagacagcgacatgcaaaccctggtctatgagaactacgataagttcatccccgccacagaaattgacaaacagcataaaactgtatga

SEQ ID NO: 120583 - DNA, 1605 bp, Homo sapiens
atgcagctgggaatccaacaggctaaggaaaaaggacaccaaaatgaagaagacacagaggttgatgaccttctgctgggacaccccacggcagtcgggtgtgccaagggaacagatgccctacattggcacctggaggactgtgggtgtaaggtgtccaagaagaaagctcagatctgccgacagcaggccttggcagcaactgccctgcgagtacaagaagcaaataagctgactcttgagcaaaacctgaacataaaggcctcccgtgctgtggtgactttaatgaatactaaaggacatcattggctaacgaatgccagactcacccagtaccagacttggctctgtgaaaatccccgtataaccattgaagtttgtaacagcctacaccccgccaccttgctcccggtatcagagagccccgtcgagcctcgttgtgtagaagtgttggacacaattgactctagcagacctgacctccggggccagccttgggcatcagtagactgggaactatacgtggatgggagtagcttcttcaacccccaaggagagagaggtgcagggtgtgcagtgataaccctggacactgttgttgaagccagatcgttgtcccaggccacatcagcccagaaagctgaactcattgctttcattcgggccttagaactcagtgagggggacaccagcgagcttccaccttgctgggtttggggaattcccgcgctgactcagaggctcgaaaagcagcattgcttcggggcagcagtgttccctcaagcacctgatcttggacctacttcttctaaagaagaaaaggactttctccaggtagagggaaggacaagtgatggaggaaggatggattcggttaccggatgggagagtactgtgccacagctgctaggagctgcagttgtactggctgtgcaagaaaccacccatcgacatcaggagtcactggaaaagttgttaggccggtatttctacatctcgcctttgtcagctcttgccaaaacggtgaggcagcggtgtgttacctgccgacagcatgatgcgaggcaaggtccagccgttctgcctggcataggagcttatggagcagccccctttgaaggtctccaggtggacttcacagagatgccaaagtgtggaggtaacaagtatgtactagttcttgtgtgtacctactctgggtgggtggaggcttatccaacgctaactgagaaagctcgtgaagtaacccgtgtgcttcttcgagacctgattcctagatttcgaccgcccttacggatcggctcagacaaggggcctgcgtttttggctgccttgttacagaagacggcaaagatgggcacacgcagtgacacacagctagcacacataggcacagtcctgcgggacatccatgtcagtgtctgttctgatgggccgaatctaagaacaggtttgaacgtcatccttgggggtgtggagtggcagagcactcctgggaatcttgtaagaagacaaggagagacaggacttcatcttcacatctaccactggtggcaggctgtggccatcttccccgtgtacctgggctcgagcctgcacatgaag

SEQ ID NO: 120584 - DNA, 7103 bp, Homo sapiens
  misc_feature (1)...(7103): n = a,t,c or g
gaacaatatcacagaagaggtgtacactccctgcgatattgggattaatatcgtacgcttcttccgtgaatattaggagcaatatcaccgggtggctgtacattgatcgctatgttggcagtcatgtcatactctacccgctgggtattaggatgggtgtcacaggagagatgaaaggcgaaaggcggagagggctccacgcagcaactaagtggctagaggaacatgcaccagctgattatcaaaacccccaagagtatggaaggacccagttaccaggaacccagccccagttggacccacatgaaagagaggatatgcaaaggctaaaccgagacagggaagctctcttggaaggattcaagaggggagctcagaaggccacaaacgttaacaaggtctctgaggtcattcagggaaaagaagaaagtccagcacaattccaccagagactgtgtgaggcctatcgtatgtatactccccttgatcacgatagccctgaaaatcagcgcatgattcacatggctttagtccgtcaaagcgcagaagacatgagaagaaaactgcagaaacaggctgggcttgcagggatgaatccatcacaattactagaaatagctagccaggtgtttgtaaacagggatgcagtaagccctaaggaaaacagcaaagagaatggaggtcaggcccggcgacacgatgacctgtttagccctgtcgagcctgattgtgtagaagtgttggactcaattcactctagcagacctgacctccgggaccagccttggccatcaggagactgggaactatatgtggatgggagcagcttcttcaacccccaaggagagagaggtgcagggtatgcagtgataaccctggacactgttgttgaagccacatcgttgccccaggccacttcaggccagaaagctgaactcattgctttcattggggccttagaactcagtgagggtgagactgtcaacatttacactgattctcgccatggcactgaagagggacagcaaatcttgaagcagccggtgtcagagagactggactttgtgtgcagttttctgcagagaaggaacagcttctacatgggcacttgccaggatgagcctgagcagctggatgactggaaccgcattgcagagctgcagcagcgcaatcgagtgtgccccccacatctgaagacctgctatcccctggagtccaggccttccctgagcctgggcaccatcacagatgaggagatgaaaactggagacccccaagagaccctgcgccgagccagcatgcagccaatccagatagccgagggcactggcatcaccacccggcagcagcgcaaacgggtctccctagagccccaccagggccctggaactcctgagtctaagaaggccaccagctgtttcccacgccccatgactccccgagaccgacatgaagggcgcaaacagagcactactgaggcccagaagaaagcagctccagcttctactaaacaggctgaccggcgccagtcgatggccttcagcatcctcaacacacccaagaagctagggaacagccttctgcggcggggagcctcaaagaaggccctgtccaaggcttcccccaacactcgcagtggaacccgccgttctccgcgcattgccaccaccacagccagcgccgccactgctgccgccattggtgccacccctcgagccaagggcaagctgggccaggacgacgtgacgctggacaacctgttcagggtccacgagcacacaggagaagttggtgctgtgcagggcaggggtcagctgctccagcaccaaggccttgcacagctgcgtacctgtgctcccacgttcccggctggagcggaagggaaggaaaggtatggtttccaggaagttcaccctgttttctacgttgttgtcattgcagaaaatcgaaaacatccctcttccccagaatgcctggtatctgcacagaaggtgctagagggatcagagctggaactggcgaagatgaccatgctgctcttataccactctaccatgagctccaaaagtcccagggactgggaacagtttgaatataaaattcaggctgagttggctgtcattcttaaatttgtgctggaccatgaggacgggctaaaccttaatgaggacctagagaacttcctacagaaagctcctgtgccttctacctgttctagcacattccctgaagagctctccccacctagccaccaggccaagagggagattcgcttcctagagctacagaaggttgcctcctcttccagtgggaacaactttctctcaggttctccagcttctcccatgggtgatatcctgcagaccccacagttccagatgagacggctgaagaagcagcttgctgatgagagaagtaatagggatgagctggagctggagctagctgagaaccgcaagctcctcaccgagaaggatgcacagatagccatgatgcagcagcgcattgaccgcctagccctgctgaatgagaagcaggcggccagcccactggagcccaaggagcttgaggagctgcgtgacaagaatgagagccttaccatgcggctgcatgaaaccctgaagcagtgccaggacctgaagacagagaagagccagatggatcgcaaaatcaaccagctttcggaggagaatggagacctttcctttaagctgcgggagtttgccagtcatctgcagcagctacaggatgccctcaatgagctgacggaggagcacagcaaggccactcaggagtggctagagaagcaggcccagctggagaaggagctcagcgcagccctgcaggacaaggccagggcaaaaggagatcttggtaacaagatgatgggccccatgtttgctgatgtttatgagggcttgtgtggtaatctgaaatgccttgaagagaagaacgaaatccttcagggaaaactttcacagctggaagaacacttgtcccagctgcaggataacccaccccaggagaagggcgaggtgctgggtgatgtcttgcagctggaaaccttgaagcaagaggcagccactcttgctgcaaacaacacacagctccaagccagggtagagatgctggagactgagcgaggccagcaggaagccaagctgcttgctgagcggggccacttcgaagaagaaaagcagcagctgtctagcctgatcactgacctgcagagctccatctccaacctcagccaggccaaggaagagctggagcaggcctcccaggctcatggggcccggttgactgcccaggtggcctctctgacctctgagctcaccacactcaatgccaccatccagcaacaggatcaagaactggctggcctgaagcagcaggccaaagagaagcaggcccagctagcacagaccctccaacagcaagaacaggcctcccagngcctccgccaccaggtggagcagctaagcagtagcctgaagcagaaggagcagcagttgaaggaggtagcggagaagcaggaggcaactaggcaggaccatgcccagcaactggccactgctgcagaggagcgagaggcctccttaagggagcgggatgcggctctcaagcagctggaggcactggagaaggagaaggctgccaagctggagattctgcagcagcaacttcaggtggctaatgaagcccgggacagtgcccagacctcagtgacacaggcccagcgggagaaggcagagctgagccggaaggtggaggaactccaggcctgtgttgagacagcccgccaggaacagcatgaggcccaggcccaggttgcagagctagagttgcagctgcggtctgagcagcaaaaagcaactgagaaagaaagggtggcccaggagaaggaccagctccaggagcagctccaggccctcaaagagtccttgaaggtcaccaagggcagccttgaagaggagaagcgcagggctgcagatgccctggaagagcagcagcgttgtatctctgagctgaaggcagagacccgaagcctggtggagcagcataagcgggaacgaaaggagctggaagaagagagggctgggcgcaaggggctggaggctcgattacagcagcttggggaggcccatcaggctgagactgaagtcctgcggcgggagctggcagaggccatggctgcccagcacacagctgagagtgagtgtgagcagctcgtcaaagaagtagctgcctggcgtgagcggtatgaggatagccagcaagaggaggcacagtatggcgccatgttccaggaacagctgatgactttgaaggaggaatgtgagaaggcccgccaggagctgcaggaggcaaaggagaaggtggcaggcatagaatcccacagcgagctccagataagccggcagcagaacgaactagctgagctccatgccaacctggccagagcactccagcaggtccaagagaaggaagtcagggcccagaagcttgcagatgacctctccactctgcaggaaaagatggctgccaccagcaaagaggtggcccgcttggagaccttggtgcgcaaggcaggtgagcagcaggaaacagcctcccgggagttagtcaaggagcctgcgagggcaggagacagacagcccgagtggctggaagagcaacagggacgccagttctgcagcacacaggcagcgctgcaggctatggagcgggaggcagagcagatgggcaatgagctggaacggctgcgggccgcgctgatggagagccaggggcagcagcaggaggagcgtgggcagcaggaaagggaggtggcgcggctgacccaggagcggggccgtgcccaggctgaccttgccctggagaaggcggccagagcagagcttgagatgcggctgcagaacgccctcaacgagcagcgtgtggagttcgctaccctgcaagaggcactggctcatgccctgacggaaaaggaaggcaaggaccaggagttggccaagcttcgtggtctggaggcagcccagataaaagagctggaggaacttcggcaaaccgtgaagcaactgaaggaacagctggctaagaaagaaaaggagcacgcatctggctcaggagcccaatctgaggctgctggcaggacagagccaacaggccccaagctggaggcactgcgggcagaggtgagcaagctggaacagcaatgccagaagcagcaggagcaggctgacagcctggaacgcagcctcgaggctgagcgggcctcccgggctgagcgggacagtgctctggagactctgcagggccagttagaggagaaggcccaggagctagggcacagtcagagtgccttagcctcggcccaacgggagttggctgccttccgcaccaaggtacaagaccacagcaaggctgaagatgagtggaaggcccaggtggcccggggccggcaagaggctgagaggaaaaatagcctcatcagcagcttggaggaggaggtgtccatcctgaatcgccaggtcctggagaaggagggggagagcaaggagttgaagcggctggtgatggccgagtcagagaagagccagaagctggaggagaggctgcgcctgctgcaggcagagacagccagcaacagtgccagagctgcagaacgcagctctgctctgcgggaggagctcgagcacaccagcacacaggccctggtgagtgagctgctgccagctaagcacctctgccagcagctgcaggccgagcaggccgctgccgagaaacgccaccgtgaggagctggagcagagcaagcaggccgctgggggactgcgggcagagctgctgcgggcccagcgggagcttggggagctgattcctctgcggcagaaggtggcagagcaggagcgaacagctcagcagctgcgggcagagaaggccagctatgcagagcagctgagcatgctgaagaaggcgcatggcctgctggcagaggagaaccgggggctgggtgagcgggccaaccttggccggcagtttctggaagtggagttggaccaggcccgggagaagtatgtccaagagttggcagccgtacgtgctgatgctgagacccgtctggctgaggtgcagcgagaagcacagagcactgcccgggagctggaggtgatgactgccaagtatgagggtgccaaggtcaaggtcctggaggagaggcagcggttccaggaagagaggcagaaactcactgcccaggtggagcagctagaggtatttcagagagagcaaactaagcaggtggaagaactgagtaagaaactggctgactctgaccaagccagcaaggtgcagcagcagaagctgaaggtggggcagctgggggaatgggtctggcctctggacaagggagggaagctattctctaagctctggggccgtggggggttggtttataagtggttcctgctaatctataaaatcagctatgccactggcattgttggctacatggctgtcatgtttaccctctttggtcttaacttattattcaagatcaaaccagaagatgccatggactttggcatctcccttctcttctatggcctctactatggagttctggaacgggactttgcagaaatgtgtgcagactacatggcatctaccatagggttctacagcgagtcgggcatgcctaccaaacatctttcagacagtgtgtgtgctgtgtgtgggcagcagatctttgtggacgtcagtgaagaggggatcattgagaacaccggtgctcagcttccacgagttctgcatccgtggctggtgcatcgtgggaaagaagcaaacgtgtccctactgcaaagagaaggtagacctcaagaggatgttcagcaatccgtatcctttattggggtcgttgttgggagtgggctgtgggaagaaagtactggccagtgtgacctgcatttgggtcctcctggggccctcacttctgcccccaaccagaacatgtcaaaccatgaacaacaaaaagattatgaaggtgatgatgaggataaagaggatgatgacagacaccatggcatcatgaacccttactga

SEQ ID NO: 120585 - DNA, 2524 bp, Homo sapiens
atattaggaaaaaatgtccctggggatgtgaacagccctgcgatattgagagtagtatcatcctctccccttgcatactgggaaaaatatcacagattatatttggatcaatatcaccggctgggtgtacacctactgcgatattgaacgtaatatcatgctctctccctccctggacattagaagcaataacacagctcgtttacgacccaaaacggggacacaaatgcccctgagagagcagcggtatactgggatagataaggatggtcacttggtggagaggcgtgcttttggctaccagcccatcacctgcgtcaaccttctcaactggaaaaacaatacacagaactataccgaaaagccacaagccctaattgattttctccaagctgttatccagacccacaaccccaccttggctgattggcaccagttgctcatgttcctctttaacagcgaagaaaggcggagagtcctccaagcagtaactaagtggctagaagaacatgcaccagctgattatcaaaacccccaagagtatggaaggacccagttgccaggaaccgacccccagttggacccacatgaaagagaggagttgcaaaggctaaaccgagacagggaagctctcttggaaggattcaagaggggagctcagaaggccacaaacattaacaagctctctgaggtcattcagggaaaagaagaaagtccagcacaattcgacgagagactgtgtgaggcctatcgtatgtatactccctttgatcccgatagccctgaaaatcagcgcatgattcacatggctttagtccgtcaaagcgcagaagacatgagaagaaaactgcagaaacaggctgggcttgcagggatgaatccatcacaattactagaaatagctagccagatgtttgtaaacagggatgcagtaagccctaaggaaaacggcaaagagaatggagatggggtttctaaaggatggcccccctgtttgagggccttggcagcaactgccctgctagtacaagaagcaaataagctgactcttgggcaaaacctgaacataaaggcctcccgtgctgtggtgactttaatgaatactaaaggacatcattggctaacggatgccagactcatcaagtaccaaactttgctctgtgagaatccccgtataaccattgaagtttgtaacaccctacaccccgcctccttgctcccggtatcagagagcactgtcgagcctgattgtgtagaagtgttggattcagttgactctagcagacctgacctccgggaccaagcttgggcatcaggagactggaaactatacgtgtatgggagcagcttcttcaacccccaaggaaagagagaggtgcaggcccttgccaaaacggtgaggcagcggtgtgttacctgccgacagcatgatgcgaggcaaggtccagccgttccacacggcatacgagcttatggagcagccccctttgaaggtctccaggtggacttcaaagagatgccaaagtgtggaggtaacaagtatgtactatttcttgggcgtacctactctgggtgggtggaggcctatccaacacgaactgagaaagctcgtgaagtaacccctgtgcttcttcgggatctgattcctaaatttcgaccgcccttatggatcggctcaaacaacgggcctgcatttttggctgccttggtacagaaaacggcaaagatattaggaaaaaatgtcactggggatgtgaacagccctgcgatattgagagtagtatcatcctctccccccttgtatattgggaacaacatcacagaggatccagaactgcagccagtcctcgctttgctgtccctgtccctgtccatgtatctggtcacggtgctgaggaacttgctgagcatcctggctgtccgctctgagtccccgctccacacaaccatgtacttcttcctctccatcctgtgctgggctgacatcggtttcacctcagccacagttcccaagatgattgtggacatgcagtggtatagcaaagtcatctctcatgcgggctgcctgacacagatgtctttcttggtcctttttgcatgtatagaaggcatgctcctgactgtgatggcctatgactgctttgtaggcatctgtcgccctctgcactacccagtcatcgtgaatcctcatctctgtgtcttctttgttttggtgtcctttttccttagcctgttggattcccagctgcacagttggattgtgttacaattcaccatcatcaagaatgtggaaatctctaattttgtctgtgacccctctcaacttctcaaacttgcctgttctgacagcgtcatcaatagcatcttcatatattttggtagtactatgtttggttttcttcccatttcagggatccttttgtcttactataaaatcgtcccctccattctaaggatttcatcgtcagatgggaagtataaagccttctccacctatggctctcacctagcagttttttgctga

SEQ ID NO: 120586 - DNA, 3022 bp, Homo sapiens
ggaaggagagtatgctattactcccaatatcgcaggagttgtacacccttttgtgttttttggtccaatatccaggaaaatagaggatgatatttctcccaatgtcgaagtaattctagagcacccctgtgatattctccctaatatccagaaaatattaggaaaaaatgtcactggggatgtgaacagtcctgcgatattgagagtagtatcatcatctccccccttggatattgggaacaacatcacagaggatccagaactgcagccggtcctcgctttgctctccctgtccctgtccatgtatctggtcacggtgctgaggaacctgctcagcatcctggctgtcagctctgactcccacctccacacccccatgtacttcttcctctccaacctgtgctgggctgacatcggttacacctcggccacggttcccaagatgattgtggacacgcagtcgcatggcagagtcatctctcatgctggctgcctgacacagatgtctttcttggtcctttttgcatgtatagaagacatgctcctgactgtgatggcctatgactgctttgtagccatctgttgccctctgcactacccagtcatcgtgaatcctcacctctgtgtcttcttcgttttggtgtcctttttccttagcctgttggattcccagtttattcctccggtcacagagggtgttcaccctgtgatatttttcatcatagctttgtgggatgttactcctaaagtcacacggggtgtacacagagtcacacagtgatatgagctgtaatattaggtgagacccataggtggagaaggctttatacttcccacctgatgatgaaaccctcagaatggaggaaacaattttatcgtaagagaaaagtgtccccgagatgggaagaaaaccaaatatggcatcagggaaatacaggattatgttattgttgaaggtgtcacaacatgcaagatgggggagttgagaagggtcacagaagaaattaggaatttccacatccttgaagcaggtcatttgtaaggcaatcaaattgtacagctgggcatctaaaagatcaggagtatgtctgtcttccatgcctccaaaaatggcaaagagagacatctgagtcaggcagcctgcataggagatgactctgctgtgagattggatgtccacagtcatcttggggactgtggtggaggtgaaactgatgtcaggcaaggacaggttggagaggaagaagtacatgggggtgtggaggtgggagtcagggctgatggccaggatgatgagcaggttccccagcgccatgaccaggcacgtggacaggaacagcccagtgaggaccggctgccgttctggatcctctgagctttgaacggcccttcccctctgctgggccatgaccacggagaacaggtccactgtcctccccacacaagaaaaaggatggagcagatcttgagataacagatcatgagattcgactgttctgctgcgcagcctccacagggcactttgaatgtccctatttctcaggctgtagatgaaagggttcagcatgggggtgaccacagcgtacatcactgatgccaccacaccattcctggggggtggtgacaccagctgaagtcaggtacacgccaatgcctgttccataaaataagcaaacaactgccaggtgagagccacaggtggagaaggctttagacttcctatctgatgatgaaattcttagaatggaggggacattgttagcgtaagacaaaaggatccctgaaatgggaagaaaaccaaacataatactatctaaatatatgaatatggttagtgaatgcccctgtcagaacaggcaaggttgagaagttgagatgggtcacagaaaaaaaattatagatttccacattcttgaagaaggtgagttgtgtaacacaatccagctgtgcagctgggaatccaacaggctaaggaaaaaggacaccaaaactaagaagacacagaggtgaggattcatgatgactcggtagtgcagggggtgacagatgggcagatggctacaaagcagtcataggccatcacagtcaggagcatgccttctatacatgcagcaaggagcaggaaagacatctgtgtcaggcagcccgcatgagagatgactctgctatgcgactgcgtgtccacaatcatcttgggaaccatggccgaggtgaaaccgatgtcaggccagcacaggttggagaggaagaagtacatgggggtgtggagggggcagtcagagctgacagccaggatgctgaaaaggttcctcagctccgtgaccagatacatggacagggacagggacagcaaagcgagggccggctgcagttctggatcctctgagagtcccaggaggaggaattctgagacacctgtgagattccgtggctctgtgtgacttggacacccggaggtggagaggatgataatactcccaatatcacaaggggtgtacaccacccctgtttgatatcgttggtaatatgccagcggggcagaggatgatattacagccaatatcgcaggggatgtacacccccttgtgacattcttccttctatccctgactttccatccaacagtacctagcccgtccacattgttggggttgctgccagccgaggacagctggttcacctgcttggacctgagagacgctttctttcctatcagattagccccggagagccagaagctgtttgcctgtgctgggctgacatcggtttcaccttggccacggttcccaagatgattgtggacatgcagtcgcatagcagagtcatctctcatgcgggctgtctgacgcagatgtctttcttcatcctttttgcatgtatagaaggcatgctcctgactgtgatggcctatgactgctttgtagccatctgtcgccctctgcactacccagtcatcgtgaatcctcacctctgtgtcttcttcgttttggtgtcctttttccttagcctgttggattcccag

SEQ ID NO: 120587 - DNA, 3197 bp, Homo sapiens
atggaggaaggatggattcggttaccagatgggagactagctgtgccacagctgctaggagctgcagttgtactggctgtgcaagaaaccacccatcgagatcaggagtcactggaaaagttgttaggctggtatttctacatctcacttctgtcagcccttgccaaaacgatttcgaccgccttacggatcggctcagacaacgggcctgtgtttttggctgccttggtacagaagacagcaaaggtgtccaagacacagagagccacggaatctcacaggtgtctgagaattcctcctcctgggactctcagaggatccagaactgcagccgtcctcgctttgctgtccctgtccctgtccatgtatctggtcacggtgctgaggaacctgctcagcatcctggctgtccgctctgactcccccctccacacccccatatacttcttcctctccaacctgtgctgggctgacatcggtttcacctcggccacagttcccaagatgattgtggacatgcagtcgcatagcagagtcatctctcatgcaggctgcctgacgcagatgtctttcttggtcctttttgcatgtatagaaggcatgctcctgactgtgatggcctatgactgctttgtagccatctgtcaccctctgcactacccagtcatcgtgaatcctcacctctgtgtcttcttcgttttggtgtcctttttccttagcctgttggattcccagctgcacagttggattgtgttacaattcaccatcatcaagaatgtggaaatctctaattttgtctgtgacccctctcaacttctcaaatttgcctgttctgacagcatcatcaatagcatattcatatatttccataaggatccagaacggccagctggtccttgctggactgttcctgtccatagtgactggtcatggtgatggggaacctgctcatcatctctggccgtcagccctgactcccacctccacacccacatgtacttcttcctcatccaacctgtccttgcctgacatcggtttcacctccaccacggtccccaagatgagcgtggacatccagtctcacagcagagtcatctcctatgcaggctgcctgactcaaatgtctctctttgccatttttggaggcatggaaaaaagacatgctcctgagatattaagatccaaatggcaggggggcgaggcgccccccgcgattcggggagtaataccacccgcctctccccccgcatatattaagatccaaatggcagggaggcgaggcgccccccgcgatgcggggaattatattcggatcaatatcaccggctgtgtgtacacctactgcgatattgaacgtagtatcatgctctctccctccctggagattaggagcaatatcacagctcgtttacgacccaaaacggggacacaaatgcccctgagagtgcagcgttatactgggatagacgaggatggtcacgtggtggagaggcgtgtttttggtgaagaaaggcggagagtcctccaagcaggaactaagtggctagaggaacatgcactagctgattatcaaaacccccaagaatatggaaggacccagttgccaggaaccgacccccagttggacccacatgaaagagaggagatgcaaaggctaaaccgagacagggaagctctcttggaaggattaatgaggggagctcagaaggccacaaacgttaacaagctctctgaggtcattcagggaaaagaagaaagtccagcacaattctacgagagactgtgtgaggcctatcgtatgtatactccctttgatcccgatagccctgaaaatcagcacatgattcacatggctttagtccgtcaaagcgcagaagacatgagaagaaaactgcagaaacaggctgggcttgcagggatgaatccatcacaattactagaaatagctagccaggtgttcataaacagggatgcagtaagccctaaggaaaatggcaaagagaatggaggatggcccccctgtttgagggccttggcagcaactgccctgctagtacaagaagcaaataagctgactcttgggcaaaacctgaacataaaggcctcccgtgctgtggtgactttaatgaatactaaaggacatcattggctaacggatgccagactcaccaagtaccaaactttgctctgtgaaaatccccgtataaccactgaagtttgtaacaccctacaccctgccaccttgctcccggtatcagagagccctgtcgagcctgattgtgtagaagtgttggactcagttgactctagcagacctgacctccgggaccaggcttgggcatcagtagactgggaactatacgtggatgggagcagcttcttcaacccccaaggagagagaggtgcagggtatgcagtggtaaccctggacactgttgttgaagccagatcgttgccccaggccacttcagcccagaaagctgaactcgttgctttcattcgggccttagaactcagtgaggttgagactgtcaacatttacactgattctcgaggacaccagcgagcttccaccttgctgggtttggggaattcccgcgctgactcagaggctcgaaaagcagcatctgcccccttctgggcatcagtgctccctcaagcacctgatcttggacctacttcttctaaagaagaaaaggaccttctccagatttcgaccgccttacggatcggctcagacaacgggcctgtgtttttggctgccttggtacagaagacagcaaagatattaggaaaaaatgtcactggggatgtgaacagccctgcgatattgagagtagtatcatcccctccccccttgcatattgggaaacaacatcacagcaaaaaggaatgtagtaggagggcagggtgataataaggagaaggtgagcaacgaacatgtgagcaatacaatctaagtcataaggaagttcaagggaaggtactatgactggacgtgtacgaaccttctgtcatggaaccagagattggagaccgtgggaacacatccaaatccacatctccgtgacaaggtggtgctgatttccagtggtcctccctggtgggggaatcacgtagctctgactctggagcgtgttgttgtgtttctctttcagtacgagcttgtctgtggccctgcagttcctcccttatga

SEQ ID NO: 120588 - DNA, 1874 bp, Homo sapiens
  misc_feature (1)...(1874): n = a,t,c or g
accatgcnnnnnnnnnnnnnnnnnnnnnnnnnnnnnnnnnaggattcacaatttgaacaaattctattttaagcttcatattttcctcagcatttnnnnnnnnnncacgtacagagaccatgtccagggcagcagctgcagccggacccccacgccaggccacccctgcctctccccggtggtccaatgactgtgtactgcgcagggaatgcagcaaccccatcgggcacactcttcagcactacccggggaggtaccaggatcatgtacaactggaaattcccaatagagtgctgaactcaccagtgaccaaaacaccctcgagggacccgcccaccacttccggggtcaccagccctgccagtgatgagcccccggcagacatacagacagcccagaacagcaggcaggtggtgaagggtcagagtttgacctggacatctaaaggcctagccatgagaaggaaaggaagcagagacctggtggttgacagtgccaagtccctggaagatggcccatctgcagcacttcactcgaaactctatgaagccatcatgagagaagactgcactacgatcgaggtactcctgagaaatcaccctgtcaaccagcccatcaccattctgcccaactccgccagcaacagattacttctgacccagccgacagagtctatcatccccatccatctggctgccaagtaccacaaggcccagagtctgctctgcctgttacggcacggtgctgacccagaagtcagggacacgacaggcctcaccacactcaacttaatgctactgcactggccagtcacttccaccacgtgggcaaaaccaggcaacagaacgcacaggatcctgacagacattcagaatagcagcatcacatgtctccgcatcttgtgtgcgcacggagctcaagtgaacactcaaggggaaatcagcaacaaacgttcaccactccacctggccatagcatatggttgctatccagttctctccattttgacccaaaatggtgccgatgtcaatgctattaatgaagccagcatgacaccccttcacatggccgcaaacatgctgaataaggagatgatggaaacgctcattgcctatggagcaaacgtcaactgtgctgtctcttccacggggaacacgcccctgaagcttgcagtgtgcactgcatcaagcaaagcaggccgactcctcggggcgggggtcagctgcatccgtctgctactcactcacggagccaaagtcaacgcccaggactacaagggccaaacagccatccatgaggcatgctttggaggcagagaggcaatcatcaatctcctgcttgaatttgaagcaaatgttaacattttaacaagaaacggggaatctccaatttatatgtaccttcagcgcagttgcaatgtaagagatacggcacttctggccaggctactttatcacacttatcctctgagaatgaccaataaccaaggaattctacctgcaggaatcatgctaccagaattccgcctcttaagggacaccctaataaagcaatcgcaaaaacctttatccctacagggtatctgccaaagaaacatcaggaatatttatggtgagaaatacaagcagcccttgaagcaattcctcccagtgacaatatggaattctgtctactgctggtatgacttggcatatacctcttgaaataagacctcccagtttcacagcagagggactttcggccactccaactgcattttctggctagacatggcccagaaaatgcttcccctatcacctgtgacatcccaaatgtgccaactactgattcttgaacatgttccaaaaaacaaagtgatttgtctattaaaaaaa

SEQ ID NO: 120589 - DNA, 429 bp, Homo sapiens
atgataaaaaccctcaacaaaacaggcatacaagggacttacttcaaagtaataaaagcgatatatgacaaacccatagtcaacatcatattgaacgaggaaaagttgaaagcattccccctgagaaatggaacaaaacgtccttcacaacaatgtccactttcaccatttctagtcaacataacacaggaagtcctagccagagtacttatagaagagaaagaaataaagggcatccaaattggaaaagaggatgtcaaactgtcactgtttaccaataatatgattagatacctagaaaaccctgaagattcatccaaaaagctcctagatctgataaatggattcagtaaagtctcaggatacaaaatcaatgtacacaaatcagtagcactgctgtataccaacaacaaccaagctgaaaattaa

SEQ ID NO: 120590 - DNA, 475 bp, Homo sapiens
ttgccgggtcgacccacgcgtccgggaagaggtgcctttgaaacctgggggtgggagtattcttgtgacacaaaataataaagcggagtacgtccagcttggtactgaacttcgaatgacaagagccattcagcctcagatcaatgcttttttacagggctttcatatgttcattccaccctccctcatacagctttttgatgaatatgaattggagctactgctttctggcatgccagaaattgatgtgagtgattggataaaaaatacagaatacacaagtggctatgaaagagaagatccagttattcagtggttctgggaagttgtagaagacattactcaagaggagagagttcttctcttacagtttgttacgggcagttccaggggtcccacatgggtgggttttgctaatatcatggggtgggaagtgggattgcaaaacttttacaatcgctggctgtgccatata

SEQ ID NO: 120591 - DNA, 504 bp, Homo sapiens
atggaaacagggacaccagatgttgcagtaatccagatgagaagtgatgatagcttggactggggtgctgaaatggaggcggagtacgtccagcttgttactgaacttcgaatgacaagagccattcagcctcagatcaatgcttttttacagggctttcatatgttcattccaccctccctcatacagctttttgatgaatatgaattgctgccagtgcagataggatcaaagcaagcagaggaacatggaagggctagactggctaagtcttctggcctccatctttctccattactggatgctacctgccctcgaacatcagactccaagtcttcagcttttggactcttggacctacaccaggggctctcagaccttcagccacagactaaaggctgcactgtcggcttccctatttttgaggttttggactcaaactggcttccttgctcattagcttgcagacagcttactgtggaacttcatcttctgatcatgtga

SEQ ID NO: 120592 - DNA, 593 bp, Homo sapiens
  misc_feature (1)...(593): n = a,t,c or g
atcgtagttcctagtccatgtggtggaattccgctcgggagccctgcccatggcgaattgtggatgattgcggtggagccttcactatgggtgtcatcggtggcggagtcttccaggccatcaagggtttccgcaatgcccctgtttgcagattgctgtctgaagctcccttgtttatctactcttgctcaagatctgtgtctcccaccgttaatgtgagctctgagagggcagagagcagacctaccttgttcatggctgtatccctgcatatggcatggtgcttggcacatataggaattcggcaccggttgagaggtagtgccaatgctgtgaggatccgagccccccagattggaggtagcttcgcagtgtgggggggcctgttctccaccatcgactgtggcctggtgcggcttcggggcaaggaggatccctggaactctatcaccagtggagcaattgaccggggctgttctgggctgcccgcagtgncccactggcaatgggtgggctcagcaatgatggggggcatcctgttggcctcattgagggggttggnatcctcctaatcggtaaacagccacagttcg

SEQ ID NO: 120593 - DNA, 849 bp, Homo sapiens
ccgacgatttcgtgccagcgccatggaggagtacgctcgggagccctgcccatggcgaattgtggatgattgcggtggagccttcactatgggtgtcatcggtggcggagtcttccaggccatcaagggtttccgcaatgcccctgttggaattcggcaccggttgagaggtagtgccaatgctgtgaggatccgagccccccagattggaggtagcttcgcagtgtgggggggcctgttctccaccatcgactgcggcctggtgcggcttcgggcgcaaggaggatccctggaactctatcaccaagtggagcatttgaccggggctgtgctgggctgcccgcaggtggcccactggccatgggtgggcttcagcaatgatgggggggcatcctgtttgcgcctcatttgagggcgtttggcatcctcctcactcgctacacagcccaagcagttccgaaatgcgcccccattcctggaggaccccaagccaagctgccccctaaggatggcaccccggccatcaggctaccccaagctatcagcagtaccactgaggaagccactgccaccatgggagctacttctcggttccctccccgatgggtctaccctcaaagggagggctggctcccaagttagccctgggaccctccagagagggtttctactctgctccctagtcccagggtgggggtggggcaccccagctgccctgacagatgggtcccctttttctctctcagggcaccccagccccacactcacatgtacgaagttctcaccccagctcctttgtgtggcaccctgatgagtatttaaagcccgttttgaaatgccaaaaaaaaa

SEQ ID NO: 120594 - DNA, 2277 bp, Homo sapiens
tttcgtggccgcttgaaaagctagctgaccctggggcggccacaggagctctggcccgctgaggctggcgatgaggccgcagggagggttactgcgtgcttgtgacagacgatttttaaagtcagggcttgaaagaacaaacaaaacctggggaagagtcaggaagacactgccggaaatcgtggtatccatagagacgctatcggaagttggggttgctaggaagccgcggcgcgtctgctaagctgcaaatggctgaagtcccggaggattatgattccggcccagaatgaagatggagagctggagcctgagaggcctgaactgcctggacttcataaattgtatgaaaatgccgaaccagacaccatggcaaaggcagactcgaagctaccagcagagatttaccaagagccacagccagagaccgaggaagaggacttcaaagagggggagccagacagtgctaagaacgtgcagctgaaacctggcgggacgtcccaggaaggaattgccaaggagtccaagagagacgtaccaagcgaaactgaaccagggatacaccaagaggtaaagtcggaaacatccagagagatgggagagtttttcaaagatttggaggcccctatggatgaaacgcataaagagtcagacctagagccaccagaggaggctaaaccaaatgttacagaggatgtgttcctagagtcagctatggaaacagatccagatccagtgccaccaacggaaaccatgtctgaggtttcgggggccacagtcagagagagaaatttagaattactagaggaggagactgaaccgggggttccagaggaatcacttagagtgcaacatgaagagacaggtctagagcctccagagcagaccaaacaagattttccaagtgagaaactaggagaatcacttgaagagacagatcttcagccaccaaagatgaccaaaccagagactccagaggagacacaaagagagtcaactgagaagaaaaggacagagccacccgagcaggctagactggaatttctggagaaggaaccaagaaagtctagtgaggaggcaggtctagagcctccagaagagactcaaccagaggttccagaggagatgcaaagaaaggcaactgaggagaaagggacagaactacctgagcggactaaaccagactttccagaccacaagccaagaaagtctactgatgagaacgttcctgagccactagaagagatcaaattagagtttcctgaggaagaatcaagaaaaacaaatgaggaaacaattctagaacaatcagaaatgatgaaaccagaaagtccagaagagataagaaagtcaaatgagaaaaaaaatccacagccaccagaggagactggtccagtgctaccacaggagatcaacccacaagttgaagagaaaacacaaacaaagccaactgagaaaattctagagttaccagatgaaaccaaaccaagggagacacatgtagaattttccaaggaagacaggccagaaccaataaagtctaagtattctgtaggaaacgatgagctagagcaccgtgagcctaaaagaggaaagttgtcactaagtgacaaatttagaaaagaatattacgcattaggatctctcagagaaagtgaagaatcaattggtacacattatgagtttttgcaaccactccaaaaattgcttaatgtcagtgaagaatgctcatactcagatccctcagagtctcagacagaattaagtgagttcgttcatgaaaaggaagttgtagatttgtcccaagagttgaaggaacgggtctctgaagatgacgaaacccagccagaaaaagggactgagttacaatttgagcatcttaattgggatccagaggaagttgcagagtggattagccagctaggcttccctcaatacaaggagtgttttatcacaaacttcatcagtggccgaaaactcattcacgtcaactgctcaaacctccctcagatggggataacaaactttgaggacatgaaggcaatttctcggcatacgcaggagctcctggaaattgaagagccattattcaaacgctccatcagccttccctatagggatattatcggcttatatttagagcaaaaaggtcatactgggataaaatctgattccttgactttatctgaatttgtcaaagcagcaggattacaggattatgctccagaaataactgcccctgaagagaatgaggaattaccttgcactgaaccatag

SEQ ID NO: 120595 - DNA, 3765 bp, Homo sapiens; identical to SEQ ID NO: 118074

SEQ ID NO: 120596 - DNA, 1296 bp, Homo sapiens
atggcgggcgcccctcccccagcctcgttgccgccttgcagtttgatctcagactgctgtgctagcaatcagcgagattccgtgggcgtaggaccctctgagccaggtgtgggatatagtctcgtggtgcgccgtttcttaagccggtctgaaaagcgcaatattcgggtgggagtgacccgattttccagatggaaatgcagaaatcacccgtcttctgcgtcgctcacgctgggagctgtagaccggagctgttcctattcggccatcttggcaaagatggggaaaaaacagaacagaaaaactggaaactctaaaacgcagagcgcctctcctcctccaaaggaacgcagttcctcaccagcaacagaacaaagctggatggagaatgattttgacgagctgagagaagaaggcttcagacgatcaaattactctgagctacgggaggacattcaaaccaaaggcaaagaagttgaaaactttgaaaaaaatttagaagaatgtataactagaataaccaatacagagaagtgcttaaaggagctgatggagctgaaaaccaaggctccagaactacgtgaagaatgcagaagcctcaggagccgatgcgatcaactggaagaaagggtatcagcaatggaagatgaaatgaatgaaatgaagcgagaagggaagtttagagaaaaaagaataaaaagaaatgagcaaagcctccaagaaatatgggactatgtgaaaagaccaaatctacatctgattggtgtacctgaaagtgatgtggagaatggaaccaagttggaaaacactctgcaggatattatccaggaaaacttccccaatctagcaaggcaggccaacgttcagattcaggaaatacagagaacgccacaaagatactcctcgagaagagcaactccaagacacataattgtcagattcaccaaagttgaaatgaaggaaaaaatgttaagggcagccagagagaaaggtcgggttaccctcaaaggaaagcccatcagactaacagcggatctctcggcagaaaccctacaagccagaagagagtgggggccaatattcaacattcttaaagaaaagaattttcaacccagaatttcatatccagccaaactaagcttcataagtgaaggagaaataaaatactttatagacaagcaaatgctgagagattttgtcaccaccaggcctgccctaaaagagctcctgaaggaagcactaaacatggaaaggaacaaccggtaccagccgctgcaaaatcatgccaaaatgtaa

SEQ ID NO: 120597 - DNA, 407 bp, Homo sapiens
gctcgaccgagtgaggcaatgcgtcaccctgctctcactcatgcacagtgcactgcactcactgtcctgtgcccactgtctggcactccctagtgagatgaacctggtaccttagatggaaatgcagaaatcacccgtcttctgcgtcactcacgctgggagctgtagaccagagctgttcctattcggccatcttggctgccctccgcttcccttgtttttaacagggagaattaagcctcttcattgtctttattctttttttttttttcaattgccctaacagtttccgagagcagtgttccgtgactcctcagttaagccaccagttcttccgagcccaacacagggtctttggtgtgaaaatttctgttttttccttattgctttaaaaaaaaaaaagtcga

SEQ ID NO: 120598 - DNA, 528 bp, Homo sapiens
tcatgcttctggagcaaaactaccacgttttggaactggaagagacctagaaatcacagaatcagctcctctcatcaaagggagaatacgctgatggccagcaagatcaagtgtccattccagcacccagtccgtacaccctgagcgggcctcagactcagagctgtccagttcggccagagttggggctctgaggagcttcttccgctgtgcaggcacctgctgtgaggtacttaacccgttttcttttgtttgtgatgtcaaacctccattcaccatagatgactccacaagattcccaaagctatatacagatccaatagaatccccaagaaaatcctggggaggagccaagatggccgaataggaacagctccggtctacagctcccagcgtgagcgacgcagaagacggtgatttctgcatttccatctgaggtaccgggttcatctcactagggagtgccagacagtgggcgcaggccagtgtgtgtgcgcaccgtgcgcgagccgaagcagggcgaggcat

SEQ ID NO: 120599 - DNA, 897 bp, Homo sapiens
atgcctcgccctgctttggctggcgcacggtgcgcgcaaccactgacctgcgcccactgtctggcactccctagtgagatgaacccgttacctcagatggaaatgcagaaatcaccgtcttctgcgtcactcaggctgggagctgtagactggagctgttcctattcggccatcttggctcctccccctcttaacttcccattcttatacccataccatattcacataattcctgaaagatgtcatgacatagatccccatggagaagatcctgtggagatgacaccaggaggcctgatgaattacaaatctcaagggactgccttctccctgggctgctgttttgaaaagaaaaaaacaagaaaatttgaggatactatgcctggagaggtggttgaaaataggtacaatgaacaagggctctgtcatcctgggaccctctatcctaggaaacaagtggaacaaatcaaaagatttatactaactgaagaatataaaactatcagacagaagaatttcccagaaagcagcagcaaagaaaaagaaaataaggagtctcttcttgtgccaccaccacgcaggtctgtggtgagtactgcctgctactgccaatgtttcctcaaagcccgtggtctcttcactcagcttgtggtaaatactgccaggcctctccctttagagcagtgggctcccctgtggcccagggcaggtccagaaatgctttccaggaaccaaggcctgaaatcaaaggccctaggagcctccttggtgctctacctcaatctggtgaccaagctgcaagaccaagttccctttactcttccctctccttgccttaagcaagacgagtttctccctgtggccaccagaactgggaatgtgctgagtgacacctga

SEQ ID NO: 120600 - DNA, 8083 bp, Homo sapiens
taaatttaaaggcggggcggcctgtgagccctgaagtgccggccgcggagggtcctggccattttggtgggaccagttcagcctgataggatggcggaggaaggagccgtggccgtctgcgtgcgagtgcggccgctgaacagcagagaagaatcacttggagaaactgcccaagtttactggaaaactgacaataatgtcatttatcaagttgatggaagtaaatccttcaattttgatcgtgtctttcatggtaatgaaactaccaaaaatgtgtatgaagaaatagcagcaccaatcatcgattctgccatacaaggctacaatggtactatatttgcctatggacagactgcttcaggaaaaacatataccatgatgggttcagaagatcatttgggagttatacccagggcaattcatgacattttccaaaaaattaagaagtttcctgatagggaatttctcttacgtgtatcttacatggaaatatacaatgaaaccattacagatttactctgtggcactcaaaaaatgaaacctttaattattcgagaagatgtcaataggaatgtgtatgttgctgatctcacagaagaagttgtatatacatcagaaatggctttgaaatggattacaaagggagaaaagagcaggcattatggagaaacaaaaatgaatcaaagaagcagtcgttctcataccatctttaggatgattttggaaagcagagagaagggtgaaccttctaattgtgaaggatctgttaaggtatcccatttgaatttggttgatcttgcaggcagtgaaagagctgctcaaacaggcgctgcaggtgtgcggctcaaggaaggctgtaatataaatcgaagcttatttattttgggacaagtgatcaagaaacttagtgatggacaagttggtggtttcataaattatcgagatagcaagttaacacgaattcttcagaattccttgggaggaaatccaaagacacgtattatctgcacaattactccagtatcttttgatgaaactcttactgctctccagtttgccagtactgctaaatatatgaagaatactccttatgttaatgaggtatcaactgatgaagctctcctgaaaaggtatagaaaagaaataatggatcttaaaaaacaattagaggaggtttctttagagacgcgggctcaggcaatggaaaaagaccaattggcccaacttttggaagaaaaagatttgcttcagaaagtacagaatgagaaaattgaaaacttaacacggatgctggtgacctcttcttccctcacgttgcaacaggaattaaaggctaaaagaaaacgaagagttacttggtgccttggcaaaattaacaaaatgaagaactcaaactatgcagatcaatttaatataccaacaaatataacaacaaaaacacataagctttctataaatttattacgagaaattgatgaatctgtctgttcagagtctgatgttttcagtaacactcttgatacattaagtgagatagaatggaatccagcaacaaagctactaaatcaggagaatatagaaagtgagttgaactcacttcgtgctgactatgataatctggtattagactatgaacaactacgaacagaaaaagaagaaatggaattgaaattaaaagaaaagaatgatttggatgaatttgaggctctagaaagaaaaactaaaaaagatcaagagatgcaactaattcatgaaatttcgaacttaaagaatttagttaagcatcgagaagtatataatcaagatcttgagaatgaactcagttcaaaagtagagctgcttagagaaaaggaagaccagattaagaagctacaggaatacatagactctcaaaagctagaaaatataaaaatggacttgtcatactcattggaaagcattgaagacccaaaacaaatgaagcagactctgtttgatgctgaaactgtagcccttgatgccaagagagaatcagcctttcttagaagtgaaaatctggagttgaaggagaaaatgaaagaacttgcaactacatacaagcaaatggaaaatgatattcagttatatcaaagccaattggaggcaaaaaagaaaatgcaagttgatctggagaaagaattacaatctgcttttaatgagataacaaaactcacctcccttatagatggcaaagttccaaaagatttgctctgtaatttggaattggaaggaaagattactgatcttcagaaagaactaaataaagaagttgaagaaaatgaagctttgcgggaagaagtcattttgctttcagaattgaaatctttaccttctgaagtagaaaggctgaggaaagagatacaagacaaatctgaagagctccatataataacatcagaaaaagataaattgttttctgaagtagttcataaggagagtagagttcaaggtttacttgaagaaattgggaaaacaaaagatgacctagcaactacacagtcgaattataaaagcactgatcaagaattccaaaatttcaaaacccttcatatggactttgagcaaaagtataagatggtccttgaggagaatgagagaatgaatcaggaaatagttaatctctctaaagaagcccaaaaatttgattcgagtttgggtgctttgaagaccgagctttcttacaagacccaagaacttcaggagaaaacacgtgaggttcaagaaagactaaatgagatggaacagctgaaggaacaattagaaaatagagattctccgctgcaaactgtagaaagggagaaaacactgattactgagaaactgcagcaaactttagaagaagtaaaaactttaactcaagaaaaagatgatctaaaacaactccaagaaagcttgcaaattgagagggaccaactcaaaagtgatattcacgatactgttaacatgaatatagatactcaagaacaattacgaaatgctcttgagtctctgaaacaacatcaagaaacaattaatacactaaaatcgaaaatttctgaggaagtttccaggaatttgcatatggaggaaaatacaggagaaactaaagatgaatttcagcaaaagatggttggcatagataaaaaacaggatttggaagctaaaaatacccaaacactaactgcagatgttaaggataatgagataattgagcaacaaaggaagatattttctttaatacaggagaaaaatgaactccaacaaatgttagagagtgttatagcagaaaaggaacaattgaagactgacctaaaggaaaatattgaaatgaccattgaaaaccaggaagaattaagacttcttggggatgaacttaaaaagcaacaagagatagttgcacaagaaaagaaccatgccataaagaaagaaggagagctttctaggacctgtgacagactggcagaagttgaagaaaaactaaaggaaaagagccagcaactccaagaaaaacagcaacaacttcttaatgtacaagaagagatgagtgagatgcagaaaaagattaatgaaatagagaatttaaagaatgaattaaagaacaaagaattgacattggaacatatggaaacagagaggcttgagttggctcagaaacttaatgaaaattatgaggaagtgaaatctataaccaaagaaagaaaagttctaaaggaattacagaagtcatttgaaacagagagagaccaccttagaggatatataagagaaattgaagctacaggcctacaaaccaaagaagaactaaaaattgctcatattcacctaaaagaacaccaagaaactattgatgaactaagaagaagcgtatctgagaagacagctcaaataataaatactcaggacttagaaaaatcccataccaaattacaagaagagatcccagtgcttcatgaggaacaagagttactgcctaatgtgaaaaaagtcagtgagactcaggaaacaatgaatgaactggagttattaacagaacagtccacaaccaaggactcaacaacactggcaagaatagaaatggaaaggctcaggttgaatgaaaaatttcaagaaagtcaggaagagataaaatctctaaccaaggaaagagacaaccttaaaacgataaaagaagcccttgaagttaaacatgaccagctgaaagaacatattagagaaactttggctaaaatccaggagtctcaaagcaaacaagaacagtccttaaatatgaaagaaaaagacaatgaaactaccaaaatcgtgagtgagatggagcaattcaaacccaaagattcagcactactaaggatagaaatagaaatgctcggattgtccaaaagacttcaagaaagtcatgatgaaatgaaatctgtagctaaggagaaagatgacctacagaggctgcaagaagttcttcaatctgaaagtgaccagctcaaagaaaacataaaagaaattgtagctaaacacctggaaactgaagaggaacttaaagttgctcattgttgcctgaaagaacaagaggaaactattaatgagttaagagtgaatctttcagagaaggaaactgaaatatcaaccattcaaaagcagttagaagcaatcaatgataaattacagaacaagatccaagagatttatgagaaagaggaacaacttaatataaaacaaattagtgaggttcaggaaaacgtgaatgaactgaaacaattcaaggagcatcgcaaagccaaggattcagcactacaaagtatagaaagtaagatgctcgagttgaccaacagacttcaagaaagtcaagaagaaatacaaattatgattaaggaaaaagaggaaatgaaaagagtacaggaggcccttcagatagagagagaccaactgaaagaaaacactaaagaaattgtagctaaaatgaaagaatctcaagaaaaagaatatcagtttcttaagatgacagctgtcaatgagactcaggagaaaatgtgtgaaatagaacacttgaaggagcaatttgagacccagaagttaaacctggaaaacatagaaacggagaatataaggttgactcagatactacatgaaaaccttgaagaaatgagatctgtaacaaaagaaagagatgaccttaggagtgtggaggagactctcaaagtagagagagaccagctcaaggaaaaccttagagaaactataactagagacctagaaaaacaagaggagctaaaaattgttcacatgcatctgaaggagcaccaagaaactattgataaactaagagggattgtttcagagaaaacaaatgaaatatcaaatatgcaaaaggacttagaacactcaaatgatgccttaaaagcacaggatctgaaaatacaagaggaactaagaattgctcacatgcatctgaaagagcagcaggaaactattgacaaactcagaggaattgtttctgagaagacagataaactatcaaatatgcaaaaagatttagaaaattcaaatgctaaattacaagaaaagattcaagaacttaaggcaaatgaacatcaacttattacgttaaaaaaagatgtcaatgagacacagaaaaaagtgtctgaaatggagcaactaaagaaacaaataaaagaccaaagcttaactctgagtaaattagaaatagagaatttaaatttggctcaagaacttcatgaaaaccttgaagaaatgaaatctgtaatgaaagaaagagataatctaagaagagtagaggagacactcaaactggagagagaccaactcaaggaaagcctgcaagaaaccaaagctagagatctggaaatacaacaggaactaaaaacttgctcgtatgctatcaaaagaacacaaagaaactggtgataaacttagagaaaaaatttcagaaaagacaattcaaatttcagacattcaaaaggatttagataaatcaaaagatgaattacagaaaaagatccaagaacttcagaaaaaagaacttcaactgcttagagtgaaagaagatgtcaatatgagtcataaaaaaattaatgaaatggaacagttgaagaagcaatttgagccaaactatctatgcaagtgtgagatggataacttccagttgactaagaaacttcatgaaagccttgaagaaataagaattgtagctaaagaaagagatgagctaaggaggataaaagaatctctcaaaatggaaagggaccaattcatagcaaccttaagggaaatgatagctagagaccgacagaaccaccaagtaaaacctgaaaaaaggttactaagtgatggacaacagcaccttatggaaagcctgagagaaaagtgctctagaataaaagagcttttgaagagatactcagagatggatgatcattatgagtgcttgaatagattgtctcttgacttggagaaggaaattgaattccacagaatcatgaagaaactgaagtatgtgttaagctatgttacaaaaataaaagaagaacaacatgaatgcatcaataaatttgaaatggattttattgatgaagtggaaaagcaaaaggaattgctaattaaaatacagcaccttcaacaagattgtgatgtaccatccagagaattaagggatctcaaattgaaccagaatatggatctacatattgaggaaattctcaaagatttctcagaaagtgagttccctagcataaagactgaatttcaacaagtactaagtaataggaaagaaatgacacagtttttggaagagtggttaaatactcgttttgatatagaaaagcttaaaaatggcatccagaaagaaaatgataggatttgtcaagtgaataacttctttaataacagaataattgccataatgaatgaatcaacagagtttgaggaaagaagtgctaccatatccaaagagtgggaacaggacctgaaatcactgaaagagaaaaatgaaaaactatttaaaaactaccaaacattgaagacttccttggcatctggtgcccaggttaatcctaccacacaagacaataagaatcctcatgttacatcaagagctacacagttaaccacagagaaaattcgagagctggaaaattcactgcatgaagctaaagaaagtgctatgcataaggaaagcaagattataaagatgcagaaagaacttgaggtgactaatgacataatagcaaaacttcaagccaaagttcatgaatcaaataaatgccttgaaaaaacaaaagagacaattcaagtacttcaggacaaagttgctttaggagctaagccatataaagaagaaattgaagatctcaaaatgaagcttgtgaaaatagacctagagaaaatgaaaaatgccaaagaatttgaaaaggaaatcagtgctacaaaagccactgtagaatatcaaaaggaagttataaggctattgagagaaaatctcagaagaagtcaacaggcccaagatacctcagtgatatcagaacatactgatcctcagccttcaaataaacccttaacttgtggaggtggcagcggcattgtacaaaacacaaaagctcttattttgaaaagtgaacatataaggctagaaaaagaaatttctaagttaaagcagcaaaatgaacagctaataaaacaaaagaatgaattgttaagcaataatcagcatctttccaatgaggtcaaaacttggaaggaaagaacccttaaaagagaggctcacaaacaagtaacttgtgagaattctccaaagtctcctaaagtgactggaacagcttctaaaaagaaacaaattacaccctctcaatgcaaggaacggaatttacaagatcctgtgccaaaggaatcaccaaaatcttgtttttttgatagccgatcaaagtctttaccatcacctcatccagttcgctattttgataactcaagtttaggcctttgtccagaggtgcaaaatgcaggagcagagagtgtggattctcagccaggtccttggcacgcctcctcaggcaaggatgtgcctgagtgcaaaactcagtag

SEQ ID NO: 120601 - DNA, 648 bp, Homo sapiens
acaggaccctcagctgcaggtctgttggagtttgctagaggtccactccagaccgtttgcctgggtatcagcagcggtgtctgcagaaccacggattttcatgaaccgcgaatgctgctgtctgatcgttcctctggaagttttgtctcagaggagtacctggccatcccgtcggaaaagcgcagtattcgggtgggagtggcccgattttccaggtgccatctgtcacccctttccttgaccaggaaagggaactcccggaccccttgcgcttcccgtgtgatgcgatgccacgccctgcttcggctggcgcacggtgcgctgcacccactgtcctgcacctactgtctggcactccctagtgagatgaacccggtatctcagatggaaatgcagaaatcacccgtcttctgcgtcgctcacactgggagctgtagaccggagctgttcctatttggccatcttggctcctcccacttcttcctttataaaacggtgggacacatggaagcttatactctcagtgaaaaaggcatcaatcaaatattctgcccactagcacaaggagatgaggaggaagtgtgtttgccttggcctgggaaatctcctatcagtatttatgctacacttcaggtatggaaaccctaa

SEQ ID NO: 120602 - DNA, 2067 bp, Homo sapiens
atggcgctggcatctgcttggcttctaggacaccctcagggagcttttactcgtggcagggtttcactttctgcagtttcacttatccatggccagccacagtctgaaaatattaaatggaatattccagaattaaacaactcacatgtagactgccaaagtgtatgggatgctttcaagggtgcatttatttcaaaacatccttgcaacattactgaagaagactatcagccactaatgaagttgggaactcagaccgtaccttgcaacaagattcttctttggagcagaataaaagatctggcccatcagttcacacaggtccagcgggacatgttcaccctggaggacacgctgctaggctaccttgctgatgacctcacatggtgtggtgaattcaacacttccagtgaggctctgggccctgtgggattgcccagggatgtggagggctttccagatattttgaaggactcggatgttgtgatctacgttgtatctgctgtagggggccctgcaagcctagtaatgctgtgggtcttgtacacactcatggagagacttatgccaggatcccaccataaaagagctggaatcgattataagcaaaaggaatattcaattttcctgcaagaatatctacagccagaaaaggccatgagcattctacagcagttagacaggaaaacagaaagaatgaatgaaggagcaactgtaaaagcaatcttgcggcggaggagccaagatggccgaataggaacagctccggtctacagctcccagcgtgagcgacgcagaagacgggtgatttctgcatttccatctgagggcacagacaaacaaaaagacagcagtaacctctgcagacttaagtgtccctgtctgacagctttgaagagagcagtggttctcccagcacgcagctggagatctgagaacgggcagactgcctcttcaaaaggaaaactaacaaccagaaaggacatctacaccgaaaacccatctgtacatcaccatcatcaaagaccaaaagtagataaaaccacaaagatggggaaaaaacagaacagaaaaactggaaactctaaaacgcagagcgcctctcctcctccaaaggaacgcagttcctcaccagcaacagaacaaagctggatggagaatgattttgacgagctgagagaagaaggcttcagacgatcaaattactctgagctacgggaggacattcaaaccaaaggcaaagaagttgaaaactttgaaaaaaatttagaagaatgtataactagaataaccaatacagagaagtgcttaaaggagctgatggagctgaaaaccaaggctcgagaactacatgaagaatgcagaagcctcaggagccgatgcgatcaactggaagaaagggtatcagcaatggaagatgaaatgaatgaaatgaagcgagaagggaagtttagagaaaaaagaataaaaagaaatgagcaaagcctccaagaaatatgggactatgtgaaaagaccaaatctacgtctgattggtgtacctgaaagtgatgtggagaatggaaccaagttggaaaacactctgcaggatattatccaggagaacttccccaatctagcaaggcaggccaacgttcagattcaggaaatacagagaacgccacaaagatactcctcgagaagagcaactccaagacacataattgtcagattcaccaaagttgaaatgaaggaaaaaatgttaagggcagccagagagaaaggtcaggttaccctcaaaggaaagcccatcagactaacagcggatctctcggcagaaaccctacaagccagaagagagtgggggccaatattcaacattcttaaagaaaagaattttcaacccaaaatttcatatccagccaaactaagcttcataagtgaaggagaaataaaatactttatagacaagcaaatgctgagagattttgtcaccaccaggcctgccctaaaagagctcctgaaggaagagctaaacatggaaaggaacaaccggtaccagccgctgcaaaatcatgccaaaatgtaa

SEQ ID NO: 120603 - DNA, 870 bp, Homo sapiens
atggcgggcgcccctcccccagcctcgctgccgccttgcagtttgatcttagactgctgtgctagcaatcagcgagattccgtgggcgtaggaccctccgagccaggtgtgggatatagtctcgtggtgcgccgtttcttaagccggtctgaaaagcgcaatattcgggtgggagtgacccgattttccagtgagatgaacccggtacctcagatggaaatgcagaaatcaccgtcttctgcgtcgctcacgctgggagctgtagaccggagctgttcctattcggccatcttggctcctcccctcgggttctgtttttatccactctatgaaaactctaccttgcagagcgctaaaaaacgcgatgctgagttagcgaacggcgccctcggtatcatagagttaaataatgattacacattgaaaaaagtaatgaagccgctgatcacttcaaacacggtaactgatgaaatcgagcgcgcgaatgttttcaaaatgaacggcaaatggtacttgttcactgattcacgcggttcaaaaatgacgatcgatggtattaactcaaacgatatttacatgcttggttatgtatcaaactctttaaccggcccttacaagccgctgaacaaaacagggcttgtgctgcaaatgggtcttgatccaaacgatgtgacattcacttactctcacttcgcagtgccgcaagccaaaggcaacaatgtggttatcacaagctacatgacaaacagaggcttcttcgaggataaaaaggcaacatttgcgccaagcttcttaatgaacatcaaaggcaataaaacatccgttgtcaaaaacagcatcctggagcaaggacagctgacagtcaactaa

SEQ ID NO: 120604 - DNA, 372 bp, Homo sapiens
gatctggaaatacaacaggaactaaaaactgctcgtatgctatcaaaagaacacaaagaaactgttgataaacttagagaaaaaatttcagaaaagacaattcaaatttcagacattcaaaaggatttagataaatcaaaagatgaattacagaaaaagatggaaatgcagaaatcaccgtcttctgcgtcgcccacgctggaagctgtagaccggaactgttcctattcggccatcttggctcctcctcgcaggatgatctcccgaaacgagcacaaccgccctcgggcaccagaggaagatccccagagtgtgatattcccaatcgtgagtccaggtgatgtcattgttcaattcccgaaatatgagtga

SEQ ID NO: 120605 - DNA, 1303 bp, Homo sapiens
atgtcaacaggcctcacagctgaaggctttacccacccaatcctgctccccctcttctaacagctatgaaaccttcctagtttcaccccttcacccgttccagttttacataagttttcctcactacacagagatggttcctcccttgacacctgaggattacaattcgagaggagattttggtggggacacagagacaaaccatattatttcaaagttccacaggtctctagagcaggtgcaaaatgctgccagtcggaggagccaagatggccgaataggaacagctccggtctacagctcccagcgtgagcgacgcagaagacgggtgatttctgcatttccatctgaggaacgcagttcctcaccagcaatggaacaaagctggatggagaatgactttgaggagctgagagaagaaggcttcagacgatcaaattactctgagctacgggaggacattcaaaccaaaggcaaagaagttgaaaactttgaacaaaatttagaagaatgtataactagaataaccaatacagagaagtgcttaaaggagctgatggagctgaaaaccaaggctcgagaactacgtgaagaatgcagaagcctcaggagccgatgtgatcaactggaagaaaggatatcagtgatggaagatgaaatgaatgaaatgaagcgagaagggaagtttagagaaaaaagaataaaaagaaatgagcaaagcctccaagaaatatgggactatgtgaaaagaccaaatctacgtctgattggtgtacctgaaagtgatggggagaatggaaccaagttggaaaacactctgcagcatattatccaggagaacttccccaatctagcaaggcaggccaacgttcagattcaggaaattcagagaacgccacaaagatactcctcgagaatagcaattccaagacacataattgtcagattcaccaaagttgaaatgaaggaaaaaatgttaagggcagccagagagaaaggtcgggttaccctcaaagggaagcccatcagactaacagcagatctctcggcagaaaccctacaagccagaagagagtgggggccaatattcaacattcttaaagaaaataattttcaacccagaatttcatatccagccaaactaagcttcataagtgaagaagaaataaaataccttacagacaagcaaatggtgagagattttgtcaccaccaggcctgccctaaaagagctcctgaaggaagcactaaacatggaaaggaacaaccggtaccagctgctgcaaaatcatgccaaattctaa

SEQ ID NO: 120606 - DNA, 2307 bp, Homo sapiens
gcaatggcgggctcccctcccccagcctcgctgctgccttgcagtttgatctcagactgctgtgctagcaatgagcgaggctccgtgggcgtaggacccttcgatccaggtgcggaatataatctcctcatgtgccatttgttaagcctgttgggaaagcgcagtattagggtgggagtgacccaattttccaggtgccgtctgtcacccctttctttgactaggaaagggaattccctgacctcttgcgcttcccgggtgaggcgatgcctcgccctgctttggctcacgcacccgtgcgcgcaccccacttgcctgcgcccactggtctggcactcgctagtgagatgaacccggtacctcagatggaaatgcagaaatcacccgtcttctgcgtcgctcacgctgggagctgtagaccagagcttgttcctattcggccatcttggctcacaattaaaagaactagaaaagcaagagcaaacacattcaaaagctagcagaaggcaagaaataactaaaagcagagcagaactgaaggaaatagagacacaaaaaacccttcaaagaattaatgaatccaggagctggttttttgaaaggatcaacaaaattgatagaccgctagcaagactaataaagaagaaaagagagaagaatcaaatacacgcaataaaaaatgataaagggaatatcaccaccgatcccacagaaatacaaactaccatccgagaatactacaaacacctctacgcaaataaactagaaaatctagaagaaatcgataagttcctcgacacatacagcctcccaagactaaaccaggaagaagttgaatctctgaatagaccaatagcaggctctgaaattgtggctttaatcaatagcttaccaaccaaaaagagcccaggaccagatggattcacagccgaattctaccagaggtacaaggaggaactggtaccattccttctgaaactattccaaccaatagaaaaagagggaatcctccctaactcattttatgaggccagcatcatcctgataccaaagcttggcagagacacaaacaaaaaagagaattttagaccaatatccttgatgaacattgatgcaaaaatcctcaataaaatactggcaaaacgaatccagcagcacatcaaaaagcttatccaccatgatcaagtgggcttcatccctgggatgcaaggctggttcaatatacgcaaatcaataaatgtaatccagcatataaacagaaccaaagacaaaaaccacatgattatctcaatagatgcagaaaaggcctttgacaaaattcaacaacccttcatgctaaaaactctcaataaattaggtattgatgggacatatctcaaaataataagagctatctatgacaaacccacagccaatatcatactgaatgggcaaaaactggaagcattctctttgaaaactggcacaagacagggaggccctctctcaccactcctattcaacatagtgtgggaagttctgaccagggcaattaggcaggagaaggaaataaagggtattcaattaggaaaagaggaagtcaaattgtccctgtttgcagatgacatgattgtatatctagaaaaccccattgtctcagcccaaaatctccttaagctgataagcaacttcagcaaagtctcaggatacaaaatcaatgtacaaaaatcacaagcattcttatatgccaataacagacaaacagagagccaaatcatgagtgaactcccattcacaattgcttcaaagagaataaaatacctaggaatccaacttacaagggacatgaaggacctcttcaaggagaactacaaaccactgctcaatgaaataaaagaggatagaaagaaatggaagaacattccatgctcatgggtaggaggaatcaatatcgtgaaaatggccatactgcccaaggtaatttatagattcaatgccatccccatcaagctaccaatgccttccttcacagaattggaaaaaagtactttaaagttcatatggaaccaaaaaagagcccgcattgccaagtcaatcctaagccaaaagaacaaagctggaggcatcatgctacctgacttcaaattatactacaaggctacagtaaccaaaacagcatggtactggcaccaaaacagagatatagatcaatggaacagaacggagccctcagaaataacgccgcatatctacaactatctgatctttgacaaacctgagaaaaacaagcaatggggaaaggattccctatttaataaatggtgctga

SEQ ID NO: 120607 - DNA, 1620 bp, Homo sapiens
atggcagccaagatattgtattgcaaagacaagaaacagagagacagagttattagtaacgggattgagggggatgtttgcaagcccctggagcaatacttcagatacccagggcttttggggggtagagctcacctgtgggggtggttgattggctgttgttcagctcatcttagagaagtaaaacaaggagatcagataaaatgttggaaaggttaccaagctttctacagaagctggctctttctggctacttctatcacagctttcctgtcaactgggtttttcatcaagttcttgagttttgaatcttcttcatcttatcttggatcaaatgtagtatctccaactcaattctacatctttcaccaccattttctctgttctgcccttagaaaagtgttcgctcatcctgctgagattcaaggagagtcacccctggctaacttacagatgatgcagatgactccgttgccacctgcctctgtaaatctccaggccactttccttttctttaaaatgcccatcatgaatgggcatttctccaattgcaatagcctggctcatccatttctctccctgcccttccttatgttggggaattactcacctactctgggcctcatcttctttgtggactttggagaccgttctgcttttatattgtctgtaggtgaattgtttccatggtctccctacttgcctggagctgtggaatgcaccatgaaccaggaacagcatggggcagagccctcagaggaccacagctattgtgattgtcagcctctaagaggaccctactcatcctcacctcctggtactgacacccatccatgtgaagggctggctcctgcttcgccttctgccatgagtaaaatctccccgaggcttccccagaagcagatgcagccttgcttcctatatagcctgcagaactccagaggaatctttgaagaagaagaagaagaagaagaagaagaagaagaagaagaagaagaagaagaagaagaagaagatgatgaggaggaagaagaagaagaaaaatggttttatacaatgctggataaacatcccatagacaccataatggaggactccacaagagaagggcatgttggttttgttttctcaggcacttctagacctgctcttgttttacaagttctcctgtctcagtgtggacagctggtaggactgatctcctctcagcacagcctggaattagtgccagaacaaaatatacagctggatgtttgtcacaattctaatgtccctgcaaagatgagatgcatgaatcacacagcaatctcatcaaaaagatgtctccagactctaaccaccagtatttcaggcccaagggatctcagacttgtcattctctttagtactgcagcattccccagaggagagaaccagaaatcccgtagaaaatgcagaagtagaagaataactaatagagattttctcttccgcctcataagtctggtggatgaactgaacattaaccctcaccgggtaaccttgagaagccctcatgaatgtgcagcaattacaatccatcgcacttgccagcgacctggtaaaaatcaagacagggcctcactttgtgactcaggctga

SEQ ID NO: 120608 - DNA, 318 bp, Homo sapiens; identical to SEQ ID NO: 117050

SEQ ID NO: 120609 - DNA, 159 bp, Homo sapiens; identical to SEQ ID NO: 117049

SEQ ID NO: 120610 - DNA, 282 bp, Homo sapiens; identical to SEQ ID NO: 117047

SEQ ID NO: 120611 - DNA, 264 bp, Homo sapiens
tgacagaagaagaagaagaagaagaagaagaagaagaagaagaagaagaagaagaagaagaagaagaagaagaagaagaaggagaagaagaagaaagaggaggaggaggaggcaaacctctgaacctcttttttacagatgagcacacgttacccattatttcagtgtcaggacatgtctccgtgtactgtattccctatgtaagaggcaatctggacctaaaagagtgtccaagagataagctagaagtagatctgcagatag

SEQ ID NO: 120612 - DNA, 181 bp, Homo sapiens
aagaagaagaagaagaagaagaagaagaggaagaggaagaggaagaagaagaagaagaagaagaagaagaagaagaagaagaagaagaagaagaagaagaagaagaagaacaggccatgtgaggttgccacaccacctacaaaacagggataccacagtccccaggtaaggatcacaggag

SEQ ID NO: 120613 - DNA, 435 bp, Homo sapiens; identical to SEQ ID NO: 117052

SEQ ID NO: 120614 - DNA, 591 bp, Homo sapiens; identical to SEQ ID NO: 120429

SEQ ID NO: 120615 - DNA, 333 bp, Homo sapiens
ctaggtgaggaagggccgggtccagagcacggagaacaacccccggttgaggagcgtccgcaggaacgctcggtgtcggggtcctttcctttgcagccgcacgccgccggcggcacctctgcacctgcgccctctcgcccgcagattccgccaagggctggaagggacgtaaccgggaaggagcaggactgccggagcattgagtaatatcagccgcctagagcggacccacgaaacctggaattcaattggttggtgagcagtcctgagcctaatatcttctccctccaggtcctgacctgagggctgcatcaagatcttgtcattccacat

SEQ ID NO: 120616 - DNA, 451 bp, Homo sapiens
tcaccaagatgttaagggaagtttgccaagaggcatcaaccaattgaattccaggtttcgtgggtccgctctaggcggctgatagtactcaatgctccggcagtcctgctccttcccggttacgtcccttccagcccttggcggaatctttagcaaattgtctttattactttgtacactgctttcaccagtctgctcttccatggctaacggggcagaactgttatttttagggttttccacatccagtatgttcataagatttctaccctgtgtgaacttccagatgtcgaataaaggctggatgctgaccaaagacctttccacattttttacatgtgtgtagggttgctcaccagtagtattcccctgatgcttcataatggttgatcccagagagaatgccctttcacactcattacattcatagggtttctgtccagtgtgagtt

SEQ ID NO: 120617 - DNA, 3023 bp, Homo sapiens
  misc_feature (1)...(3023): n = a,t,c or g
gaggccaagctcacagaccagcttcccctcntcatcgtgtgtgatcgttttggctttgtccatgaccttgtcctatatttataccgcaacaacctgcagaggtacattgagatctacgtgcagaaggtcaaccctagccggaccccagctgtgattggagggctgcttgatgtggattgttctgaggaagtgattaaacacttaatcatggcagtgagaggacagttctctactgatgagttggtggctgaagtagaaaaaagaaataggctcaagctgctgcttccctggctggagtcccagattcaggaaggctgtgaggagcctgccactcacaatgcactggctaaaatctacatcgacagcaacaacagccccgagtgcttcctgagagagaatgcctactatgacagcagcgtggtgggccgctactgtgagaagcgagacccccatctggcctgtgttgcctatgagcgggggcagtgtgaccttgagctcatcaaggtgtgcaataagaattctctgttcaaaagcgaggcccgctacctggtatgcagaaaggatccggagctctgggctcacgtccttgaggagaccaacccatccaggagacagctaattgaccaggtggtacagacagcattgtcagaaacacgggatcctgaagagatttcggtcactgtcaaagcctttatgacagccgacctgcctaatgaactgattgaactgctggagaagatagttctggataactctgtcttcagcgagcacaggaatctacagaatctgttgatcctgactgccatcaaggcagaccgcacacgggtcatggagtacatcagccgcctggacaactatgacgcactggacatcgcgagcatcgctgtcagcagcgcgctgtatgaggaggccttcaccgttttccacaagtttgatatgaatgcctcagcaatccaggtcctgatcgagcacattggaaacctggaccgggcatatgagtttgcggagagatgcaatgagcctgctgtgtggagtcagctggcccaagcccagctccagaaagatttggtgaaggaagccatcaactcctatatcagaggggacgacccttcctcttacctggaagttgttcagtcagccagcaggagcaacaactgggaggatctagttaaatttctgcagatggccaggaaaaagggccgtgagtcctatatagagactgaacttatttttgccttggctaaaaccagccgtgtttctgagctagaagattttattaatggacccaacaatgcccacatccagcaggttggagaccgctgttacgaggagggaatgtacgaggctgccaagctgctctatagcaatgtttctaactttgcccgcctggcttccaccttggttcacctcggtgagtatcaggcagcagtggacaacagccgcaaggccagcagcacccggacgtggaaggaggtgtgctttgcctgcatggatggacaagagttccgcttcgcacagctgtgtggtcttcacatcgtcattcatgcagatgagctggaggagctgatgtgctattaccaggatcgtggctactttgaggagctgatcttgctgttggaagcggccctgggcctggagcgggcccacatgggcgtgttcactgagctggccatcctctactccaaattcaagccacagaagatgctggagcatctggagcttttctggtcccgtgtcaacatcccaaaggtgctgagggctgcagagcaggcacacctgtgggctgagctggtgttcctctatgacaagtacgaggagtatgacaatgctgtgctcaccatgatgagccaccccactgaggcctggaaggagggtcagttcaaggacatcattaccaaggttgccaacgtcgagctctgttacagagccctgcagttctatttggattacaaaccactgctcatcaatgacctgctgctggtgctttcaccccggctggaccacacctggacagtcagtttcttttcaaaggcaggtcagctgcccctggtgaagccttacctgcggtcagtccagagccacaacaacaagagtgtgaatgaggcactcaaccacctgctgacagaggaggaggactatcagggcttaagggcatctatcgatgcctatgacaactttgacaacatcagcctgatgccatgcagcatgctgcagagtcgcgggatgctgagctggcccagaagttgctgcagtggttcctggaggaaggcaagagggagtgcttcgcagcttgtctcttcacctgctatgacctgcttcgcccagacatggtgcttgagctggcctggaggcacaacctcgtggacttggccatgccctacttcatccaggtgatgagggagtacctgagcaaggtggacaaactggatgccttggagagtctgcgcaagcaagaggagcatgtgacagagcctgcccctctcgtgtttgattttgatgggcatgaatgagacccagctgattgcactaagccctgccgtgggcccagcccctgccagcttcccctatggatatgcctctgctcccaacttcgccagcctccagtgtacaacttccgcgtgtagtggtcgttgtcaccacccaccctacctgcagagttactaacttctccaaggagcatgtcactccagcagcacaggggacgcaatgggaggcagggacacctggacaatatttatttttgctgaaacccaatgacggcaacctctgagccatcccagagcctggggaggccagggtagaggctgacggcgcaagaccagctttagccgacaacagagactggactgtgggccctcctgctggagccaggccttcctcctgggcgcctccgactggctggagctgccccctccaggccagtttgaagactacatgaacacgtcttgtttggaggtaccggacctcataaaaggactctcagcctcttggcaatcataaatattaaagtgggtttatccagg

SEQ ID NO: 120618 - DNA, 5542 bp, Homo sapiens
ggcttctggttcggcccacctctgaaggttccagaatcgatagtgaattcgtgattcctgccgctgccgccgccgccgccgaggtcccgcaccagccatggcgcagatcctccctgttcgctttcaggagcacttccagctccaaaaccttggaattaatccagctaacattggattcagcacactgaccatggaatctgacaagttcatatgtatccgagagaaagttggtgagcaggcacaggtcacgatcattgacatgagtgacccaatggctccgatccgacggcctatctctgcagagagtgccatcatgaatccagcctctaaggtgatagctctgaaagctgggaagacacttcagatctttaatattgagatgaagagtaaaatgaaggctcatactatggcagaagaagtgattttctggaaatgggtttctgtgaacactgttgccttggtgaccgagaccgcggtctaccactggagcatggaaggtgactcccagcccatgaagatgtttgatagacataccagtctggtgggctgccaggtgattcactaccggactgatgagtaccagaagtggctgctgctcgtaggcatctcggctcagcaaaaccgtgtggttggagcaatgcagctctactctgtggataggaaggtttcacaacacatagaaggccatgctgcggcttttgcagagttcaagatggaggggaatgccaagcctgccacccatttctgctttgctgtacgtaatcccacaggaggcaagttgcacatcattgaagttggacagcctgcagcgggaaaccaaccttttgtaaagaaagcagtagatgtgttttttcctccagaggcacagaatgattttccagtggctatgcagattggagctaaacatggtgttatttacttgatcacaaagtatggctatcttcatctgtacgacctagagtctggcgtgtgcatctgcatgaaccgtattagtgctgacacaatatttgtcactgctccacacaaaccaacctctggaattattggtgtcaacaaaaagggacaggtactgtcagtttgtgttgaggaagataacattgtgaattatgcaaccaacgtgcttcagaatccagaccttggtctgcgtttggccgttcgtagtaacctggctggcgcagagaagttgtttgtgagaaaattcaataccctctttgcacagggcagctatgctgaagccgccaaagttgcagcgtctgcaccaaagggaatcctgcgtaccagagagacggtccagaaattccagagtatacccgctcagtctggccaggcttctccattgctgcagtacttcggaatcctgctcgaccagggtcagctcaataaacttgaatccttagaactttgccatctggttcttcagcaggggcgtaagcaactcctagagaagtggctgaaagaagataagctggagtgctcagaggagctcggagacttggtcaaaaccactgaccccatgctcgctctgagtgtgtaccttcgggcaaatgtgccaagcaaagtgatccagtgttttgcagaaacaggccaattccagaaaattgtgctctatgccaaaaaggttgggtacaccccagactggatctttctgctgaggggtgtaatgaagatcagtccggaacagggccagcagttttctcgaatgctagtgcaggacgaggagccgctggccaacattagccagattgtggacattttcatggaaaacagtttaattcagcagtgtacttccttcttattggatgccttgaagaataatcgcccagctgagggactcctgcagacatggctgttggagatgaaccttgttcatgcaccccaggttgcagatgccatccttggaaataaaatgtttactcattacgaccgggcccacattgcccagctctgtgagaaggcaggcctcctgcagcaagcactggagcactacaccgacctctatgacatcaagagggctgtggtccacactcacctcctcaatcccgagtggcttgtcaatttctttggctccttatcggtggaggattctgtggagtgtctgcatgccatgctgtctgctaacatcagacagaaccttcagctgtgtgtgcaggtggcctctaagtaccacgagcagctgggcacgcaggccctggtggagctctttgaatccttcaagagttacaaaggcctcttctacttcctgggctcaatcgtgaacttcagccaagacccagatgtgcatctgaaatacattcaggctgcctgtaagacagggcagatcaaggaggtggagaggatatgccgagagagcagctgctacaacccagagcgtgtgaagaacttcctgaaggaggccaagctcacagaccagcttcccctcatcatcgtgtgtgatcgttttggctttgtccatgaccttgtcctatatttataccgcaacaacctgcagaggtacattgagatctacgtgcagaaggtcaaccctagccggaccccagctgtgattggagggctgcttgatgtggattgttctgaggaagtgattaaacacttaatcatggcagtgagaggacagttctctactgatgagttggtggctgaagtagaaaaaagaaataggctcaagctgctgcttccctggctggagtcccagattcaggaaggctgtgaggagcctgccactcacaatgcactggctaaaatctacatcgacagcaacaacagccccgagtgcttcctgagagagaatgcctactatgacagcagcgtggtgggccgctactgtgagaagcgagacccccatctggcctgtgttgcctatgagcgggggcagtgtgaccttgagctcatcaaggtgtgcaatgagaattctctgttcaaaagcgaggcccgctacctggtatgcagaaaggatccggagctctgggctcacgtccttgaggagaccaacccatccaggagacagctaattgaccaggtggtacagacagcattgtcagaaacacgggatcctgaagagatttcggtcactgtcaaagcctttatgacagccgacctgcctaatgaactgattgaactgctggagaagatagttctggataactctgtcttcagcgagcacaggaatctacagaatctgttgatcctgactgccatcaaggcagaccgcacacgggtcatggagtacatcagccgcctggacaactatgacgcactggacatcgcgagcatcgctgtcagcagcgcgctgtatgaggaggccttcaccgttttccacaagtttgatatgaatgcctcagcaatccaggtcctgatcgagcacattggaaacctggaccgggcatatgagtttgcggagagatgcaatgagcctgctgtgtggagtcagctggcccaagcccagctccagaaagatttggtgaaggaagctatcaactcctatatcagaggggacgacccttcctcttacctggaagttgttcagtcagccagcaggagcaacaactgggaggatctagttaaatttctgcagatggccaggaaaaagggccgtgagtcctatatagagactgaacttatttttgccttggctaaaaccagccgtgtttctgagctagaagattttattaatggacccaacaatgcccacatccagcaggttggagaccgctgttacgaggagggaatgtacgaggctgccaagctgctctatagcaatgtttctaactttgcccgcctggcttccaccttggttcacctcggtgagtatcaggcagcagtggacaacagccgcaaggccagcagcacccggacgtggaaggaggtgtgctttgcctgcatggatggacaagagttccgcttcgcacagctgtgtggtcttcacatcgtcattcatgcagatgagctggaggagctgatgtgctattaccaggatcgtggctactttgaggagctgatcttgctgttggaagcggccctgggcctggagcgggcccacatgggcatgttcactgagctggccatcctctactccaaattcaagccacagaagatgctggagcatctggagcttttctggtcccgtgtcaacatcccaaaggtgctgagggctgcagagcaggcacacctgtgggctgagctggtgttcctctatgacaagtacgaggagtatgacaatgctgtgctcaccatgatgagccaccccactgaggcctggaaggagggtcagttcaaggacatcattaccaaggttgccaacgtcgagctctgttacagagccctgcagttctatttggattacaaaccactgctcatcaatgacctgctgctggtgctttcaccccggctggaccacacctggacagtcagtttcttttcaaaggcaggtcagctgcccctggtgaagccttacctgcggtcagtccagagccacaacaacaagagtgtgaatgaggcactcaaccacctgctgacagaggaggaggactatcagggcttaagggcatctatcgatgcctatgacaactttgacaacatcagcctggctcagcagctggagaagcatcagctgatggagttcaggtgcattgcggcctatctgtacaagggcaataactggtgggcccagagcgtggagctctgcaagaaggatcatctctacaaggatgccatgcagcatgctgcagagtcgcgggatgctgagctggcccagaagttgctgcagtggttcctggaggaaggcaagagggagtgcttcgcagcttgtctcttcacctgctatgacctgcttcgcccagacatggtgcttgagctggcctggaggcacaacctcgtggacttggccatgccctacttcatccaggtgatgagggagtacctgagcaaggtggacaaactggatgccttggagagtctgccgccaagcaagaggagcatgtgacagagcctgcccctctcgtgtttgattttgatgggcatgaatgagacccagctgattgcactaagccctgccgtgggcccagcccctgccagcttcccctatggatatgcctctgctcccaacttcgccagcctccagtgtacaacttccgcgtgtagtgggcgttgtcaccacccaccctacctgcagagttactaacttctccaaggagcatgtcactccagcagcacaggggacgcaatgggaggcagggacacctggacaatatttatttttgctgaaacccaatgacggcaacctctgagccatcccagagcctggggaggccagggtagaggctgacggcgcaagaccagctttagccgacaacagagactggactgtgggccctcctgctggagccaggccttcctcctgggcgcctccgactggctggagctgccccctccaggccagtttgaagactacatgaacacgtcttgtttggaggtaccggacctcataaaaggactctcagcctcttggcaatcataaatattaaagtcggtttatccaggcaaaaaa

SEQ ID NO: 120619 - DNA, 5322 bp, Homo sapiens
attcctgccgctgccgccgccgccgccgaggtcccgcaccagccatggcgcagatcctccctgttcgctttcaggagcacttccagctccaaaaccttggaattaatccagctaacattggattcagcacactgaccatggaatctgacaagttcatatgtatccgagagaaagttggtgagcaggcacaggtcacgatcattgacatgagtgacccaatggctccgatccgacggcctatctctgcagagagtgccatcatgaatccagcctctaaggtgatagctctgaaagctgggaagacacttcagatctttaatattgagatgaagagtaaaatgaaggctcatactatggcagaagaagtgattttctggaaatgggtttctgtgaacactgttgccttggtgaccgagaccgcggtctaccactggagcatggaaggtgactcccagcccatgaagatgtttgatagacataccagtctggtgggctgccaggtgattcactaccggactgatgagtaccagaagtggctgctgctcgtaggcatctcggctcagcaaaaccgtgtggttggagcaatgcagctctactctgtggataggaaggtttcacaacccatagaaggccatgctgcggcttttgcagagttcaagatggaggggaatgccaagcctgccacccttttctgctttgctgtacgtaatcccacaggaggcaagttgcacatcattgaagttggacagcctgcagcgggaaaccaaccttttgtaaagaaagcagtagatgtgttttttcctccagaggcacagaatgattttccagtggctatgcagattggagctaaacatggtgttatttacttgatcacaaagtatggctatcttcatctgtacgacctagagtctggcgtgtgcatctgcatgaaccgtattagtgctgacacaatatttgtcactgctccacacaaaccaacctctggaattattggtgtcaacaaaaaaggacaggtactgtcagtttgtgttgaggaagataacattgtgaattatgcaaccaacgtgcttcagaatccagaccttggtctgcgtttggccgttcgtagtaacctggctggggcagagaagttgtttgtgagaaaattcaataccctctttgcacagggcagctatgctgaagccgccaaagttgcagcgtctgcaccaaagggaatcctgcgtaccagagagacggtccagaaattccagagtatacccgctcagtctggccaggcttctccattgctgcagtacttcggaatcctgctcgaccagggtcagctcaataaacttgaatccttagaactttgccatctggttcttcagcaggggcgtaagcaactcctagagaagtggctgaaagaagataagctggagtgctcagaggagctcggagacttggtcaaaaccactgaccccatgctcgctctgagtgtgtaccttcgggcaaatgtgccaagcaaagtgatccagtgttttgcagaaacaggccaattccagaaaattgtgctctatgccaaaaaggttgggtacaccccagactggatctttctgctgaggggtgtaatgaagatcagtccggaacagggcctgcagttttctcgaatgctagtgcaggacgaggagccgctggccaacattagccagattgtggacattttcatggaaaacagtttaattcagcagtgtacttccttcttattggatgccttgaagaataatcgcccagctgagggactcctgcagacatggctgttggagatgaaccttgttcatgcaccccaggttgcagatgccatccttggaaataaaatgtttactcattacgaccgggcccacattgcccagctctgtgagaaggcaggcctcctgcagcaagcactggagcactacaccgacctctatgacatcaagagggctgtggtccacactcacctcctcaatcccgagtggcttgtcaatttctttggctccttatcggtggaggattctgtggagtgtctgcatgccatgctgtctgctaacatcagacagaaccttcagctgtgtgtgcaggtggcctctaagtaccacaagcagctgggcacgcaggccctggtggagctctttgaatccttcaagagttacaaaggcctcttctacttcctgggctcaatcgtgaacttcagccaagacccagatgtgcatctgaaatacattcaggctgcctgtaagacagggcagatcaaggaggtggagaggatatgccgagagagcagctgctacaacccagagcgtgtgaagaacttcctgaaggaggccaagctcacagaccagcttcccctcatcatcgtgtgtgatcgttttggctttgtccatgaccttgtcctatatttataccgcaacaacctgcagaggtacattgagatctacgtgcagaaggtcaaccctagccggaccccagctgtgattggagggctgcttgatgtggattgttctgaggaagtgattaaacacttaatcatggcagtgagaggacagttctctactgatgagttggtggctgaagtagaaaaaagaaataggctcaagctgctgcttccctggctggagtcccagattcaggaaggctgtgaggagcctgccactcacaatgcactggctaaaatctacatcgacagcaacaacagccccgagtgcttcctgagagagaatgcctactatgacagcagcgtggtgggccgctactgtgagaagcgagacccccatctggcctgtgttgcctatgagcgggggcagtgtgaccttgagctcatcaaggtgtgcaatgagaattctctgttcaaaagcgaggcccgctacctggtatgcagaaaggatccggagctctgggctcacgtccttgaggagaccaacccatccaggagacagctaattgaccaggtggtacagacagcattgtcagaaacacgggatcctgaagagatttcggtcactgtcaaagcctttatgacagccgacctgcctaatgaactgattgaactgctggagaagatagttctggataactctgtcttcagcgagcacaggaatctacagaatctgttgatcctgactgccatcaaggcagaccgcacacgggtcatggagtacatcagccgcctggacaactatgacgcactggacatcgcgagcatcgctgtcagcagcgcgctgtatgaggaggccttcaccgttttccacaagtttgatatgaatgcctcagcaatccaggtcctgatcgagcacattggaaacctggaccgggcatatgagtttgcggagagatgcaatgagcctgctgtgtggagtcagctggcccaagcccagctccagaaagatttggtgaaggaagccatcaactcctatatcagaggggacgacccttcctcttacctggaagttgttcagtcagccagcaggagcaacaactgggaggatctagttaaatttctgcagatggccaggaaaaagggccgtgagtcctatatagagactgaacttatttttgccttggctaaaaccagccgtgtttctgagctattaagattttattaatgggacccaacaatgcccacatccagcaggttggagaccgctgttacgaggagggaatgtacgaggctgccaagctgctctatagcaatgtttctaactttgcccgcctggcttccaccttggttcacctcggtgagtatcaggcagcagtggacaacagccgcaaggccagcagcacccggacgtggaaggaggtgtgctttgcctgcatggatggacaagagttccgcttcgcacagctgtgtggtcttcacatcgtcattcatgcagatgagctggaggagctgatgtgctattacccggatccttgtgttctttgaggagctgatcttgctgttggaagcggccctgggcctggagcgggcccacatgggcgtgttcactgagctggccatcctctactccaaattcaagccacagaagatgctggagcatctggagcttttctggtcccgtgtcaacatcccaaaggtgctgagggctgcagagcaggcacacctgtgggctgagctggtgttcctctatgacaagtacgaggagtatgacaatgctgtgctcaccatgatgagccaccccactgaggcctggaaggagggtcagttcaaggacatcattaccaaggttgccaacgtcgagctctgttacagagccctgcagttctattttggattacaaaccactgctcatcaatgacctgctgctggtgctttcaccccggctggaccacacctggacagtcagtttcttttcaaaggcaggtcagctgcccctggtgaagccttacctgcggtcagtccagagccacaacaacaagagtgtgaatgaggcactcaaccacctgctgacagagaaggaggactatcaggatgccatgcagcatgctgcagagtcgcgggatgctgagctggcccagaagttgctgcagtggttcctggaggaaggcaagagggagtgcttcgcagcttgtctcttcacctgctatgacctgcttcgcccagacatggtgcttgagctggcctggaggcacaacctcgtggacttggccatgccctacttcatccaggtgatgagggagtacctgagcaaggtggacaaactggatgccttggagagtctgccgccaagcaagaggagcatgtgacagagcctgcccctctcgtgtttgattttgatgggcatgaatgagacccagctgattgcactaagccctgccgtgggcccagcccctgccagcttcccctatggatatgcctctgctcccaacttcgccagcctccagtgtacaacttccgcgtgtagtgggcgttgtcaccacccaccctacctgcagagttactaacttctccaaggagcatgtcactccagcagcacaggggacgcaatgggaggcagggacacctggacaatatttatttttgctgaaacccaatgacggcaacctctgagccatcccagagcctggggaggccagggtagaggctgacggcgcaagaccagctttagccgacaacagagactggactgtgggccctcctgctggagccaggccttcctcctgggcgcctccgactggctggagctgccccctccaggccagtttgaagactacatgaacacgtcttgtttggaggtaccggacctcataaaaggactctcagcctcttggcaatcataaatattaaagtcggtttatccaggcaaaaaa

SEQ ID NO: 120620 - DNA, 501 bp, Homo sapiens; identical to SEQ ID NO: 118345

SEQ ID NO: 120621 - DNA, 558 bp, Homo sapiens
atgaatgcaaggccacacaaggtggatgaagagttgtggaaccaaagagagctgtctaagaagattctcaaagaccagacatttgttgctggcattaaagaagacacagaagaacatcacctaagagattattttcaacagtatggaaaaatggaagtgattgaaatcatgactgaccgaggcagtggcaagaaaaggggctttgcctttgtaacctttgacaaccatgactctgtggataagactgtcgttcagaaataccacactgcaaatgaccacaactgtgaaggtaggaaagccctgtcaaagcaagagatggctagtgcttcatccagccaaagaggacatagtagttctggaaactttcgtggtggccatggaggtggttttggtgggaatgacatctttggttatggagaaaacttcagtggtcatggtggctttagtggcagctgtggtggtggaggatatggtagcagtgggggtggctataatgaatttggtaatgatgggagcaacactggaggtggtggaagctacaatgattttggcaattaa

SEQ ID NO: 120622 - DNA, 648 bp, Homo sapiens
atgctggctgcagcgggatgggcagctccaggtgcgagcatgggtgctgactccctgcgaggctatggctggactatgtaccacaagcagcttccacggctggcatcagggaatgcggtggcacctggaatcttgggagaagccagaaactgcagagccccaaagcagacatttgttgctggcattaaagaagacacagaagaacatcacctaagagattattttcaacagtatggaaaaatggaagtgattgaaatcatgactgaccgaggcagtggcaagaaaaggggctttgcctttgtaacctttgacaaccatgactctgtggataagactgtcgttcagaaataccacactgcaaatgaccacaactgtgaaggtaggaaagccctgtcaaagcaagagatggctagtgcttcatccagccaaagaggacatagtagttctggaaactttcgtggtggccatggaggtggttttggtgggaacgacatctttggttatggagaaaacttcagtggtcatggtggctttagtggcagctgtggtggtggaggatatggtagcagtgggggtggctataatgaatttggtaatgatgggagcaacactggaggtggtggaagctacaatgattttggcaattaa

SEQ ID NO: 120623 - DNA, 1119 bp, Homo sapiens
aggacgagggctgaggaagctcttcattggagggttgagcttttaatttattgatgagagcctgaagagccaggttggggaatggggaacgctcacggactgtgtggtaatgagagatccaaacaccaagcgctccaggggctttgggtttgtcacatatgccacttgtggaggaggtggatgcagctatgaatgcaaggccacacaaggtggatggaagagttgtggaaccaaagagagctgtctccagagaagattctcaaagaccaggtgcccacattaacttgtgaaaaagatatttgttggtggcattaaagaagacactgaagaacatcacctaagagattattttgaacagtatggaaaaattgaagtgattgaaatcatgactgaccgaggcagtggcaagaaaaggggctttgcctattgtaacctttgacgaccatgactccgtggataagattgtcattcagaaataccatactgtgaatggccacaactgtgaagttagaaaagccctgtcaaagcaagagatggctagtgcttcatccagccaaagaggtcgaagtggttctggaaactttggtggtggtcgtggaggtggtttcggtgggaatgacaacttcggtcgtggaggaaacttcagtggtcgtggtggctttggaggcagccgtggtggtggtggatatggtggcagtggggatggctataatggatttggtaatgatggaagcaattttggaggtggtggaagctacaatgattttgggaattacaacaatcaggcttcaaattttggacccatgaagggaggaaattttggaggcagaagctctgggccctatgggcggtggaggccaatacttttgctaaaccccgaaaaccaaggtggctatggcggttccagcagcagcagtagctatggcagtggcagaagattttaattaggaaacaaagcttatcaggagaggagagccagagaagtgacagggaagctacaggttacaacagatttgtgaactcagccaagcacagtggtggcagggcctaactgctacaaagaagacatgttttagacaaatactcatgtgtatgggcaaaaaactcgaggactgtatt

SEQ ID NO: 120624 - DNA, 1515 bp, Homo sapiens
atgcagggaccaagaaacccagcccagtacctcatcatggaccacacagctcgtggggacactgggaatccactgctcttgggttctggtggcagtggagagtggcagccaccccaagctcctttgaacactttcagcatcactagtggcactttgtacgggtcccatggtgttattcaaagtttatggtattgcattagctacgatgaaagaaatgaacgcagctcctcatcagcaatggaacaaagctggatggagaatgactttgacgagctgagagaagaaggcttcagacgatcaaattactccgagctacgggaggacattcaaaccaaaggcaaagaagttgaaaactttgaaaaaaatttagaagaatgtataactagaataaccaatacagagaagtgcttaaaggagctgacggagctgaaaaccaaggctcgagaactaccaccacaccatacctattccaaaattgaccacatacttggaagtaaagctctcctcagcaaatgtaaaagaacagaaattataacaaactatctctcagaccacagtgcaataaaactagaactcaagattaagaatcccattcaaaactgctcaactacatggaaactgaacaacctgctcctgaatgactactgggtacataacgaaatgaaggcagaaataaagatgttctttgaaaccaacgagaacaaagacacaacataccagagtctctgggatgcattcaaagcagtgtgtaggggaaaatttatagcactaaatgcccacaagagaaagcaggaaagattcaaaattgacaccctaacatcacaattaaaagaactagaaaagcaagagcaaacacattcaaaagctagtagaaggcaagaaataactaaaatcagagcagaactgaaggaaatagagacacaaaaaacccttcaaaaaattaatgaatccaggagctggttttttgaaaggatcaacaaaattgatagaccactagcaagactaataaagaaaaaaagagagaagaatcaaatagatgcaataaaaaatgataaaggggatatcaccaccgatcccatagaaatacaaactaccatcagagaatactacaaacacctctatgcaaataaactagaaaatctagaagaaatggataaattccttgacacatacaccctcccaagactaaaccaggaagaagttgaatctctgaataggccaataacaggctctgaaattgtggcaataatcaatagcttaccaaccaaaaagagtccaggaccagatggattcacagccaaattctaccagaggtacaaggaggaactggtaccattccttctgaaacaattccaatcaatagaaaaagagggaatcctccctaactcattttatgaggccagcatcatcctgataccaaagccgggcagagacacaaccaaaaaagagaattttagaccaatatccttgatgaacgttgatgcaaaaatcctcaataaaatactggcaaactga

SEQ ID NO: 120625 - DNA, 3677 bp, Homo sapiens
atgagcttctcactcacgttcaccgagctggccaacatcgccatcccacagtgcggggtgctgaacttcaaggccctgcacctcctgctgcacggcatcttggagcacatccacatggccgagctcaagaaagtcctctcaggcgatgaggacttcctgcagacctcgcaggtggtcatcatgcccagggaaggagacgcccagcctatcctcaaccccatgaagaggctcagcaatgtcttcgaccacgtggtgagccgcctcgacaagttggagaaccagctggccctgctgcaggacctgccctccactgcccagctgctggaagccagccagggcactgcccggcccgtccaggacctgtggcatctgatcaagctccggaagatggtggagggtcatgatgaagtcatggccaagtcaatgcagaccctgcaggacttgctcactgatcttcatgcactccaggtcaccatcacagccctcagaaaagaagtggacatgctgaagaacatgcttgacaaggtacacccagaaagaatggacatctttgctgaagacttcaaaatacagaactggaagatggttgcactgcagcgggaagtggcttctctccagaataagtttaaaaccatccccaaaaccgaggacatggtgctctggagtggccttcatgatgccatgttcacctcagaaattggttcatcaccactggacctgtggcagtctgtagagcagctcccagaggctgccctggcccagaccaccaagtaccttgaagctactcgtgccgtccaggtctccgagcccgtccaaaacccccagctactgcagactgtctggcattatgagccatatcagtctcgccagggagaagccctccagctcgcagctgtccaagtaaagggggaggaaaatgatgtccccagcctaaggggccttcgggagagggcccgcaaggatggggcccccaaggatagaactcgcaaggttggggtccccaaagatagaggtggcaaggatgtggaccccaaggatagagctcacaaggatgatgtccccaaagatagaggtggcaaggatgtggaccccaaggatagagctcacaaggatgatgtccccaaagatagaggtggcaaagatggggaccccaaggatagagttggcaaggatggggcccccaaggaagcacagcctaaggctccccagtctgcccttcaccggctgaaaaccaccgctgccatcgccgccgctgccgccgcagcctacgccgctgccacatcctccgctgcccaggcagccaaagttgctgccaagtttgtcaaggatgccccagccaccaaaatggccgccattgcaacagacacggctgcagctgggcccctaggggtctttgcagatgtcctgggtgcagggccttcccggggagccacagaatcccagatcttgggcgatgattccgaaatctacgaaatcctctctccctcctactctgctgccagcatcggtcccgatccagccctgtcccaggccatggtggctaccaagcaggccatgagccctgaagacaagaagagggctgtcaagtattccatgagccacatagcccagatacctgtcaaacacgactctctgaaggaagaatttgcccagctgtcctgtaacctgaaccagcgcttgagttatctaggtgcagctgtgttctgcagcaaaacaggctgggggaaagcgagctggctgcgaaggcagctgctgcctctcaaagctgattcactggtgcgggggggggcccagcaggtgtggggctacacggttctgtgtctcaggtggctgttcagacggcaggaggaagaacttgagagaatttggggcaaccaaatagagatgatgaaggatcgctacatcactttggacaaggcggtggagaacctgcagattcgcatggatgagttcaagactctccaggctcaaatcaaaagactggaaatgaacaaggtgaataagagcacgatggaggaggagctgagagagaaagctgacaggagtgccctggcaggcaaggcaagccgcgttgacctggagactgtggccttggagctgaacgagatgattcagggcatactcttcaaggtcacgatccatgaggacagctggaagaaggctatggaggagctcagcaaggacgtgaacaccaagttagtccacagtgatctggatcccttgaagaaagaaatggaagaggtctggaaaatcgtccggaagctgctgattgagggcttaagactggatcctgacagtgctgctggctttaggaggaagctgttcaagcgcgtgaagtgcatctcctgtgaccggcctgtggagatgatgactggcccacagctgatcaccatccgcaaagcccacctgctgtcccggctgcggccagccagcgccaacagctgcgagtacttgcagcggcaacagatgagggaacagcagtggctgcagctccaggacctcggtatccaggaggattgtcagcaggactggggtgatggcccccaaaacgccaccagcctcaagtgcaagtcctgcaacctgttgacgctctatccctacggggatccccacgtgatcgactatgacagcgccgaggtggacatcctgggcgtggatgggatcctgtacaaaggccgcgtgaacagccagcgtggggctcagcccttggccgtcgcaaaggagctggcagctgtgaaggctccatctcccccgtcacaaagcctgtatgaccgtgtgcactccagtgccctatttggcgccatctgcccccccctgtgcccccgctccagtgcctgctcagctgcctcgggccctcacctgacgatgccagctcgaccaccttccctgccacctctgctgctgctgccaccgctgattccatccctaagggacccccagcaggccccagggtccaccaggctctcaagagctccacacattgagtcccgagtcggcaggaagccccccgaggagcccgccaacccgaccatgaactcattaacactaagggataaacaacagacgccagcacgtgtgttggaaaagggcactgtgagtacccgaaagtggactgcccagggctctgttgaaatacatccgttgtccaaatatgagcagtgctcaaaaacccagagaactttccaaacgcaggaattagaagtagccttgtgtcaaaagaactccattccggccaacctaggaggtctcccgtattcggggaagaagaccggagtcaaaggactcatctgtcctgtgccagggactgctgtgaaagcccctcagagacctccagggccacagcagccccacccagccccgcagtcagcctcggagacagcctggttccctgtggctgaccgcagggtgttctcagagaaccctggctggaccgctgcaaagaccctggggacactcagcagcccctgccaagcaggggcaggggtgggccgacaggatggggacccaggccaggaactaacttcacaggaaaagccctgggtgggcaggaagattccagagcacgctgtggctgacaagggctacaggcagcagtgtggagccggggaggctcggggtggccctgtcttctgggcggcggcccccagaaccagctggcagcaagcctcgtatacaag

SEQ ID NO: 120626 - DNA, 669 bp, Homo sapiens
atgacacaggccctggaagaaatctcaggccacccagccttctctgaatctacaccaaccaaatgtttttctgtcacttgcatccacaaaagtcctgacaaggatagcaccttgaaggccccgcagcagcagctgccccttatgtgcgccaactcagcgtggccatccacagacgagccagcactacgctgcacgcgggccctccttcagcttcctcagcaaaccctcaccaaaggccccctggcgggtccagtgccaagtccgggacagagagatgatgaggatcgctacatcactttggacaaggcggtggagaacctgcagattcgcatggatgagttcaagagagacccaggccaccatgtcctggggtcatcttggtgccctttctccatggagctggagccagttccattcagcatgtccatcgtgcacccagcactacgccagaccctgcatgggggtctggcccacctggggtttattggcaatgcagcagctgattttgtgagactgctgaactttgacctggaccggggcgtgtttccagtagtcatccaggctgtggtggacgaaggagatggtgagtgcgtcctcttccgtcctcctgggcgtgcaggccgtgcagggaggaagcacgtcttgagggaggagtgcttgcagcagtga

SEQ ID NO: 120627 - DNA, 3650 bp, Homo sapiens
cggcggccgcggatcccggcggcgatccgacctcgcagtctccccaggtccgccagcagccggttcagccagaatactgggatcttcagtggcaggaggagtaatcagaagacggagatgaattttaacactattttggaggagattcttattaagaggtcacagcagaaaaagaagacatcgcccttaaactacaaagagagactttttgtacttacaaagtccatgctaacctactatgagggtcgagcagagaagaaatacagaaaggggtttattgatgtttcaaaaatcaagtgtgtggaaatagtgaagaatgatgatggtgtcattccctgtcaaaataagtatccatttcaggttgttcatgatgctaacacactttacatttttgcacctagtccacaaagcagggacctgtgggtgaagaagttaaaagaagaaataaagaacaacaataatattatgattaaatatcatcctaaattctggacagatggaagttatcagtgttgtagacaaactgaaaaattagcacccggatgtgaaaaatacaatctttttgagagcagtataagaaaagcactacctccagcaccagaaacaaagaagcgaaggcctcccccaccaattccactagaagaagaagataatagtgaagaaatcgttgtagccatgtatgatttccaagcagcagaaggacatgatctcagattagagagaggccaagagtatctcattttagaaaagaatgatgtgcattggtggagagcaagagataaatatgggaatgaaggatatatcccaagtaattacgtaacgggaaagaaatcaaacaacttagatcaatatgaatggtattgcagaaatatgaatagaagcaaggcagagcaactcctccgcagtgaagataaagaaggtggttttatggtaagggattccagtcaaccaggcttgtacacagtctccctttataccaagtttggaggagaaggttcatcgggttttaggcattatcatataaaggaaacaacaacatctccaaagaagtattacctagctgaaaaacatgcttttggctccattcctgagattattgaatatcataagcacaatgcagcaggacttgtcaccaggcttcggtacccagttagtgtgaaagggaagaatgcacccaccactgcaggattcagctatgagaaatgggagattaacccttcagaactgacctttatgagggaattgggaagtggactgtttggagtggtgaggcttggcaaatggcgagcccagtacaaagtcgcaatcaaagctattcgggaaggtgcaatgtgcgaggaggactttatagaagaagctaaagtgatgatgaagctgacacacccgaagttagtgcagctttatggtgtgtgcacccagcagaaaccaatatacattgttactgagttcatggaaaggggctgccttctgaatttcctccgacagagacaaggtcatttcagtagagacgtactgctgagcatgtgtcaggatgtgtgtgaagggatggagtatctggagagaaacagcttcatccacagagatctggctgccagaaattgtctagtaagtgaggcgggagttgtaaaagtatctgattttggaatggccaggtattttctggatgatcagtacacaagttcttctggtgctaagtttcctgtgaagtggtgtccacctgaagtgtttaattacagccgcttcagcagcaaatcagatgtctggtcatttggtgttttaatgtgggaagtattcacggaaggcagaatgccttttgaaaaatacaccaattatgaagtggtaaccatggttactcgaggccaccgactctaccagccgaagttggcgtccaactatgtgtatgaggtgatgctgagatgttggcaggagaaaccagagggaaggccttctttcgaagatctgctgcgcacaatagatgaactagttgaatgtgaagaaacttttggaagataagtgatgtgtgaccagtggctcccagattcccaagcacaaggaaggatgggcattttgtggcttttaatttattgagcacttggacatgtagatcattttacttatacagtggaaacacataaataatttgcttctagaccagcctctgtctagacttgcttctagacagaatctcccagagtgtggaaatgttgccttagaaatggtgattaaaatcactcatttctattcattcctcaggcacttgagtgacagttgtttaccaggcactgtgtgtagccccagggtttggccattcaggggtgcacacatgggaccatgttagctgatgccagttgaaggccagggtatttgggaaggggaagggtattagagtcatgaccaagcaacccttctttttccctttgacttctacagaaatctgggcctgagacattgtctacaattgggttctagatacatcaggaacccatcttggataaataaatacctatcttttgttttgaaaacatctcagttttcaagactgctcttagtattacatgaacaatatttgtatgctgtatatattgtaaatatatataatatataaagttatatatttatgagaaacacgaattgtcttttaattgaaacttttaatcctgtagtataggagttcaccttcttaggactagagactgtgccttatagctgttaattcatttccccctgaacatcaaatatgcctgaagagaagaaagtctagattcttctatgagtaacgccccctcctcactcaggtaaatgtgtctggggatgcctgtccagcttaaccacgtgcatttggcctatgtaatcctgcccatggtggccgcagctaatcagaatcagatggaaaattaaaccgggtaatctacttctaagccttaagaatattccctgggacacagacactataattggaagtgctgagctctggggcagaaggatcaggtgaccttcgcaacaaagtttgcccccacctcacataggacccggaagcagcctgagctgtggcggaggatccaggaagctacggagagaagcagccagcatggtgttccgtgcctcccggacgtttttcaggaggcctggttggacttgggttcctggatggtgggattgttgtacagcctctcaggagaccctgctgtcaagactgtgtgtgtggatttcccacccttagaagctctactaagacatcaacggaattagggccttcctttttgccttgtgagcgccaaggaaaagaaactatctcggtcacgtgagcgccacgaaagaaactgtatcagtcatccagagaccgtttattgcccaacacgttattcttgctgttggtggggtaactagccgaggaagacacagcgccttcccttcaggagttgcgtctcctctgcaggccacgatggtctgctctggagcattgggtgaacacacaggctggctgctctgggcagcgccttcactctgaccctggagaaccatttcatttcatcctggtcagtctagagtctgtgcaccaggcagtccatccactgaaggctgtgtttattcttttcctgtgcccctcataatggaagaaagtaaactgcttatcccgagccttaaaaaaa

SEQ ID NO: 120628 - DNA, 665 bp, Homo sapiens
atggacccccacaaagtgaacgagctttgggcctttgtgaaaatgtgtaagcaggatccgagcattctgcacaccgaggaaatgcatttcctgagggagtgggtggagagcacggtgggtaaagtaccacctgctactcagaaagctaaatcagaagaaaataccaaggaagaaaaacctgatagtaagagggtggaggaagacttaaaggcagacgaacaatcaagtgagaaaagtgatctagaaattgataaagaagagataatggaggagatgatggatcaggcaaatgataagaaagtggctgctattgaaaccctaaatgatggtgaactccagaaagccactgacttattcacagatgccatcaagctgaatcctcgcttggccattttgtatgccaagagggccagtgtcttcgtcaaattacagaagccaaatgctgccattcgagactgtgacagagccattgaaataaatcctgattcagctcagccttacaagtggcgagggaaagcacacagacttctaggccactgggaagaagcagcccatgatcttgcccttgcctgtaaattggattatgatgaagatgttagtgcaatgctgaaagaagttcaacctagggcacagaaaagtgaagaacatcaaagaaagtatgagtg

SEQ ID NO: 120629 - DNA, 1121 bp, Homo sapiens
ccagctccacttttcctcggatgccatggagactcgtaaccagctggacagcatacatcccagagctggaggggagcacaagcgaccctgactcacctgccgttgctcagaagggagagaaacctgtgaaactcggaaattccctctgggggagtcacactgagccagtgcctaggcctggaaccgggccacggcccctcagcttcgtccaccgcctcccgaccatggacccccacaaagtgaatgcacttcgggcttttgtgaaaatgtgtaagcaggatctgagcgttctgcacaccaaggaaatgcacttcctgagggagtgggtggagagcatggggggtaaactatcacctgctactcagaaagttaaatcagaagaaaataccaaggaagaaaaacctgatagtaagaaggtggaggaagacttaaaggcagacgaaccatcaagtgaggaaagtaatctattaattgataatgaagatgtgattgaaccagaccctgatgcccctcaagaaatgggagatgaaaatgcagagataacagaggagatgatggatcaggcaaatcataagaaagtggctgctattgaagccttaaatgatggtgaactgcagaaagccattgacttattcacagatgccatcaagctgaatcctcagttggccattttgtatgccaagagggccagtgtcttcatcaaattacagaagccaaatgctgccatccgagactgtgacagagccgttgaaatttatttcagctcagccttacaagtggcgagaaagtatgagcaaaaacgtgaagagcgagagatcaaagaaagaatagaaagagttaagaaggctcgagaagagcaagagagagcccagagggaggaagaagccagaggacagtcagtagctcagtatggctcttttccagatggacttccggggggaatgcttgaaatgagagggggcatgcctgggaagcccggaataactggactcaatgaaatttttagtgatccagaggttcttgcagccgtgcaggatcccaaagttatggtggcttcttccaggatgtggctcaaaacccagcaaatatgtcacaataccagggcaacccaaaggttatga

SEQ ID NO: 120630 - DNA, 3292 bp, Homo sapiens
gaccggaggcaggaggggagagagagagagagagagcccagagggaggaagattccacacgacagtcaagagctcagtatggctcttttacaggtggctttcctgggggaatgcctggtaattttcccggaggaatgcctggaatgggagggccttctgcgcggtcacgccgagcacagcgcctgagcctggaaccggaccgtagcccccccagttacgcccaccacctccctaccatggacccccgcagagtgaacgagcttcgggcctttgagaaaatgtgtaagcaggatccgagcgttctgcacaccgaggaaatgcgcttcctgcagggagtgcgtggagagcatgtgtggaaaagtaccacctgctactcacaaagctatgtcagaagaaaataccacggaagaaaaacctgatagtgagaaggcggaggaagacttacaggcagactgaaccatcaagtgaggaaagtgatcttaggaaattgattaaagaaggtgtgattgaaccagacactgatgctcctcaagaaatgggagatgaaaatgcggagataccggaggaagatgatggatcaggcaaatgataaaaaagtggctgctattgaagccctaaatgatggtgaactccagaaagccattgacttattcacagatgccatcaagctgaatcctcgcttggccattttgtatgccaagagggccagtgtcttcgtcaaattacagaagccaaattgctgccatccgagactgtgacagagccattgaaataaatcctgattcagctcagccttacaagtggcgggggaaagcacacaggcttctaggccactgggaagaagcagcccatgatcttgcccttgcctgtaaattggattatgatgaagatgctagtgcaatgctgaaagaagttcaacctagggcacagaaaattgcagaacatcggagaaagtatgagcgaaaacgtgaagagcgagagatcaaagaaagaatagaacgagttaagaaggctcgagaagagcatgagagagcccagagggaggaagaagccagacgacagtcaggagctcagtatggctcttttccaggtggctttcctgggggaatgcctggtaattttcccggaggaatgcctggaatgggagggggcatgcctggaatggctggaatgcctggactcaatgaaattcttagtgatccagaggttcttgcagccatgcaggatccagaagttatggtggctttccaggatgtggctcagaacccagcaaatatgtcaaaataccagagcaacccaaaggttatgaatctcatcagtaaattgtcagccaaatttggaggtcaagcgtaatgtccttctgataaataaagcccttgctgaaggaaaagcaacctagatcaccttatggatgtcgcaataatacaaaccagtgtacctctgaccttctcatcaagagagctggggtgctttgaagataatccctacccctctcccccaaatgcagctgaagcattttacagtggtttgccattagggtattcattcagataatgttttcctactaggaattacaaactttaaacactttttaaatcttcaaaatatttaaaacaaatttaaagggcctgttaattcttatatttttctttactaatcattttggatttttttctttgaattattggcagggaatatacttatgtatggaagattactgctctgagtgaaataaaagttattagtgcgaggcaaacataactcatttgaggataaagtttgtgttggatatgtggttcctgatgcattttgacttgtctttttaaatgctttatctttttctttaaagatttatttcaataaaactaattgggaccacccgtatttcagtaggacctgggtagggattggaagtacttggcagggcagcagcaatcttgctgtgtttgatataacatgcatccttgggcaggttgcccttaaatcttacactgtggtgaagggatgttttttttgtaatgctgcagtagagttggagtacttagttctcttgttgtccagtatatctaataagtgtttttcatattatttccacgtaagggaaataaggtagtacttttctttttatatttctatgcttaaaattctctttcctagtcaaaaattgcccaaatctgtgtttgctttctgcttgctacatttgtctcccttacttttcttgagctaaagacaggctttttccaccggcatcatcactgctatcatcattaacagcgtaattatacaagcatatttaatgctgagtttaatttaatatgtaatacatatggtaattgtagggtaatacccacaacaactgtagtttcttacttggccaagagaatgcttatttaagtgttagacttccattctggcaaaatcttgccttatcagaagacattggaaagagggattccctttggtgtttggtcttctacttagaaaaacctattgcagttagtttatcttgtagtattcatctttgtattctgaagataaggtttgaattaaattgatacacacagaggggaaccgattttttttatccaatgtgaattataaatgagataatccacagttattcattgtggagttgttgagactatgaaagactcattgtctttgtattcagctcttaaatagtgtaactatatccccacctctgcttgctttctttccctcccctccaatgataaagaaaatgataaattttctgttgtgcattcaattcttattttaaataagactaagtataggcattgtacctgacattgctacgtttctaccagtgtttcaatttaaagtgctagtgtttaaaaacattttcaagggataaggccttctgtactttgcttatttgaagaatcagtggtaggagcagtgaagtaaattctatggagtacatttctaaaataccacatttctgaaatcataaataagtttattcaggttctaaccctttgctgtacacaagcagacagaaatgcatctgttacataaatgagaaaaagctattatgctgatggagcatgctttttaaatcctttaaaaacactcaccatataaacttgcatttgagcttgtgtgttcttttgttaatgtgtagagttctcctttctcgaaattgccagtgtgtacttggcttaactcaagaacagtttcttctggattccttatttgatttatttaacctaattatattctaatattgcaaatattaccataagtgggtaaaagtaaaattcctcttctg

SEQ ID NO: 120631 - DNA, 433 bp, Homo sapiens
cggcccccctttgaatctatctagtccgcgtggtggaattctgaagacgtacgggtgcgagctctgcgggaagcggttcctggatagtttgcggctgagaatgcacttactggctcattcagcgggtgccaaagcctttgtctgtgatcagtgcggtgcacagttttcgaaggaggatgccctggagacacacaggcagacccatactggcactgacatggccgtcttctgtctgctgtgtgggaagcgcttccaggcgcagagcgaccttgcagcagcacatggaggtccacgcgggcgtgcgcagctacatctgcagtgagtgcaaccgcaccttccccagccacacggctctcaaacgccacctgcgctcacatacaggcgaccacccctacgagtgtgagttctgtggcagctgcttccgggatgagag

SEQ ID NO: 120632 - DNA, 690 bp, Homo sapiens
atgatcctgagccttttagcccacggacaacactcagtcaatgtgcaggcagctggggagtcgtggaaagagcactggcccatcagccctctcgctgcttctaaccgcttgctgctgctgttggtccccatgtgtgcccagagtcactggcttcaaacacagctgcactgcaccattcctctgtctgatcctcccaccggccatgtttcctcctggcccagagtgttcacagacactattccatcttccggattccgccattcacctggtgttctgggcactgacatggccgtcttctgtctgctgtgtgggaagcgcttccaggcgcagagcgcactgcagcagcacatggaggtccacgcgggcgtgcgcagctacatctgcagtgagtgcaaccgcaccttccccagccacacggctctcaaacgccacctgcgctcacatacagaacaatcccaatccacgatggagattgaggagttgctggaagaaataggagggacaccagaagagtgtggtgtcatggaagctaaaggaagaggtttcaaaaagaaaaaagcacgggtgctgcttactactgatttatacgggcaggcgtcctgcgggctccaggcttctctgccacagctggcggaggtgcttaaggccttggaccccgtgacctttgccctagtcctgctgtcattttga

SEQ ID NO: 120633 - DNA, 934 bp, Homo sapiens
atttagcccctccggcagtgttgttcccttgacagagagacacagagccagaagtgagtctcctgggagaatggatgagcctaagcaacccagctcccaggtagaagagtcagcaatgatgggagtaagtggctatgtggagtatctccgagagcaggaagtatctgagcggtggttccggtacaaccctcgtctcacctgcatctattgcgccaaatctttcaaccagaagggaagcctggaccgccacatgcgcctacacatggggatcacaccattcgtctgccgcatgtggggcaagaagtatacccggaaagatcagttggagtatcatatccgcaagcacacaggcaacaagccctttcactgtcatgtctgtggcaaaagtttccccttccagactgaaacatccagggggagggggctgaccctcttcccctttgagccataagcagccagcatcagagccatgggctgatacttagattcacaaaatgccacatcaataggccagaagatgctcccaagatgttgccaaactggaggatcagcaacttacacaaaagcactaaaggctcctcccttcttattgcccgcctcacactttggaaaataatcaagcaaatcaactttctaattcagggatcaacagccttggtttgttaactttataagaaaaaaggttttttaacaaaacgatgatgataaatggtcatttatctatcagtcatgtttgaacactgtactttggtccatatcatcttggtggctataattgcccggatctaaaaaatgcagcaggagcctcaaccatccgaagcagccaaccgcaagagaggaggtagtcatgatggtgatgaggaggagaaatttctcctcttccttccctggcataacatgcatttttgtgtttcaagaaaaaaaaaaaaaaaaa

SEQ ID NO: 120634 - DNA, 1125 bp, Homo sapiens
atgctgagcgctagtcccctgggcccactgttctttctctatactttgtctctgtgtcttatttcttttctcagtctctcgtccaacctgatgagaaggcggcgggattacagggggagtgggccgtgcggcgagatactgagggtgcaggtctcctctagaggatcccccgttggcgtggctgatgcactttccaaacgcctggtcagtagcgtacttaacgccgcagtggtagaaggcgagcccattcatcttcgctgcttcgaatccacccacgaaatgctgctggagcaattaagtcagcataaactggatatgatcatttctgactgtccgatagactctacgcagcaggaaggcctgttctccgtgagaattggcgaatgtggcgtgagtttctggtgtacaaatccaccaccagaaaaaccgttcccggcttgtctggaagaacggcgacttttgattcctgggcgacgttcaatgttagggcgcaaattgcttaactggtttaactcccagggattaaacgtagaaatcctcggcgagtttgatgatgccgctttgatgaaagcttttggtgcgatgcacaatgcaatcttcgttgccccaacgctttatgcatatgacttttatgccgataaaactgtcgtagaaattggtcgcgtcgagaatgtgatggaagagtaccatgctatttttgctgagcggatgattcagcacccggcggcagtacagaatggttttcggcagcaggttttcttcattctgcttgctcagcaacttagacagctcttccgccatcggacggtcgttgatggagtcaaagcctacatccggccccagcagtttgaactgacgcaggttgttattacgcagcgcgccaatgtggtactgctgtacccagccgcgacgtgcatattcggcaccaaggaacaccagtaccgcagttttgaactgcgccacttcgtgctcgctcagggtttcgccagccagacggcgcgccagaatgctgtccagttccgcttcgttcgcttcagcaaacatcaccacatccagcgcgtggtcagacactttacagccgtgagcggcgaagtgatccagacgtttggtcagggcagtttgcag

SEQ ID NO: 120635 - DNA, 684 bp, Homo sapiens
atggcggcccccttggaactcagttgctggggaggcggctggggactcccatcggttcacagcgagtccctggtggtgatgaaatataatgctgattatgaactctcagcaaaacaaggggcagatacattggcttatattgctctcctcgaagagaagcttctccctgcagtggtgggacgagagactgagaaaagaagtaagacacagagacaaagtatagagaaagaacagtgggcccagcagactggcgctcagcatacggaggacctgcaccagcaccggtctctgagttccctcagtttttattattattttcactatctcagcaagaggaatgcagtaggagagcagggtgataatagggagaaggtcagcaagaaaacatggcctcagggctttcatgagaaactcaatgcagtggaaagccagaagggtgttaagtggggagtgaggagtgatgccatcaggcctgttttgggaaagcacttctgctgttgtgtagaggtaactgcaggaagccaagcccttgtggagagactcagtaagagactcttgcaacattccaggtgtcaaagagttcactgcagaagcagcagcagacatgaaaaggagatgaattttagatctattttgctggtagaattgatagaatttggtaatagatggaatatacaagagtag

SEQ ID NO: 120636 - DNA, 486 bp, Homo sapiens
atgctgctgctggctgccgccttcctcgtggccttcgtgctgctgctgtacatggtgtctccgctcatcagccccaagcccctcgccctgcccggggcgcatgtggtgggttcccggggccccaggggttctgtggctgctcgtgaatccatgcaacatccctgggatgtggatgttttgtcctcagtttttccgatgagtcaactgaggcacagagaggctgagaaactttgccaaggacacagcggtcggtgtgggaaggatgagctaaacgacaaggcttgtgtgcgaggaatgaaggagaggtggataggtgtgatttatttcttggcggaagctcgcatattcagcgatccctgttctgcaaatgtggcacctttcttaaacagagagaatgcctccttgcctgcgcccagcactttcccgtttgcagtggctttctcacgagcattctcgtttggatctcccaaacccgaggcacagtga

SEQ ID NO: 120637 - DNA, 273 bp, Homo sapiens
acgcggggtccctggtgtgattccgtcctgcgcggttgttctctggagcagcgttcttttatctccgtccgccttctctcctacctaagtgcgtgccgccacccgatggaagattcgatggacatggacatgagccccctgaggccccagaactatcttttcggtcagtttaggggctggtgcaaaggatgagttgcacattgttgaagcagaggcaatgaattacgaaggcagtccaattaaagtaacactggcaactttgaaaatgtctgt

SEQ ID NO: 120638 - DNA, 681 bp, Homo sapiens
atggaagattcgatggacatggacacgagcaccctgaggccccagaattaccttttcagttgtgaactaaaggccaacaaagatgatcaccttaaggtagataatgatgaaaatgagctcaagttatctttaaacacagtcagtttagtggttggtgcaaaggatgaattgcacactgttgaagcagaggcaatgaattacaaaggcagtccaattaaagtaacactgtgtggctcaggaccagtacatattagtggacagcacttagtagctgtggaggaagaggcagagtcaggagatgaagaggaggaggatgtgaaactcttaagtatatctggaaagcaatctgccccagggggtggtagcaagtttccatggaaacaagtaaaacttgctgctgatgaagatgatgatgatgatgacaatgataattttgatgatgaggaaactgaagaaaagtctatactcacttttttggttattctgacctatgctatatggttggcccttgaacaacatgagtttgaactgcatggtccatttatatgtagattttcttctacctctgtcacccctgaaatggcaaaaccaatccctcttcttccacctcctcagtctactcaacatgaagacaatgaggatgaagaactttatgatgatccacttccacctagtgaatag

SEQ ID NO: 120639 - DNA, 634 bp, Homo sapiens
ggctggggaggtcttgcaatcatgagggaaggcaaatgggaagcaaagtcatgtcttatgtggtggcgggcagggggacttgtgcacaggaactcctatttatacaaccatcagatatcttgagacaagaacagtatggggctccctggtgtgattccgtcctgcgcggctgttctctggagcagcattcatttatcttcgtctgccttgtctcctacctaagtgtgtgtcgccacccgatggaagatttgatggacatggacatgagccccctgaggccccagaactatcttttcagttgtgaactaaaggccgacaaagatgatcactttaaggtggataatgatgaaaatgagcaccagttatctttaagaacggtcagtttaggggctggtgcaaaggatgagttgcacattgttgaagcagaggcaatgaattacgaaggcagtccaattaaagtaacactggcaactttgaaaatgtctgtacagccaacggtttcccttgggggctttgaaataacaccaccagtggtcttaaggttgaagtgtggttcagggccagtgcatattagtggacagcacttagtagctgtggaggaagatgcagagtcagaagatgaagaggaggaggg

SEQ ID NO: 120640 - DNA, 479 bp, Homo sapiens
  misc_feature (1)...(479): n = a,t,c or g
naatgttccgccaagactgccatccgtggagtctcggaatgccttatccaccatcatggtattccacacagcactgcctctgaccaaggcactcactttacagctaaagaggtgtggcagtgggcttatgctcatggaattcactggtcttaccatgttctccatcatcctgaagaggctgcaaagaacggtggaatggccttttgaagtcacaattacaatgccaactaggtgacaacactttgcagggctgaggcaaagttctccagcaggccgtatatgttctgaattagcatccaatatacggtactgtttctcccatagccaggattcacggtccaggaatcaaggggtgaaactgaactgacaccactcaccatcacccctagtgatcccctagcaaaatttttgcttcctgttcccccgacattacattctgctggcctggagatcttagttccagagggagaaatacgaaa

SEQ ID NO: 120641 - DNA, 1542 bp, Homo sapiens
atggtgggaaaagccaaatggaagccattagagctgcctctacctagaaaaatggtaagtcaaaaacaatatcgcatccttggagggactgcagagattagtgtcaccatcaaggacttgaaagacgcaagggtggtgattcccagcacatccccattctactctcctatctggcctgtgcagaagatagatggatcttggagaatgacagaggattatcgtaagcttaaccaagtggtaactccaactgcagcagctgtaccagatgtggtttcattacttgaacaaattaacacatctcccggtacccggtatgcagccattgatttgacaaatgcttttttctccattcctttccataaggcccaccagaagctatttgccttcagctggcaaggccagcaatatacctttactgtcctaccttggggggatatcaactctccagctctgtgtcataatcttattcggagagaccctgattgcttttcacttccacaagatatcacactggtccatcacattgatgacattatgttaactggatccagagagcaagaagtagcagacacacgggacttcttggtaaaggataagttgctgcatttggcccctcctacaaccaagaaacaggcacaacacctagtgggcctatttggattttggaggcaacatattcctcttttgggtgtattactccagcccatttatcgagtgactcaaaaggttgcgagttttgagtggagtcaagaacagaagacggctctgcaacaggtccaggctgctgtgcaagctgttctgccacttgggccatataacccagcagatccaatggtgcttgaggtctcagtggcagatagggatgctgtctgcagcctttgtcaggcccctataggtgaatcacagtggaggcctctaggattttggagcaaggccctgccatcttctgcagataactactctccttttgagagacagctcttggcctccataaagtgggtcatgcacagcagcattccatcagcaaatggaagtgatacatacacgatcgggctcaagcagactaccatccgtggactcgaggcatgccttatccactgtcagggtattccacacagcattgcctctgacaaagacgctcactttacaactaaagaagtgtggcagtggactcatgctcatgaaattcattggtgttaccatgttctccatcatcctgaagcagctggattgacagaacgatggaatcgccttttgaagtcacaattacaacgccaactaggtgacaatactttgcagggctcgggcaaagttctccagaaggccatgtatgctctgaatcaacatccaatatatggtactatttctcccatagccaggattcatggatccagtaatcaaggggtggaagtggcaccactcaccatcacccctagtgatccactagcaaaatttttgctttgtgttcccacaacattacgttctgctggcctagatgtcttagttccagagggaggaatgacacaacaacaattccattaa

SEQ ID NO: 120642 - DNA, 636 bp, Homo sapiens
atggggagaaaccagagcagaaaagctgaaaattctaaaaattggagtgcctcttctcctccaaaggatcacagctccttgccagctatggaacaaagctggatggagaatgactttgatgagttcacagaagtaggcttcagaaggtcggtaataacaaacttctctgagctaaaggagcatgttctaacctattgtaaggaagctaaaaacgttgaaaaaaggatttacaggtccaggaaccaagggatggaagtgaaagtggcaccactcaccatcacccctagtgatccactagcaaatttttttgcttctgttcccgcaacattacattctgctggcctagaggtcttagttccagagggaggaacactgccactgggagacacaacaatgattccattaaactggaagttaagattgcgaactggatactttggtctcctcctacgtttaagtcaacaggctaagaagggagctatggtgttggctgggtggttgacccagactatcaaaatgaaatcagtctactactccacaactgaggaaaaacccacgaccactgaggtgcttgctaaaggcaaagggaatacagaatgggtagtagaagaaggtagtcatcaacaccagctatga

SEQ ID NO: 120643 - DNA, 357 bp, Homo sapiens
tcacgatttattatcctcaaattccattcccatgaatactttcctggctccttcttgtacatactgtcttctggcgtacagttccttttctcccatggcaggcccagcacttccctgtccacaacgttcagcaaccagctgagcacttctggccacctcatcggctaaagatgcaggaatttttataagaactaatccagcatgttccccatcatcctgaagcagcatcacccctagtgatccactagcaaatttttttgcttctgttcccgcaacattacattctgctggcctagaggtcttagttccagagggaggaacactgccactgggagacacaacaatgattccattaaa

SEQ ID NO: 120644 - DNA, 342 bp, Homo sapiens
  misc_feature (1)...(342): n = a,t,c or g
acgacgatttcgtctcttggacttacaccagtggtttgccaggggcttttgggcctttggtcacagactgaaggctgcactgtcagcttccctacttttgagggnnnnnnnnnnnnnnnnnnnnnnnnnnnnnnnnnnnnnnnnnnnnnnnnnnnnnnnnnnnnaccttgtgatcatgaagtagaagtgattatccacattccatagaagaagaagcggagctcagaatggtctcatctccaggcagctgtccctcttctggatctctggcaactccagttcacagcaccctttctcctcctagcctaggatccagtgcctttagcagcccagtcatgcgaa

SEQ ID NO: 120645 - DNA, 948 bp, Homo sapiens
tcaatcttcagagaactgaagagagttagggtcttgctttcgattaggctttggcttaagggaatgttgtggctggtttgaacttctatcgacatggcgagtgaccatggcccgtgacacagacctcaggaagtcctcagaacatgtgcccaaggtggttggggtgcagctggctggcgtgtactgagtcaaccacattttctctcgcaggatacagaaattgttgttagtctctggtgggtgcttaaaatgaaagttgttctctggctcccacagggcatctgaattccttcttggaatgatgtgagttgataaaatgcctacacgatgagatgaagtgagatgaatgacataggcattgtgatgtaacatgaggctgctgtcatctgctttgggtgatcctgggtcatcaagccatgatgatgttgatggttggatgtcagaagcagatgttgatgtacgatcacaaggtgaagtcccacaacaggctgcctgcaagttgaggggacaggaagccagtccgagtcccaaaacctcaaaagtagggaagctgatagtgcagccttcagtctgtggctgaaggcccaagagcccttggcaaatcactggtgtaagtccaagagtccaaaagcagactctgaatttacttgtaccttgatcttgaacttcccagtctgcagaattgagagaaataagtttctgttgtttatatgccatgcagtttataagattttgttgtagtaacctgaacaggctcccatagataatcatttctctgatggatctgggcaaagtagtttgaaaagcttctggaaaggattcagcattgtagatgccattaagaacatatgacacagatgttttgaattgggggctgtctgtaggccttcttggactctcaagtgggtccggtgtcagaagctgccagttgtcttccccaacatccat

SEQ ID NO: 120646 - DNA, 243 bp, Homo sapiens
atgccgctctacgagggcctggggagcggcggggagaagacggcggtcgtgatcgacctgggagaggcctttaccaacgcccttgcaaataacagctcttattatttcctccctgggcgatgcgaatccgaggatcggggtctgactcccagagaggcccagaaagcttctgttgaattgccctcgtcgccgccccttgtcatcaccccaaacccaacaaaccctttgggatcatctgtgtag

SEQ ID NO: 120647 - DNA, 495 bp, Homo sapiens
tttcgtgagacttgttggccgcggagactgcgaccctcttctctcagtctgccttactaccatgccgctctacgagggcctggggagcggcggttgagaaaacggcggtcgtgatcgacctgggagaggcctttaccaagtgtggatttgctggagaaactggtccaagatgtataattcctagtgggataaaaagagctgggatgcctaagcctgtcagagttgttcagtataatatcaatacagaagaattatattcctacctaaaggaattcatccacatactatatttcaggcatcttattggtgaatcccagagaccgccgagtttgtgattatcgaatccggtattatgtccttcttcacttcagagaggacactcactcgtgtttctttttcaaatattttgagggttccatctgtcttgcttgcctccaagtccatctaatggctcttctgacgcttggaattaattcttggcatgggcctagattg

SEQ ID NO: 120648 - DNA, 582 bp, Homo sapiens
atggctagcgaagacaatcgtgtcccttccccgccaccaacaggtgatgacgggggaggtggagggagagaagaaacccctactgaagggggtgcattgtctctgaaaccagggctccccatcaggggcatcagaatgaaatttgccgtgttgaccggtttggttgaagttggagaagtatccaatagggatattgtagaaactgtctttaacctgttggtaggaggacagtttgatctggaaatgaatttcattatccaagaaggtgagagtattaactgcatggtggacctactggaaaaatgtgacattacgtgccaagcagaagtctggagcatgtttacagccattctgaagaaaagcatacggaatcttcaagtctgcactgaagtaggccttgttgaaaaagtgcttgggaaaattgaaaaagttgacaatatgatagcagatcttttggttgacatgttgggagtgctggctagctataatttgacagttcgcgagctaaagcttttcttcagtaaacttcaaggagataaaggacgatgggtaaaaaaacttaagtactctttggtattttaa

SEQ ID NO: 120649 - DNA, 624 bp, Homo sapiens
atgatctcctttgacttcatgtctcacatccaggtcacactgatgcaagagtggacgctgtcagtggatctaccattctggggtctggaagattgtggccctcttctcacagctccactaggcagtgccccagtggaaactctgtggaggcgcttgtaccccacatttcccttccacagtgtcttagcagaggttctctgtgagggctccacccctgcagcacacctctgcctggacatccagttggtaggaggacagtttgatctggaaatgaatttcattatccaagaaggtgagagtattaactgcatggtggacctactggaaaaatgtgacattacgtgccaagcagaagtctggagcatgtttacagccattctgaagaaaagcatacggaatcttcaagtctgcactgaagtaggccttgttgaaaaagtgcttgggaaaattgaaaaagttgacaatatgatagcagatcttttggttgacatgttgggagtgctggctagctataatttgacagttcgcgagctaaagcttttcttcagtaaacttcaaggagataaaggacgatggatactgccaggctacacagggcctaatataagattttatgagaactaa

SEQ ID NO: 120650 - DNA, 354 bp, Homo sapiens
atgaactggagaatgtcgaccagtaaagtgacagttctgggttatggtctcttaaccgcagatgcaaagactttgatagatgcactgaataatcagaacttcaaagtagttatagtggatgaatcacactacatgaaatccagaaatgcaactcgcagcaggattttattgccaatagtacagaaagccagacgagccattcttcttacaggaacaccagctttaggaaggcctgaagagatgcttcctgccctggaacattggactcccaagttcttcagttgtggaactagaactggcttccttgttcctcagcctgctgatggcccattgtgggaccttgtgatcatgtga

SEQ ID NO: 120651 - DNA, 450 bp, Homo sapiens
gataagaacaagaaactgcgtcccctgtatgacattccttacatgtttgaggcccgggaatttcttcgaaaaaagcttattgggaagaagggcaaagagcctctcttgtcttttcatcagctcacagttcctaagactgtgcttgacattgacaatgacgtcgagatcctcaatagatctttacagaagggatcagcagcagcattagattctcatagaagtgcaaagcctagtgtgaactacacgtgcgagggatctaggtctcatgctctttatgagaatctaatgcttgatgatctgaaggtcaatgtgacggtggactacattagaccagccagcccagccacagagacagtgcctgccttttcagagcgtacctgtgccactgtcaccattggaggaatattgatgacttacgctttaatcatagtcaatgaaaagaactgctga

SEQ ID NO: 120652 - DNA, 881 bp, Homo sapiens
tttcgtgctgctggggcctaaaatttacagctctaagaattcattgctgccgttgctgctaacatattacaaggggtgcctaattccagtaacttgttacaggacatccttagatcttcatgttctgtaatcagcaggtaaaggtgatgcaggttctgaatgctgatgccattgttgtgaagctgaactcaggcgattacaagacgattcacctgtccagcatccgaccaccgaggctggagggggagaacacccaggataagaacaagaaactgcgtcccctgtatgacattccttacatgtttgaggcccgggaatttcttcgaaaaaagcttattgggaagaagagagtaagcatggaaagttccagccccaaggacgacatttcagaaacccagctgaaaagatcaggagtgggtggcttaagacaagccgaccacaaatcatgttataaatatgggaacattcaccagaaaaatatgagcaacttgggagtccaacctgggccacaagagcaaaactccatttcaagaaaacaacaacaacaacaacaacaaataacacacttcaccaaagaaatgtgtgctcagctcaacaccctgatagtcctcaaagaacagaggtttgccaaagagcgcaggctgagaatatggagagactatgtggctcccacagctaatttggaccgggaggacaaaaaatttgttgccatgcatgtgactggtcataatgcaactattcagcatggaagcatcaaacagctgtcactgtgtagcatcttttccaggcaccaggatgacatctggactcagtattttcgtgtaagagaaatggttcttgctaatcgtgttgtcacaggatcatacatcaaacagagctag

SEQ ID NO: 120653 - DNA, 2628 bp, Homo sapiens
atggtgttagggagtggcagagaggatgttaatgggcagaaagaccagtatgtgcagcgacatatagcagctaaagaaagggttttaagtaacttgcggaagcatgaggctccccagcctccccttgctctgcacccgacgaagcctcctgtgccagttatttcctctgctgtgctattgagtcagaaggacgccacccagctggtgtgcacagacctgaatctgttgcaacagcaggccagaaccgcagctcttcgggaatctcagcaggttgctctggatggtgagctgttagacacaatgccaaagcagtatgtgaatcgtgaagaacagaccacactacatttggagtgcagaggcagcagcggtaagaaatgccaaggagccgcagttgtcacggttcagtttgaaggcatgcataagaatgaagccataagccaacagcttcatgttttacggaaggaagtgaagcagttgcaagcagaagctgctaaaccaccatcacttaatattgtggaagctgctgtacatgcagaaaacttgatcacggccttagtgaatgcctacaagttgcagcctacacctgggattcagaaagttggcattagccttttctttactattgtggattacgtcagcgatgagacgcagcgtcatcccccaacaaggcagttctttacttcatgtattgagatcttgggacaggtatttatcagtggcattaaatcagagtgcagaaaagtacttgaaaccattctgaagaacagcaggctctgctccctgctgtctcctttcttcactcccaatgctgcacctgcagagttcatacagctgtatgagcaagtggtgaagtttctaagtgaggacaacagtgatatgattttcatgctgctaaccaagaaagtctccaggtggtttttctgccactacagtgtggggatcactggcagaatgtatgatgatggcaaagtcagacttggcatttggctgtttatgtccgagatgccctttgggactctgtctgtgcaaatgctgtggaagctcttctacctcatgcaccaggtggagagcgagaacctgcagcagctctcctcctccctgcagcccgcccagtgcaagcagcagctccaagacccagaacattttaccaactttgagaagtgtctttcttctatgaatagctcagaagagatttgccttctgactacctttgctcagatggctcaggccagaagaaccaatgtggacgaagacttcataaaaattattgttctggagatatatgaggtatcttatgtcaccttgtctaccagagagactttttcaaaggttggccgagagcttttagggactatcacagctgttcaccctgagataatttccgtccttctggatagagttcaagagaccattgaccaggttggaatggtttctctatacttgtttaaagaactgcctttgtatctttggcaaccttctgcatctgagatagcggtgattcgggattggttattgaattacaacctgacagtggtgaagaataaactggcctgtgttattcttgaaggactgaattggggatttgctaaacaggctacccttcatctggatcaagcagtccatgctgaagtggctttaatggttcttgaagcttatcagaagtaccttgcacagaagccatatgctgggattctctctgaaagtatgaagcaggctgtgaaagcgggcatgcccattggctgttatctagccttatctatgacagctgtgggccacagcattgagaagttctgtgcagaaggcatcccactattgggaattctggtccagtcaagacatttgagaacagtggttcatgtcctggataagattctgcctttattttacccttgccagtattaccttctgaagaatgagcaaatcagcaccctgggtatgaggcaagtttggaaactgaatggtttggaaacatctctgcctttattcatggagttggggagtttttatcgcatctcctcatgttcctacacttggacagcggtgtccctcagggtgtcacacaacaggtcacccacaaggtggcacagcacctgcacaggagccagccatggggacaacgtgaagcttctcaacagcatgatccaggcacacatatctgtaagcactcagcccaatgaagtgggccccgttgctgtgttggagttctgggttcaggctctcataagccagcatctctggtaccgagaacaacctatcctcttcctcatggaccacttgtgtaaagcagcttttcagctgatgcaggaagactgcatacagaaattactctaccaacaacataagaatgccttgggttaccactgtgaccggagtctgctctcatctttggtaagctggattgtggcaggcaacatcactccttcctttgtggagggcttggccacgcccactcaggtctggtttgcctggacagtgctcaacatggaatccatctttgaagaggactcccagctccggagagttattgaaggggaattggtgataaactctgctttcacccctgaccaagctctgaaggtacaaatagcagttctgcatttgagtggtagaaggtggcttacactttga

SEQ ID NO: 120654 - DNA, 1677 bp, Homo sapiens
atggtaaagctagactcccaaacaaaagggcttgacttttgtgaagaacagggatacctgccatatggcagaggcataaggcaaagtgaaccggagcaaggggtgcagatgtatgttctagataacacggtgcagaaggttttactagatttagacatgcagactatcaaagataaccaagctaaaaaattaagtggtggtcaaaaaagaaagctgtcattaggaattgctgttcttgggaacccaaagatactgctgctagatgaaccaacagctggaatggacccctgttctcgacatattgtatggaatcttttaaaatacagaaaagccaatcgggtgacagtgttcagtactcatttcatggatgaagctgacattcttgcagataggaaagctgtgatatcacaaggaatgctgaaatgtgttggttcttcaatgttcctcaaaagtaaatgggggatcggctaccgcctgagcatgtacatagacaaatattgtgccacagaatctctttcttcactggttaaacaacatatacctggagctactttattacaacagaatgaccaacaacttgtgtatagcttgcctttcaaggacatggacaaattttcaggtttgttttctgccctagacagtcattcaaatttgggtgtcatttcttatggtgtttccatgacgactttggaagacgtatttttaaagctagaagttgaagcagaaattgaccaagcaggggaatttggcttacggagatcatctttatattttctgaagccttcatattggtcaaagagcaaaagaaattatgaggagttatcagagggcaatgttaatggaaatattagttttagtgaaattattgagccagtttcttcagaatttgtaggaaaagaagccataagaattagtggtattcagaagacatacagaaagaagggtgaaaatgtggaggctttgagaactgagacaggtgaggaagctgaagaagaaaactctgaagctttaagaggttggtccataaggtttaaggaaagcagtcatctccataacacaaaactgcaagatgaaacagcaaaggctgatacagaagctgctgtaagttatccagaccatctagctaagaccattgatgaagatggctacaccaaacaacagattttttgtatagatgaaacagccttctcttggaagaagatgccatctaagactttcacggcaagaaagaatacactttgtacggctacaggtgctatagacagtgattcttctgataaatctggacaaaagttgcttcctctggaggagcaaagaaagtgtcttcttgagatgcaaactattgttagtgaagatgctgtgaacattgttgaaatgacaacaaaggatttagaatattacatccacttagttaataaagcagcaacagggcttgagggcattgacttcaatttcgaaagaagtttcactttgggtaaaatgctgtcaaacagcatcgcatgctacagagaaatctttcatcaaaagaagcctattgagtcacacatttcattgttgtcttcttttaagaaattgccacagccacctcaaccttcagcaaccactactttgatcagtaagcagccatcaacgtcaaggcaagactgtccagcagcaaaaaagattatgacttgctaa

SEQ ID NO: 120655 - DNA, 2238 bp, Homo sapiens; identical to SEQ ID NO: 117937

SEQ ID NO: 120656 - DNA, 2238 bp, Homo sapiens
cttatccaccatgatcaagtgggcttcatccctgggatgcaaggctggttcaatatatgcaaatcaataaatgtaatccagcatataaacagagccaaagacaaaaaccacatgattatctcaatagatgcagaaaaagcctttgacaaaattcaacaacccttcatgctaaaaactctcaataaattaggtattcatgggacgtacttcaaaataataagagctatctatgacaaatccacagccaatatcatactgaatgggaaaaaactggaagcattccctttgaaaactggcacaagacagggatgccctctctcaccactcctattcaacatagtgttggaagttctggccagggcaattaggcaggagaaggaaataaagggtattcaattaggaaaagaggaagtcaaattgtccctgtttgcagaagacatgattgtatatctagaaaaccccactgtctcagcccaaaatctccttaagctgataagcaacttcagcaaagtctcaggatacaaaatcaatgtacaaaaatcacaaacattcttatacaccaacaacagacaaacagagagccaaatcatgagtgaactcccattcacaattgcttcaaagaaaataaaatacctaggaatccaacatacaagggatgtgaaggacctcttcaaggagaactacaaaccactgctcaaggaaataaaagaggatacaaacaaatggaagaacattccatgctcatgggtaggaagaatcaatatcgtgaaaatggccatactgcccaaggtaatttacagattcaatgccatccccatcaagctaccaatgactttcttcacagaattggaaaaaactacttcaaagttcatatggaaccaaaaaagagcccgcatcaccaagtcaatcctaagccaaaagaacaaagctggaggcatcacactacctgacttcaaactatactacaaggctacagtaaccaaaacagcatggtacttgtaccaaaacagagatatagatcaatggaacagaacagagccctcagaaatgacgccgcatacctacaactatctgatctttgacaaacctgagaaaaacaagcaatggggaaaggattccctatttaataaatggtgctgggaaaactggctagccatatgtagaaagctgaaactggatcctttccttacaccttatacaaaaatcaattcaagatggattaaagatttaaacgttagacctaaaaccataaaaaccctagaagaaaacctaggcattaccattcaggacataggcatgggcaaggacttcatgtccaaaacaccaaaagcaatggcaacaaaagacaaaattgacaaatgggatctaattaaactcaagagcttctgcacagcaaaagaaactaccatcagagtgaacaggcaacctaaaaaatgggagaaaattttcgcaacctactcatctgacaaagggctaatatccagaatctacaatgaactcaaacaaatttacaagaaaaaaacaaacaaccccatcaaaaagtgggcgaaggacatgaacagacacttctcaaaagaagacatttatgcagccaaaaaacacatgaaaaaatgttcatcatcactggccatcagagaaatgcaaatcaaaaccactatgagataccatctcacaccagttagaatggcaatcattcaaaagtcaggaaacaacaggtgctggagaggatgtggagaaataggaacactcttacactgttggtgggactgtaaactagttcaacatattctcactcataggtgggaattgaacaatgagatcacatggacacaggaaggggaatatcacactctggggactgtggtggggtggggggaggggggagggatagcattgggagatatacctaatgcaagatgacgggttagtgcctggttggaatggatcaaatattccatccacacgttaaaaaaaagcaattgttatgcttgtgcacatggcaagccagaggcccagattgtcccctttccactaaggtggtcctccagtcaaccaggtgtgggctgcatggtaacccttttccaggattctacagcctggagtaataagtcatgccaagctctctctgctgtatcccggaagctgactggtccacgcacagccgaagcatgagaaaactcattgcggggactcattttccttaaaattcagacttgtacagtaaggacttattaactg

SEQ ID NO: 120657 - DNA, 2784 bp, Homo sapiens
atggggaaaaaacagaacagaaaaactggaaactctaaaaagcagagcgcctctcctcctccaaaggaacgcagttcctcaccagcaacggaacaaagctggatggagaatgactttgacgagatgagagaagaaggcttcagacgatcaaattactctgagctacgggaggacattcaaaccaaaggcaaagaagttgaaaactttgaaaaaaatttagaagaatgtataactagaataaccaatacagagaagtgcttaaaggagctgatggagctgaaaaccaaggctcgagaactacgtgaagaatgcagaagcctcaggagccgatgcgatcaactggaagaaagggtatcagtgatggaagatgaaatgaatgaaatgaatgatggggagaatggaaccaagttggaaaacactctgcaggatattatccaggagaacttccccaatctagcaaggcaggccaacgttcagattcaggaaatacagagaacgccacaaagatactcctcgagaagagcaactccaagacacataattgtcagattcaccaaagtggaaatgaaggaaaaaatgttaagggcagccagagagaaagactttaaaccaacaaagatcaaaagagaaaaagaaggccattacataatggtaaagggatcaattcaacaagaagagctaactatcctaaaaatatatgcacccaatacaggagcaccaagattcacaaagcaagtcctgagtgacctacaaagagacttagactcccacacattaataatgggagactttaacaccccactgtcaacattagacacatcaacgagacagaaagtcaagaaggatacccaggaattgaactcagctctgcaccaagcggacctaatagacatctacagagctctccaccccaaatcaacagaatatacatttttttcagcaccacaccacacctattccaaaattgaccacatagttggaagtaaagctctcctcagcaaatgtaaaagaacagaaattataacaaactatctctcagaccacagtgcaatcaaactagaactcaggattaagaatctcactcaaaaccactcaactacatggaaactgaacaacctgctcctgaatgactactgggtacataacgaagtgaaggcagaaataaaggtgttctttgaaacgaaggagaacaaagacacaacataccagaatctctgggacgcattcaaagcagtgtgtagagggaaatttatagcactaaatgcccacaagagaaagcaggaaagatccaaaattgacaccctaacatcacaattaaaagaactagaaaagcaagagcaaacacattcaaaagctagcagaaggcaagaaataactaatatcagagcagaactgaaggaaatagagacaaaaaaacccttcaaaaaattaatgaatccaggagctgaaatacaaactaccatcagggaatactacaaacacctctatgcaaataaactagaaaatctagaagaaatggataaattcctggacacatacactctcccaagactaaaccaggaagaagttgaatccctgaatagaccaataacaggctctgaaattgtggcaataatcaatagcttaccaaccaaaaagattccaggaccagatggattcacagccgaattctaccagaggtacaaggaggaactggtaccattccttctgaaactattccaatcaatagaaaaagagggaatcctccctaactcattttatgaggccagcatcattctgataccaaagccaggcagagacacaacaaaaaaagagaattttagaccaatatccttgatgaacattgatgcaaaaatcctcaataaaatactagcaaaacgaatccagcagcacatcaaaaagcttatcccccatgatcaagtgggcttcatccctgggatgcaaggctggttcaatatacgcaaatcaataaatgtaatccagcatataaacagagcaaaagacaaaaaccacatgattatctcaatagatgcagaaaaagcctttgacaaaattcaacaacccttcatgctaaaaactctcaataaattaggtattgatgggacgtatttcaaaataataagagctatctatgacaaacccacagccaatatcatactgaatgggcaaaaactggaagcattccctttgaaaactggcacaagacagggatgccctctctcaccactcctattcaacatagtgttggaagttctggccagggcaattaggcaggagaaggaaataaagggtattcaattaggaaaagaggaagtcaaattgtccctgtttgcagatgacatgattatatatctagaaaaccccattgtctcagcccaaaatctccttaagctgataagcaacttcagcaaagtctcaggatacaaaatcaatgtacaaaaatcacaagcattcttatacaccaataacagacaaacagagagccaaatcatgagtgaactcccattcccaattgcttcaaagagaataaaatacctaggaatccaacttacaagggatgtgaaggacctcttcaaggagaactacaaaccactgctccaggaaataaaagaggatacaaacaaatggaagaacattccatgctcatgggtaggaagaatcaatattgtgaaaatggccatactgcccaagggaatttacagattcaatgccatccccatcaagctaccaatgactttcttcacagaattggaaaaaactactttaaagttcatatggaactaa

SEQ ID NO: 120658 - DNA, 2406 bp, Homo sapiens
atggggaaaaaacagagcagaaaaactggaaactctaaaaagcagagcccctctcctcctccaaaggaacgcagttcctcaccagcaacggaacaaagctggacagagaatgactttgacgagctgagagaagaaggcttcagacgatcaaattaccccgagctacgggaggacattcaaaccaaaggcaaagaagaaatacaaactaccatcagagaatactacaaacacctctatgcaaataaactagaaaatctagaagaaatggataaattcctcaacacatacactctcccaagactaaaccaggaagaagttgaatctctgaatagaccaataacaggatctgaaattgtggcagtaatcaatagcttaccaaccaaaaagagtccaggaccagatggattcacagccgaattccaccagaggtacaaggtggaactggtaccattccttctgaaactattccaatcaatagaaaaagagggaatcctccctaactcattttatgaggccagcatcatcctgataccaaagccgggcagagacacaatcaaaaaagagaattttagaccaatatccttgacgaacattgatgcaaaaatcctcaataaaatactggcaaaccgaatccagcagcacatcaaaaagcttatccactatgatcaagtgggcttcatccctgggatgcaagactggttcaatatacgcaaatcaataaatgtaatccagcatataaacagaaccaaagtcaaaaaccacatgattatctcaatagatgcagaaaaagcctttgacaaaattcaacaacgcttcatgctaaaaactctcaataaattagcccaaaatctccttaagctgataagcaacttcagcaaagtctcaggatacaaaatcaatgtacaaaaatcacaagcattcttatacaccaacaacagacaaacagagagccaaatcatgagtgaactcccattcacaattgcttcaaagagaataaaatacctaggaatccaacttacaagggatgtgaaggacctcttcaaggagaactacaaaccactgctcaaggaaataaaagaggatacaaacaaatggaagaacattccatgctcatgggtaggaagactcaatatcgtgaaaatggccatactgcccaaggtaatttacagattcaatgccatccccatcaagctaccaatgactttcttcacagaattggaaaaaactactgtaaagttcatatggaaccaaaaaagagcctgcatcaccaagtcaatcctaagccaaaagaacaaagctggaggcatcacactacctgacttcaaactatactacaagtctacagtaaccaaaacagcatggtactggtaccaaaacagagatatagatcaatggaacagaacagagccctcagaaataatgccacatatctacaactatctgatctttgacaaacctgagaaaaacaagcaatggggaaaggattccctatttaataaatggtgctgggaaaactggctagccatatgtagaaagctgaaactggatcccttccttacaccttatacaaaaatcaattcaagatggattaaagacttaaacgttagacctaaaaccataaaaactctagaagaaaacctaggcattaccattcaggacataggcgtggacaaggacttcatgactaaaacaccaaaagcaatggcaacaaaacccaaaattgacaaatgggatctaattaaactaaagagcttctgcacagcaaaagaaactaccatcagagccttcgatgaattggacgatgtccacccacatgaggaaattgaggcttgcagagtatggcagaactatggtactcaccctcctgttccttcacagttaccaactggtgatggccaatgggctgtgagtgcaagatttatcattcatcttcaggccaagatgaagtgtgttaagtctgaatgcaaaggacaaaataacttgaatctgaacaattgtggaagagaactgatagcaattaaattggcaactgcccatggacttgacctgaatacaataactaaagaagggcatcattctgaaacgaatgctggaattcctggtccatacttcccgagacccaaaccacagggtgtccaaaggacagctgttgtgggggtgaactggggtcctctctttcatgcaaatcttcatggcatgggacagctggatggaaacagaagagtggctctcaagggccaattaccccccatgccaccaccttccaggacacaaagccaagagtctgagaattctaaatccaaacttgacctttcagattgttacaacattatatttgtcaaagtcttattaggagccagagctcctgaggcccaggcctggcagcagcatggagctgtcatgtag

SEQ ID NO: 120659 - DNA, 2853 bp, Homo sapiens
ttaaagtagttttttccaattcttgggcagtatggccattttcatgatattgattcttcctacccatgagcatggaatgttcttccatttgtttgtatcctcttttatttccttgagcagtggtttgtagttctccttgaagaggtccttcacatcccttgtaagttggattcctaggtattttattctctttgaagcaattgtgaatgggagttcactcatgatttggctctctgtttgtctgttgttggtgtataagaatgcttgtgacttttgtacattgattttgtaacctgagactttgctgaagttgcttatcagcttaaggagattttgggctgagacgatggggttttctagatatacaatcatgtcgtctgcaaacagggacaatttgactccctcttttcctaattgaataccctttatttccttctcctgcctaattgccctggccagaacttccaacactatgttgaataggagtggtgagagaggacatccctgtcttgtgccagttttcaaagggaatgcttccagtttttgcccattcagtatgatattggctgtgagtttgtcatagatagctcttattattttgaaatacgtcccatcaatacctaatttattgagagtttttagcatgaagggttgttgaattttgtcaaaggctttttctgcatctattgagataatcatgtggtttttgtctttggctctgtttataggctggattacatttattgatttgcgtatattgaaccagccttgtatcccagggatgaagcccacttgatcgtggtggataagctttttgatgtgctgctggattcgttttgccagtattttattgagggtttttgcatcaatgttcatcaaggatattggtctaaaattctcttttttggttgtgtctctgcctggctttggtatcagaatgatgctggcctcataaaatgagttagggaggagtccctctttttctattgattggaatactttcagaaggaatggtaccagttcctccttgtacctctggtagaattcagctgtgaatccatctggtcctggactctttttggttggtaagctattgattattgccacaatttcagatcctgttattggtctattcagagattcaacttcttcctggtttagtcttgggagagtgtatgtgtcgaggaatttatccacttcttctagattttctagtttatttgcgtagaggtgtttgtagtattctctgatggtagtttgtatttctgtgggatcggtggtgatatgccctttatcattttttattgcgtctattagattcttctctctttttttctttattagtcttgctagtggtctatcaattttgttgaccctttcaaaaaaccagctcctggattcattaattttttgaagggttttttgtgtctctatttccttcaattctgctctgattttagttatttcttgccttctgctagcttttgaatgtgtttgctcttgcttttctagttcttttaattgtgatgttagggtgccaattttggatctttcctgctttctctccatcaggtcatttaaggacttttctaccttggttattctagttagccattcatctaatcttttttcaaggtttttagcttctttgcaatggattcgaacttcctcctttagcttggagaagtttgattgtctgaagacttcttctctcaacttgtcaaaatcattctccatccagctttgttccattgctggtgaggatctgcattcctttggagggggagaggtgctctgatttttagaattttcagtttttctgctctgttttttccccatctttgtggttttatctacctttgggctttgatgctggtgacgtacagatggggttttggtgtggatgtcctttctgtttgttagttttccttcttttgctggatagcctggagtgagtgggtcaccagcaccattcaaatttaacacatttcctctctgggctgcagttccaggaagattccatcctttgggatatggctgtacctcaggagcaaagtagtcagctggatctgagtacaagatgattcctatggctcctgctaacatggcatttttaactttatttcctctgaagatttttccatatcttgcaataacaatcttcccagtacagttgatgcccatctctctttctagtttgaaaaagtcttcagtgcgagcatagttcacatatacaagatctccctctggcatgccttgggctgagaaagcattatatggtggcacaatatttgtaacattctcatagccatctggtggtggttcaaggtatgatgttttgaaaatctcagtttcatgttcatccacaatcgatatatagttggcatttgtctcattggggtaagataagaggacatcataatgaaccaacttggctgaatctagtccaaatttcttccactgggtttggattttcttggcaagcaagaaattttgttctgttcctgccagatgaggaagctttgtaaaagaactctctatattggtgagttctgcatccatgtattcaaccaactcagcccattctgtggaacccagaagtccaaattcttctgcatcccagctggcaaaaatgatagttcttctaggtctccagcctttactcatcagttttccaaaactccgggcaatttcttgcaaaacagcaaccccactggttgggtcaatagctccaaatacccaggagtcccggtgacctcccagaataacatacctgtcaggttccacagatcctctgatagttccaactacattgtaaatccttgtaattttattgatgttataaacatgcat

SEQ ID NO: 120660 - DNA, 2205 bp, Homo sapiens
atgattatctcaatagatgcagaaaaagcctttgacaaaattcaacaacccttcatgctaaaaactctcaataaattaggtatcgatgggacttatctcaaaataataagagctatctatgacaaacccacagccaatatcatactgaatggacaaaaattggaagcattccctttgaaacctggcacaagacagggatgccctctctcaccactcctattcaacatagtgttggaagttctggccagggcaattaggcaggagaaggaaataaagggtattcaattaggaaaagaggaagtcaaattgtccctgtttgcagatgacatgattgtatatctagaaaaccccatcgtctcagcccaaaatctccttaagctgataagcaacttcagcaaagtctcaggatacaaaatcaatgtgcaaaaatcacaagcattcttatacaccaataacagacaaacagagagccaaatcatgagtgaactcccattcacaattgcttcaaagagaataaaatacctaggaatccaacttacaagggatgtgaaggacctcttcaagaactacaaaccactgctcaatgaaataaaagaggatacaaacaaatggaagaacattccatgctcatgggtaggaagaatcagtatcgtgaaaatggccatactgcccaagcctctgctgctgatacccaggaaaacagggtccggagtggacctccagcaaactccaacagacctgcagttgagggtcctgactgttagaaggaaaactaacaaacagaaaggacatccacaccaaaaccccatctgtatgtcaccatcatcaaagaccaaagaactagagaagcaagagcaaacacattcaaaagccagcaggaggcaagaaataactaagatcagagcagaactgaaggagatagagacacaaaaaacccttcaaaaaatcaatgactccaggagctggttttctgaaaagatcgacaaaattcatagactgcgagcaagactaataaagaagaaaagagggaagaatcaaatagatgcaataaaagatgataaaggtgatatcaccactgatcccacagaaatacaaactaccatcagagaatactataaacacctctatgcaaataaactagaaaatctagaagaaatggataaattcctggacacatacaccctcccaagactaaaccaggaagaagttgaatctcttaatagaccaataacaggctctgaaattgaggcaataattaatagcttaccaaccaaaaaaggtccaggaccagacagattcacagctgaattctatcagaggtacaaggaggagctgagaataaaatacctaggaatccaacttacaagggatgtgaaggacctcttcaaggagaacaacaaaccactgctcaacaaaataaaaagaggatacaaacaaaaggaagaacattccatgcttatgggtaggaagaatcaatatcgtgaaaatggccatactgcccaagaattggaaaaaactactttaaagttcatatggaaccaaaaaagagcctgcattgccaagtcaaccctaagccaaaagaacaaagctgaaggcatcatgctacctgacttcaaactatactacaatgctacagtaaccaaaacagcatggtactggtaccaaaacagagatatagaccaatggaacagaacagagccctcagaaataatgccgcatatctacaaccatctgatctttgacaaagctgacaaaaacaagaaatggggaaatgattccctctttactaaatggtgctgggaaaactggctagccatatgtagaaagctgaaactggatcccttccttataccttatacaaaaattaattcaagatggattaaagacatacatgttagacctaaaaccataaaaaccctagaagaaaacctaggcaataccattcaggatacaggcatgggcaaggacttcatgtccaaaacacaaaaagcaatggcaacaaaagccaaaattgacaaatgggatctaattcaactaaagagcttctgcacagcaaaagaaactaccatcagagtgaacaggcaacctacagtatgggagaaaatttttgcaatctactcatctgacaaagggctaatatccagaatctacaatgaactcaaacaaatttatgagaaaaaaacaaccccatcaaaaagtgggtga

SEQ ID NO: 120661 - DNA, 2325 bp, Homo sapiens
atggaagatgaaatgaatgaaatgaaacaagaagggaagtttagagaaaaaagaataaaaggaaacgaacaaagcctccaagaaatatgggactatgtgaaaagaccaaatctacgtctgattggtgtacctgaaagtgacagggagaatggaaccaagttggaaaacactctgcaggatattttccaggagagcttccccaatctagcaaggcaggccaacattcagattccagaaatacacagaatgccacaaagatactcctcgagaagagcaactccaagacacataattgtcagattcaccaaagttgaaatgaaggaaaacatgttaagggcagccagagagaaagcaccacaccacacctattccaaaattgaccacatactgggaagtaaagctctcctcagcaaatgtaaaagaacagaaattataacaaactgtctctcagaccacagtgcaatcaaactagacctcaggattaagaaactcactcaaaaccgctcaactacatggaaactgaacaacctgctcctgaatgactactgggtacataacgaaatgaaggcagaaataaagatgttctttgaaaccaacgagaacaaagacacaacataccagaatctctgggacacattcaaagcagtgtgtagagggaaatttatagcactaaatgcccacaagagaaagcaggaaagatccaaaattgataccctaacatcacaattaaaagaactagaaaagcaagagcaaacacattcaaaagctagcagaaggcaagaaataactaagatcagagcacaactgaagaaaatggagacacagaaaacccttcaaaaaattaatgaatccaggagctggttttttgaaacgatcaacaaaattgatagaccgctagcaagactaataaagaagaaaagagagaagaatcaaatagatgcaataaaaaatgataaaggggatatcaccaccgatcccacagaaatacaaactaccatcagagaatactacaaacacctctatgcaaataaactagaaaatctacaagaaatggataaattcctcgacacatacactcttccaagactaaaccaggaagaagttgaatctctgaatagaccaaaaacaggctctgaaattgtggcaataatcaatagcttaccaaccaaaaagagtccaggactagatggattcacagccgaattctaccagatgtacaaggaggaactggtactattccttctgaaactattccaatcaacagaaaaagagggaatcctccctaactcattttatgaggccagcatcatcctgacaccaaagcctggcagagacacaacaaaaaaagagaattttagaccaatatccttgatgaacattgatacaaaaatcctcaataaaatactggcaaaccgaatccagcagcacatcaaaaaccttatccaccatgatcaagtgggcttcacccccgggatgcaagtctggttcaatatatgcaaatcaataaatgtaatccagcatataaacagaaccaaagacaaaaaccacatgattatctcaatagatgcagaaaaggcctttgacaaaattcaacaacgcttcatgctaaaaactctcaataaattaggtattgatgggacttatctcaaaataataagagctatctatgaaaaacccacagccaatatcatactgaatgggcaaaaactggaagcattccctttgaaaactggcacaagacagggatgccctctctcaccactcctattcgacatagtgttggaagttctggccagggcaattaggcaggagaaggaaataaaggatattcaattaggaaaagaggaagtcaaattgttcctgtttgcagatgacatgattgtgtatctagaaaaccccattgtctcagcccaaaatctccttaagctgataagcaacttcagcaaagtctcaggatacaaaatcaacgtacaaaaatcacaagcattcttctacagcaataatagacaaacagagagccaaatcatgagtgaactcccattcacaattgcttcaaagagaataaaatacctaggaatccaacttacaagggatgcaaaggacctcttcaaggagaactacaaaccactgctcaataaaataaaagaggatacaaagaaatggaagaacattccatgctcatgggtaggaagaatcagtatcatgaaaatggccatactgcccaagataatttatagattcaatgccatccccatcaagctaccaatgcctttcttcacagaattggaaaaaactactttaaagttcatatggaaccaaagatga

SEQ ID NO: 120662 - DNA, 2880 bp, Homo sapiens; identical to SEQ ID NO: 116376

SEQ ID NO: 120663 - DNA, 2229 bp, Homo sapiens
atggataaattcctcaacacatacactctcccaagactaaaccaggaagaagttgaatctctgaatagaccaataacaggatctgaaattgtggcaataatcaatagcttacaaaccaaaaagagtccaggaccagatggattcacagccgaattctaccagaggtacaaggaggaactggtaccattccttctgaaactattccaatcaatagaaaaagagggaatcctccctaactcattttatgaggccagcatcattctgataccaaagccaggcagagacacaacaaaaaaagagaattttagaccaatatccttgatgaacattgatgcaaaaatcctcaataaaatactaggaaaacgaatccagcagcacatcaaaaagcttatccaccatgatcaagtgggcttcatccctgggatgcaaggctggttcaatatacgcaaatcaatgaatgtaatccagcatataaacagagccaaagacaaaaaccacatgattatctcaatagatgcagaaaaagcctttgacaaaattcaacaacccttcatgctaaaaactctcaataaattaggaattgatgggacgtatttaaaaataataagagctatctatgacaaacccacagccaatatcatactgaatgggcaaaaactggaagtattccctttgaaaactggcacaagacagagaataaaacacctaggaatccaacttacaagggatgtgaaggacctcttcaaggagaactacaaaccactgctcaatgaaataaaagaggatacaaacaaatggaagaacattccatgctcatgggtaggaagaatcaatatcgtgaaaatggccatactgcccaaggtaatttacagattcaatgccatccccatcaagctaccaatgactttcttcacagaattggaaaaaactactataaagttcatatggaaccaaaaaagagcccgcattgccaagtcaatcctaagccaaaagaacaaagctggaggcatcacactacctgacttcaaactatactacaaggctacagtaaccaaaacagcatggtactggtaccaaaacagagatatagatcaatggaatagaacagagccttcagaaataatgccacatatctacaactatctgatctttgacaaacctgagaaaaacaagcaatggggaaaggattccctatttaataaatggtgctgggaaaactggctagccatatgtagaaagctgaaactggatcccttccttacaccttatacaaaaatcaattcaagatggattaaagatttaaacgttagacctaaaaccataaaaaccctagaagaaaacctaggcattaccattcaggacataggcatgggcaaggacttcatgtctaaaacaccaaaagcaatggcaacaaaagacaaaattgacaaatgggatctaattaaaataaagagcttctgcacagcaaaagaaactaccatcagagtgaacaggcaacctacaaaatgggagaaaatttttgcaacctactcatctgacaaagggctgatatccagaatctatgatgaactcaaacaaatttacaagaaaaaaacaaacaaccccatcaaaaagtgggcgaaggacatgaacagacacttctcaaaagaagacatttatgcagccaaaaaacacatgaaaaaatgctcatcatcactggccatcagagaaatgcaaatcaaaaccactatgagataccatctcacaccagttagaatggcaatcattaaaaagtcaggaaacaacaggtgctggagaggatgtggacaaataggaacacttttacactgttggtgggactgtaaactagttcaaccattgtggaagtcagtgtggcaattcctcagggatctagaactggaaataccatttgacccagccatcccattactgggtatttacccaaaggactataaatcatgctgctataaagacacatgcacacgtatgtttattgcggcattattcacaatagcacagacttggaaccaacccaaatgtccaccaatgatagactggattaagaaaatgtggcacatatactccatggaatactatgcagccataaaaaatgatgagttcacgtcctttgtaggcacatggatgaaattggaaatcatcattctcagtaaactatcacaagaacaaaaaaccaaacaccgcatattctcactcataggtgggaactga

SEQ ID NO: 120664 - DNA, 2232 bp, Homo sapiens; identical to SEQ ID NO: 116248

SEQ ID NO: 120665 - DNA, 5175 bp, Homo sapiens; identical to SEQ ID NO: 118077

SEQ ID NO: 120666 - DNA, 2872 bp, Homo sapiens
atgaaggcagaaataaaggtgttctttgaaaccaacgagaacaaagacacaacataccagaatctctgggacacattcaaagcagtgtgtagagggaaatttatagcactaaatgcccacaagagaaagcaggaaagatccaaaattgacaccctaacatcacaattaaaagaactagaaaagcaagagcaaacacattcaaaagctagcagaaggcaagaaataactaaaatcagagcagaactgaaggaaatacagacacaaaaaacccttcaaaaaatcaatgaatccaggagctggttttttgaaaggatcaacaaaattgatagatcgctagcaagactaataaagaaaaaaagagagaagaatcaaatagacacaataaaaaatgataaaggggatatcaccaccgatcccacagaaatacaaactaccatcagagaatactacaaacacctctatgcaaataaactagaaaatctagaagaaatggataaattcctcgacacatacactctcccaagactaaaccaggaagaagttgaatctctgaatagaccaataacaggagctgaaattgtggcaataatcaatagtttaccaaccaaaaagagtccaggaccagatggattcacagccgaattctaccagagctgggcagagacacaaccaaaaaaagagaattttagaccaatatccttgatgaacattgatgcaaaaatcctcaataaaatactggcaaaacgaatccagcagcacatcaaaaagcttatccaccatgatcaagtgggcttcatccctgggatgcaaggctggttcaatatacgcaaatcaataaatgtaacacagcatataaacagagccaaagacaaaaaccacatgattatctcaatagatgcagaaaaagcctttgacaaaattcaacaacccttcatgctaaaaactctcaataaattaggtattgatgggacgtatttcaaaataataagagctatctatgacaaccccacagccaatatcatactgaatgggcaaaaactggaagcattccctttgaaaactggcacaagacagggatgccctctctcaccactcctattcaacatagtgttggaagttctggccagggcaattaggcaggagaaggaaataaagggtattcaattaggaaaagaggaagtcaaattgtccctgtttgcagacaacatgattgtatatctagaaaaccccattgtctcagcccaaaatctccttaagctgataagcaacttcagcaaagtctcaggatacaaaatcaatgtacaaaaatcacaagcattcttatacaccaacaacagacaaacagagagccaaatcatgagtcaactcccattcacaattgcttcaaagagaataaaatacctaggaatccaacttacaagggatgtgaaggacctcttcaaggagaactacaaaccactgctcaaggaaataaaagaggatacaaacaaatggaaaaacattccatgctcagggggaaggaagaatcaatatcgtgaaaatggccatactgcccaagaattggaaaaaaactactttaaagttcatatggaatcaaaaaagagcctgcatcaccaagtcaatcctaagccaaaagaacaaagctggaggcatcacactacctgacttcaaactatactacaaggctacagtaaccaaaacagcatggtactggtaccaaaacagagatatagatcaatggaacagaacagagccctcagaaataacgccacatatctacaactatctgatctttgacaaacctgagaaaaacaagcaatggggaaaggattccctatttaataaatggtgctgggaaaactggctagccatatgtagaaagctgaaactggatcccttccttacaccttatacaaaaatcaattcaagatggattaaagacttaaacattagacctaaaaccataaaaaccctagaagaaaacctaggcattatcattcaggacataggcatgggcaaggacttcatgtctaaaacaccaaaagcaatggcaacaaaagccaaaatagacaaatgggatctaattaaactaaagagcttctgcacagcaaaagaaactaccatcagagtgaacaggcaacctacaaaatgggagaaaattttcgcaacctgctcatctgacaaagggctaatatccagaatctacaatgaactcaaacaaatttacaagaaaaaaacaaacaaccccatcaaaaagtgggcaaaggacatgaacagacacttctcaaaagaagacatttatgcagccaaaaaacacatgaaaaaatgctcatcatcactggccagcagagaaatgcaaatcaaaaccacaatgagataccatctcacaccagttagaatggcaatcattaaaaagtcaggaaacaacaggtgctggagaggatgtggagaaataggaacacttttacactgttggtgggactgtaaactagttcaaccattgtggaagtcagtgtggcgattcctcagggatctagaactggaaataccatttgacccagccatcccattactgggtatatacccaaatgactataaatcatgctgctataaagacacatgcacacgtatgtttattgcggcattattcacaatagcaaagacttggaaccaacccaaatgtccaacaattatagactggattaagaaaatgtggcacatatacaccatggaatactatgcagccataaaaaatgatgagttcgtgtcctttgtagggacatggatgaaattggaaatcatcattctcagtaaactatcacaagaacaaaaaaccacacaccgcatattctcactcataggtgggaattga

SEQ ID NO: 120667 - DNA, 2241 bp, Homo sapiens; identical to SEQ ID NO: 116379

SEQ ID NO: 120668 - DNA, 3104 bp, Homo sapiens
atggtaaaggaatcaattcaacaagaggagctaactatcctaaatatttatgcacccaatacaggagcacccagattcataaagcaagtcctgagtgacctacaaagagacttagactcccacacattaataatgggagactttaacaccccactgtcaacattagacagagcaacgagacagaaagtcaacaaggatacccaggaattgaactcagctctgcaccaagcggacctaatagacctaatagacctaatctacagaactctccaccccaaatcaacagcaatatacatttttttcagcaccacaccacacctattccaaaattgacaacatacttggaagtaaagctctcctcagcaaatgtaaaagaacagaaattataacaaactatctctcagaccacagtgcaatcaaactagaactcaggattaagaatctcactcaaaaccgctcaactacatggaaactgaacaacctgctcctgaatgactactgggtacataacaaaatgaaggcagaaataaagatgttctttgaaaccaacgagaacaaagacacaacataccagaatctctgggatgcattcaaagcagtgtgtagagggaaatttatagcactaaatgcccacaggagaaagcaggaaagatccaaaattgacaccctaacatcacaattaaaagaactagaaaagcaagagcaaacacattcaaaagctagcaggaggcaagaaataactaaaatcagagcagaactgaaggaaatagagacacaaaaaacccttcaaaaaattaatgaatccaggagctggttttttgaaaggatcaacaaaatagatagaccgctagcaagactaataaagaaaaaaagagagaagaatcaaatagacacaataaaaaatgataaaggggatatcaccaccgatcccacagaaatacaaactaccatcagagaatactacaaacacctctatgcaaataaactagaaaatctagaagaaatggataaattcctcgacacatactctattccaagactaaaccaggaagaagttgaatctctatatagaccaataacaggagctgaaattgtggcaataatcaatagcttaccaaccaaaaagggtccaggaccagatgaattcacagccgaattctaccagaggtacaaggaggaactgccgggcagagacacaacaaaaaaaagagaattttagaccaatatccttgatgaacattgatgcaaaaatcctcaataaaatactggcaaaccgaatccagcagcacatcaaaaagcttatccaccatgatcaagtgggcttcatccctgggatgcaaggctggttgaatatatgcaaatcaataaatgtaatccagcatataaacagagccaaagacaaaaaccacatgattatctcaatagatgcagaaaaagcctttgacaaaattcaacaacccttcatgctaaaaactctcaataaattaggtattgatgggatgtatttcaaaataataagagctatctatgacaaacccacagccaatatcatactgaatgggcaaaaactggaagcattccctttggaaactggcacaagacagggatgccctctctcaccactcctattcaacatagtgttggaagttctggccagggcaattaggcaggagaaggaaataaagggtattcaattaggaaaagaggaagtcaaattgtccctgtttgcagatgacatgattgtatatctagaaaaccccattgtctcagcccaaaatctccttaagctgataagcaacttcagcaaagtctcaggatacaaaatcaatgtgcaaaaatcacaagcattcttatacaccaacaacagacaaacagagagacaaatcatgagtgaactcccattcacaattgcttcaaagagaataaaatacctaggaatccaacttacaagggatgtgaaggacctcttcaaggagaactacaaaccgctgctccaggaaataaaagaggatacaagcaaatggaagaacgttccatgctcatgggtaggaagaatcaatatcgtgaaaatggccatactgcccaaggtaatttacagattcaatgccatcccgatcaagctaccaatgcctttcttcacagaattggaaaaaactattttaaagttcatatgggaccaaaaaagagcccgcatcgccaagtcaatcctaaggcaaaagaacaaagctggaggcatcacactacctgacttcaaactatactacaaggctacagtaaccaaaacagcatggtactggtaccaaaacagagatatagatcaatgcaacagaacagagccctcagaaataacgccgcatatctacaactatctgatctttgacaaacctgagaaaaacaagcaatggggaaaggattccctatttaataaatggtgctgggaaaactggctagccatatgtagaaagctgaaactggatccctttcttacaccttatacaaaaatcaattcaagatggattaaagacttaaatattagacctaaaaccataaaaaccctagaagaaaacctaggcattaccattcaggacataggcatgggcaaggacttcatgtccaaaacaccaaaagcaatggcaacaaacgccaaaattgacaaatgggatctaattaaactaaagagcttccgcacagcaaaagaaactaccatcagagtgaacaggcaacctacaaaatggcagaaaattttcgcaacctactcatctgacaaagggctaatgtccagaatctacaatgaactcaaacaaatttacaagaaaaaaacaaacaaccccatcaaaaagtgggcggaggacatgaacagacacttctcaaaagaagacatttatgcagccaaaaaacacatgaaaaaatgctcatcatcactggccatcagagaaatgcaaatcaaaaccacaatgagataccatctcacaccagttagaatggcaatcattaaaaagtcaggaaacaacagactaaccctcttgaataaccataataatcctcaacctttgataagcatcaaggaaccaagggagaaagaagaattaaacctacaagtataa

SEQ ID NO: 120669 - DNA, 3288 bp, Homo sapiens
ttattttgatgtgcagaaggctttcagtttaattaagtcccatctatttatctttgttgtgtttgcttttgggttcttgattgtgaagtctttgcctaagccaatgtctagaagtgtttttccaatcttatcttctagaatttttatggtttcaggtcttagatttaagtctgtgaaccatcttgagttgatttgtttataaggtgagagatgaggatccagttgcattcttctacatgtggcttgccaattataccagcaccatttgttgaatagggtgtcctttccccactttatgtttttgcttgctttgtcaaagatcagttggctgaaagtatttggctttatttctgggttctctattctattccattggtctatatgcctatttttataccagtaccatgctgttttggtgactatggccttatagtatagtttgaagtcgagtaatgtgatgcctctagatttattctttttgcttagtcttgctttggctgtgtgggctcttttttggttccatgtgaattttagccttgttttttctagttctgtgaagaatgatggtggtattttgatgggaattgcattgaatttgtaggttgcttttggcagtatggtcgttttcacactgttgactctatcattcatggtgaacagcagggggtgtgggtaggacccatgggagacagacttgtttcttctttgtggtcgactgcagcttgttggaggtgtggataaagcactggggtctttgctccattttgtattctcaccaacaatgcataagagtgcctctctcggtgttttagacatgaagtccttgcccatgcctgtgtcctgaatggtaaagcctaggttttcttccagggtttttatggttttaggtctaacgtttaagtctttaatccatcttgaattgatttttgtataaggtgtaaggaagggatccagtttcagctttctacatatggctagccagttttcccagcaccatttattaaatagggaatcctttccccattgcttgtttttctcaggtttgtcaaagatcagatagttgtagatatgcggcattatttctgagggctctgttctgttccattgatctatatctctgttttggtaccagtaccatgctgttttggttactgtagccttgtcgtatagtttgaagtcaggtagcgtgatgcctccagctttgttcttttggcttaggattgacttggcgatgcaggctcttttttggttccatatgaactttaaagtagttttttccaattctgtgaagaaagtcattggtagcttgatggggatggcattgaatctgtaaattaccttgggcagtatggccattttcacaatattgattcttcctacccatgagcatggaatgttcttccatttatttgtatcctcttttatttccttgagcagtgatttgtagttctccttgaagaggtccttcacatcccttgtaagttggattcctaggtattttattctctttgaagcaattgtgaatgggagttcactcatgatttggctctctgtttgtctgttgttggtgtataagaatgcttgtgatttttgtacatttattttgtatcctgagactttgctgaagttgcttatcagcttaagaagattttgggctgagacaatggggttttctagatatacaatcatgtcgtctgcaaacagggacaatttgacttcctcttttcctaattgaataccctttatttccttctcctgcctagttgccctgggcagaacttccaacactatgttgaataggagtggtgagagagggcatccctgtcttgtgccagttttcaaagggaatgcttccagtttttgcccattcagtatgatattggctgtgggcttgtcatagacaggtcttattattttgaaatacgtcccatcaatacctaatttattgagagtttttagcatgaagcgttgttgaattttgtcaaaggctttttctgcatctattgagataatcatgtggtttttgtctttggctctgtttatatgctggattacatttattgatttgcatatattgaaccagccttgcatcccagggatgaagcccacttgatcttggtggataagctttttgatgtgctgctggattcgttttgccagtattttattgaggatttttgcatcaatgttcatcaaggatattggtctaaaattctctttttttgttgtgtctctgcctggctttggtatcagaatgatgctggcctcataaaatgagttagggaggattccctctttttgtattgattggaatagtttcagaaggaatggtaccagttcctccttgtacctctggtagaattcggctgtgaatccatctggtcctggactctttttggttggtaagctattgattattgccacaatttcagcttctgttattggtctattcagagattcaacttcttcctggtttagtcttgggagagtgtatgtgtccaggaatttatccatttcttctagattttctagtttatttgcatagaggtgtttgtagtattctctgatggtagtttgtatttcactgttagcaatgaccataatatctagcctgtaggtatctgtacaggcaagtttgattaccctaggaaggtcacaataaaaactatcgacctcattgggaccacagaagggtaagtgcacggcaaaggccaactggctcaccgaatggagaaagccaattccccatgcgacagccataatgccgacacatgcgttgccacacataattgtagtgtagtgtaggggtttgcatattgctatatatctgtcaaagcccatggctatgaggatcaccatctcactcccaccaaagaagtgaaggagaaatatctgaacaaggcagcccttgaaagagatgactttgcgctggctgaaaaagtcagtaatcatcttgggggctgtgactgaagacagagacagatcaatgagtgagaggttggctagcaggaagtacatgggagagtgaaggtgggagtcagataccactgttatgacaataagaaggtttccaaacacgattcctccatagaatacaaaaaacaacataaataggaaggtctggagttcctgagaatcagagagacccagaaaaatgaattcagtcaccatagagttattcgtttcactcgttgattcattccaggaaatagcctctgcagttaccagagagtcatttacttggtccactgaatcagatagaagggaagactgtgaagcaaccttcat

SEQ ID NO: 120670 - DNA, 3266 bp, Homo sapiens
atgaataattcaatcaaggaaaaagtgaaactcagtttaactaaatgggaaatgcaaacaaaacctaacaataatactgttgatcttaaagatgcccaagaggtcaatctcacaagcacggattacagaaagcaacatgtcatgctgcctaccgaaatcaattcagacgactctcttttaaaaattggggttattagactggcaaattggataaagagtcaagacccatcagtgtgctgtaatcaggaaacccatctcacgtgcagagacacacataggctcaaaataaaaggatggaggaagatctaccaagcaaatggaaaacaaaaaaaggcaggggttgcaatcctagtctccgataaaacagacttcaaaccaacaaagatcaaaagagacaaagaaggccattacataatggtaaagggatcaattcaacaagaagagctaactatcctaaatacatatgcacccaatacaggagcacccagattcataaagcaagtcctgagtgacctacaaagagacttagactcctacacattaataatgggagactttaacaccccactgtcaacattagacagatcaacgagacagaaagtcaacaaggatacccaggaattgaactcagctctgcaccaagtggacctaatagacatctacagaactctccaccccaagtcaacagaatatacatttttttcagcaccacaccacacctattccaaaattgaccacatacttggaagtaaagctctcctcagcaaatgtaaaagaacagaaattataacaaactatctctcagaccacagtgcaatcaaactagaactcaggattaagaatctcattcaaaaacgctcaactacatggaaactgaacaaactgctcctgaacgactactgggtacataacgaactgaaggcagaaataaagatgttctttgaaaccaacgagaacaaagacacaacataccagaatctctgggacgcattcaaagcagtgtgtagagggaaatttatagcactaaacgcccacaagagaaagcaggaaagatccaaaattgacaccctaacattacaattaaaagcactagaaaagcaagagcaaacacattcaaaagctagcagaaggcaagaaataactaaaatcagagcagaactgaaggaaatagagacacaaaaaacccttcaaaaaattaatgaatccaggagctggttttttgaaaggatcaacaaaattgataaaccgctagcaagactaataaagaaaaaaagagagaagaatcaaatagacacaataaaaaatgatagaggggatatcaccaccgatcccacagaaatacagactaccatcagagaatactacaaacacctctatgcaaataaactagaaaatctagaagaaatggataaattcctcgacacatacactctcccaagactaaaccaggaagaagttgaatctctgaatagaccaataacaggatctgaaattgtggcaataatcaatagcttaccaacgaaaaagagtccaggaccagatggattcacagccgaattctaccagaggtacaagcaggaactgcatataaacagaaccaaagacaaaaaccacatgattatctcaatagatgcagaaaaggcctttgacaaaattcaacaacgcttcatgctaaaaactctcaataaattaggtattgatggggcgtatttcaaaataataagacctatctatgacaaacccacagccaatatcatactgaatgggcaaaaactggaagcattccctttgaaaactggcacaagacagggatgccctctctcaccactcctattcaacatagtgctggaagttctggccaaggcaattaggcaggagaaggaaataaagggtattcaattaggaaaagaggaagtcaaattgtccctgtttgcagacgacatgattgtatatctagaaaaccccattgtctcagcccaaaatctccttaagctgataagcaacttcagcaaagtctcaggatacaaaatcaatgtacaaaactcacaggcattcttatacaccaataacagacaaacagagagccaaatcatgagtgaactaccattcacagttgcttcaaagagaataaaatacctaggaatccaacttacaagggatgtgaaggacctcttcaaggagaactacaaaccactgctcaatgaaataaaagaggatacaaacaaatggaagaacgttccatgctcatgggtaggaagaatcaatatcgtgaaaatggccatactgcccaaggtaatttatagattcaatgccatccccatcaagctaccaatgactttcttcacagaattgggaaaaactactttaaagttcatatggaaccgaaaaagagcccacatcgccaagtcaatcctaagacaaaagaacaaagctggaggcatcacgctacctgacttcaaactatactacaaggctacagtaaccaaaacagcatggtactggtaccaaaacacagatatagatcaatggaacagaacagagccctcagaaataacgctgcatatctacaactatctgatctttgacaaacctgagaaaaacaagcaatggggaaaaggattccctatttaataaatggtgctgggaaaactggctagccatatgtagaaagctgaaactggatcccttccttacaccttatacaaaagttaattcaagatggattaaagacttacatattagacctaaaaccataaaaaccctagaagaaaacctaggcattaccattcaggacataggcatgggcaaggacttcatgtctaaaacaccaaaagcaatggcaaccaaagccaaaattgacaaatgggatctaattaaactaaagagcttctgcacagcaaaagaaaccaccatcagagtgaacaggcaacctacagaatgggaggaaatttttacaatctacccatctgacaaagggctaatatccagaatctacaaagagctcaaacaaatttacaagaaaaaaaacaaacaatcccatcagaaagtgggcgaaggacatgaacagacacttctcaaaagaagacatttatgcagccaacagacacgtgaaaaaaagctcaccatcactggtcatcagagaaatgcaaatcaaaatcacaatgagataccatctcacaccagttagaatggcaatcattaaaaagtcaggaaacaacaggtgctggagaggatgtggagaaataggaacacttttacactgttga

SEQ ID NO: 120671 - DNA, 8181 bp, Homo sapiens
cctccggtctacagctcccagcgtgagcgacgcagaagacgggtgatttctgcatttccatctgaggtaccgggttcatctcactagggagtgccagacagtgggcgcaggccagtgggtgcgcgcaccgtgcggagccgaagcagggcgaggcattgcctcacctgggaagcgcaaggggtcagggagttccctttccgagtcaaagaaaggggtgacggacgcacctggaaaatcgggtcactcccacccgaatattgcgcttttcagaccggcttaaaaaacggcgcaccacgagactatatcccacacctggccttcggagggtcctacgcccacggaatctcgctgattgctagcacagcggtctgagatcaaactgcaaggccgcagcaaggctgggggaggggcgcccgccattgcccaggcttgcttaggtaaacaaagcagccggggaagctcgaactgggtgcagcccaccacagctcaaggaggcctgcctgcctctgtaggctccacctctgggggcagggcacagacaaacaaaaagacagcagtaacctctgcagacttaaatgtccctgtctgacagctttgaagagagcagtggttctcccagcacgcagctggagatctgagaacgggcagactgcctcctcaagtgggtccctgacccctgacccccgagcagcctaactgggaggcaccccccagcaggggcacactgacacctcacacggcagggtattccaacagacctgcagctgagggtcctgtctgttagaaggaaaactaacaaacagaaaggacatccacaccgaaaacgcatctgtacatcaccatcatcaaagaccaaaagtagataaaaccacaaagatggggaaaaaacagaacagaaaaactggaaactctaaaacgcagagcacctctcctcctccaaaggaacgcagttcctcaccagcaacggaccaaagctggatggagaatgattttgacgagctgagagaagaaggcttcagacgctcaaattactctgagctacgggaggacattcaaaccaaaggcaaagaagttgaaaactttgaaaaaaatttagaagaatgtataactagaataaccaatacagagaagtgcttaaaggagctgatggagctgaaaaccaaggctcgagaactacgtgaagaatgcagaagcctcaggagccaatgcgatcaactggaagaaagggtatcagcaatggaagatgaaatgaatgaaatgaagcaagaagggaagtttagagaaaaaagaataaaaagaaacgagcaaagcctccaagaaatatgggactatgtgaaaagaccaaatctacgtctgattggtgtacctgaaagtgatgcggagaatggaaccaagttggaaaacactctgcaggatattatccaggagactttccccaatctagcaaggcaggccaacgttcagattcaggaaatacagagaacgccacaaagatactcctcgagaagagcaactccaagacacataattgtcagattcaccaaagttgaaatgaaggaaaaaatgttaagggcagccagagagaaaggtcgagttaccctcaaagggaagcccatcagactaacagcggatctctcggcagaaaccctacaagccagaagagagtgggggccaatattgaacattcttaaagaaaagaattttcaacccagaatttcatatccagccaaactaagcttcataagtgaaggagaaataaaatactttacagacaagcaaatgctgaccgattttgtcaccagcaggcctgccctaaaagagctcctgaaggaagcgctaaacatggaaaggaacaaccggtaccagccactgcaaaatcatgccaaaatgtaaagaccatcgagactaggaagaaactgcatcaactaacgagcaaaatcaccagctaacatcataatgacaggatcaaattcacacataacaatattaactttaaatgtaaatggactaaattctccaattaaaagacacagactggcaagttggataaagagtcaagacccatcagtgtgctgtattcaggaaacccatctcatgtgcagagacacacataggctcaaaataaaaggatggaggaagatctaccaagcaaatggaaaacaaaaaaaggcaggggttgcaatcctagtctctgataaaacagactttaaaccaacaaagatcaaaagagacaaagaaggccattacatgatggtaaagggatcaattcaacaagaggagctaactatcctaaatatgtatgcacccaatacaggagcacccagattcataaagcaagtcctgagtgacctacaaagagacttagactcccacacattaataatgggagactttaacaccccactgtcaacattagacagatcaacgagacagaaagtcaacaaggatacccaggaattgaactcagctctgcaccaagcagacctaatagacatctacagaactctccaccccaaatcaacagaatatacatttttttcagcaccacaccacagctattccaaaattgaccacatacttggaagtgaagctctcctcagcaaatgtaaaagaacagaaattataacaaactatctctcagaccacagtgcaatcaaactagaactcaggattaagaatctcactcaaagccgctcaactacatggaaactgaacaacctgctcctgaatgactactgggtacataacgaaatgaaggcagaaataaagatgttctttgaaaccaacgagaacaaagacacaacataccagaatctctaggacgcattcaaagcagtgtgtagagggaaatttatagcactaaatgcccacaagagaaagcaggaaagatccaaaattgacaccctaacatcacaattaaaagaactagaaaagcaagagcaaacacattcaaaagctagcagaaggcaagaaataactaaaatcagagcagaactgaaggaaatagagacacaaaaaaacctttcaaaaaattaatgaatccaggagctggttttttgaaaggatcaacaaaattgatagaacgctagcaagactaataaagaaaaaaagagagaagaatcaaatagacacaataaaaaatgataaaggggatatcaccaccgatcccacagaaatacaaactaccatcagagaatactacaaacacctctacgcaaataaagtagaaaatctagaagaaatggatacattcctcgacacatacactctcccaagactaaaccaggaagaagttgaatctctgaatagaccaataacaggctctgaaattgtggcaataatcaatagtttaccaaccaaaaagagtccaggaccagatggattcacagccgaattctaccagaggtatgaggaggaactggtaccattccttctgaaactattccaatcaatagaaaaagagggaatcctccctaactcattttatgaggccagcatcattctgataccaaagccgggcagagacacaaccaaaaaagagaattttagaccaatatccttgatgaacattgatgcaaaaatcctcaataaaatactggcaaaccgaatccagcagcacatcaaaaagcttatccaccatgatcaagtgggcttcatccctgggatgcaaggctggttcaatatacacaaatcaataaatgtaatccagcatataaacagagccaaagacaaaaaccacatgattatctcaatagatgcagaaaaagcctttgacaaaattcaacaacccttcatgctaaaaactctcaataaattaggtattgatgggacgtatttcaaaataataagagctatctgtgacaaacccacagccaatatcatactgaatgggcaaaaactggaagcattccctttgaaaactggcacaagacagggatgccctctctcaccgctcctgttcaacatagtgttggaagttctggccagggcaatcaggcaggagaaggaaataaagggtattcaattaggaaaagaggaagtcaaattgtccctgtttgcagacgacatgattgtttatctagaaaaccccatcgtctcagcccaaaatctccttaagctgataagcaacttcagcaaagtctcaggatacaaaatcaatgtacaaaaatcacaagcattcttatacaccaacaacagacaaacagagagccaaatcatgagtgaactcccattcacaattgcttcaaagagaataaaatacctaggaatccaacttacaagggatgtgaaggacctcttcaaggagaactacaaaccactgctcaaggaaataaaagaggacacaaacaaatggaagaacattccatgctcatgggtaggaagaatcaatatcgtgaaaatggccatactgcccaaggtaatttacagattcaatgccatccccatcaagctaccaatgactttcttcacagaattggaaaaaactactttaaagttcatgtggaaccaaaaaagagcccgcatcaccaagtcaatcctaagccaaaagaacaaagctggaggcatcacactacctgacttcaaactatactacaaggctacagtaaccaaaacagcatggtaccggtaccaaaacagagatacagatcaacggaacagaacagagccctcagaaataacgccgcatacctacaactatctgatctttgacaaacctttgcttgagaaaaacaagcaatggggaaaggattccctatttaataaatggtgctgggaaaactggctagccatatgtagaaagctgaaactggatcccttccttacaccttatacaaaaatcaattcaagatggattaaagatttaaacattagacctaaaaccataaaaaccctagaagataacctaggcattaccattcaggacataggcatgggcaaggactttatgtccaaaacagcaaaagcaatggcaacaaaagccaaaattgacaaatgggatctaattaaactaaagagcttctgcacagcaaaagaaactaccatcagagtgaacaggcaacctacaacatgggagaaaattttcgcaacctactcatctgacaaagggctaatatccagaatctacaatgaactcaaacaaatttacaagaaaaaaaacaaacaaccccatcaaaaagtgggcgaaggacatgaacagacacttctcaaaagaagacatttatgcagtcaaaaaacacatgaaaaaaatgctcatcatcactggccatcagagaaatgcaaatcaaaaccacagtgagataccatctcacaccagttagaatggcaatcattaaaaagtcaggaaacaacaggagctggtattttgaaaagatcaacaaaattgatagactgctagcaagactaataaagaaaaaaagagagaagaatcaaatagacgcaataaaaaatgataaaggggatatcaccactgatcccacagaaatacaaactaccaccagagaatactataaacacctctatgcaaataaactagaaaatctagaagaaatggataaattcctcgacacatacaacctcccaagactaaagcaggaagaagttgaatctctgaatagaccaataagaggctctgaaattgtggcaataatcaatagcttaccaaccaaaaaaagtccaggaccagatggattcacagccgaattctaccacaggtacaaagaggagctggtaccattgcttctgaaactattccaatcaatagaaaaagaggtaatcctccctaactcattttatgaggccagcatcatcctgataccaaagcctgacagagacacagcaaaaaaagagaattttagaccaatatccttgatgaacatcgatgcaaaaatcctcaataaaatactggcaaaccgaatccagcagcacatcaaaaagcttatccaccatgatcaagtgggcttcatccctgggatgcaaggctggttcaacatacgcaaatcagtaaatgtaatccagcatataaacagaaccaaagacaaaaaccacatgatcatctcaatagatgcagaaaagtcctttgataaaattcaacaacacttcatgctaaaaactctcaataaattaggtattgatgggtcatatctcaaaataataagagctacctatgacaaacccacagccaatatcatactgaatgggcaaaaactggaagcattccctttgaaaactggcacaagacacggatgccccctctcaccactcctattcaacatagtgttggaagttctggccagagcaatcaggcaggagaaggaaataaagggtattcaattaggaaaagaggaagtcaaattgtccctgttcatagatgacatgattgtatatctagaaaaccccatcatctcagcccaaaatctccttaagctgatagacaatttcagcaaagtctcaggatacaaaatcaatgtgcaaaaatcacaagcattcttatacaccaataacagacaaacagagagccaaatcatgagtgaactcccattcacaattgcttcagagagaataaaatacctaggaatacaacttacaagggacgtgaaggacctcttcaaggagaactacaaaccactgctcaatgacataaaagaggatacaaacaaatggaagaacactccacgctcatgggtaggaagaatcaatatcatgaaaatggccatactgcccaaggtaatttatagattcaatgccatccccatcaagctaccaatgactttcttcacagaattggaaaaaactactttaaagttcatatggaaccaaaaaggagcccgcattgccaagtcaatcctaatttatagattcaatgcccaagaattggaaaaaactactttaaagttcatatggaaccaaaaaggagcccgcattgccaagtcaatcctaagccaaaagaacaaagctggaggcatcacgctacctgacttcaaactatactacaaggctacagtaatcaaaacagcatggtactggtaccaaaacagagatatagaccaatggaacagaacagagccctcagaaataatgccacatatctacaaccatctgatctttgacaaacctgacaaaaacaagaaatggggaaatgattccctatttaataaatggtgctgggaaaactggctagccatatgtagaaagctgaaactggatcccttccttataccttatacaaaaattaattcaagatggattaaagacttaaatgttagacctaaaaccataaaaaccctagaagaaaacctaggcaataccattcaggacatagccatgggcaaggactttatgtctaaaacaccaaaagcaatggcaacaaaagccaaaattgacaaatgggatctaattaatctaaagagcttctgcacagcaaaagaaaccaccatcagagtgaacaggcaacctatagaatgggagaaaatttttgcaatctactcatctgacaaagggcgaatatccagaatctacaatgaactcaaacaaatttacaagaaaaaaacaaacaaccccatcaaaaagtgggcaaaggatatgaacagacacttctcaaaagaagacatttatgcagccaaaagacacatgaaaaaatgctcatcatcactggccattagagaaatgcatatcaaaaccacaatgagacaccatctcacatcagttagaatggcgatcattaaaaagttaggaaacgactggtgctggaggggatgtggagaaataggaagacttttacactgttggtgggactgtaaactagttcaaccattgtggaagtcagtgtggcgattcctcagggatctagaactagaaacaccatttgacccagccagcccattactgggtatacacccaaaggattatagatcatgctgctataaagacacatgcacacgtatgtttactgcagcactattcacaatagcaaagacttggaaccaacccaaatgtccatcaatgatagactggattaagaaaatgtggcacatatacaccatggaatactatgcagccataaaaaaggatgagttcatgtcctttgcagggacatggataaagctggaaaccatcattctcagcaaactatcgcaaggacaaaaaaccaaacaccacatgttctcactcatagatgggaattga

SEQ ID NO: 120672 - DNA, 3442 bp, Homo sapiens
agccggtgcgccgcagactagggcgcctcgggccagggagcgcggaggagccatggccaccgctaacggggccgtggaaaacgggcagccggacgggaagccgccggccctgccgcgccccatccgcaacctggaggtcaagttcaccaagatatttatcaacaatgaatggcacgaatccaagagtgggaaaaagtttgctacatgtaacccttcaactcgggagcaaatatgtgaagtggaagaaggagataagcccgacgtggacaaggctgtggaggctgcacaggttgccttccagaggggctcgccatggcgccggctggatgccctgagtcgtgggcggctgctgcaccagctggctgacctggtggagagggaccgcgccaccttggccgccctggagacgatggatacagggaagccatttcttcatgcttttttcatcgacctggagggctgtattagaaccctcagatactttgcagggtgggcagacaaaatccagggcaagaccatccccacagatgacaacgtcgtatgcttcaccaggcatgagcccattggtgtctgtggggccatcactccatggaacttccccctgctgatgctggtgtggaagctggcacccgccctctgctgtgggaacaccatggtcctgaagcctgcggagcagacacctctcaccgccctttatctcggctctctgatcaaagaggccgggttccctccaggagtggtgaacattgtgccaggattcgggcccacagtgggagcagcaatttcttctcaccctcagatcaacaagatcgccttcaccggctccacagaggttggaaaactggttaaagaagctgcgtcccggagcaatctgaagcgggtgacgctggagctgggggggaagaacccctgcatcgtgtgtgcggacgctgacttggacttggcagtggagtgtgcccatcagggagtgttcttcaaccaaggccagtgttgcacggcagcctccagggtgttcgtggaggagcaggtctactctgagtttgtcaggcggagcgtggagtatgccaagaaacggcccgtgggagaccccttcgatgtcaaaacagaacaggggcctcagattgatcaaaagcagttcgacaaaatcttagagctgatcgagagtgggaagaaggaaggggccaagctggaatgcgggggctcagccatggaagacaaggggctcttcatcaaacccactgtcttctcagaagtcacagacaacatgcggattgccaaagaggagattttcgggccagtgcaaccaatactgaagttcaaaagtatcgaagaagtgataaaaagagcgaatagcaccgactatggactcacagcagccgtgttcacaaaaaatctcgacaaagccctgaagttggcttctgccttagagtctggaacggtctggatcaactgctacaacgccctctatgcacaggctccatttggtggctttaaaatgtcaggaaatggcagagaactaggtgaatacgctttggccgaatacacagaagtgaaaactgtcaccatcaaacttggcgacaagaacccctgaaggaaaggcggggctccttcctcaaacatcggacggcggaatgtggcagatgaaatgtgctggaggaaaaaaatgacatttctgaccttcccgggacacattcttctggaggctttacatctactggagttgaatgattgctgttttcctctcactctcctgtttattcaccagactggggatgcctataggttgtctgtgaaatcgcagtcctgcctggggagggagctgttggccatttctgtgtttccctttaaaccagatcctggagacagtgagatactcagggcgttgttaacagggagtggtatttgaagtgtccagcagttgcttgaaatgctttgccgaatctgactccagtaagaatgtgggaaaaccccctgtgtgttctgcaagcagggctcttgcaccagcggtctcctcagggtggacctgcttacagagcaagccacgcctctttccgaggtgaaggtgggaccattccttgggaaaggattcacagtaaggttttttggtttttgttttttgttttcttgtttttaaaaaaaggatttcacagtgagaaagttttggttagtgcataccgtggaagggcgccagggtctttgtggattgcatgttgacattgaccgtgagattcggcttcaaaccaatactgcctttggaatatgacagaatcaatagcccagagagcttagtcaaagacgatatcacggtctaccttaaccaaggcactttcttaagcagaaaatattgttgaggttacctttgctgctaaagatccaatcttctaacgccacaacagcatagcaaatcctaggataattcacctcctcatttgacaaatcagagctgtaattcactttaacaaattacgcatttctatcacgttcactaacagcttatgataagtctgtgtagtcttccttttctccagttctgttacccaatttagattagtaaagcgtacacaactggaaagactgctgtaataacacagccttgttatttttaagtcctattttgatattaatttctgattagttagtaaataacacctggattctatggaggacctcggtcttcatccaagtggcctgagtatttcactggcaggttgtgaatttttcttttcctctttgggaatccaaatgatgatgtgcaatttcatgttttaacttgggaaactgaaagtgttcccatatagcttcaaaaacaaaaacaaatgtgttatccgacggatacttttatggttactaactagtactttcctaattgggaaagtagtgcttaagtttgcaaattaagttggggagggcaataataaaatgagggcccgtaacagaaccagtgtgtgtataacgaaaaccatgtataaaatgggcctatcacccttgtcagagatataaattaccacatttggcttcccttcatcagctaacacttatcacttatactaccaataacttgttaaatcaggatttggcttcatacactgaattttcagtattttatctcaagtagatatagacactaaccttgatagtgatacgttagagggttcctattcttccattgtacgataatgtctttaatatgaaatgctacattatttataattggtagagttattgtatctttttatagttgtaagtacacagaggtggtatatttaaacttctgtaatatactgtatttagaaatggaaatatatatagtgttaggtttcacttcttttaaggtttacccctgtggtgtggtttaaaaatctataggcctgggaattccgatcctagctgcagatcgcatcccacaatgcgagaatgataaaataaaattggatatttgaga

SEQ ID NO: 120673 - DNA, 243 bp, Homo sapiens
atggccaccgctaacggggccgtggaaaacgggcagccggacaggaagccgccggccctgccgcgccccatccgcaacctggaggtcaagttcaccaaggcatttccctacagaaatgacacggtgcacactaaaagactactcccgagccaggacttctgcagaggtccctgccacagccgagattcctcgtctgtagaagatgatggttcctccttcatggggatgagaaatgcaacttga

SEQ ID NO: 120674 - DNA, 486 bp, Homo sapiens
ccgtgactgccctatagcttttgctggatctggatataaattccactatggagcctcgcatggaagtccctcccctgccgcaagtgttgcaagaaggaatgtggggaaaacgattgccaggttggcccaagaactgatagactatttcctcaagacaaacagaagtctgctgaccttgagcatgaccagaccatgttagataaacttgtggatggacttgcctacctcttgggtgaactctagcaattacaaggtggttctgctgggcatggacatcctgtccgccctggtgacccggctgcaggatcggttcaaggcgcagatcggcacagtgctgccaagtctaatagacagactaggagatgctaaagactctgtgagggagcaggaccaaactctgctgctaaagatcatggatcaagctgctaatccccagtacgtatgggacagaatgcttggaggcttcaaacacaagaatttccgtac

SEQ ID NO: 120675 - DNA, 561 bp, Homo sapiens
atggggcaagaagcactgggacactgggataagcaggagaatgcaggtggacaaggggactgccactgtcagagaaaagaagttgtatacacagctgtacatagctctttttgtggaagatcatccttcttcgtgctaatctctttggtcctccagtcggcatgcgtctggactctcggactgcgtctgggccggaaatgtctaggcctccccggagcgggtgggcgggagcgctgccccgcaggccggctgctaacaggctcccggtgtttcccgctgcaggtggttctgctgggcatggacatcctgtccgccctggtgacccggctgcaggatcggttcaaggcgcagatcggcacagtgctgccaagtctaatagacagactaggagatgctaaagactctgtgagggagcaggaccaaactctgctgctaaagatcatggatcaagctgctaatccccagtacgtatgggacagaatgcttggaggcttcaaacacaagaatttccgtactcgagaaggcatctgtctctgccttatagcaacactcaatgcgtaa

SEQ ID NO: 120676 - DNA, 3888 bp, Homo sapiens
atggagaagagagagactgagagccagaatctggatgaagaggttacagggcaggaatttaaaaactacccaagattcccaatgccccagagccgcagtttgcacaactatatctcatggcgtttctcttgtgtgtctgaggagctgtccagctctgacatcctggaacaaggaccgtctaatgccctccgtctgccccggaccgccgcggtgttgagtccggagctgacgccctcgagccgccagcaagcggaaaacccggagtggatctccacgccttttggatcggagccaaagggcacctcggaggaggtggccggctctgcggccctgcccggtgccaggccgcggccatcgggggagcacgggctgggggtgcagcccgctcggcccccgccctcggacccgcccccgggggtcgcccggccccatgcccagcggcggcggcggagcagcgcgcggccgcgggcggctctgaggagcccggagggaaccggcgacgaggggaccatgtaccgggacccggaggcggccagcccaggacagcggcagcgccggacgccgtctcggagccccagcctggggctgttgtccgcccggagccgcacgggctcccccaggggtcatcccagccccgggggcgcgggatcgagcggcagcggctcggaccccggtcccccgcagtctggacactgccaggctggatgtctgggaccggcttcgcagtgtccccacaaggacctctcccccacccctcaacagcccaaggacaacgtgagggctgaaggggcattgcctgtggagagccctcccctcatctgtctggacctaggtcacctaccctggcatcttcgtcgaagaggccgccggcttccagcccatggcccgtggcaggagtattctcttgctctgctcaccttcttagaagccagtagcttagttcagaagccagctctggggtatgaggatggaagacttcacggcctcttcctgccctcagccttcaccctctggttcatcctgaagtccctgtttctctcggactgcttgtccccaggccaggcaggccccagcaggcctgcaggggccctaagaggagggctgcctatcatctctgtagtgaccctgatagtgacaaaccctaatagtgacaaaaccaaagatgctggttggctggcatctttgggccgtgggagccaggctgtgcctgagtctgcttccttcctggagaagttctgtggagctctttgctcctccatcagcatcccctgccctgacagaaccctgacccaggcagtttctgtggctggagctgctacccagtacctccacaacccccctgccctctgtgggttgagaaaagggaaggacctgcttcctgccttctgctccctgcagaagctccctgtcaccaacagggctgcccatgggctttgtgcatccctggggcctgacttcatgactttcaaggtcccttctagctggagacacagtgactccatatgcagggaatggttcactctggctggggcgccctcgcgcgacgtcctgctggtctctgccatcatcaccgtcagccttagcgtcactgtcgtcctctgcggcctctgccactggtgtcagcgcaaactgggcaaacgctacaagaattccttggagacggtgggcacgccagactcagggcgtgggcgcagtgagaagaaggctatcaatgatctagacagagacttttggaataacaatgagagcacagtgcagcagaaatggagctcctaccctcccaaggagtttattctaaacatttcaccctacgccccttatggcgacccacgactgtccctcaatggcaccctcctgtcgggcgccaaagtggccgccgcggcggggctggcggtggagcgggaaggccggctgggggagaagccggcaccggtgccgccacccggagaggacgccttgagaagcggcggggctgcccccagcgagccgggcagcggtggcaaggcggggagaggccgctggcggacggtgcagagccacctggccgcagggaagctcaacttgtccaatttcgaggactccaccctgtccacggccactacccttgagtctatccccagctccacgggagagccgaaatgccagcgaccccgcaccctgatgcggcagcagagcctgcaacagccgctgagccagcaccagcggggccggcagcccagccagcccaccaccagccagagcctgggccagctgcaggcccacatggcctcggcaccaggccccaacccccgggcctatggccggggccaggctcggcagggcacctcggccggctccaagtaccgggcggcagggggccgcagccgctccaacccaggcagctgggaccacgtggtggggcagattcgaaaccgaggcttggacatgaaatccttcctcacaactagctcccgagcagccaaatggaattttaccaactctgaaacagtaccggcccttgacctggactcagcggtggtgctcattccctggatctccagcaaggaggacacaggagacagccactatggccgagttgccatataccacaaaggactttcattctcctctgatgggcttgtatatccaggagccaaggggagggaaggccggatggtggtgctatccttggtcttagggctttcggaacaggatgactttgccaatatccctgacctgcaaaacccaggaacccagcagaaccagaacgctcagggggacaagaggttgcctgcaggagggaaggcggtgaacacagcccccgtgccaggccagacaccccacgatgagtccgaccgccggaccgagccacgttcctccgtctcagacctcgtcaactccctcaccagcgagatgctcatgccacagttggaacaccgggaaactgttccagctgtgttccacgtgttccagcgggagtgcttgcctcattgggatgttgtaagaggattcagtaaggagacggcgatgcgagagtcgctggtcatgctctccccaggctccgaggaggatgaggcccacgagggttgcagccgagagaacctgggccggatccagttcagtgtcggctacaacttccaggagtccacgctcaccgtgaagatcatgaaggcccaggagctgccggccaaggacttcagcggcaccagcgaccccttcgtcaagatctacctgctgcccgacaagaagcacaagctggagaccaaggtgaagcggaagaacctgaacccccactggaacgagaccttcctctttgaaggttttccctatgagaaggtggtgcagaggatcctctacctccaagtcctggactatgaccgcttcagccgcaacgaccccattggggaggtgtccatcccccttaacaaggtggacctgacccagatgcagaccttctggaaggatctgaagccatgcagcgatgggagtgggagccgaggggagctgctcttgtctctctgctacaacccctctgccaactccatcatcgtgaacatcatcaaagcccggaacctcaaagccatggacatcgggggcacatcagacccctacgtgaaggtatggctgatgtacaaggacaagcgggtggagaagaagaagacggtgacgatgaagaggaacctgaaccccatcttcaatgagtccttcgccttcgatatccccacggagaagctgagggagacgaccatcatcatcactgtcatggacaaggacaagctcagccgcaatgacgtcatcggcaagatctacctgtcctggaagagcgggccaggggaggtgaagcactggaaggacatgattgcccgtccccggcagcccgtggcccagtggcaccagctgaaggcctga

SEQ ID NO: 120677 - DNA, 2302 bp, Homo sapiens
aagctccctgtcaccaacagggctgcccatgggctttgtgcatccctggggcctgacttcatgactttcaaggtcccttctagctggagacacagtgactccatatgcagggaatggttcactctggctggggcgccctcgcgcgacgtcctgctggtctctgccatcatcaccgtcagccttagcgtcactgtcgtcctctgcggcctctgccactggtgtcagcgcaaactgggcaaacgctacaagaattccttggagacggtgggcacgccagactcagggcgtgggcgcagtgagaagaaggctatcaaggtttccaggccatgccctccaccggccaaggcttctgccacccaccccacctgcaagtccccacgttctcaggagaaggtggagagtccaggtgatctagacagagacttttggaataacaatgagagcacagtgcagcagaaatggagctcctaccctcccaaggagtttattctaaacatttcaccctacgccccttatggcgacccacgactgtccctcaatggcaccctcctgtcgggcgccaaagtggccgccgcggcggggctggcggtggagcgggaaggccggctgggggagaagccggcaccggtgccgccacccggagaggacgccttgagaagcggcggggctgcccccagcgagccgggcagcggtggcaaggcggggagaggccgctggcggacggtgcagagccacctggccgcagggaagctcaacttgtccaatttcgaggactccaccctgtccacggccactacccttgagtctatccccagctccacgggagagccgaaatgccagcgaccccgcaccctgatgcggcagcagagcctgcaacagccgctgagccagcaccagcggggccggcagcccagccagcccaccaccagccagagcctgggccagctgcaggcccacatggcctcggcaccaggccccaacccccgggcctatggccggggccaggctcggcagggcacctcggccggctccaagtaccgggcggcagggggccgcagccgctccaacccaggcagctgggaccacgtggtggggcagattcgaaaccgaggcttggacatgaaatccttcctcacaactagctcccgagcagccaaatggaattttaccaactctgaaacagtaccggcccttgacctggactcagcggtggtgctcattccctggatctccagcaaggaggacacaggagacagccactatggccgagttgccatataccacaaaggactttcattctcctctgatgggcttgtatatccaggagccaaggggagggaaggccggatggtggtgctatccttggtcttagggctttcggaacaggatgactttgccaatatccctgacctgcaaaacccaggaacccagcagaaccagaacgctcagggggacaagaggttgcctgcaggagggaaggcggtgaacacagcccccgtgccaggccagacaccccacgatgagtccgaccgccggaccgagccacgttcctccgtctcagacctcgtcaactccctcaccagcgagatgctcatggaagactggcccccagctgtcttctcttctggatgggccattgccacagcccaccctgcctccctgcacagccccttaattggttacagcttcctggcagccaggggtggcttgctgcttttcgaggctgacttctgctggtgcaagcgctcaggaagcaccttccctgactgtgatggggtggccaacctggctgccacagagatggctctgtcccagctgagattcagtaaggagacggcgatgcgagagtcgctggtcatgctctccccaggctccgaggaggatgaggcccacgagggttgcagccgagagaacctgggccggatccagttcagtgtcggctacaacttccaggagtccacgctcaccctgaagatcatgaaggcccaggagctgccggccaaggacttcagcggcaccagcgaccccttcgtcaagatctacctgctgcccgacaagaagcacaagctgaagaccaaggtgaagcggaagaacctgaacccccactggaaacgagaccttcctctttgaaggttttccctatgagaaggtggtgcagaggatcctctacctccaagtcctggactatgaccgcttcagccgcaacgaccccattggggaggtgtccatcccccttaacaaggtggacctgacccagatgcagaccttctggaaggatctgaagccatgcagcgatgggagt

SEQ ID NO: 120678 - DNA, 579 bp, Homo sapiens
atggatgtctatccagtgctcagcgctgttatgaatgacagctcgatcgccaagctcatcttagtactacacgcagaagctgacctaggctactctgaagcaggtggcttagccctggccctggctggatgcaggacaggttggcagggaggcagcagagccaaattttgtacaaaggagctggtgctagcaagctcaggaagaagccacagccggaagttcaccttgccaggacctggctcagctgcaggttccaccgggccaccaggctccgaggaggatgaggcccacgagggttgcagccgagagaacctgggccggatccagttcagtgtcggctacaacttccaggagtccacgctcaccctccctgcgcagcgcacagccagctcggaccgcttcgtcaactgctctaagtgccacgccggtctccgagtggcagccccgcaggctgcccgcggaaatattttgagtaccgcactcaatcggcgccccagcctctacgactctatccttccggctcgtatctttcgacgaatcgtgcgcgaataccaacttcgcaccatgagcagcgtctag

SEQ ID NO: 120679 - DNA, 440 bp, Homo sapiens
gcggccgccggcatgcagctgtgcgtggacgcctcgcagccgctttggatgctcttcggcctgcacgggaccatcacgcagatccgcatcctcggtgagtgcccgcagctgcgcctgggcgtatgcctttcctggaggcggggacgatccgggtaggagacaaagggcgagctccccttcctccaggctcatgatggtgttgctaaggaatcacagacacctaaggtgagttctgggcgggacttggtcatcttgtcagtggcccttatatgtcacctgggagactcacctggggggtgaggcgacgggaaagcgcggattattgagtttgatgcccagaatcagatcaacccatagtctcacagatacataaacagtccagaagcacacaacccactggaccacttcaaaaatgagaggaaaaggccaggtgcggtggc

SEQ ID NO: 120680 - DNA, 5504 bp, Homo sapiens
ctacttttaaattttattttaaatagtcataaattactttttttctcttaataaatatgtgctgtttaaaaatgagaaaagtatatactgcatctttaagtaatgcactttgctctctgggttttttccattctaccttatttaaagtgcattaattaaaaaataatgaaccacttctttatcattattgttcaaataagtacaaataatattaacatgaagacactaaaccactaccattagtactgcaatctagcagattaactcaacatcctgctctatttaatactgtccagcagaagaaaataactaatttcaattttaaacaaactcacaaaacaaaaggaaacaaaacaatctcaccacaggccttcgacaaagaacacgagccatttgctctagctgccaggcatcagtgtatggcgagggacaggggcttagggttgcccaggcaaggcctctgggatggggtgtggtggggtagggtaggggtgggggtgggttttgaaggcactgagacactgggtcccatgctgccctgcctgggtggggagcagggtgagggagggcctttcctcctctatagaaaacaccaacccccagtccagggaccctggcagctgaatcggtggctgtgaggcccaatctgtccgaaatcaaaggcacgtgtggaaatccactcccagcgaagggggagtccttgggggaagccggctgggcttctggagggtcccctctgaaatgtcaacaattgaaaaacacaacccaaaggtgacagaggacctacagggaactttattctctcgcttctgtcttcactggggcactgaccctcgggaagaccaggttggctcctggcacagggatcctccatcttcttgggcacctgtggcattgccagcaggccagagggggtggctggcggtgttggctccagtctgacccaaggggccagccgggtcccccctctgcccatagtggggacaatggctgcttctccatgcttcatacgtaaggcttccagccctgcccagctggggaacacacgcagaatggcggtcacccagcaggctgggagctgccttctctccaaaagtctggctcctgaacaccctcctccttcctggggagggtttttgcccctctgaggttgtgcaggaaccagaagaacagtttctctgcttcaccatgtctgcaacctggggcttgcctagccccaaatttttctggcaggcgccaagctccagcacagtccacacagtggaaaccaaatgaaacgactttggcttgtggagggggaagaatgtgaaacaaaaacaaaagcaaaatcacccgcccacaagatacaacagaaaccccatccactacccatctccttcccatgtgaggccgaccacccaggcccccaaacaacccctaaaataagacgcaaaccaaaggcctgacatataagccccaaatcaacaaacctctcccgaaacatgcaaaggaactgcccgcccagaaatacccaaaatagtctgtgcagattaggaagagaccggtggcttcgcccaccctctctgtaaactctggtactgtgtcctccatggggtgccccacggagagcgggctctcttctcaaggccaagacagtgacagttatgaaagatggtctttgctggcacctgggaactgctttttcttcaactaacagtgacaatggcctggcccagaagcaggcttgagctcagaagacacccccaagcctgaaagccagtggtggcttctaatgtacccacctgtggtaggcgtggcaatgcccaggaaaccagcacaattcacaaatacagcttaggacaataccagggatacctggggtggcaagatgccagcaatcaaaactgggccaagcaggggcaggacactggaggcccccatgaccttgtcttttccagatctgtagcaaaggcacaactggggtctcccacatggcctgtcccagatggcatgtaatccattggtgaagtccctatggtgcacaggatatctcagctttcttggctctgggtcccaggcctgggactccctggtccattcccttcctcactcagtgtgggcacccccatcccctaccttccagctgtgggatggcttggacagggggcatctttgaggtcacccattctgcagtgttgaatgttgtccaccccccaccccccacccccattttttcctttcccttttgttcgtctcaccgctcatccagtgggcggccagagaggcacactgaggctggaagagcccaggccctctgctagttctttttctcaaggtagttggaaggcacccagcctttgaagggcttcacaccatccaggatctggcagtaccaccagccattagggttcctctccagaacctccatggacaccccctcctggaagcctgctgtctcctcatccccctcgtagtctgcgatagagacgtacacatctttgaggttattgtggatgaactgagacttctcgatgggcttggggcgcacaggggacacggggatgctgttgcgctgggcgggcagtaggggtgagtctgaaccctggctggcagcccgttcggccaggcggcccttggcctcggcggcagcggagcgagcagtgctaaaggaggagttccgtcggacgcctcggaggccatcagtggccgtgagtgactcattcctccgcagggcgcaggacaggttgttgtccttgggtggcggggacacaaacaccgactggggcctgaccgccacctgccgcactccgttcctcatcttcaccgctggagtgcctgaggtcttgccaaagcccccgggaggtttggaggggatggggggcgtggccttcttgctctggttgacggtgttcagtgcttggacgcgcctctcgatcttctccaggctgtctgacttgccttcgttctgcctgcccttggcgggcactgtgtccagctctttgccagaggggtcaggttgctcgttctcatccagcaccaaatagtgggaaggggcccagccctccagctccccaaacctcacataccaccacccgctctcctgcttctccagcacctgcacctccacgcccgcggggaagctgatctccgagtcctggaccttctggtaggcgctgcatgtcatgtacgaggtggctggcccttcccattccttcttggtgggacatgggggagtggtggctgggagggtgatgaggtcggatgagcttctcctagacccctcactgggagcctcggaggccgtctgcgggggcagctccgaatcctcactcttggagcccttgagccctccacggagctggcctgtgggtctcagctggcgccgtaaagtgctgatgtccatcttctcttggctctgcgactctgctcggtttaggaatggcttgggccggaccgatggcttggcccggggacaggaggtcagcccagcgttcgcatcagcatccttctttgccctgaccttgggagtgccgcggatgcctgcgtccgaagcagagcggggcttcaggtcgccactggttttggacaaggaagaggaggaggaggaagaggaggagcagcaagtggtgttgatggtgatggatgaggaaaaggaggctgaggagtggttcttccccatttctgcctgggcattcttctctgccttgagctttaggagtgatgatgacttgggggagcctgatttgggggagtttttcctggtcagggacagcgaggagctgcctggggagtcgctgtccccggaggagcctctggctgacagggtgtcctctgcatatggccggaagccctcattctcatagatggtctcctcttccagggccacatcctctgaagactcacccaccttgaagcgggcccgctgcagagaagaggccggcgagggccggtggggctgggcaggccgcctctcccctgaggctctgtcctccacgggctcctcgctcagctcaggctctgagtcaaagccgaatgcagggatgtcatactcaggctcctcatacttgagcttccgcggggagtcctggctctcactggcccccgtagggccctcctcggcctccttgggcttgctggggggtgctggcgggggcaccttgggccgggtcagcgtgcttgtgcggcggctcaggttgggcttcttgcgcttatcgatgtatgatgcgggggcccagccctccttctcaccgatctgcacgtaccaccagccacctgagttcttatcaatgacctctgccttctgtccaccccgaaagctgatgccatcggaaatgcacgactggaattcggcaatggtgtagtactccacctcaacagaagggggctctggtggctttggcagttggaaccccaggctggattctctgcgtggtggaggtcttgtccgtaggttcggggagctgatctgggcccgctgaggggcaatcctggccacagctggagagccctgggccagcctggagacagtcctgtcaggaacgcccacggcactgccattggaggcattgcagaggatgggcaggctgatctccttcttggcaatgggggcctcatggccctcgccttcggctggtggagtttccttgtccccagacgccttcttgttcagcaggttgctgatctccatgatgttcccaatgatctccactgggccggccaggttcttcttccgggttggcaggtcatccttggccttcttcaggtaggatgctggcgcccagccctctttgcccaggtatctgatataccaccagccttccagattcttccggatcacctccactgtgacgcccttctcaaagccaatctcgtccttgctttggctggtgtaaggctgcacggtgacatacttctcctcttctccagtcttagaggtgttgatgtcggagtcatcccgagtaccattctgggcctccaggtaggtggcagggacccagccctgctcctcagaagtgctcacgaaccaccagccgctctcgttcttctcgatgacatccaccacctccccggcctggaggctcagctccgagttctcctgcttcttatagttggacaccaccacgtactgttccaggatcatgggctcggcggtggcgtcggcacctgtcacgtccttcttgggcgactcagcccagctggacagccacactgtggtcccagccactctggaggctgaagtgggaggattgcttgagcccagggaggtcgaggctgcagtgaggcatgatcacgccactgcaatccagcctgagcaacagagcgagaccctgatttcctcttggaactgccatagtcccttccctaagccttggcggggaagggcgaggcaggttctcctcacttcccaaactgggaaactgacgctccgggatggcgctcgccggaacccggcccctacccagcgctgggagcccgctctccccgccaccggagcggttcacccgccaggtaatcacagatttgtg

SEQ ID NO: 120681 - DNA, 591 bp, Homo sapiens
gtccgtgtgcgcgggagccggtgcctgcaggccctgcgcatgcttccctgtgatgtgcagaagctgtttgccagcatggcagggggcaagagggagccgtggaaggcgttggagcatgggactgacttggcaaaagcccagttgagaagtttaagttggcagccagggttccatccaggtggtagtgaaaggaatgcagatgtgaggcaaggcggggccatcttgggcttggtggtcaacgccgacggcgagttgcacctcagccacaatggcgcggccgccggcatgcaactgtgcgtggacgcctcgcagccgctttggatgctcttcggcctgcacgggaccatcacgcagatccgcatcctcggctggtggttcgtgagcacttctgaggagcagggctgggtccctgccacctacctggaggcccagaatggtactcgggatgactccgacatcaacacctttaagactggagaaggaaagatgcatggcaagcactcagagaatgccaggactcgggctggtgggcacaacacagctctctatgcacctcccattggttctgtttctctggagaacactgactaa

SEQ ID NO: 120682 - DNA, 1059 bp, Homo sapiens
atgaagccacggaccttcgcagtgactgttacagtttttaaagatggagtgaggctacagaccttcccagtaactgttacaactcataaaagcagtgtggacctaaagagtgaacaacaagatttactgcaaaaagcaaaagaacaacacttccacactgctgaacacgacccaagcagcttaccactacagcttgggcagcctgcttttattcccttatcggactccacccacatcctgctgattggcccattttacagagagctgattggtccattttatagagcactgattggtccgttttacagagagctgattgtgtgtttgacaggtgctaatgatgcattgagttgctcctctcccacatgtggtaagtttctcaagactgtgagcaaagtcccggtgtgccgccgtggcctggccgtgaacaggaaagaggctgagggccgctcctccgagagccccaccagctctgccactttccagtcgccggctttgtcctggatgctggtctcccagaggctgctgctgccccacatgatcggggcccagagctcgccgggccccaagcggccgggcaacaccctgcgcaagtggctcaccagccccgtgcggcggctcagcagcggcaaggccgacgggcacgtgaagaagctggcgcacaagcacaagaagagccgcgaggtccgcaagagcgccgacgccggctcgcagaaggactccgacgacagtgcggccaccccgcaggacgagacggtcgaggaggataccgtcgcgcagcccaggggccggcgagagggggccggacgccagagtggcagcagagcggcggggcccggcggacgccgagcgtcggccatccgcggcgggcacgcgcggacagatgtcgggaagcgaaacggaaccaggacgagaaaggagctcatgccgctccacgggaagcgcaaggacgcagcggaacatgacgaaccaacatcagccagtcgccccgcgggcgagcgcccggaattgacattagcagctgttcaaacagaatacaactgctcttttccaagctaa

SEQ ID NO: 120683 - DNA, 1264 bp, Homo sapiens
  misc_feature (1)...(1264): n = a,t,c or g
tttcgtgtccctgtcgcgtcccagtctgtgtctgagtgtctgtttagctggtcgctgcttttgctgccaagcgggtggctctagctgctgtggagggagaggtaggataggggttctgcacctttagcctccagtcggctccagtcaccatgcccaacggattgaagccagtggacacgctggactcgctgtccttctgtcagttcagcctactgcagcggcgggcagccgggcacctgcaagtacttggatcctcgacctagactcgctctccgtctccagcaatgacgccagtccacccgcatccgtggcttccctccagccccacatgatcggggcccagagctcgccaggccccaagcggccgggcaacaccctgcgcaagtggctcaccagccccgtgcggcggctcagcagcggcaaggccgacgggcacgtgaagaagctggcgcacaagcacaagaagagccgcgaggtccgcaagagcgccgacgccggctcgcagaaggactccgacgacagtgcggccaccccgcaggacgagacggtcgaggagctaaaatcctttgggggagacagcgtggagaatttgcaatgcaagacagatgttcaccggaactctcctgctgttgagcagggcatccgtgggtggccctgtctcatcggaaacgccctggctgtcaatcggcagcagacccacatgtgtgcatgtttggctgacgttatgtggcatgagggctgccagtcacagcagaggcttggtgaccttgtgggttttgtgaccctggctgtccaaggaggcccgcacttcacagccccagctcttcttcccactctgggcctggggcgcttgtccttagattcgtcgtctcgccgctctgcttcatcctgctttcttcctcagccttctgcagctttttcctacacatcagtcacatgtggtaagtttctcaagactgtgagcaaagtcccggtgtgccgccgtggcctggccgtgaacaggaaagaggctgagggccgctcctccgagagccccaccagctctgccactttccagtcgccggctttgtcctggatgctggtctcccagaggctgctgctgnggggtaggttgtgtgccgcggcaaatatgacgcacagtgttgcgctccatgagttcgccaattgtctaacgcccccggaaattgtcacggtgacaacgatcccgaaagccccgcgggtggagcacgatgtcatcacctccaaagctctggcctctctctga

SEQ ID NO: 120684 - DNA, 602 bp, Homo sapiens
ggcacgaggcagctcttctccagatcttgcccacgtgtcctcccccgccagccttccacagccatggcagcctacggccagacgcagtacagtgcggggatccagcaggctaccccctatacagcttacccacctccagcacaagcctatggaatcccttcctacagcatcaagacagaagacagcttgaaccattcccctggccagagtggattcctcagctatggctccagcttcagcacctcacccactggacagagcccatacacctaccagatgcacggtgaatacaacacacacaatggaccttccacaccagcgaaagagggagacacagacaggccgcaccgggcctccgacgggaagctccgaggccggtctaagaggagcagtgacccgtccccggcaggggacaatgagattgagcgtgtgttcgtgtgggacttggatgagacaataattatttttcactccttactcacggggacatttgcatccagatacgggaaggacaccacgacgtccgtgcgcattggccttatgatggaagagatgatcttcaaccttgcagatacacatctgttcttcaatgacctggagga

SEQ ID NO: 120685 - DNA, 2327 bp, Homo sapiens
aaatggtagaactagtgatctcacccagcctcactgtaaacagcgattgtctggataaactgaagtttaaccgtgctgacgctgctgtgtggactctgagtgacagacaaggcatcaccaaatcggcccccctgagagtgtcccagctcttctccagatcttgcccacgtgtcctcccccgccagccttccacagccatggcagcctacggccagacgcagtacagtgcggggatccagcaggctaccccctatacagcttacccacctccagcacaagcctatggaatcccttcctacagcatcaagacagaagacagcttgaaccattcccctggccagagtggattcctcagctatggctccagcttcagcacctcacccactggacagagcccatacacctaccagatgcacggcacaacagggttctatcaaggaggaaatggactgggcaacgcagccggtttcgggagtgtgcaccaggactatccttcctaccccggcttcccccagagccagtacccccagtattacggctcatcctacaaccctccctacgtcccggccagcagcatctgcccttcacccctctccacgtccacctacgtcctccaggaggcatctcacaacgtccccaaccagagttccgagtcacttgctggtgaatacaacacacacaatggaccttccacaccagcgaaagagggagacacagacaggccgcaccgggcctccgatgggaagctccgaggccggtctaagaggagcagtgacccgtccccggcaggggacaatgagattgagcgtgtgttcgtgtgggacttggatgagacaataattatttttcactccttactcacggggacatttgcatccagatacgggaaggacaccacgacgtccgtgcgcattggccttatgatggaagagatgatcttcaaccttgcagatacacatctgttcttcaatgacctggaggattgtgaccagatccacgttgatgacgtctcatcagatgacaatggccaagatttaagcacatacaacttctccgctgacggcttccacagttcggccccaggagccaacctgtgcctgggctctggcgtgcacggcggcgtggactggatgaggaagctggccttccgctaccggcgggtgaaggagatgtacaatacctacaagaacaacgttggtgggttgataggcactcccaaaagggagacctggctacagctccgagctgagctggaagctctcacagacctctggctgacccactccctgaaggcactaaacctcatcaactcccggcccaactgtgtcaatgtgctggtcaccaccactcaactaattcctgccctggccaaagtcctgctatatggcctggggtctgtgtttcctattgagaacatctacagtgcaaccaagacagggaaggagagctgcttcgagaggataatgcagagattcggcagaaaagctgtctacgtggtgatcggtgatggtgtggaagaggagcaaggagcgaaaaagcacaacatgcctttctggcggatatcctgccacgcgaacctggaggcactgaggcacgccctggagctggagtatttatagcaggatcagcagcatctccacctgccatctcaccctcagaccccctcgccttccccacctccccaccgagaactccagagacccagatgttggacaccaggaaggggccccacagccgagacgactgtccagtgaccatctcagaagccgtccatcagtccaaatgggggttctgagaaggaaagtacccaacattggcttcggagtatttgactttggggaaaagggctggctcggagtctagactcttctgtaagactcacagaacaaaagcaaggaattgctgatttggggggtgcctggtgatgaggaggggatgggtttgtcttgtcttctttttaatttatggactagtctcattactccggaattatgctcttgtacctgtgtggctgggtttcttagtcgttggtttggtttggttttttgaactggtatgtggggtggttcacagttctaatgtaagcactctattctccaagttgtgctttgtggggacaatcattctttgaacattagagaggaaggcagttcaagctgttgaaaagactattgcttatttttgtttttaaagacctacctgacgtcatgtggacagtgcacgtgccttacgctacatcttgttttctaggaagagggggatgctgggaaggaatgggtgctttgtgatggataaaaggcattaaataaaaccacgtttacattttg

SEQ ID NO: 120686 - DNA, 602 bp, Homo sapiens; identical to SEQ ID NO: 120684

SEQ ID NO: 120687 - DNA, 2327 bp, Homo sapiens; identical to SEQ ID NO: 120685

SEQ ID NO: 120688 - DNA, 915 bp, Homo sapiens
atgagtgaaggggcggccgctgcctcgccacctggtgccgcttcggcagccgccgcctcggccgaggagggcaccgcggcggctgcggcggcggcagcggcgggcgggggcccggacggcggcggcgaaggggcggccgagcccccccgggagttacgctgtagcgactgcatcgtgtggaaccggcagcagacgtggctgtgcgtggtacctctgttcatcggcttcatcggcctggggctcagcctcatgcttctcaaatggatcgtggtgggctccgtcaaggagtacgtgcccaccgacctagtggactccaaggggatgggccaggaccccttcttcctctccaagcccagctctttccccaaggccatggagaccaccaccactaccacttccaccacgtcccccgccaccccctccgccgggggtgccgcctcctccaggacgcccaaccggattagcactcgcctgaccaccatcacgcgggcgcccactcgcttccccgggcaccgggtgcccatccgggccagcccgcgctccaccacagcacggaacactgcggcccctgcgacggtcccgtccaccacggccccgttcttcagtagcagcacgctgggctcccgacccccggtgccaggaactccaagtacccaggcaatgccctcctggcctactgcggcatacgctacctcctcctaccttcacgattctactccctcctggaccctgtctccctttcaggatgctgcctcctcttcttcctcttcttcctcctccgctaccaccaccacaccagaaactagcaccagccccaaatttcgtgtagacatagattctgtgaccgccgagagtgagttaactaggaggaaatatgaagggagccctgcagagctgccacctctagggtcctga

SEQ ID NO: 120689 - DNA, 638 bp, Homo sapiens
gttaattaagaatttattagacttgaaatagtcaaaagatgagagataatttgtttcatttctattcccttttctgtaaccaagatgaaggccaaagtggtcttaggaaccttttgtcttcctgatgagttcttctatggtgtcccactgctccttggtgacctttctcaggtcgttgaattcccctgaaataagtacttcctctccaccgtcaaatttaatgactgctccattaatccaagaagcataatcactacaaaggaaagcagcaagatttgcgagttcttctacagtccccaggcgaccacagggaattctgccaatcatttctttctcaaatgttccagttgggtccagacggctaaaggcacctttggtttttataggccctggttgaatcacattgaatcgcattccatatttaccccattcagctgcaagagacttgctcatggcttccacacctgctttggcagaagcacttggtactacaaaacctgaaccagtctcagcatagatagtagtaatagaaagaaatgtcacgaaagctgtgccatttagaactatgtcagttatggttttccaagcattaggagaaagtcttcagtaggagaaataaaattccctgctgcattttt

SEQ ID NO: 120690 - DNA, 1983 bp, Homo sapiens
ctttaacaccccactgtcaacattagacagatcatcgagacagaaagttaacaaggatatccaggacgttatctcagctctgcatgaagcaggcctaatagacatctacagaactctccaccccaaatcaacagaatatacattcttctcagcaccacatcacacttattacaaaattgaccacatagttggaagtaaagcactccttagcaaatgtaaaagaacagaaatcacaacaaactgtctctcagacgacagagcaatcaaattagaactcaggattaagaaactcactcaaaactacacaactacatggaaactgaacaacctgctcctaagtgactactgggtaaacaacgaaatgaaggcagaaataaagatgttctttgaaaccaatgagaacaaagacacaatgtaccagaatctctgggacacattcaaagcagtgtgtagagggaaatttatagcagtaaatgcctacaagagaaagcaggaaagatctaaaatccacaccctaacatcacaactaaaagaaccagagaagcaagagcaaacacattcaaaagctagcagaaggcaagaaataactaagattagagcagaactgaaggagatagacacacaaaaaacccttcaaaaaatcagtgtatccaggagctggttttctgaaaggatcaacaaaattgatagactgatagcaagactaatgaagaagaaaagagagaagaatcaaatagatgcaataaaaaatgataaaggggatatcactattgatcccacagaaatgcaaactaccatcagagaatactataaaaacctctacgcaaataaacttgaaaatctagaagaaatggataaattcttggacacatatatcctcccaagactaaaccaggaagaagttgaattgccaaatagaccaataacaggctctgaaaatgaggcaataattaatagcctaccaacaaaaaaagtccaggaccagatgagttcacagccaaattctaccagaggtacaaaggttctggccagggcaatcaggcaagagaaagaaagagaggacactcaattaggaaaagaggaagtcaaattgttactgtttgcagaagacatgattgtgtatttagaaaaccccatcgtctcagcccaaaatctccttaagctgataaacaacttcagcaaagtctcaggatacaaaatcaatgtgcaaaaatcacaagcattcttacacaccaataacagacaaacagagagccaaatcatgagtgaatgcccactaacaattgcttcaaagagaataaaatacctaggaatccaacttacaagggatgtgaaggacctcttcaaggagaactacaaaccactgcttaacaaaataaaagaggacacaaaacaaatggaagaacattccacgctcatgtttaggaagaaacaatattgtgaaaatgaccatactgcccaaggtaatttaaaaaaaactactttaaacttcatatggaaccaagaaagagcccgcattgccaagacaatcctaagcaaaaagaacaaagctggaggtatcacgctacctgacttcaaactatactacaaggctacagtaaccaaaacagcacggtactggactctcaccattaagaaaggaagcgtgtggcccatctccttgaaatctgagaagaggggtcatagaactagaccgctgtggaagttatgccataatgacgtccaaggagagctcctaaagacaatacaatttttgtttggctctcccttaggacactcatccttggatcccagtgccctggtgtgtaagtaaaacttgccagcccacagccagaaccaacttgccagcagtgtgagagccattttaggagtggatcttccagccccagtgacactccagctgataacccatgagcgagtaagtctcaaatcagtgaataaactagttcagagtcacacggccagtaagaaatagggtcaaga

SEQ ID NO: 120691 - DNA, 2991 bp, Homo sapiens
atgcctccccactcagagcagcctcacagtccaagcacaagacagaaacgaaaagttcctttgtttgtaaggcaatgcccatcttttgtcattcaggcccccaaagctaagatggacacatttgatggaaggaagaagcagtttaccaggttcttattcttattctcaatggaccagctgggccagggccggttttcaatgcagactctctcttttgctcttgctgtgtatcggaaggattcccccctggttgcttgtcaggtgcaggctcttggcaacctggagccaagctcagtggaagcgcatgtttccagccacggcatcgccattgacaggaagggctggcatgtatcacttttcagcatccaaccaggtgattgcttccccaaagctctcgtggaggatagccccagggacagagcacggaggcaacagtcaagcaaagaggaaggttggtgtagagacaggagaaggcttaagttccacagcaagaaaggggcggcagcaatagtggtgaaaagcaagaagtatgagtctcctagctttggcgtgtgctttgaatccttgctgaatccaccaaggctgaccagcagaagagaaaagacgatttccagcagtaaacgatgcaggcagtgtcatgcagaggaaaccactgttgttttctgggctaaagagagccagaccggagaacagacaggaaggggagcaggacagaggagaatgggcatgattatatgtaaagcttgttccatgctccctgcagaaaggcaggatctcagacccacttctcttgttatctctcatggggtcagtgtcaaggacagacgtgaacactgtcaatgccccaactactacccaccactgagaaatatgtcccctctggaacattcaattaaaatctgtggggggaaaaagcctcaaaatgacagccagagaataacaacaataacaaaagttattgtaaaccaagacttcaagcagccagatgacactgagttgagtcaaggcagtagaaaagaaacgagtgaagcgtccctggtcacattactttgggagttggtaacagcaggccaaacacctccactggtgacacccaggcaaacagggtctggagtggacctccagcaaactccaacagacctgcagttgagggtcctgactattagaaggaaaactaacaaacagaaaggacatccaccaaaaccccatctgtatgtcaccatcatcaaagaccaaagaactctccaccccaaatcaacagaatatacattcttctcagcaccacatcccacttattctaaaattgaccacatagttggaagtaaagcactcctcagcaaatgtaaaagaacagaaattataacaaactgtctctcagaccatagtgcaatcaaattagaactcaggattaagaaactcactcaaaaccgctcaactacatggaaacttaacaatctgctcctgaatgactactgggtatataaagaaatgaaggcagaaataaagatgttctttgaaaccaatgagaacaaagacacaacataccagaatctctgggacacatttaaagcaatgtatagtgggaaatttatggcactaaatgcccacaagagaaagcagcaaagatctaaaattgacaccctaatatcacaattaacagaactagagaagcaagagcaaacacattcaaaagctagcagaaggcaagaaacaactaagatcagagcagaactgaaggagatagagacacaaaaaacccttcaaaaaatcaatgaatccaggagctggttttttgaaaagatcaacaaaattgatagaacactagcaagactaataaagaagaaaagagagaagaatcaaatagacacaataaaaaatgataaaggtgatatcaccaccgatcccacagaaatacaaactactgtttatattatttggtactggtacgcaaataaactagaaaatctagaagaaatggataaattcctggacacatataccctcccaatactaaaccaggaagaagttgaatccctgaatagaccaataacaggctctgaatttgaggcaataattaatagcctaccaaccaaaaaaagtccaggaccagatggattcacagctgaattctaccagagaaccaaagacaaaaaccacatgattatctcaatagatgcagaaaaggccttcaacaaaattcaacagcccttcatgctaaaaactctcaataaactaggtattgatgggacatatctcacccacagccaatatcatactgactgggcaaaaactggaagcattccctttgaaaattggcacaagacagtgttggaagttctggccagggcaatcaggcaggagaaagaaataaagggtattccattaggaaaagaggaagtcaaattgtccctgtttgcagatgacatgattgtatatttagaaacccccatcatctcagcccaaaatctccttaagttgataagcaacttcagcaaagtctcaggatacaaagtcagtgtgcaaaaatcacaagcattcctatacaccaataacagacaaacagagagccaaatcatgagtgaactcccattcacaattgcttcaaagagaataaaatacctaggaatccaacttacaagggatgtgaaggacctcttcaaggagaactacaaaccactgatcaatgaaataaaagaggacacaaacaaatggaagaacattccatgctcatgggtaggaagaatcaatgttgtgaaaatggccatattgcccaaggtaatttatagattcaatgccatccccatcaagctaccaatgactttcttcacagaattggaaaaaactactttaaagttcatatggaaccaaaaaagagccagcattgccaagacaatcctaagccaaaagaacaaagctggaggcatcacgctacctgacttcaaactatactacaaggctacagtaaccaaaacagcatggtactggtactaa

SEQ ID NO: 120692 - DNA, 1471 bp, Homo sapiens
ctttaacaccccactgtcaacattagacagatcatcgagacagaaagttaacaaggatatccaggacgttatctcagctctgcatgaagcaggcctaatagacatctacagaactctccaccccaaatcaacagaatatacattcttctcagcaccacatcacacttattacaaaattgaccacatagttggaagtaaagcactccttagcaaatgtaaaagaacagaaatcacaacaaactgtctctcagacgacagagcaatcaaattagaactcaggattaagaaactcactcaaaactacacaactacatggaaactgaacaacctgctcctaagtgactactgggtaaacaacgaaatgaaggcagaaataaagatgttctttgaaaccaatgagaacaaagacacaatgtaccagaatctctgggacacattcaaagcagtgtgtagagggaaatttatagcagtaaatgcctacaagagaaagcaggaaagatctaaaatccacaccctaacatcacaactaaaagaaccagagaagcaagagcaaacacattcaaaagctagcagaaggcaagaaataactaagattagagcagaactgaaggagatagacacacaaaaaacccttcaaaaaatcagtgtatccaggagctggttttctgaaaggatcaacaaaattgatagactgatagcaagactaatgaagaagaaaagagagaagaatcaaatagatgcaataaaaaatgataaaggggatatcactattgatcccacagaaatgcaaactaccatcagagaatactataaaaacctctacgcaaataaacttgaaaatctagaagaaatggataaattcttggacacatatatcctcccaagactaaaccaggaagaagttgaattgccaaatagaccaataacaggctctgaaaatgaggcaataattaatagcctaccaacaaaaaaagtccaggaccagatgagttcacagccaaattctaccagaggtacaaaggttctggccagggcaatcaggcaagagaaagaaagagaggacactcaattaggaaaagaggaagtcaaattgttactgtttgcagaagacatgattgtgtatttagaaaaccccatcgtctcagcccaaaatctccttaagctgataaacaacttcagcaaagtctcaggatacaaaatcaatgtgcaaaaatcacaagcattcttacacaccaataacagacaaacagagagccaaatcatgagtgaatgcccactaacaattgcttcaaagagaataaaatacctaggaatccaacttacaagggatgtgaaggacctcttcaaggagaactacaaaccactgcttaacaaaataaaagaggacacaaaacaaatggaagaacattccacgctcatgtttaggaagaaacaatattgtgaaaatgaccatactgcccaaggtaattta

SEQ ID NO: 120693 - DNA, 1061 bp, Homo sapiens
cctccactggtgacacccaggcaaacagggtctggagtggacctccagcaaactccaacagacctgcagttgagggtcctgactattagaaggaaaactaacaaacagaaaggacatccaccaaaaccccatctgtatgtcaccatcatcaaagaccaaagaactctccaccccaaatcaacagaatatacattcttctcagcaccacatcccacttattctaaaattgaccacatagttggaagtaaagcactcctcagcaaatgtaaaagaacagaaattataacaaactgtctctcagaccatagtgcaatcaaattagaactcaggattaagaaactcactcaaaaccgctcaactacatggaaacttaacaatctgctcctgaatgactactgggtatataaagaaatgaaggcagaaataaagatgttctttgaaaccaatgagaacaaagacacaacataccagaatctctgggacacatttaaagcaatgtatagtgggaaatttatggcactaaatgcccacaagagaaagcagcaaagatctaaaattgacaccctaatatcacaattaacagaactagagaagcaagagcaaacacattcaaaagctagcagaaggcaagaaacaactaagatcagagcagaactgaaggagatagagacacaaaaaacccttcaaaaaatcaatgaatccaggagctggttttttgaaaagatcaacaaaattgatagaacactagcaagactaataaagaagaaaagagagaagaatcaaatagacacaataaaaaatgataaaggtgatatcaccaccgatcccacagaaatacaaactactgtttatattatttggtactggtacgcaaataaactagaaaatctagaagaaatggataaattcctggacacatataccctcccaatactaaaccaggaagaagttgaatccctgaatagaccaataacaggctctgaatttgaggcaataattaatagcctaccaaccaaaaaaagtccaggaccagatggattcacagctgaattctaccagag

SEQ ID NO: 120694 - DNA, 1584 bp, Homo sapiens
atggtggaaggcacctcttcacagggcagcaggaaagagaatgtgttccaagtgaaggggtctcttgcagctgaatggggtaaatatggaatgcgattcaatgtgattcaaccagggcctataaaaaccaaaggtgcctttagccgtctggacccaactggaacatttgagaaagaaatgattggcagaattccctgtggtcgcctggggactgtagaagaactcgcaaatcttgctgctttcctttgtagtgattatgcttcttggattaatggagcacctccactggtgatacccaggcaaacagtgtctgcagtggacgtccagcaaactccaacagacctgcagctcagggtcctgactgttagaaggaaaactaacaaacagaaaggacatccacaccaaaaccccgtttcaccacatctcacttattccaaaattgaccacataggtggaagtaaagcactcctcagcaaatgtaaaagaacagaaattataacaaactgtctctcagaccacagtgcaatcaaacgacaactcaggtttaagaaactcactcaaaaccgctcaactacatggaaactgaacaacctgttcctgaatgactactgggtacataacgaaatgaaggcagaaataaagatgttctttgaagccaatgagaacaaagacacaacataccagaatctctgggacacatttaaagcagtgtgtagagggaaatttatagcactaaatgcccacaagagaaagcagggaagatctaaaatgggcaccctaacatcacaattaaaagaactagagaagcaagagcaaacacattcaaaagctagcagaaggcaagaaaagatacaaactcccatcagagaatactataaacaccactatgcagataaactagaaaatctagaagaaatggatacattcctgtacacatacactctcccaagactaaacctggaagaagttgaatccctgaatacaccaataacacactctgaaattgaggcaataattaaaagcctactaaccaaaaaaagtccaggaccagacagattcacagccaaattccaccagaggtacaaagaggagctggtaccattccttctgaaactattccaatcaatagaaaaagaggtaatcctccctgactcattttatgaggccagcatcatcctgatacgaaagcctggcagagatacaacaacaaaaaaagagaattttagaccaatattcctgatgaacattgatgcaaaaaacttcagtaaaatactggcaaaccaaatccagcagcacatcaaaaaggttatccaccacgatcaagtgggcctcatccctgggatgcaaggctggttcaacatacccaaatcaataaacataatccatcatataaacagaaccaaagacaaaaaccacatgattatctcaatagatgcagaaaaggccttcgacaaaattcaactgcccttcatgctaaaaactctcagtaaactaggagtcagttacaacatgttcactagactgactatccccattgcccaagttgacacaagaggaaaccagcttccatcttacctcatctga

SEQ ID NO: 120695 - DNA, 1284 bp, Homo sapiens
acgccgcctgggtcccagtccccgtcccatcccccggcggcctaggcagcgtttccagccccgagaactttgttctttttgtcccgccccctgcgcccaaccgcctgcgccgccttccggcccgagttctggagactcaacatgaagctaccggccagggttttctttactctggggtcccggctgccctgtggcctcgctcctcggaggtttttcagttatgggacaaaaatattatatcaaaacactgaagctttgcaatctaaattcttttcacctcttcaaaaagcgatgctaccacctaatagttttcaaggaaaagtggcattcattactgggggaggtactggccttggtaaaggaatgacaactcttctgtccagcctaggtgctcagtgcgtgatagccagccggaagatggatgttttgaaagctaccgcagaacaaatttcttctcaaactggaaataaggttcatgcaattcagtgtaatgtgaagtatcctgatatggttcaaaacactgtgtcagagctgatcaaagtgcagggacatcctagtactgtgataacaaatgcagcagggaattttatttctcctactgaaagactttctccctaatgctggaaaaaccaaaaacgaacatagtctaaaatggcacagccttcgtgacactagaaattggaaaacaactaattaaagcacagaaaggagcagcatttctttcctattacctactatctatgcctgagactggttcaggttttgtagtacccaagtgcttctgccaaagcaggtgtggaagcccatgagcaagtctcttgcagctgaatggggtaaaatatggaatgcgattcaatgttgatccaaccacgggcctataaaaaaccaagagttccctttagccgtctggacccaactggaacattttgagaaagaaatgattggcagaattccctgtggtcgcatggggactgtagaagaactccgcaaatcttgctgctttcctttgtagtgattatgcttcttgggattaatggagcagtcattaaatttgacggtggagtagaagtacttattttcaggggaattcaacgacctgagaaaggtcaccaaggagcagtgggacaccatagaagaactcatcaggaagacaaaaggttcctaagaccactttggccttcatcttggttacagaaaagggaatagaaatgaaacaaattatctctcatcttttgactatttcaagtctaataaattcttaattaacaaaaaaaaaaaaaaaca

SEQ ID NO: 120696 - DNA, 2902 bp, Homo sapiens
atggtaaagggatcacttcaacaagaagagctaactatcctaaatatatatgcacccaatacagaagcacccagattcataaagcaagtccttagagacctacaaagagacttagactcccacacattaataatgggagactttaacaccccactgtcaacattagacagatcaacgagacagaaaattaacaaggatacccaggaattgaactcagctctgtaccaagcggacctaatagacatctacggaactctccaccccaaatcaacaggaatatacattttttttcagcaccacaccacacctattcccaaaattggaccaccatagttggaagtaaagctctcctcagcgaacataaaagaacagaaattataaccaaactatctctcagacccacagtgccaatcaaactagaactcaggattaagaaactcactcaaaaccagctcagctacatggaaactgaacaacctgctcctgaatgactactgggtacataacgacatgaaggcagaaataaagatgttctttgaaaccaaaagagaacaaaggacacaacataccagaatctctggggacacattcaaagcagtgtgtagagggaaattcatagcaaaaaaatgcccacaacagaaagcaggaaagtatctaaaattgacaccctaacatcacaattaaaagaactagagaagaaagagcaaacatatttgaaagctagcagaaggcaagaaataactaagatcaaagcagaactgaaggagatagagacacaaaaaaacccttcaaaaaaaatcaatgaatccaggagctggtttttttgaaaagatcaataaaatagatagatagaccgctcagactaataaagaaaaaaagagagaagaatcaaatacacgcaataaaaaatgataaaggggatatcaccaccgatcccacagaaatacaaactaccatcagagaatactacaaacacctctacgcaaataaactagaaaatctagaagaaatggataaattcctcgacacatacaccctcccaagactaaaccaggaagaagttgaatctctgaatagaccaataacaggctctgaaattgtggcaataatcaatagcttaccaaccaaaaagagtccagtaccagatggattcacagctgaattctaccagaggtacaaggaggaactggtaccattccttctgaaactattccaatcaatagaaaaagagggaatcctccctaactcattttatgaggccagcatcattctgataccaaagccgggcagagacacaaccaaaaaagagaattttagaccaatatccttgatgaacattgatgcaaaaatcctcaataaaatactggcaaaccgaatccagcagcacatcaaaaagcttatccaccatgatcaagtgggcttcatccctgggatgcaaggctggttcaatatacgcaaatcaataaatgtaatccagcatataaacagagccaaagacaaaaaccacatgattatctcaatagatgcagaaaaagcctttgacaaaattcaacaacccttcatgctaaaaactctcaataaattaggtattgatgggatgtatttcaaaataataagagctatctatgacaaacccacagccaatatcatactgaatgggcaaaaactggaagcattccctttgaaaactggcacaagacagggatgccctctctcaccgctcctattcaacatagtgttggaagttctggccagggcaatcaggcaggagaaggaaataaagggtattcaattaggaaaagaggaagtcaaattgtccctgtttgcagacgacatgattgtttatctagaaaaccccatcgtctcagcccaaaatctccttaagctgataagcaacttcagcaaagtctcaggatacaaaatcaatgtacaaaaatcacaagcattcttatacaccaacaacagacaaacagagagccaaatcatgggtgaactcccattcacaattgcttcaaagagaataaaatacctaggaatccaacttacaagggatgtgaaggacctcttcaaggagaactacaaaccactgctcaaggaaataaaagaggacacaaacaaatggaagaacattccatgctcatgggtaggaagaatcaatatcgtgaaaatggccatactgcccaaggtaatttacagattcaatgccatccccatcaagctaccaatgactttcttcacagaattggaaaaaactactttaaagttcatatggaaccaaaaaagagcccgcattgccaagtcaatcctaagccaaaagaacaaagctggaggcatcacactccttgacttcaaactatactacaaggctacagtaaccaaaacagcatggtactggtaccaaaacagagacatagatcaatggaacagaacagagccctcagaaataatgccgcatatctacaactatctgatctttgacaaacctgagaaaaacaagcaatggggaaaggattccctatttaataaatggtgctgggaaaactggctagccatatgtagaaagctgaaactggatcccttccttacaccttatacaaaaatcaattcaagatggattaaagatttaaacgttaaacctaaaaccataaaaaccctagaagaaaacctaggcattaccattcaggacataggcgtgggcaaggacttcatgtccaaaacaccaaaagcaatggcaacaaaagacaaaattgacaaatgggatctaattaaactaaagagcttctgcacagcaaaagaaactaccatcagagtgaacaggcaacctacaacatgggagaaaattttcgcaacctactcatctgacaaagggctaatatccagaatctacaatgaactcaaaaaa

SEQ ID NO: 120697 - DNA, 5130 bp, Homo sapiens; identical to SEQ ID NO: 116418

SEQ ID NO: 120698 - DNA, 3570 bp, Homo sapiens; identical to SEQ ID NO: 116242

SEQ ID NO: 120699 - DNA, 3666 bp, Homo sapiens; identical to SEQ ID NO: 116259

SEQ ID NO: 120700 - DNA, 3529 bp, Homo sapiens; identical to SEQ ID NO: 120366

SEQ ID NO: 120701 - DNA, 3235 bp, Homo sapiens; identical to SEQ ID NO: 116409

SEQ ID NO: 120702 - DNA, 3252 bp, Homo sapiens
atgaatctgagcagacacctgaatgaagtgaagggtgagcttctctggtcacttgaatggagagatccagatggtggtagcatcaggatggaggttggactcggaggttggactcaaaggttggaggaggagaaaaagggcaatgtctgttcccatgggaacctagagaaggactttccctatattccccacctctttgggcttcagcaaaagaaaatggacctcaagggagtcttcaagagctgcttcaaaatttactgttcatcaaagcacttgctgaagactggcttcatttcagaggctgtgctgtgttatggagaaggaggtgaaggagatacggtgcttaccatgaaggagaggtggccacatgaatgcatcgttttaatacagtgcaataagggcagactgacacctcacacggccagatactcctctgagacaaaacttccagaggaacgatcaggcagcagcatctgcggttcaccaatatccgctgttctgcagccaccgctgctgattcccaggcaaacagggtctggagtggacctccagcaaactccaacaaacctgcagctgagggtcctgactgttagaaggaaaactaacaaacagaaaggacatccacaccaaaaacccatctgtatgtcaccatcatcaaagaccaaagactttaaaccaacaaagatcaaaagagacaaagaaggccattacatcatggtaaagggatcaattcaacaggaagaactaactatcctaaatatatatgcacccaatacagaagcaccaagattcataaaacaagtccttagtgacctacaaagagacttagactcccacataataataatgggagactttaacaccccaatatcaacattagacagatcaatgagacagaaagttaacaaggatatccaggaattgaagtcagctctgcagcaagcagacctaatagacatctacagaactctccaccccaaatcaacagaatatacattcttttcagcaccacaccacacctattccaaaattgaccacatagttggaagtaaagcactcctcagcaaatgtaaaagaatggaaattataacaaactgtctctcagaccacagtgcaatcaaactagaactcaggattaaaaaactcactcaaaaccgctcaactacatggaaactgaacaacgtgctcctgaatgactactgggtacataacaaaatgaaggcagaaataaagatgttctttgaaaccaatgggaacaaagacacaacataccagaatttgtgggacacattcaaaggagtgtgtagagggaaatttatagcactaaatgcccacaagagaaagcaggaaggatctaaaattgacaccctaacatcacaattaaaagaactagagaagcaagagcaaacacattcaaaagttagcagaaggcaagaaataactaagatcagagcagaactgaaggaaatagagacacaaaaaacccttcaaaaaatcaatgaatccaggagctggttttttgaaaagttcaacaaaattgatagacggctagcaagactaataaagaagaaaagagagaagaatcaaatagacgcaataaaaaatgacaaacgggatatcaccactgatcccacagaaatacaaactaccatcagagaacactataaacacctctacgcaaataaactagaaaatctagaagaaatggataaattcctcgacacatacaccctcccaagactaaaccaggaagaagttgaatctctgaatagaccaataacaggctctgaaattgaggcaataattaatagcttaccaaccaaaaaaagtccaggaccagatggattaacagccaaattctaccagaggtacaaggaggagctggtaccattccttctgaaactattccaatcaatagaaaaagagggaatcctccctaactcattttatgaggtctgcatcatcctgataccaaagcctggcagaggcactacaaaaaaagagaattttagaccaatatccttgatgaacattgatgcaaaaatccttaataaaatactggcaaaccgaatccaacaactcatcaaaaagcttatccaccatgatcaacatataaacagaaccaaatacaaaaaccacatgattatctcaataaatgcagaaaaggcctttgacaaaattcaacagcgcttcatgctaaaaactctcaataaattaggtattgatgggacgtatctcaaaataataagagctatctatgacaaacccacagccaatatcatactgaatggacaaaaactggaagcattccctttggaaactggcacaagacagggatgccctctctcaccacccctattcaacatagtgttggaagttctggccagggcaatcaggcaggagaaggaaataaagggcattcaattaggaaaagaggaagtcaaattgtccttgtttgcagacgacatgattgtagatctagaaaatcccatcgtctccgcccaaaatctccttaagctgataagcaacttcagcaatgtctcaggatacaaaatcaatgtgcaaaaatcacaagcattcttatacaccaataacagacaaacagagagccaaatcatgagtgaactcccattcacaattgcttcaaagagtataaaatacctaggaatccaacttacaagggatgtgaaggacctcttcaaggagaactacaaaccactgctcaatgaaataaaagaggatacaaacaaatggaagaacattctatgctcatgggtaggaagaatcaatatcgtgaaaatggccatactgcccaaggtaatttatagattcaatgccatccccatcaagctgccaatgactttcttcacagaattggaaaaaacgactttcaagtatttagagtacatcaagtggctgtcgccgaagtcaggacaattggagacagtttcaaggggctgtgaatggagcaacaacaagaaaaaacactcattgagcacctgctctggcagagatccctgttcccatggagcttacatcctgaggagtgggggtggagatgggtcgaggacaggaaaagtgtcaatctgcaagtgtcaatctgaaatgcaagtgtcacagcagctccagagactccaaggaaatgactgcagctcagaggttacaaatgggagcttcaaccacaggttgattgcagacctgggacaggatgaaggacattgctgcaacacaagaggatcaaccagaaattga

SEQ ID NO: 120703 - DNA, 3300 bp, Homo sapiens; identical to SEQ ID NO: 118070

SEQ ID NO: 120704 - DNA, 4989 bp, Homo sapiens; identical to SEQ ID NO: 120155

SEQ ID NO: 120705 - DNA, 3405 bp, Homo sapiens
atggcctcgtgcctagtcagccagtcaacatctgaagataacgggttccacagggtgcccacaagctctccaaagtcccaacgccagtctgccttcacggctgtccgaagtgctttatcactgtgggagctcattgtggttttggtttgtgttttcctgatgactggttgtaatgagaaaaaccgagaatcacatttaaaaccttaccctaaagtgggagttgctgagagaccaaagaatgactgggcggagtccagcttggtgagtagggacacctgctcctcgctgggcaccgtggcctggactcaccgcctggcctttagggttcaggccacagacatccgccctgaagtaacctggcgggaaccgccacgccacagcggtggtgctgggtggctgtgttttatttatccgcacatggagacaccagagcttccaggccttcctactaacaaagagttccaggcccacaagaggactggctatgaggaagagacctggaatctgaaggaatgtgttgggcgttgtgcgcacccacccgtaaatttcctgacaaagtggagcagcttctcggactacgtgcagtgcgtcctggccttcacgggcgtggcgggctacatcacctacctgtccattgactccgccctgtttgtggagaccctgggcttcctggctgtgctgaccgaagccatgctgggtgtgccccagctttaccgcaaccaccgccaccagtccacggagggcatgagagctacagaagcactgtgggtacgggagcaccacgggtacgggagcaccacgggtacgggagcaccacgggtacgggagcactgcggctatgagagcaccacgggtacgggagtgccgcaggtacaagagcgccgcgggtacgggagcaccgtgggtatgggagggtacgggagcactgcgggtacgagagcgccgcgggtacgggagcaccgtgggtatgggagggtacgggagcactgcgggtatgagagcaccgtgggtacgggagcgctgtgggtatgggagcgccatgggtacgggagcaccgtggagcgtccccgcagctggaatgtccccgcagccagcagagcccagcccagtgatggctccgtgcctgcagctgccatgctgcagagcgcacctgtgcgtcagggccccggggacgctaacacttttggctttagcgggtactgcttttggttacggaagaaggtggaatttttaagccccaatggcagcgtctcatctggaagatgtagaaaaggggaatcctatggagatttctcttatgaccaccccattttgggaacaactggtaacagactaaaccaggaagaagttgaatctctgaatagaccaataacaggatctgaaattgtggcaataatcaatagcttaccaaccaaaaagagtccaggaccagatggattcacagccgaattctaccagaggtacaaggaggaactggtaccattccttctgaaactattccaatcaatagaaaaagagggaatcctccctaactcattttatgaggccagcatcatcctgataccaaagctgggcagagacacaaccaaaaaagagaattttagaccaatatccgtgatgaacattgatgtaaaaatcctcaataaaatactggcaaaccgaatccagcagcacatcaaaaagcttatccaccatgatcaagtgggcttcatccctgggatgcaaggctggttcaatatacacaaatcaataaatgtaatccagcatataaacagaaccaaagacaaaaaccacatgattatctcaatacatgcagaaaaggcctttgacaaaattcaacaacacttcatgctaaaaactctcaataaattaggtattgatgggacgtatctcaaaataataagagctatctatgacaaacccacagccaatatcatactgaatgggcaaaaactggaagcattccctttgaaaattggcacaagacagggatgccctctctcaccactcctattcaacatagtgttggaagttctggccagggcaattaggcaggagaaggaaataaagggtattcaattaggaaaagaggtagtcaaattgtccctgtttgcagatgacatgattgtatatctagaaaaccccatcgtctcagcccaaaatctccttaagctgataagcaactttggcaaagtctcaggatacaaaatcaatgtacaaaaatcacaagcattcttatacaccaataacagacaaacagagagccaaatcatgagtgaactcccattcacaattgcttcaaagagaataaaatacctaggaatccaacttacaagggatgtgaaggacctcttcaaggagaactacaaaccactgctcaatgaaataaaagaggatacaaacaaatggaagaacattccatgctcatgggtaggaagaatcaatatcgtgaaaatggccgtactgcccaagctaccaatgactttcttcacagaattggaaaaaactactttaaagttcatatggaaccaaaaaagagcccgcatcgccaagtcaatcctaagccaaaagaacaaagctggaggcatcacgctacctgacttcaaactatactacaaggctacagtaaccaaaacagcatggtactggtaccaaaacagagatatagatcaatggaacagaacagagccctcagaaataacgctgcatatctacaactatctgatctttgacgaacctgagaaaaacaagcaatgtggaaaggattccctatttaataaatggtgctgggaaaactggctagccatatgtagaaagctgaaactggatcccttccttacaccttatacaaaaattaattcaagatggattaaagacttaaaagttagacctaaaaccataaaaaccctagaagaaaacctaggcattaccattcaggacataggcatgggcaaggacttcatgtctaaaacaccaaaagcaatggcaacaaaagccaaaattgacaaatgggatctaattaaactaaagagcttctgcgcagcaaaagaaactaccatcagagtgaacaggcagcctacaaaatgggagaaaattttcgcaacccacttatctgacaaagggctaatatccagaatctacaatgaactcaaacaaatttacaagaaaaaaacaaacaaccccatcaacaagtgggcaaaggatatgaacagacacttctcaaaagaagacatttatgcagccaaaagacacatgaaaaaatgctcatcatcactggccatcagagaaatgcaaatcaaaaccacaatgagataccatctcacaccagttagaatggcaatcattaaaaagtcaggaaacaacagtttcaggtacgtctttatcagcagcatgaaaatgaactaa

SEQ ID NO: 120706 - DNA, 3291 bp, Homo sapiens; identical to SEQ ID NO: 116410

SEQ ID NO: 120707 - DNA, 3171 bp, Homo sapiens
atggggaaaaaacagaacagaaaaactggaaactctaaaacgcagagcgcctctcctcctccaaaggaacgcagttcctcaccagcaacagaacaaagctggatggagaatgattttgacgagctgagagaagaaggcttcagacgatcaaattactctgagctatgggaggacattcaaaccaaaggcaaagaagttgaaaactttgaaaaaaatttagaagaatgtataactagaataaccaatacagagaagtgcttaaaggagctgatggagctgaaaaccaaggctcgagaactacgtgaagaatgcagaagcctcaggagccgatgcgatcaactggaagaaagggtatcagcaatggaagatgaaatgaatgaaatgaagcgagaagggaagtttagagaaaaaagaataaaaagaaatgagcaaagcctccaagaaatatgggactatgtgaaaagaccaaatctacgtctgattggtgtacctgaaagtgatgtggagaatggaaccaagctggaaaacactctgcaggatattatccaggagaacttccccaatctagcaaggcaggccaacgttcagattcaggaaatacagagaacgccacaaagatactcctcgagaagagcaactccaagacacataattgtcagattcaccaaagttgaaatgaaggaaaaaatgttaagggcagccagagagaaagaaatacaaactaccatcagagaatactacaaacacctctacgcaaataaactagaaaatctagaagaaatggatacattcctcgacacatacactctcccaagactaaaccaggaagaagttgaatctctgaatagaccaataacaggctctgaaattgtggcaataatcaatagtttaccaaccaaaaagagtccaggaccagatggattcacagccgaattctaccagaggtacaaggaggaactggtaccattccttctgaaactattccaatcaatagaaaaagagggaatcctccctaactcattttatgaggccagcatcattctgataccaaagccgggcagagacacaaccaaaaaagagaattttagaccaatatccttgatgaacattgatgcaaaaatcctcaataaaatactggcaaaccgaatccagcagcacatcaaaaagcttatccaccatgatcaagtgggcttcatccctgggatgcaaggctggttcaatatacgcaaatcaataaatgtaatccagcatataaacagagccaaagacaaaaaccacatgattatctcaatagatgcagaaaaagcctttgacaaaattcaacaacccttcatgctaaaaactctcaataaattaggtattgatggtacatatttcaaaataataagagctatctatgacaaacccacagccaatatcatactgaatgggcaaaaactggaagcattccctttgaaaactggcacaagacagggatgccctctctcaccgctcctattcaacatagtgttggaagttctggccagggcaatcaggcaggagaaggaaataaagggtattcaattaggaaaagaggaagtcaaattgtccctgtttgcagacgacatgattgtttatctagaaaaccccattgtctcagcccaaaatctccttaagctgataagcaacttcagcaaagtctcaggatacaaaatcaatgtacaaaaatcacaagcattcttatacacgaacaacagacaaacagagagccaaatcatgggtgaactcccattcacaattgcttcaaagagaataaaatacctaggaatccaacttacaagggatgtgaaggacctcttcaaggagaactacaaaccactgctcaaggaaataaaagaggacacaaacaaatggaagaacattccatgctcatgggtaggaagaatcaatatcgtgaaaatggccatactgcccaaggtaatttacagattcaatgccatccccatcaagctaccaatgactttcttcacagaattggaaaaaactactttaaagttcatatggaaccaaaaaagagcccgcattgccaagtcaatcctaagccaaaagaacaaagctggaggcatcacactacctgacttcaaactatactacaaggctacagtaaccaaaacagcatggtactggtaccaaaacagagatatagatcaatggaacagaacagagccctcagaaataatgccgcatatctacaactatctgatctttgacaaacctgagaaaaacaagcaatggggaaaggattccctatttaataaatggtgctgggaaaactggctagccatatgtagaaagctgaaactggatcccttccttacaccttatacaaaaatcaattcaagatggattaaagatttaaacgttaaacctaaaaccataaaaaccctagaagaaaacctaggcattaccattcaggacataggcgtgggcaaggacttcatgtccaaaacaccaaaagcaatggcaacaaaagacaaaattgacaaatgggatctaattaaactaaagagcttctgcacagcaaaagaaactaccatcagagtgaacaggcaacctacaacatgggagaaaatttttgcaacctactcatctgacaaagggctaatatccagaatctacaatgaactcaaacaaatttacaagaaaaaaacaaacaaccccatcaaaaagtgggcgaaggacatgaacagacacttctcaaaagaagacatttatgcagccaaaaaacacatgaagaaatgctcatcatcactggccatcagagaaatgcaaatcaaaaccactatgagatatcatctcacaccatatctgaacacagtcattccttacgagaagaaagcctctcctccctcagtggaagacctgcagatgctgacaaacaatcaatctgtgcacttccttataaaatccagtttcagcaagaaccgtgtgaagtttagcaagaaccctctacccccaatatctgatcagggtcctcatcctctaccatcccccagggtttgggatgctctgacagacaattacatcccttcactctcagaagactggagggatccaaacatcgaggctctgaatggcaactgctctgacactgaggtacctctccggggcccctggtttagcagggcttga

SEQ ID NO: 120708 - DNA, 3519 bp, Homo sapiens
atgaccagggccagagcactcagatctcagtcagaggagtctgcttctgcctttagtgctgatgaccttatgagtatagatttagcagaacagatggctaatgactctgatgatagcatctcagcagcaaccaacaaaggaagaggccgaggaagaggtcgaagaggtggaagagggcagaattcagcatcgagaggagggtctcaaagaggaagagcagacactggtctggagacttctacccgtagcaggaactcaaagactgctgtgtcagcatctagaaatatgtctattatagatgacttccctgagccagctgacctcttctggaagtacctggacttggccaccttcatcctgctctacatcctgcccctcctcatcatctctgtggcctacgctcgtgtggccaagaaactgtggctgtgtaatatgattggcgatgtgaccacagagcagtactttgccctgcggcgcaaaaagaagaagaccatcaagatgttgatgctggtggtagtcctctttgccctctgctggttccccctcaactgctacgtcctcctcctgtccagcaagagaacccggaaagagaataagggagaagctaaagaagagagaaagcagacaaaatgtagaggacaggcatggacaaggaggtatcccttggtggagcctgactcaggagaagacacaagtccccaggcagatcccaacgaattcatctcacctgtatttgaaggatccattccagatgaaaggctctatcgaatgtttgtcaataaaaaagtaacaatgttgagaccaaaggaagatgagaactcttggtttaacttatttgtgattcatcagaacaggagtaaacatggaagtactaacttcattccagaacaatttttggatgacttcattgatcttgttatctggggccatgaacatgagtgtaaaatagctccaaccaaaaatgaacaacagctgttttatatctcacaacctggaagctcagtggttacttctctttccccaggagaagctgtaaagaaacatgttggtttgctgcgtattaaagggaggaagatgaatatgcataaaattcctcttcacacagtgcggcagtttttcatggaggatattgttctagctaatcatccagacatttttaacccagataatcctaaagtaacccaagccatacaaagcttctgtttggagaagcctctgctgctgatacccaggcaaacagggtctgaagtggacctccggcaaactccaacagacctgaagctgagggtcccgactgttagaaggaaaactaacaaacagaaaggacatccacaccaaaaccccatctcaccacagtgcacttattccaaaattgaccacatagttggaagtaaagcactcctcagcaaatgtaaaagaacagaaattataacaaactctctcccagaacacagagcaatcaaactagatctcaggattaagaaactcactcaaaaccgctcaactacatggaaattgaacaacctgctcctgaatgactactgggtacataatgaaatgaaggcagaaataaagatgttctctgaaaccaaagagaacaaagacacaacataccacaatctctgggacacatttaaaacagtgtgtagggggaaatttatagcactaaatgcccacaagggaaaccaggaaagatctaaaattgacaccctaacatcacaattaaaagaacaagagaagcaagagcaaacacattcaaaagctagcagaaggcaagaaataactaacatcagagcagaactgaaggagatagagacacagaaaactcttcaaaaaatcaatgaatccaggagctggttttttgaaaagatcaacaaaattgatagaccgctagcaagactaataaagaagaaaagagagaagaatcaaatagatgcaataaaaaatgataaagcagatatcaccactaatcccacagaaatacaaactaccatcagagaatactataaacacctctatgcaaataaactagaaaatctggaagaaatggataatttcctcgacacatacaccctcccaagactaaaccaggaagaagttgaatctctgaatagaccaataacaggctctgaaatggaggcaataattaatagcctaccaaccaaaaaaagtccaggaccagacggattcacagccgatttctaccagaggtacaaggaggagctggtaccattccttctgaaactattccaatcaatagaaaaagagggaatcctccctaactcattttatgaggccagcatcgtcctgataccaaagcctggcagagacacaacaaaaagaattttagaccaatatcccagacgaacatcaatgcaaaaatcctcaatacaatactggcaaaccgaatccagcaacacatcaaaaagcttatccaccatgatcaagtgggcttcatccctgggatgcaaggctgtgttggaagttctggccagggcaatcaggcaggagaaggaaataaagggtattctgttaggaaaagaggaagtcaaattgtccctgtttgcagatgacatgatcgtatatctagaaaaccccatcatctcagcccaaaatctccttaagctgataagcaacttcagcaaagtctcaggatataaaatcaatgtgcaaaaatcacaagcattcttatacaccaataacagacaaacagagagccaaatcatgagtgaactcccattcacaattgcttcaaagacaataaaatacctaggaatccaacttacaagggatgtgaaggacctcttcaaggagaactacaaaccactgctcaaggaaataaaagaggatacaaacaaatggaagaatattccatgctcgtgggtaggaagaatcagtattgtgaaaatggccatactgcccaaggtaatttatagattcaatgccatccccatcaagctaccagtgactttcttcacagaattggagaaaactactttaaagttcatatggaaccaaaaaagagcccacattgccaagtcaatcctaaggcaaaagaacaaagctggaggcatcatgctacctgacttcaaactatactacaaggctacagtaaccaaaacagcatggttccagttaactctgggcttccgcctgggaacctgcagaaacaggagacgaatgcgattcctaaattaccccactgctggactcttcgaagccccacaatcgcgacccaaggctgtcttcttttcgggaagaaagggcaggatccgtgaaaagaaaacaacacggtctgaacttgcctctgagaacccgcagggccgtaaacctgaattccgcgggagagaacggcgtccgtttctctcgcgacacttcatggataacgtagatgcttcaagtccagttcggctctcattggctaccgcacgcagtgagggggcggggaaagtagcggcgaggccccgccctcacgcaggagccaatcctgagcaggctaggagacgaacccggaagtga

SEQ ID NO: 120709 - DNA, 3693 bp, Homo sapiens; identical to SEQ ID NO: 118073

SEQ ID NO: 120710 - DNA, 3357 bp, Homo sapiens; identical to SEQ ID NO: 120163

SEQ ID NO: 120711 - DNA, 3543 bp, Homo sapiens; identical to SEQ ID NO: 118071

SEQ ID NO: 120712 - DNA, 3316 bp, Homo sapiens; identical to SEQ ID NO: 120164

SEQ ID NO: 120713 - DNA, 4797 bp, Homo sapiens; identical to SEQ ID NO: 120167

SEQ ID NO: 120714 - DNA, 3573 bp, Homo sapiens; identical to SEQ ID NO: 119733

SEQ ID NO: 120715 - DNA, 3384 bp, Homo sapiens; identical to SEQ ID NO: 120168

SEQ ID NO: 120716 - DNA, 3432 bp, Homo sapiens; identical to SEQ ID NO: 118085

SEQ ID NO: 120717 - DNA, 3783 bp, Homo sapiens; identical to SEQ ID NO: 120170

SEQ ID NO: 120718 - DNA, 3897 bp, Homo sapiens; identical to SEQ ID NO: 120172

SEQ ID NO: 120719 - DNA, 3726 bp, Homo sapiens; identical to SEQ ID NO: 120173

SEQ ID NO: 120720 - DNA, 3174 bp, Homo sapiens
atggtaaagggatcaattcaacaagaagagctaactatcctaaatatctatgcacccaatacaggagcacccagattcataaagcaagtcctgagtgacctacaaagagacttagactcccacacattaataatgggagactttaacaacccactgtcaacattagacagatcaatgagacagaaagtcaacaaggatacccaggaattgaactcagctctgcaccaagtggacctaatagacatctacagaactctccaccacaaatcaacagaatatagatttttttcagcaccacaccacacctattccaaaattgaccacatacttggaagtaaagctctcctcagcaaatgtaaaaggacagagattataacaaactatctctcaggccacagtgcaatcaaactagaactcaagattaagaatctcactcaaaaccgctcaactacatggaaactgaacaacctgctcctgaatgactactggatacataacgaaatgaaggcagaaataaagatgttctttgaaaccaatgagaacaaagacacaacataccagaatctctgggatgcattcaaagcagtgtgtagagggaaatttatagcactaaatgcccacaagagaaagcaggaaagatccaaaattgacaccctaacatcacaattaaaagaactagaaaagcaagagcaaacacattcaaaagctggcagaaagaaagaaataactaaaatcagagcacaactgaaggaaatagagacacaaaaaacccttaaaaaattaatgaatccaggagctgaaatacaaactaccatcagagaatactacaaacacctctatgcaaagaaactagaaaatctagaagaaatggataaattcctcgacacatacactctcccaagactaaaccaggaagaagttgaatctctgaatagaccaataacaggagctgaaattgtggcaataatcaatagtttaccaaccaaaaagagtccaggaccagatggattcacagccaaattctaccagaggtacaaggaggaactggtaccattccttctgaaattattccaatcaatagaaaaagagggaatcctccctaactctttttatgaggccagcatcattctgataccaaagccaggcagagacacaacaaaaaaagagaattttagaccaatatccttgatgaacattgatgcaaaaatcctcaataaaatactggcaaaacgaatccagcagcacatcaaaaagcttatccaccatgatcaagtgggcttcatccctgggatgcaaggctggttcaatatacacaaatcaataaatgtaatccagcatataaacagacccaaagacaaaaaccacatgattatctcaatagatgcagaaaaagcctttgacaaaattcaacaacccttcatgctaaaaactctcaataaattaggtattgatgggacgtatttcaaaataataagtgctatctatgacaaacccacagccaatatcatactgaatgggcaaaaagtggaagcattccctttgaaaactggcacaagacagggatgccctctctcaccactcctattcaacatagtgttggaagttctggccagggcaattaggcaggagaaggaaataaagggtattcaattaggaaaagaggaagttaaattgtccctgtttgcagacgacatgattgtatatctagaaaaccccatcgtctcagcccaaaatctccttaagctgataagcaacttcagcaaagtctcaggatacaaaatcaatgtacaaaaatcacaagcattcttatacaccaacaacagacaaacagagagccaaatcatgagtgaactcccattcacaattgcttcaaagagaataaaatacctaggaatccaacttacaagggatgtgaaggacctcttcaaggagaactacaaaccactgctcaaggaaataaaagaggatacaaacaaatggaagaacattccatgctcatgggtaggaagaatcaatatcgtgaaaatggccatactgcccaaggtaatttacagattcaatgccatccccatcaagctaccaatgactttcttcacagaattggaaaaaactactttaaagttcatatggaaccaaaaaagagcccgcatcgccaagtcaattctaagccaaaagaacaaagctggaggcatcacactacctgacttcaaactatactacaaggctacagtaaccaaaacagcatggtactggtaccaaaacagagatctagatcaatggaacagaacagagccctcagaaataacgccgcatatctacagctatctgatctttgacaaacctgagaaaaacaagcaatggggaaaggattccctatttaataaatggtgctgggaaaactggctacccatatgtagaaagctgaaactggatcccttccttacaccttatacaaaaatcaattcaagatggattaaagacttaaatgttagacctaaaaccataaaaaccctaaaagaaaacctaggcattaccattcaggacataggcatgggcaaggacttcatgtctaaaacaccaaaagcaatggcaacaaaagacaaaattgacaaatgggatctaattaaactaaagagcttctgcacagcaaaagaaactaccatcagagtgaacaggcaacctacaaaatgggagaaaattttcgcaacctactcatctgacaaagggctaatatcaagaatctacaatgaactcaaacaaatttacaagaaaaaaacaaacaaccccatcaacaagtgggtgaaggacatgaacagacacttctcaaaagaagacatttatgcagccaaaaaacacatgaaaaaatgctcatcatcactggccatcagagaaatgcaaatcaaaaccacaatgagataccatctcacaccacttagaatggcgatcattaaaaagtcaggaaacaacagaacttgggaatataacatactttgttctcttgtgcctctcctgtgttccctcttgtggctgcacctgactgaccatcacctaaaagaggacagaacaaaacacttgacagctagtgataaccttgaaaaaacagaactcagcagatggaaggagagagccctactgtatgagcatcgtgtgctgagacctgctattgactcccag

SEQ ID NO: 120721 - DNA, 4401 bp, Homo sapiens
atggggaaaaaacagaacagaaaaactggaaactctaaaacgcagagcgcctctcctcctccaaaggaacgcagttcctcaccagcaacagaacaaagctggatggagaatgattttgacgagctgagagaagaaggcttcagacgatcaaattactctgagctacgggaggacattcaaaccaaaggcaaagaagttgaaaactttgaaaaaaatttagaagaatgtataactagaataaccaatacagagaagtgcttaaaggagctgatggagctgaaaaccaaggctcgaaaactacgtgaagaatgcagaagcctcaggagccgatgcgatcaactggaagaaagggtatcagcaatggaagatgaaatgaatgaaatgaagcgagaagggaagtttagagaaaaaagaataaaaagaaatgagcaaagcctccaagaaatatgggactatgtgaaaagaccaaatctacgtctgattggtgtacctgaaagtgatgtggagaatggaaccaagttggaaaacactctgcaggatattatccaggagaacttccccaatctagcaaggcaggccaacgttcagattcaggaaatacagagaacaccacaaagatactcctcgagaagagcaactccaagacacataattgtcagattcaccaaagttgaaatgaaggaaaaaatgttaagggcagccagagagaaagacagatcaacgagacagaaagtcaacaaggatacccaggaattgaactcagctctgcaccaagcagacctaatagacatctacagaactctccaccccaaatcaacagaatatacatttttttcagcaccacaccacacctattccaaaattgaccacatagttggaagtaaagctctcctcagcaaatgtaaaagaacagaaattataacaaactatctctcagaccacagtgcaatcaaactagaactcaggattaagaatctcactcaaagccgctcaactacatggaaactgaacaacctgctcctgaatgactactgggtacataacgaaatgaaggcagaaataaagatgttctttgaaaccaatgagaacaaagacacaacataccagaatctctgggacgcactcaaagcagtgtgtagagggaaatttatagcactaaatgcccacaagggaaagcaggaaagatctgaaattgacaccctaacatcacaattaaaagaactagaaaagcaagagcaaacacattcaaaagctagcagaaggcaagaaataactaaaatcagagcagaactgaaggaaatagagacacaaaaaacccttcaaaaaatcaatgaatccaggagctggttttttgaaaggatcaacaaaattgatagaccgctagcaagactaataaagaaaaaaagagagaagaatcaaatagacacaataaaaaatgataaaggggatatcaccaccgatcccacagaaatacaaactaccatcagagaatactacaaacacctctacgcaaataaactagaaaatctagaagaaatggatacattccttgacacatacactctcccaagactaaaccaggaagaagttgaatctctgaatcgaccaataacaggttctgaaattggggcaataatcaatagtttaccaaccaaaaagagtccaggaccagatggattcacagccgaattctaccagaggtacaaggaggaactggtaccattccttctgaaactattccaatcaatagaaaaagagggaatcctccctaactcattttatgaggccagcatcattctgataccaaagccgggcagagacacaacaaaaaaagagaattttagaccaatatccttgatgaacattgatgcaaaaatcctcaataaaatactggcaaaccaaatccagcagcacatcaaaaagcttatccaccatgatcaagtgggcttcatccctgggatgcaaggctggttcaatatacgcaaatcaataaatgtaatccagcatataaacagagccaaagacaaaaaccacatgattatctcaatagatgcagaaaaagcctttgacaaaattcaacaacccttcatgctaaaaactctcaataaattaggtattgatgggacgtatttcaaaataataagagctatctatgacaaacccacagccaatatcatactgaatgggcaaaaactggaagcattccctttgaaaactggcacaagacagggatgccctctctcaccgctcctattcaacatagtgttggaagttctggccagggcaatcaggcaggagaaggaaataaagggtattcaattaggaaaagaggaagtcaaattgtccctgtttgcagacgacatgattgtttatctagaaaaccccatcgtctcagcccaaaatctccttaagctgataagcaacttcagcaaagtctcaggatacaaaatcaatgtacaaaaatcacaagcattcttatacaccaacaacagacaaacagagagccaaatcatgggtgaactcccattcacaattgcttcaaagagaataaaatacctaggaatccaacttacaagggatgtgaaggacctcttcaaggagaactacaaaccactgctcaaggaaataaaagaggacacaaacaaatggaagaacattccatgctcatgggtaggaagaatcaatatcgtgaaaatggccatactgcccaaggtaatttacagattcaatgccatccccatcaagctaccaatgactttcttcactgaattggaaaaaactactttaaagttcatatggaaccaaaaaagagcccgcatcgccaagtcaatcctaagccaaaagaacaaagctggaggcatcacactacctgacttcaaactatactacaaggctacagtaaccaaaacagcatggtactggtaccaaaacagagatatagatcaatggaacagaacagagccctcagaaataatgccgcatatctacaactatctgatctttgacaaacctgagaaaaacaagcaatggggaaaggattccctatttaataaatggtgctgggaaaactggctagccatatgtagaaagctgaaactggatcccttccttacaccttatacaaaaatcaattcaaaatggattaaagatttaaacgtcagacctaaaaccataaaaaccctagaagaaaacctaggcattaccattcaggacataggcgtgggcaaggacttcatgtccaaaacaccaaaagcaatggcaacaaaagccaaaattgacaaatgggatctaattaaactaaagagcttctgcacagcaaaagaaactaccatcagagtgaacaggcaacctaccacatgggagaaaattttcgcaacctactcatctgacaaagggctaatatccagaatctacaatgaactcaaacaaatttacaagaaaaaaacaaacaaccccatcaaaaagtgggcgaaggacatgaacagacacttctcaaaagaagacatttatgcagccaaaaaacacatgaagaaatgctcatcatcactggccatcagagaaatgcaaatcaaaaccactatgagatatcatctcacaccaactgcttgtttggaaacagcggaggaacaacaactaaataacatggagtgcgcaggcaccgaagctataaacagcctcatcagcattgccctcctgcccaagggtggaatgagccgtatcttgattgagactcaaggggacaggaccctgaagtggcacaaagagcgagcagtgtgcggagcccatatgcaggcccgagcggggcagacgacgcacagcgcaggaggatttctgctcccgcctggaattcatttgcagtcattaccttgtgggtgcgaagagttgcccagaaaacagaggatggaaagaaatcagcctccaggagtaagaactggtacaactcccttccccaagatgaaacccgaggacacagtgatagtcacaactgggtcagcccaaaagcttgcatgtggtctgccacacacacactgggagaaagcgaatgctgcctcctttaaggacacctcaggggcatccaaggtcatccacgacagcctgatatgggcctttcagctcatgactttcacctgggattggttctcatttctaagtggcacttcctcccccgtggagctttctggggacacttcatggaagtggcaaaatggtcagtggaagttccaggctttcatcaccccttcagcctccagcacacccagaaaaaccagggtgcccactctttcccccacatccgtgggcatctcccggaaggtctttgatgaaccccagttaggtctgaatcttgtgctggatgagtcacagggacactatccagccacagtggctggtcccagtagttga

SEQ ID NO: 120722 - DNA, 3855 bp, Homo sapiens
aaatatgggactatgtgaaaagaccaaatctacgtctgattggtgtacctgaaagtgatgcggagaatggaaccaagttggaaaacactctacaggatattatccaggagaacttccccaatctagcaaggcaggccaacgttcagattcaggaaatacagagaacgccacaaagatactcctcgagaagagcaactccaagacacataattgtcagattcaccaaagttgaaatgaaggaaaaaatgttaagggcagccagagagaaaggtcgggttaccctcaaagggaagcccatcagactaacagcggatctctcggcagaaaccctacaagctagaagagagtgggggccaatattcaacattcttaaagaaaagaattttcaacccagaatttcatatccagccaaactaagcttcataagtgaaggagaaataaaatactttacagacaagcaaatgctgagagattttgtcaccaccaggcctgccctaaaagagctcctgaaggaagcgctaagcatggaaaggaacaaccgacagatcaacgagacagaaagtcaacaaggatacccaggaattgaattcagctctgcaccaagcggacctaatagacatctacagaactctccaccccaaatcaacagaatatacatttttttcagcaccacaccacacctattccaaaattgaccacatacttggaagtaaagctctcctcagcaaatgtaaaagaacagaaattataacaaactatctctcagaccacagtgcaatcaaactagaactcaggattaagaatctcactcaaaactgctcaactacatggaaactgaacaacctgctcctgaatgactactgggtacataacgaaatgaaggcagaaataaagatgttctttgaaaccaatgagaacaaagacacaacataccacaatctctgggatgcattcaaagcagtgtgtagagggaaatttatagcactaaatgcccacaagagaaagcaggaaagatccaaaattgacaccctaacatcacaattaaaagaactagaaaagcaagagcaaacacattcaaaagctagcagaaggcaagaaataactaaaatcagagcagaactgaaggaaatagagacacaaaaaacccttcaaaaaattaacgaatccaggagctgggtttttgaaaggatcaacaaaattgatagaccgctagcaagactaacaaagaaaaaaagcgagaagaatcaaatagatgcaataaaaaatgataaaggggatatcaccaccgatcctacagaaatacaaactaccatcagagaatactacaaacacctctacgcaaataaactagaaaatctagaagaaacggataaattcctcgacacatacactctcccaagacgaaaccaggaagaagttgaatctctgaatagaccaataacaggagctgaaattgtggcaataatcaataacttaccaaccaaaaagagtccaggatcagatggattcacagccgaattctaccagaggtacaaggaggaactggtaccattccttctgaaactattccaatcaatagaaaaagagggaatcctccctaactcattttatgaggccagcatcatcctgataccaaagccgggcagagacacaaccaaaaaagagaattttagaccaatatccttgatgaacattgatgcaaaaatcctcaataaaatactggcaaaccaaatccagcagcacatcaaaaagcttatccaccatgatcaagtgggcttcatccctgggatgcaaggctggttcaatatatgcaaatcaataaatgtaatccagcatataaacagaaccaaagacaaaaaccacatgattatctcaatagatgcagaaaaggcctttgacaaaattcaacaacccttcatgctaaaaactctcaataaattaggtattgatgggacttatctcaaaataataagagctatctatgacgaacccacagccaatatcatactgaatgggcaaaaactggaagcattccctttgaaaactggcacaagacagggatgccctctctcaccactcctattcaacatagtgttggaagttctggccagggcaattaggcaggagagggaaataaagggtattcaattaggaaaagaggaagtcaaattgtccctgtttgcagatgacatgattgtatatctagaaaaccccattgtctcagcccaaaatctccttaagctgataagcaacttcggcaaagtctcaggatacaaaatcaatgtacaaaaatcacaagcattcttaaacaccaacaacagacaaacagagagccaaatcatgagtgaactcccattcacaattgcttcaaagagaataaaatacctaggaatccaacttacaagggatgtgaaggacctcttcaaggagaactacaaaccactgctcaaggaaataaaagaggatacaaacaaatggaagaacattccatgctcatgggtaggaagaatcaatatcatgaaaatggccatactgcccaaggtaatttacagattcaatgccatccccatcaagctaccaatgactttcttcacagaattggaaaaaactactttaaagttcatatggaaccaaaatagagcctgcatcgccaagtcaatcctaagccaaaagaacaaagctggaggcatcacactacctgacctcaaactatactacaaggctacagtaaccaaaacagcatggtactggtaccaaaacagagatatagatcaatggaacagaacagagccctcagaaataacgctgcatatctacaactatctgatctttgacaaacctgagaaaaacaagcaatggggaaaggattccctatttaataaatggtgctgggaaaactggctagccatatgtagaaagctgaaactggatcccttccttacaccttatacaaaaatcaattcaagatggattaaagacttaaacattagacctaaaaccataaaaaccctagaagaaaacctaggcattaccattcaggacataggcatgggcaaggacttcatgtctaaaacaccaaaagcaatggcaaccaaagccaaaattgacaaatgggatctaattaaactaaagagcttctgcacagcaaaagaaactaccatcagagtgaacaggcaacctacaaaatgggggaaaattttcgcaacctactcatctgacaaagggctaatatccagaatctacaatgaactcaaacaaatttacaagaaaaaaacaaacaaccccatcaaaaagtttgcaaaggatatgaacagacacttctcaaaaaaagacatctatgcagccaaaaaacacatgaaaaaatgctcaccatcactggccatcagagaaatgcaaatcaaaaccacaatgagataccatctcacaccagttagaatggcaatcattaaaaagtcaggaaacaacagaactggccgtggtttacatccaggaagggattggtcagtcacctgtgccaggtccccgggggatcctgagcccagcggtataaagggtggctgtgggagtggcacaccctctcccagccccagcaagcaaaccgtcaggcggccgtggactcagatcccggagatgaagcccctgctcctggccgtcagcctcggcctcattgctgccctgcaggcccaccacctcctggcctcagacgaggagattcaggatgtgtcagggacgtggtatctgaaggccatgacggtggacagggagttccctgagatgaatctggaatcggtgacacccatgaccctcacgaccctggaagggggcaacctggaagccaaggtcaccatgctgtga

SEQ ID NO: 120723 - DNA, 5709 bp, Homo sapiens
atggggaaaaaacagaacagaaaaactggaaactctaaaacgcagagcgcctctcctcctccaaaggaacgcagttcctcaccagcaacagaacaaagctggatggagaatgattttgacgagctgagagaagaaggcttcagacgatcaaattactctgagctatgggaggacattcaaaccaaaggcaaagaagttgaaaactttgaaaaaaatttagaagaatgtataactagaataaccaatacagagaagtgcttaaaggagctgatggagctgaaaaccaaggctcgagaactacatgaagaatgcagaagcctcaggagccgatgcgatcaactggaagaaagggtatcagcaatggaagatgaaatgaatgaaatgaagcgagaagggaagtttagagaaaaaagaataaaaagaaatgagcaaagcctccaagaaatatgggactatgtgaaaagaccaaatctacgtctgattggtgtacctgaaagtgatgtggagaatggaaccaagttggaaaacactctgcaggatattatccaggagaacttccccaatctagcaaggcaggccaacgttcagattcaggaaatacagagaatgccacaaagatactcctcgagaagagcaactccaagacacataattgtcagattcaccaaagttgaaatgaaggaaaaaatgttaagggcagccagacagaaagcaccacaccacacctattccaaaattgaccacatagttggaagtaaagctctcctcagcaaatgtaaaagaacagaaattataacaaactatctctcagaccacagtgcaatcaaactagaactcaggattaagaatctcactcaaagccgctcaactacatggaaactgaacaacctgctcctgaatgactactgggtacataacgaaatgaaggcagaaataaagatgttctttgaaaccaacgagaacaaagacaccacataccagaatctctgggacacattcaaagcagtgtgtagagggaaatttatagcactaaatgcctacaagagaaagcaggaaacatccaaaattgacaccataacatcacaattaaaagaactagaaaagcaagagcaaacacattcaaaagctagcagaaggcaagaaataactaaaatcagagcagaactgaaggaaatagagacacaaaaaacccttcaaaaaatcaatgaatccaggagctggttttttgaaaggatcaacaaaattgatagaccgctagcaagactaataaagaaaaaaagagagaagaatcaaatagacacaataaaaaatgataaaggggatatcaccaccgatcccacagaaatacaaactaccatcagagaatactacaaacacctctacgcaaataaactagaaaatctagaagaaatggatacattcctcgacacatacactctcccaagactaaaccaggaagaagttgaatctctgaatagaccaataacaggctctgaaattgtggcaataatcaatagtttaccaaccaaaaagagtccaggaccagatggattcacagccgaattctaccagaggtacaaggaggaactggtaccattccttctgcaactattccaatcaatagaaaaagagggaatcctccctaactcattttatgaggccagcatcattctgataccaaagccgggcagagacacaaccaaaaaagagaattttagaccaatatccttgatgaacattgatgcaaaaatcctcaataaaatactggcaaaccgaatccagcagcacatcaaaaagcttatccaccatgatcaagtgggcttcatccctgggacgcaaggctggttcaatatacgcaaatcaataaatgtaatccagcatataaacagagccaaagacaaaaaccacatgattatctcaatagatgcagaaaaagcctttgacaaaattcaacaacccttcatgctaaaaactctcaataaattaggtattgatgggacatatttcaaaataataagagctatctatgacaaacccacagccaatatcatactgaatgggcaaaaactggaagcattccctttgaaaactggcacaagacagggatgccctctctcaccgctcctattcaacatagtgttggaagttctggccagggcaatcaggcaggagaaggaaataaagggtattcaattaggaaaagaggaagtcaaattgtccctgtttgcagacgacatgattgtttatctagaaaaccccatcgtctcagcccaaaatctccttaagctgataagcaacttcagcaaagtctcaggatacaaaatcaatgtacaaaaatcacaagcattcttatacaccaataacagacaaacagagagccaaatcatgagtgaactcccattcacaattgcttcaaagagaataaaatacctaggaatccaacttacaagggatgtgaaggacctcttcaaggagaactacaaaccactgctcaaggaaataaaagaggacacaaacaaatggaagaacattccatgctcatgggtaggaagaatcaatatcgtgaaaatggccatactgcccaaggtaatttacagattcaatgccatccccatcaagctaccaatgactttcttcacagaattggaaaaaactactttaaagttcatatggaaccaaaaaagagcctgcatctccaagtcaatcctaagccaaaagaacaaagctggaggcatcacactacctgacttcaaactatactacaaggctacagtaaccaaaacagcatggtactggtaccaaaacagagatatagatcaatggaacagaacagagccctcagaaataatgccacatatctacaactatctgatctttgacaaacctgagaaaaacaagcaatggggaaaggattccctatttaataaatggtgctgggaaaactggctagccatatgtagaaagctgaaactggatcccttccttacaccttatacaaaaatcaattcaagatggattaaagatttaaacgttagacctaaaaccataaaaaccctagaagaaaacctaggcattaccattcaggacataggcgtgggcaaggacttcatgtccaaaacaccaaaagcaatggcaacaaaagccaaaattgacaaatgggatctaattaaactaaagagcttctgcacagcaaaagaaactaccatcagagtgaacaggcaacctacaacatgggagaaaattttcacaacctactcatctgacaaagggctaatatccagaatctacaatgaactcaaacaaatttacaagaaaaaaacaaacaaccccatcaaaaagtgggcgaaggacatgaacagacacttctcaaaagaagacatttatgcagccaaaaaacacatgaagaaatgctcatcatcactggccatcagagaaatgcaaatcaaaaccactatgagatatcatctcgcaccagttagaatggcaatcattaaaaagtcaggaaacaacagacttcttggaagtgccctagaatcagcaggtccaaatcaaactcagctggccgtgggtcagccattgcagccccacctgccacgggctccaggaagagcagtcatcagtatggagaaggccggactatgctcagaagccactgagcaggtgctccatagactcaccagctggagcggggtcacatctcggaggcaccgtcagcaccaggagggcagccaagcaagggtatggcatttccgagcctctgcggtcaagggtatcgcatttccgagcctctgcggtcaagggtatggcgtttccgagcctctgcggtcaagggtatggcgtttccgagcctctgcagtcaagagcccagagatgggttgtcggggcagctgtgggggcatcccagatgtgggtgccaacatgcttgatgacctgacaccagtgcatcatgacctgacaccagcgcgcaatgacctgacaccagtgcacgatgacctggcaccagtgcgtgatgacctgacaccagtgcgtcatgacctgacaccagtgcgtgatgacctggcaccagtgcgtgatgacctgacaccagtgtgtgatgacctggcaccagtgtgcgatgacgtggccccagtgtgccatgacctggcaccagtgtgtgatgacctgacaccagtgtgtgatgacctggcaccagtgcacaatgaccttgcagcaatccagacctacctgcaagctgcaagcgatgtgcctgtgggacacagcctggaccccgctgcgaactacaactccccgaaattccgctcccggaaccagagatacatgagggccgtcagcaccctgagccaggccagctgcgtgagccaggtgagcgaggcggagatcaatgggcaattcgagtccgtgtgcgagtccgtcttcagtgaagttgaatctcaggccatggatgccctcgacctcccgggatgtttccgaacaaggagtcacagctaccttcgagccattcaagccggctactcccaagatgacgaatgtattcccatgatgacaccctctgacatcacctccaccatcaggtcaacagcagaaggcgagcgtgatgcagataaatcgtgcatctgtatcaggaactgcatatgtaagccagaattgctcgggttttcagatattgtggagatggaagtactgttgaatctgcctcccatacccctcgaacccgccggtcctcacctgtgtcaccctccaacccgccggccctcacctgtgtcaccctcgaccccgccggtcctcacctgtgtcaccctccaacccgccggccctcacctgtgtcaccctcgaccccgccggccctcacctgtgtcaccctcgaccccgccggccctcacctgtgtcaccctcgaccccgccggtcctcacctgtgtcaccctcgaccccgccggtcctcacctgtgtcaccctccaacccgccggccctcacctgtgtcaccctcgaccccgccggtcctcacctgtgtcaccctccaacccgccggccctcacctgtgtcaccctcgaacccgccggccctcacctgtgtcaccctcgaccccgccggtcctcacctgtgtcaccctccaacccgccggtcctcacctgtgtcaccctccaacccgccggccctcacctgtgtcaccctccaacccgccggccctcacctgtgtcaccctccaacccgccggcccccacctgtgtcaccctccaacccgccggccctcacctgtgtcaccctcgaccccgccggtcctcacctgtgtcaccctccaacccgccggtcctcacctgtgtcaccctcgaccccgccggtcctcacctgtgtcaccctcacaaccatccggccctcacatgtgtcacccacgaccccgccggtcctcacctgtgtcaccctcgaccccgccggtcctcacctgtgtcaccctccaacccgccggccctcacctgtgtcaccctcgaccccgccggccctcacctgtgtcaccctccaacccgccggccctcacctgtgtcaccctccaacccgccggccctcacctgtgtcaccctccaacccgccggccctcacatgtgtcaccctcgaccccgccggtcctcacctgtgtcaccctcgaccccgccggtcctcacctgtgtcaccctccaacccgccggtcctcacctgtgtcacccctcggggctga

SEQ ID NO: 120724 - DNA, 5215 bp, Homo sapiens
atggggaaaaaacagaacagaaaaactggaaactctaaaacgcagagtgcctctcctcctccaaaggaacgcagttcctcaccagcaacggaaaaaagctggatggagaatgactttgacgagctgagagaagaaggtttcagacgatcaaattactctgagctacgggaggacattcaaaccaaaggcaaagaagttgaaaactttgaaaaaaatttagaagaatgtataactagaataaccaatacagagaagtgcttaaaggagctgatggagctgaaaaccaaggctcgagaactacgtgaagaatgcagaagcctcaggagccgatgtgatcaactggaagaaagggtatcagcaatggaagatgaaatgaatgaaatgaagcgagaagggaagtttagagaaaaaagaataaaaagaaatgagcaaagcctccaagaaatatgggactatgtgaaaagaccaaatctacgtctgactggtgtacctgaaagtgacggggagaatggaaccaagttggaaaacactctgcaggatattatccaggagaacttccccaatctagcaaggcaggtcaatgttcagattcaggaaatacagagaacgccacaaagatactcctcgagaagagcaactccaagacacataattgtcagattcaccaaagttgaagtgaaggaaaaaatgttaagggcagccagagagaaaggtcgggttaccctcaaagggaagcccatcagactaacagcggatctctcggcagaaaccctacaagccagaagagagtgggggccaatattcaacattcttaaagaaaagaattttcaacccagaatttcatatccagccaaactaagcttcataagtgaaggagaaataaaacactttacagacaagcaaatgctgagagattttgtcaccaccaggcctgccctaaaagagctcctgaaggaagtgctaaacatggaaaggaacaaccagtaccagccgctgcaaaatcatgccaaaatacagatcaacgagacagaaagtcaacaaggatacccaggaattgaactcagctctgcaccaagcggacctaatagacatctacagaactctccacaccaaatcaacagaatatacatttttttcagcaccacaccacacctattccaaaattgaccacatagttggaagtaaagctctcctcagcaaatgtaaaagaacagaaattataacaaactatctctcagaccacagtgcaatcaaactagaaatcaggattaagaatctcactcaaagccactcaactacatggaaactgaacaacctgctcctgaatgactactgggtacataacgaaatgaaggcagaaataaagatgttctttgaaaccaacgagaacaaagacaccacataccagaatctctgggacgcattcaaagcagtgtgtagagggaaatttatagcactaaatgcctacaagagaaagcaggaaagatccaaaattgacagcctaacatcacaattaaaagaactagaaaagcaagagcaaacacattcaaaagctagcagaaggcaagaaataactaaaatcagagcagaactgaaggaaatagagacacaaaaaacccttcaaaaaatcaatgaatccaggagctggttttttgaaaggatcaacaaaattgatagaccactagcaagactaataaagaaaaaaagagagaagaatcaaatagacacaataaaaaatgataaaggggatatcaccaccgatcccacagaaatacaaactaccatcagagaatactacaaacacctctacgcaaataaactagaaaatctagaagaaatggatacattcctcgacacatacactctcccaagactaaaccaggaagaagttgaatctctgaatagaccaataacaggctctgaaattgtggcaataatcaatagtttaccaaccaaaaagagtccaggaccagatggattcacagccgaattctaccagaggtacaaggaggaactggtaccattccttctgaaactattccaatcaataggaaaagagggaatcctccctaactcattttatgaggccagcatcattctgacaccaaagccgggcagagacacaaccaaaaaagagaattttagaccaatatccttgatgaacattgatgcaaaaatcctcaataaaatactggcaaaccgaatccagcagcacatcaaaaagcttatccaccatgatcaagtgggcttcatccctgggatgcaaggctggttcaatatacgcaaatcaataaatgtaatccagcatataaacagagccaaagacaaaaaccacatgattatctcaatagatgcagaaaaagcctttgacaaaattcaacaacccttcatgctaaaaactctcaataaattaggtattgatgggacgtatttcaaaataataagagctatctatgacaaacccacagccaatatcatactgaatgggcaaaaactggaagcattccctttgaaaactggcacaagacagggatgccctctctcaccgctcctattcaacatagtgttggaagttctggccagggcaatcaggcaggagaaggaaataaagggtattcaattaggaaaagaggaagtcaaattgtccctgtttgcagacgacatgattgtttatctagaaaaccccatcgtctcagcccaaaatctccttaagctgataagcaacttcagcaaagtctcaggatacaaaatcaatgtacaaaaatcacaagcattcttatacaccaacaacagacaaacagagagccaaatcatgggtgaactcccattcacaattgcttcaaagagaataaaatacctaggaatccaacttacaagggatgtgaaggacctcttcaaggagaactacaaaccactgctcaaggaaataaaagaggacacaaacaaatggaagaacattccatgctcatgggtaggaagaatcaatatcgtgaaaatggccatactgcccaaggtaatttacagattcaatgccatccccatcaagctaccaatgactttcttcacagaattggaaaaaactactttaaagttcatatggaaccaaaaaagagcccgcatcgccaagtcaatcctaagccaaaagaacaaagctggaggcatcacactacctgacttcaaactatactacaaggctacagtaaccaaaacagcatggtactggtaccaaaacagagatatagatcaatggaacagaacagagccctcagaaataatgccgcatatctacaactatctgatctttgacaaacctgagaaaaacaagcaatggggaaaggattccctatttaataaatggtgctgggaaaactggctagccatatgtagaaagctgaaactggatcccttccttacaccttatacaaaaatcaattcaagatggattaaagatttaaacgttagacctaaaaccataaaaaccctagaagaaaacctaggcattaccattcaggacataggcgtgggcaaggacttcatgtccaaaacaccaaaagcaatggcaacaaaagccaaaattgacaaatgggatctaattaaactaaagagcttctgcacagcaaaagaaactaccatcagagtgaacaggcaacctacaacatgggagaaaattttcgcaacctactcatctgacaaagggctaatatccagaatctacaatgaactcaaacaaatttacaagaaaaaaacaaacaaccccatcaaaaagtgggcgaaggacatgaacagacacttctcaaaagaagacatttatgcagccaaaaaacacatgaagaaatgctcatcatcactggccatcagagaaatgcaaatcaaaaccacataccatgctggaccagatggatttacagccgaattctaccagaggtacaaggaggaactggtaccattccttctgaaactattccaatcaatagaaaaagagggaatcctccctaactcattttatgaggccagcatcatcctgataccaaagcctggtagagacacaaccaaaaaagagaattttagaccaatatccttgatgaacattgatgcaaaaatcctcaataaaatactggcaaaacgaatccagcagcacatcaaaaagcttatccaccatgatcaagtgggtttcatccctgggatgcaaggctggttcaatatatgcaaatcaataaacgtaatccagcatataaacagaaccaaagacaaaaaccacatgattatctcaatagatgcagaaaaggcctttgacaaaattcaacaactcttcatgctaaaaactctcaataaattaggtattgatgggacgtatctcaaaataataagagctatctatgacaaacccacagccaatatcatactgaatgggcaaaaactggaagcattccctttgaaaactggcacaagacagggatgccctctctcaccactcctattcaacatagtgtgggaagttctggccagggcaatgaggcaggagaaggaaataaagggtattcaattaggaaaagaggaagtcaaattgtccctgtttgcagacgacatgattgtgtatctagaaaaccccattgtctcagcccaaaatctccttaagctgataagcaacttcagcaaagtctcaggatacaaaatcaatgtacaaaaatcacaagcattcttatacaccaataacagacaaacagagagccaaatcatgagtgaactcccattcacaactgcttcaaagagaataaaatacctaggaatccaacttacaagggatgagaaggacctcttcaaggagaactacaaaccactgctcaatgaaataagaggatacaaacaaatggaagaacattccatgctcacgggtaggaagaatcaatatcgtgaaaatgctcatactgcccaagctaaggcgaaccacaggccagccacatccaaaaaggtttacctgattacggcaatgaagccactgtccagtcctattcctgaaggtttggggctagaaaacagaacaggaaaggaaatcaagagtagagaatggaccaccatgttaagattggctgtagctgctgaactaacctttagagattggaaggagcggtctcggaggactttggacacacatgaaacaaaggggattcccttaagtaaaagcagagcaggcattctggtgattgacattagatag

SEQ ID NO: 120725 - DNA, 12364 bp, Homo sapiens
atggtaaagggatcaattcaacaagaggagctaactatcctaaatatttatgcacccaatacaggagcacccagattcataaagcaagtcctgagtgacatacaaagagacttagactcccacacattaataatgggagactttaacaccccactgtcaacattagacagatcaacgagacagaaagtcaacaaggatacccaggaattgaactcagctctgcaccaagcggacctaatagacatctacagaactctccaccccaaatcaacagaatatacatttttttcagcaccacaccacacctattccaaaattgaccacatagttggaagtaaagctctcctcagcaaatgtaaaagaacagaaattataacaaactgtctctcagaccacggtgcaatcaaactagaactcaggattaagaatctcactcaaagccgctcaactacatggaaactgaacaacctgctcctgaatgactactgggtacataacgaaatgaaggcagaaataaagatgttctttgaaaccaacgagaacaaagacaccacataccagaatctctgggacgcattcaaagcagtgtgtagagggaaatttatagcactaaatgcctacaagagaaagcaggaaagatccaaaatcgacaccctaacatcacaattaaaagaactagaaaagcaagagcaaacacattcaaatgctagcagaaggcaagaaataactaaaatcagagcagaactgaaggaaatagagacacaaaaaacccttcaaaaaatcaatgaatccaggagctggttttttgaaaggatcaacaaaattgatagaccgctagcaagactaataaagaaaaaaagagagaagaatcaaatagacacaataaaaaatgataaaggggatatcaccaccgatcccacagaaatacaaactaccatcagagaatactacaaacacctctacgcaaataaactagaaaatctagaagaaatggatacattcctcgacacatacactctcccaagactagaccaggaagaagttgaatctctgaatagaccaataacaggctctgaaattgtggcaataatcaatagtttaccaaccaaaaagagtccaggaccagatggattcacagccgaattctaccagaggtacaaggaggaactggtaccattccttctgaaactattccaatcaatagaaaaagagggaatcctccctaactcattttatgaggccagcatcattctgataccaaagccgggcagagacacaaccaaaaaagagaattttagaccaatatccttgatgaacattgatgcaaaaatcctcaataaaatactggcaaaacgaatccagcagcacatcaaaaagcttatccaccatgatcaagtgggcttcatccctgggatgcaaggctggttcaatatatgcaaatcaataaatgtaatccagcatataaacagagccaaagacaaaaaccacatgattatctcaatagatgcagaaaaagcctttgacaaaattcaacaacccttcatgctaaaaactctcaataaattaggtattgatgggacgtatttcaaaataataagagctatctatgacaaacccacagccaatatcatactgaatgggcaaaaactggaagcattccctttgaaaactggcacaagacagggatgccctctctcaccgctcctattcaacatagtgttggaagttctggccagggcaatcaggcaggagaaggaaataaagggtattcaattaggaaaagaggaagtcaaattgtccctgtttgcagacgacatgattgtttatctagaaaaccccatcgtctcagcccaaaatctccttaagctgataagcaacttcagcaaagtctcaggatacaaaatcaatgtacaaaaatcacaagcattcttatacaccaacaacagacaaacagagagccaaatcatgagtgaactcccattcacaattgcttcaaagagaataaaatacctaggaatccaacttacaagggatgtgaaggacctcttcaaggagaactacaaaccactgctcaaggaaataaaagaggacacaaacaaatggaagaacattccatgctcatgggtaggaagaatcaatattgtgaaaatggccatactgcccaaggtaatttacagattcaatgccatccccatcaagctaccaatgactttcttcacagaattggaaaaaactactttaaagttcatatggaaccaaaaaagagcccgcatcgccaagtcaatcctaagccaaaagaacaaagctggaggcatcacactacctgacttcaaactatattacaaggctacagtaaccaaaacagcatggtactggtaccaaaacagagatatagatgaatggaacagaacagagccctcagaaataatgccgcatatctacaactatctgatctttgacaaacctgagaaaaacaagcaatggggaaaggattccctatttaataaatggtgctgggaaaactggctagccatatgtagaaagctgaaactggatccctttcttacaccttatacaaaaatcaattcaagatggattaaagatttaaacgttagacctaaaaccataaaaaccctagaagaaaacctagacattaccattcaggacataggcgtgggcaaggacttcatgtccaaaacaccaaaagcaatggcaacaaaagacaaaattgacaaatgggatctaattaaactaaagagcttctgcacagcaaaagaaactaccatcagagtgaacaggcaacctacaacatgggagaaaattttcgcaacctactcatctgacaaagggctaatatccagaatctacaatgaactcaaacaaatttacaagaaaaaaacaaacaaccccatcaaaaagtgggtgaaggacatgaacagacacttctcaagagaagacatttatgcagccaaaaaacacatgaaaaaatgctcatcatcactggccatcagagaaatgcaaatcaaaaccactatgaggttttactgggatttaataatgcttataatgatggttggaaatctagtcatcataccagttggaatcacattctttacagagcaaacaacaacaccatggattattttcaatgtggcatcagatacagttttcctattggacctgatcatgaattttaggactgggactgtcaatgaagacagttctgaaatcatcctggaccccaaagtgatcaagatgaattatttaaaaagctggtttgtggttgacttcatctcatccatcccagtggattatatctttcttattgtagaaaaaggaatggattctgaagtttacaagacagccagggcacttcgcattgtgaggtttacaaaaattctcagtctcttgcgtttattacgactttcaaggttaattagatacatacatcaatgggaagaggaacgcagctcctcaccagcaacagaacaaagctggacggagaatgactttgacgagctgagagaagaaggtttcagacgatcaaattactctgagctacgggaggacattcaaaccaaaggcaaagaagttgaaaactttgaaaaaaatttagaagaatgtataactagaataaccaatacagagaagtgcttaaaggagctgatggagctgaaaaccaaggctcgagaactacgtgaagaatgcagaagcctcaggagccgatgcgatcaactggaagaaagggtatcagcaatggaagatgaaatgaatgaaatgaagcaagaagggaagatcaaaagagacaaagaaggccattacataatggtaaagggatcaattcaacaagaagagctaactatcctaaatatatatgcacccaatacaggagcacccagattcataaagcaagttctgagtgacctacaaagagacttagactcccacacattaataatgggagactttaacacctcactgttaacattagacagatcaatgagacagaaagtcaacaaggatacccaggaattgaactcatctctgcaccaagcggacctaatagacatctacagaactctccaccccaaatcaatagaatatacatttttttcagcaccacaccacacctattccaaaattgaccacatagttggaagtaaagctctcctcagcaaatgtaaaagaacagaaattataacaaactatctctcagaccacagtgcaatcaaactagaactcaggattaagaatctcactcaaagccgctcaactacatggaaactgaacaacctgctcctgaatgactactgggtacataacgaaatgaaggcagaaataaagatgttctttgaaaccaacgagaacaaagacacaacataccagaatctctgggacgcattcaaagcagtgtgtagagggaaatttatagcactaaatgcccacaagagaaagcaggaaagatccaaaattgacaccctaacatcacaattaaaagaactagaaaagcaagagcaaacacattcaaaagctagcagaaggcaagaaataactaaaatcagagcagaactgaaggaaatagagacacaaaaaacccttcaaaaaatcaatgaatccaggagctggttttttgaaaggatcaacaaaattgatagaccgctagcaagactaataaagaaaaaaagagaggagaatcaaatagacacaataaaaaatgataaaggggatatcaccaccgatcccacagaaatacaaactaccatcagagaatactataaacacctctacgcaaataaaccagaaaatctagaagaaatggataaattcctcgacacatacactctcccaagactaaagcaggaagaagttgaatctctgaatagaccaataacaggagctgaaattgtggcaataatcaatagtttaccaaccaaaaagagtccaggaccagatggattcacagccgaattctaccagaggtacaaggaggaactggtaccattccttctgaaactattccaatcaatagaaaaagagggaatcctccctaactcattttatgaggccagcatcattctgataccaaagccgggcagagacacaaccaaaaaagagaattttagaccaatatccttgatgaacattgatgcaaaaatcctcaataaaatactggcaaaccgaatccagcagcacatcaaaaagcttatccaccatgatcaagtgggcttcatccctgggatgcaaggctggttcaatatacgcaaatcaataaatgtaatccagcatatcaacagagccaaagacaaaaaccacatgattatctcaatagatgcagaaaaagcctttgacaaaattcaacaacccttcatgctaaaaactctcaataaattaggtattgatgggacgtatttcaaaataataagagctatctatgacaaacccacagccaatatcatactgaatgggcaaaaactggaagcattccctttgaaaaatggcacaagacagggatgccctctctcaccactcctattcaacatagtgttggaagttctggccagggcaatcaggcaggagaaggaaataaagggtattcaattaggaaaagaggaagtcaaattgtccctgtttgcagacgacatgattgtttatctagaaaaccccatcgtctcagcccaaaatctccttaagctgataagcaacttcagcaaagtctcaggatacaaaatcaatgtacaaaaatcacaagcattcttatacaccaacaacagacaaacagagaggcaaatcacgagtgaactcccattcacaattgcttcaaagagaataaaatacctaggaatccaacttacaagggatgtgaaggacctcttcaaggagaactacaaaccactgctcaaggaaataaaagaggacacaaacaaatggaagaacattccatgctcatgggtaggaagaatcaatatcgtgaaaatggccatactgcccaaggtaatttacagattcaatgccatccccatcaagctaccaatgactttcttcacagaattggaaaaaactactttaaagttcatatggaaccaaaaaagagcccgcatcgccaagtcaatcctaagccaaaagaacaaagctggaggcatcacactacctgacttcaaactatactacaaggctacagtaaccaaaacagcatggtactggtaccaaaacagagatatacatcaatggaacagaacagagccctcagaaataatgccgcatatctacaactatctgatctttgacaaacctgagaaaaacaagcaatggggaaaggattccctatttaataaatggtgctgggaaaactggctagccatatgtagaaagctgaaactggatcccttccttacaccttatacaaaaatcaattcaagatggattaaagatttaaacgttagacctaaaaccataaaaaccctagaagaaaacctaggcattaccattcaggacataggcgtgggcaaggacttcatgtccaaaacaccaaaagcaatggcaacaaaagccaaaattgacaaatgggatctaattaaactaaagagcttctgcacagcaaaagaaactaccatcagagtgaacaggcaacctacaacatgggagaaaatttttgcaacctactcatctgacaaagggctaatatccagaatctacaatgaactcaaacaaatttacaagaaaaaaacaaacaaccccatcaaaaagtgggcgaaggacatgaacagacgcttctcaaaagaagacatttatgcagccaaaaaacacatgaaaaaatgctcatcatcactggccatcagagaaatgcaaatcaaaaccactatgagatatcatctcacaccagttagaatggcaatcattaaaaagtcaggaaacaacaggcaaacagggtctggagtggacctccagcatactccagcagacctgcagcagaggggcctgactgttagaaggaaaatgaacaaacacaaaggaatagcatcaacatcaacaaaaaggacatccactcaaaagccccatctgaaggtcaccaaaatcaaagaccagaggcctacgttacaagagctcctgaaggaagcactaaatatggaaaggaacaaccagtaccagccactgcaaaatcatgccaaaatgtaaagaccatcgagactaggaagaaactgcatcaactaacgagcaaaatcaccagctaacatcataatgacaggatcaaattcacacataacaatattaactttaaatgtaaatggactaaattctccaattaaaagacacagactggcaagttggataaagagtcaagacccatcagtgtgctgtattcaggaaacccatctcatgtgcagagacacacataggctcaaaataaaaggatggaggaagatctaccaagcaaatggaaaacaaaaaaaggcaggggttgcaatcctagtctctgataaaacagactttaaaccaacaaagatcaaaagagacaaagaaggccattacatgatggtaaagggatcaattcaacaagaggagctaactatcctaaatatgtatgcacccaatacaggagcacccagattcataaagcaagtcctgagtgacctacaaagagacttagactcccacacattaataatgggagactttaacaccccactgtcaacattagacagatcaacgagacagaaagtcaacaaggatacccaggaattgaactcagctctgcaccaagcagacctaatagacatctacagaactctccaccccaaatcaacagaatatacatttttttcagcaccacaccacagctattccaaaattgaccacatacttggaagtgaagctctcctcagcaaatgtaaaagaacagaaattataacaaactatctctcagaccacagtgcaatcaaactagaactcaggattaagaatctcactcaaagccgctcaactacatggaaactgaacaacctgctcctgaatgactactgggtacataacgaaatgaaggcagaaataaagatgttctttgaaaccaacgagaacaaagacacaacataccagaatctctaggacgcattcaaagcagtgtgtagagggaaatttatagcactaaatgcccacaagagaaagcaggaaagatccaaaattgacaccctaacatcacaattaaaagaactagaaaagcaagagcaaacacattcaaaagctagcagaaggcaagaaataactaaaatcagagcagaactgaaggaaatagagacacaaaaaacccttcaaaaaatcaatgaatccaggagctggttttttgaaaggatcaacaaaattgatagaccgctagcaagactaataaagaaaaaaagagagaagaatcaaatagacacaataaaaaatgataaaggggatatcaccaccgatcccacagaaatacaaactaccatcagagaatactacaaacacctctacgcaaataaactagaaaatctagaagaaatggatacattccttgacacatacactctcccaagactaaaccaggaagaagttgaatctctgaatagaccaataacaggagctgaaattgtggcaataatcaatagtttatcaaccaaaaagagtccaggaccagatggattcacagccgaattctaccagaggtacaaggaggaactggtaccattctttctgaaactattccaatcaatagaaaaagagggaatcctccctaactcattttatgaggccagcatcattctgataccaaagccgggcagagacacaaccaaaaaagagaattttagaccaatatccttgatgaacattgatgcaaaaatcctcaataaaatactggcaaaccaaatccagcagcacatcaaaaagcttatccaccatgatcaagtgggcttcatccctgggatgcaaggctggttcaatatacgcaaatcaataaatgtaatccagcatataaacagagccaaagacaaaaaccacatgattgtctcaatagatgcagaaaaagcctttgacaaaattcaacaacccttcatgctaaaaactatcaataaaataggtattgatgggatgtatttcaaaataataagagctatctatgacaaaaccacagccaatatcatactgaatgggcaaaaactggaagcattccctttgaaaaccggcacaagacagggatgccctctctcaccgctcctattcaacatagtgttggaatttctggccagggcaatcaggcaggagaaggaaataaagggtattcaattaggaaaagaggaagtcaaattgtccctgtttgcagatgacatgattgttgatctagaaaaccccatcgtctcagcccaaaatctccttaagctgataagcaacttcagcaaagtctcaggatacaaaatcaatgtacaaaaatcacaagcattcttatacaccaacaacagacaaacagagagccaaatcatgagtgaactcccattcacaattgcttcaaagagaataaaatacctaggaatccaacttacaagggatgtgaaggacctcttcaaggagaactacaaaccactgctcaaggaaataaaagaggatacaaacaaatggaagaacattccatgctcatgggtaggaagaatcaatattgtgaaaatggccatactgcccaaggtaatttacagattcaatggcatccccatcaagctaccaatgactttcttcacagaattggaaaaaactactttaaagttcatatggaaccaaaaaagagcccgcatcggcaagtcaatcctaagccaaaagaacaaagcaagaataaagctggaggcatcactattcaaactatactacaaggctacagtaaccgaaacagcatggtactggtaccaaaacagagatatagatcaatggaacagaacagagccctcagaaataatgccgcatatctacaactatctgatctttgacaaacctgagaaaaacaagcaatggggaaaggattccctatttaataaatggtgctgggaaaactggctagccatatgtagaaagctgaaactggatcccttccttacaccttatacaaaaatcaattcaagatggattaaagacttaaatgttagacctaaagccataaaagtcctagaagaaaacctaggcaataccattcaggacataggcatgggcaaggacttcatgactaaaacaccaaaagcaatggcaacaaaagccaaaattgacaaatgggatataattaacctaaagagcttctgcacagcagaagaaactaccatcagagtgaacaggcaacctacagaatgggagaaaaattttgcaatctacccatctgacaaaggactaatatccagattctacaaagaactcaaacaaatttacaagaaaaaaacaaacaaccccatcaaaaagtgggcgaaggacatgaacagacacttctcaaaagaagacatttatgcagccaaaaaacacatgaaaaaatgctcatcatcactggccatcagagaaatgcaaatcaaaaccacaatgagataccatctcacaccagttagaatggcaatcatgaaaaaagtcaggaaacaacagctggaggtcatgcctgcaaccatgggcagcacattcaacaacttaccggcacccaggaaccatggagaaaaaaaccagcagcggggacacccccactgtcttcccatccaccctgggtcgcaagaaaagcacaagtgctcaactaactgaactgacagctcttacacttgagttaagcaagggaaaggtaagaaacgccccttcaaagttagatctaagcccttttgagatgctgtatggatggccttttctcaccaatgatttcttattagaccaagagacctctgaattgggcaagcatgtaaactctctggctcgttttcaacaggaattaactcaagtagcagaagcccaaccccaagaagtaggaccacctttatttaacccaggatatttggtattgcccaagcagggagggccttacaccattctcctttcaatgccctcagcagtaaaagttacaggtattgattcctggatacatcatgctcaagttaaagcctggaaaactgagagagcaatccccggcagcccagcggaatgtcttggataccaatgtgaggaaataagagacctgaagctgaaaatcaaaagagataagaaaatgagcaagggctactcatcctactcagttccagtcatccattcagtcatccagtcatccagtctttgtacaactggtacacagaagtcaagaattgaggtttgggaacctctgcctagatttccgaagatgtatggatatgcctggattcctagacaaaagtttgctgcaggggcagggccctcatggagaacctctgttaaggcagtgcagaagggaaatgtggggtcgaagccccaccacagagaccctactggggcactgcctagtggagctgtgagaagaggaccaccatcctccagacctcagaatggtagatccactggcagcttgcaccgtgtgcctggaaaagccagacctcaacaccagcctgtgaaagcagccaggagggaggccgtgccctacaaagccacaggggtagagctgcccaagaccatgggaacccacctattgcatcagtgtgacctggatctacctgccaccttctctctcagccttcacatcaagtacctcaaacatcgacattcttattccccacatctccacctcctattcaccgtcatgggcccccatgccaggcaaatgattcgcatctctggcatagatgttgacaccaggaacctgtataagctgaatttgaaagtaaagtggctggaggttttggatcaagaggaacctgaatacagtagaacaacctccaggaagaagcagggattccctaacagcgatgaagaagatgtattgtggatggagaagcagctgtcctgcttctgtgacaagtaccaaaaatggataccaaccagacagctgaagggacagctcagttacgttaaggaagcagatctgattccagatgtaatgcccccacaagctttgttccatgatgatgatgagatggaaggcaatggagccatagacgcagggatggagtatgtctacaacattgacacgttgcttagatggtctgatggtgaggaggaaggagaaggaggagaagaaggaagaggaggaggaagaggaggagaaggaggaggaaagagggaggagggagaaggaaaaaaagaagaagaacaaggaggatggggaggaggacaggaagtggaagaagaaggaggaggaggagggggaaattaa

SEQ ID NO: 120726 - DNA, 494 bp, Homo sapiens
tttcgtgctcttcgggggccacgccctccgggccctgggggcctagcgcgcgacggtggggtggagctagcctcgtgaccttttaccccaacatggctgcgcccgtgggaccggtgaagttctggcgacccggtacagaggggccaggtgtaagcatctctgaagagagacaaagtctggctgaaaactctgggacaacggttgtttacaacccttatgctgccctttccatagagcagcagaggcagaagctgccggtattcaagcttaggaatcatattttatacttgatagaaaattatcagacagtggtgattgttggtgaaacaggatgtgggaagagcacacagattcctcaggaaaaatcctatgtgatgtggataggagtagaaagaaggatcaagaaaggccttgtaaaggaattggcatttgaaattgaccttgactgggagctgactgagaagatattccaagccagtgaatattgtggttag

SEQ ID NO: 120727 - DNA, 732 bp, Homo sapiens
atgcccccttcagccaacttggagaaaaggcttcctcagaaactgaggcctccatctgtgccaacccttgtaaagcggttcacctcttcagaggctaatgcctctcaaaaccaagaacaattaaagcgagagtctttccaagcaactggggaattgagcaaaataaatcagaaatcctcagccttcgctctggaggctcgcctcattatgagagcagatctattagccctcttgccattgtctttcatttctcaagtcgtggtgtctacgacagtcaatgtggatggccatgtcctggcagtctctgataacatgtttgtccataataattccaagcatgggcggagggctcggaggcttgacccctcggaagactgggtaatttttgaggaaaaggagtttatgtcttacggttctggaggctgggaagtccaagggcatgatgccagcactggtgagggcttccaggctgcatcatcctattgtggaaagttgatcactcctcatgccatccgtgtgcagacccctcctcggcacatccctggtgttgtggaagtcacactgtcctacaaatctaagcagttctgcaaaggaacaccaggcagattcatttacacagctcactttagctactttgggcatggtgattcacctgaaggatccagttcaaactcttacctctctgaagtgttctctgaccgctgtggtatagtggacagagccctgggctga

SEQ ID NO: 120728 - DNA, 800 bp, Homo sapiens
ccagcccagcctgggaactgctgactggtccagggtatggtcaggtgatgattctggggcctgctggcctgggctctgctgctgctgctgctgctgcttcagcttctctctgcctcagtttcctcacctgtaccaccttctgtgctcctcctccacactcaacctccttttccccccaacaggccaccctgcagttctgtgtggtgaagccactcatggcggtcagctccctccaagggtctgtcccagccagaaaatgctccccgtcccgcagcgtcaccagtggctacctctacgtgaccatcatctacaacatctccgtcagcctggccctctacgccctcttcctcttctacttcgccacccgggagctgctcagcccctacagccccgtcctaggaaaggaatcattctgggtccagacacccgtgcctccccatccaggcatgctcctggccatcctggagaagtgtggggccatccccaaaatccactcggcccgcgtgtcggtgggcgagggcaccgtggctgccggctaccaggacttcatcatctgtgtggagatgttctttgcagccctggccctgcggcacgccttcacctacaaggtctatgctgacaagaggctggacgcacaaggtatgagccagggtcctaggcgacccccgctgggagaagcagggagccccaaacatcccaggaccctcccacctcccagcatcctacaggtgcggctgggtcaggacatgggatccccactctatatgcaggaatggggccacagaggtcggggaagagca

SEQ ID NO: 120729 - DNA, 330 bp, Homo sapiens
atgaaagtgattgctttcagcaggcacacttttgagggaaaccgaaaacactggcacaaggttgcaaattatggagtgggaggacagtatgaaccgcacttcgacttctctaggtcttgtgggtggtggatgaagcctgttgtaaacttgggtgaaagttgttgtctgttgcagcgaccttttgacagcggcctcaaaacagaggggaataggttagcgacgtttcttaactacaatgatgagcgagatactttcaagcatttagggacggggaatcgtgtggctactttcttaaactacgtgagtatgatgtgtgctgatgagccctaa

SEQ ID NO: 120730 - DNA, 658 bp, Homo sapiens
  misc_feature (1)...(658): n = a,t,c or g
caaaagctcctggctagaggaagatgatgaccctgttgtggcccgagtaaatcgtcggatgcagcatatcacagggttaacagtaaagactgcagaattgttacaggttgcaaattatggagtgggaggacagtatgaaccgcacttcgacttctctaggcgaccttttgacagcggcctcaaaacagaggggaataggttagcgacgtttcttaactacatgagtgatgtagaagctggtggtgccacccgtcttccctgatctgggggctgcaatttggcctaagaagggtacagctgtgttctggtacaacctcttgcggacgggggaaggtgactaccgagacaagacatgctgcctgccctgtgcttgtgggctgcaagtgggtctccaataagtgggttccatgaaccnaggacaggagttcttgagaccttgtggatcaacagaagttgactgacatccttttctgtccttccccttcctggtccttcagcccatgtcaacgtgacagacacctttgtatgttcctttgtatgttcctatcaggctgatttttggagaaatgaatgtttgtctggagcagagggagaccatactaagggcgactcctgtgtgactgaagtcccaagcccttccaattcagcctgtgccatc

SEQ ID NO: 120731 - DNA, 717 bp, Homo sapiens
ttcggcacaggctaagaaatagattgaaagatgttggtggagaagcattttacccattacttgaagatgaccagtctaatttacctcattcaaacagcaataatgagttgtctgcagctgccacgctccctttaatcatcagagagaaggatacagagtaccaactaaatagaattattctcttcgacaggctgctaaaggcttatccatataaaaaaaaccaaatctggagagaagcaagagttgacattcctcctcttataagaggtttaacctgggctgctcttctgggagttgagggagctattcatgccaagtacgatgcaattgataaagacactccaattcctacagataggacaaattgaagtgggatattcctcgctgtcattcagtacgatgaactgttattcatgcaccagaaggtcatgcaaaatttaggcgtgtattaaaaggcctgggtagtgtctcatcctgatcttgtgtattggcaaggtcttgactcactttgtgctccattcctatatctaaacttcaataatgaagccttggtatatgcatgtatgtctgcttttattcccaaatacctgtataacttcttcttaaaagacaactcacatgtaatacaagagtatctgactgtcttctctcagatgattgcatttcatgatccagagctgagtaatcatctcaatgagattggcttcattccagatc

SEQ ID NO: 120732 - DNA, 508 bp, Homo sapiens
atgacctacttccaccttgggagccggcgtctggatgaggggaatgctgtgacacttgaacagaggtaccaactcagccacagggaagtagagtaccaagcaggctcttgtggcccccaattccaggacttggctcttggacagcatttctggacctgccgtgggccaaagggaaactacactgaagaccagtctaatttacctcattcaaacagcaataatgagttgtctgcagctgccatgctccctttaatcatcagagagaaggatacagagtaccaactaaatagaattattctcttcgacaggctgctaaagggagctattcatgccaagtacgatgcaattgataaagacactccaattcctacagatagacaaattgaagtggatattcctcgctgtcatcagtacgatgaactgttatcatcaccagaagttcatgcgaaatttaggcgtgtattaaaagcctgggtagtgtctcatcctgatcttgtgtattggcaag

SEQ ID NO: 120733 - DNA, 891 bp, Homo sapiens
atgaaggaagaagaacattctaggcccactgaacagcctgtagaaagggtcagattttctcgtgtactgaagaatagggcctggcctacttttaaacaggccaaatctaaaatctccccactgcacagcagtgatttctgccctaccaactgccatgtcaatgtgatggaagtttcttatcccaaaacatcaacctctttgggaagtgcatttggtgttcagttggatagcaggaagcataattctcatgataaagaaaacaaatcttcggagcaaggtctgtctctgggacagcaggatggccatggtctcaggtatctgctaaaagaagaagacttagaaacccaagacatctatcagaaactgctgggcaaacttcagactgcactgaaagaggtggagatgtgtgtttgtcaaatagatgaccttctgtcttcaataacatattctcctaaattagaacgtaagacatcagagggcataataccaacagacagtgacaatgagaagggagaaagaaacagcaaacgggtatgttttaatgtagcaggagatgaacaggaagattctggtcatgacaccatcagcaacagagactcttacagtgactgcaacagcaataggaattccatcgcctccttcaccagcatctgcagcagccagtgcagctcgtatttccacagtgatgaaatggactcagaatttcaacaggaaatggaaccaaagctgagttgtccaaaaaggctacggcttcatatcaagcaagatccttggaatcttcccagcagcgtccggactcttgctcagaacatcaggaaatttgttgaaggtcagcatgaaaagcaaagaacattgcatgatattagcaataatcaatttaaaacccactaa

SEQ ID NO: 120734 - DNA, 584 bp, Homo sapiens
attatggattccaaactttgcagtactagccaaacctttgtacagggtgacaaaggggggtgaccgggagccttttgaatgggggcctctacaacagcaagccttttgtaagttaaaggaaaaatttatgttggccccagccctaggactatcagatgtgacaaagccctttacactctatgtgtcagaaagagaaacaatggcagttggagttttaacccagactgtggggcactggccaaggccagcggcctatctctcaaaacaactagatggggtttccaaaggctggccaccacgtctaagggccctggcagcaacagccctgttagcacaagaagcagataaactaacccttgggcaaaacctgaatataaaggtcccccatgctgtgccatgggcatcagtagactgggagttatatgtggactggagcagcttcatcaacccacaaggagaaagatgtgcaggatatgcggtggtaactttggatgctgtcattgaagccaaacctttgccacagggcacttcagcccagaagactgagctcattgctttaacaagggctcaagaactcagtgaag

SEQ ID NO: 120735 - DNA, 152 bp, Homo sapiens
tcaggtggcaaaagggatggatgccctgcttcagcacctggaggactgtgggtataggtgtccaagaagaaagctcagatctgcagacagcaggttacaaagtggggcgatgggagcgctttgatgggaacctctacaacagcaagcctttt

SEQ ID NO: 120736 - DNA, 894 bp, Homo sapiens
ctaggccttgggcctgtgatgggaggggctgccatgaatgtctctgacatgttctggagacattttccctattatcttggtgattaatgtttggctcttcattactatacaaatttcagcagctggcttgaatttctccccagaaagtgagattttcttttctactgcattgtcaggttgaaaactttccaagcttttatgctccatcgcctcttgaatgctttgctgcttagaaatttcttccaccagataccctaaatcatctctctcaagttcagagttccatagacctctagggcaggggcaaaatgccaccagtctctttgttaaagcatagcaagagtcacctttgttccaattcccaacaatttcctcatctccatctgagaccacctcatactggacttcattgtccacaccactatcagcattttggtcaaagccattcagcaagtctctaggaagttccaaactttcccaccttttcctgtcttcttctgagtccgttctgtccgtcacttcccagatccgcgctttctctgtccttcctgtgcgacggttacgccgctccatgagcttatcgcgaataaatacctgtgacggaagatcacttcgcagaataaataaatcctggtgtccctgttgataccgggaagccctgggccaacttttggcgaaaatgagacgttgatcggcacgtaagaggttccaactttcaccataatgaaataagatcactataaccagaccgttcagctggatattacggccttttggggatcctctagagtcgacctggaggactgtgggtataaggtgtccaagaagaaagctcagatctgcagacagcaggtacgctacctgggattcactattcggaaaggggagcacagc

SEQ ID NO: 120737 - DNA, 1626 bp, Homo sapiens
atgaatgcagattacaagccgcttctccaagactcttctactttatcggagaaaaacttttacccagagcccagggtcccaaattttcctaatttaccacaggtgttcgggtgtcacaaagagttgaagcattcttttgatgagcagtttggaaacactgttttggtaggatctgcgaagggatatttggagcacttacgggtctatggagaaaaataccttcagataaaaactagaagaatctttgcgaaaaactgttgtgatatgggtaaaactttcctttcttttgagccttttgagaaccgtttcggcggaactgccccggcgatattggaacgcctgaagcccaggggaaacaggaaatttcacggcaccatcagtcttcacagcaaggctggtgagatccaagtaggaggttttggctggctcaggaaggatgagggcagtgcttctgggggacgctcacagtctgacttccagtggatcctccatagagggggcacgaactggtgggcttacctgggtttgggcatgtctggaccagtggccttcattgccacacttgaaatgtgcaggcaggacaagctgcagacaaaacccttcagacaccagttagagaagaaagggctttattcggccaggagctttggcaagactcactctccaacaactgagctccccaaaatagctcctgagagccagaagctgtttgcgtttcggtggaagatctacagtcaggtgtcactactcagtacacttggaactggcttcccaagggttcaagaactcccttactatcttcggggaggctctgacttggacttgcaaaagtttcctgctaaagacctaagctatgtcttgctcctgtcgtggatgaccttctgctgggacactccatggcagttgggtgctcaaaaggttgatgccctgtttcagcacctggaggactgtgggtataaggtgcccagaagaaatctcagatctgcagacagcagtgcatgtgggaacctattccctttggtaggtgtggaggaatgttcattggtccagtccacagaatgcttgtttgactccctgacgattgcctggggtcacaatagtgaaactgcatctcaaaaaaagaaaaaaaaattgagaacttgttatatggtaccgagcgtaacgcctgcgacctggaacagggctaagggtaaaaccgaccgggtgaaaacgggggaacaggatttcgaacctgggccgaatgggggaccagcaaaaaaaacgagaaaagacgacacaaacagacaaagaagagacaacgaaaaaaccacaaacgaaaaaaagataaaaaaacgaacaaaaacacagggagcgaccaaccggcgagagagacaacagccaaacaaaagacgacagaacccaagcacgagaaataaaacagaacaaaccaaaagccacacagcaaagaagcgaacagcacaggacaagccaggtacaagagaaatgcacagagagcacaacagaagaacaaaaccaacggacgcacgaacgcgagcaaaacacagcgaccagaacaacacgcacacaccgaaccagcggccagacaaaggccacagcaaagggacgaagaaacaacaaaagagctaa

SEQ ID NO: 120738 - DNA, 1974 bp, Homo sapiens
atggcccaagtatgggcaaatgataatcctccgggactggcggtcaaccaagcccccgtgctcatagacgttaagcctggggcccaaccaattagacaaaagcagtatccggttcccagagaagctctcaaaggaatccagccagggaccaaggactaccagccagtacaggacttgcgcttggtcaaccaagctacagtgactttgcacccaacagttcctaacccttacacattgttagggctgctgctggctgaggacagctggtttacctgtctggacttaaaagatgccttctttagcatcagactagctcctgagagccagaagctgtttgcctttcagtgggaagatccgcagtcagacctaggctgcatcttgctcctgtacgtggacgaccttctgctgggacactccacggcagtcgagtgtgcaaaagggatggatgtcctgcttcagcacctggaggactgtaggtataagatgtccaagaagaaagctcatatctgcagacagcaggtacgctacctgggattcactattcggaaaggggagcgcagcctgggaaagagaaaaaatggcagttggagttttaacccagactgtggggccctggccaaggccagtggcctatctctcaaaacaactagatgggtttccaaaggctggccactatgtctaaggaccctggcagcaacagccctgttagcacaagaagcagataaactaacccttgggcaaaacctgaatataaaggccccccatgctgtggtaactttgatgactaccgaaggacatcattggctaacaaatgctagattaaccaagtaccaaagcttgccatgtgaaaatccccacataactattgaagtctgtaacaccctaaatcccaccaccctgctcccagtatcagagagcccgggcgagcataactgtgtagaggtgttggactcagtctattctagcagacctgaccttcgggaccagccatgggcatcatcagtagactgggagttatacatggacgggagcagcttcatcaactcacaaggagaaagatgtgcaggatatgcggtggtaactttggatgctgtcattaaagccaaactgtggctacagggcacttcagcccagaaggctgagctcattgctttaactcgggctgtagaactcagtgaagggcaagagtcacttgaagaattgttaggccggtacttctacgtctcacacttgccagcctttgccaaagcagtagcacaactgtgcattacatgccgacagcacaatgcgaggcaaagccccactgtttcgccccacatacaagcttatggagcagctccttttgaggatcttcaggtggatttcacagaaatgccaaaatgtggaggtaacaagtatttgctggttcttacgtgtacttactctgggtgggtggaggcttatccaacacgaactgaaaagccctacaagaaaggaaagaatgacccttcctgtactaagggacaatgtaaccccttagagctagtgataaccaatccccttaatcctcactggaaaaaaggggagcgtgtgaccttaggaatcgacagggccagactggatcctcgagtaaatatcttggttcgaggaggagaagtttacgaacgctctcctgagccagtgtttcaaactttctatgatgaactaaatgtgccagtaccagaaattccaggaaaaacaagaaatttgtttttgcaactagccgagtgtgtagcccagcctctcaatgtcacttcatgttatgtctgtggaggaaccgtaacaggatatcaatggccatggaaagcccgagaattagtacctgtagacccagttcctgatgaattcctggctcaaaagaattaccctgataatttctgggtcctaaaaccctcaattactggacaatattgcatagctagagaaggaaaaaaattcactcaccccgtaggatga

SEQ ID NO: 120739 - DNA, 1464 bp, Homo sapiens
atgagggagctttattcaatctggctgaagggctattggactgaaggggactgggctcaatcacccccaaggagcccacgggaagctctcgaaggaatccgggttcatctcaggtgcttcaaagcctatggaattatagttctttgccagtgtccatggaacacccccctcctgccagtccctaagccagggaccaagcactacgaaccagtacaggacttgcgcttggtcaaccaagctacagtgactctgcacccaacagttcctaacccttacacgttgttagggctgctgccggctgaggacatctggtttacccatctggacttaaaagatgccatctgtagcatcagaatagctcctgagagccagaagctgtttgcgtttcagtgggaagatctacagtcaggtgtcactactcagtacacttggaactggcttccccaaggttgggtgctcaaaagggttgatgccctgtttcagcacctggaggactgtgggtataaggtgcccaagaagaaatctcagatctgcagacagcaggtacgctacctgggattcactatttggaaaggggagcacagcctgtggtcagaaagaaagcaggtcatctgcagcctaccggaacctaaaaccagaaggcaagtaagggaattcctgggagctgtggggttttgcacattatggattccaaactttgcagtgctagccaaacatttgtacggcattacaaaggggggcaactgggagccttttgaatgggggcctctacaacagcaagcctttttatcagagagcccagtcgagcataactgtgtagaggtgttggactcagtttattctagcagacctgaccttagggaccagccatgggcatcagtagacttggagttatatttggacgggagtagcttcatcaacccacaaggagaaagatgtgcagaatatgcggtggtaactttggatgctgtcattgaaaccaaaccattgccacagggcacttcagcccagaaggctgagctcattgctttaactcgagctctagaactcagtgaaggtgattgcatttggatcaaagactgcaacatagcccctttgaggccacggtggaaaggacctcagaccgtcatcctgaccacccccacggctgtaaagagaagcatagccatagggaattggcaagatgatgaatggctccctgagagaatcacacaatattatgggcctgctacttgggcacaatacggctcgtggggatactacaaccccatttacatgctcaaccaaatgatatggttacaagctgtcttagaaataaccactaataaaactggcagagccttgactattctggcctggcaagaaactcagatgagaaatcctacctatcaagatagattggctctcgactacttactagcagctgaaggaggggtctgtgggaaatttaaccttactaattga

SEQ ID NO: 120740 - DNA, 1008 bp, Homo sapiens
atggttatctcagtagatgcagaaaaagcctttggcaagattcaacagcccttcatgctgagaactctcagtaaattagggctcggggttgcccgctcccggaatcccggagtctccgcggcccgaaccgagtctggaccatttagaagacgccggcaggttgaaaggaaaaccaagaagcgcgcagcccggctctggaaggctttggagagtcagctgacttgtacacaattcgcggcctctggagccttacctgccttcttgactgaatgccaccatgttcggttttacggcgttgtgctgcagcgacctgctcaactgcgcactgagtctcaagggcgacctggccgcgacggcctgccgctgcagcagtacaagctggtctttaatgcgcactataacttaacccgtcacatgccagtgcacacaggagccagacccttcgtttgcaaagtgtgcggaaaaggtttcaggcaagcaagcaccctgtgcaggcacaagatcattcacacgcaggaaaaacctcacaaatgtaaccagtgtggcaaagcatttaatagaagttccactttaaacactcatacccgaatacacgcgggctacaaaccgtttgtgtgtgaattctgtggcaaagggtttcatcaaaaagggaattacaaaaaccacaagttgacccacagcggggagaagcagttcaagtgcaatatctgcaacaaggctttccaccaggtttacaacctcaccttccacatgcacacccacaacgacaagaagcctttcacctgccccacgtgcggcaagggtttctgcaggaactttgacctcaagaagcatgtccgcaagctgcacgacagcagcctggggctggcccgcacgccagctggcgaaccaggcactgaaccgccgcccccgctaccgcagcagccgccgatgacgctgcctcctctgcagccgccgctgccaaccccggggcccctgcagcccgggctccaccagggccaccagtga

SEQ ID NO: 120741 - DNA, 174 bp, Homo sapiens
ccctgtcctccccctgggccgggatgcagcgctgcccctggcccctctggagctcagcagggagccccatgcccttccaggtgtggagagcagcctgcgcgtcactcgctgccggagccctcgggcagcttggctgttttatgcccaattcttcaccctccccctatccacctc

SEQ ID NO: 120742 - DNA, 588 bp, Homo sapiens
ttaagggaagaggccaggatgctgcagcccctcaggacatagctccccgggctcctccccgaggctggctgggctcttgggtcctggatgggtccttccttccacacaagctgtgtcctggagaaccttccataaccttcccaaccctttacttggtggggaaccctggtggtggtaatgaaccttaattgagccctcagttgtcgcgctgaaataacaaacactacttcccacagctctggaggctggcagtctgggttgagagtgccagcacgggggcttctggtaaggccttttttttttctgacttgtagacggccgccttctccctgtgccctcacaggacaaagagatcgtctctgtctggtctctttttataagggcactcatcccactcatgagggtgccaacttcatgacctgatgaccttccgaaggcctcatttccaaatgccatcacctcgagggttaggaattcaacgtaggaatttgggagggacacaaaggtgcagtccctagcagcatcatttccactccagcagcctcgcttctccagctcgcagtcatctctaccacccgggcagcccat

SEQ ID NO: 120743 - DNA, 4650 bp, Homo sapiens
gggccgggccgggctgggctggagcagcggcggccgcgggagccgagcttgcagcgagggaccggctgaggcgcgcgggagggaaggagacaagggctccgcggcgctgtcgccgccgctaccgctcactctcggggaagagatggcggcggagcggggagcccggcgactcctcagcaccccctccttctggctctactgcctgctgctgctcgggcgccgggcgccgggcgccgcggccgccaggagcggctccgcgccgcagtccccaggagccagcattcgaacgttcactccattttattttctggtggagccggtggatacactctcagttagaggctcttctgttatattaaactgttcagcatattctgagccttctccaaaaattgaatggaaaaaagatggaacttttttaaacttagtatcagatgatcgacgccagcttctcccggatggttctttatttatcagcaatgtggtgcattccaaacacaataaacctgatgaaggttattatcagtgtgtggccactgttgagagtcttggaactattatcagtagaacagcgaagctcatagtagcaggtcttccaagatttaccagccaaccagaaccttcctcagtttatgctgggaacaatgcaattctgaattgtgaagttaatgcagatttggtcccatttgtgaggtgggaacagaacagacaaccccttcttctggatgatagagttatcaaacttccaagtggaatgctggttatcagcaatgcaactgaaggagatggcgggctttatcgctgcgtagtggaaagtggtgggccaccaaagtatagtgatgaagttgaattgaaggttcttccagatcctgaggtgatatcagacttggtatttttgaaacagccttctcccttagtcagagtcattggtcaggatgtagtgttgccatgtgttgcttcaggacttcctactccaaccattaaatggatgaaaaatgaggaggcacttgacacagaaagctctgaaagattggtattgctggcaggtggtagcctggagatcagtgatgttactgaggatgatgctgggacttatttttgtatagctgataatggaaatgagacaattgaagctcaagcagagcttacagtgcaagctcaacctgaattcctgaagcagcctactaatatatatgctcacgaatctatggatattgtatttgaatgtgaagtgactggaaaaccaactccaactgtgaagtgggtcaaaaatggggatatggttatcccaagtgattattttaagattgtaaaggaacataatcttcaagttttgggtctggtgaaatcagatgaagggttctatcagtgcattgctgaaaatgatgttggaaatgcacaagctggagcccaactgataatccttgaacatgcaccagccacaacgggaccactgccttcagctcctcgggatgtcgtggcctccctggtctctacccgcttcatcaaattgacgtggcggacacctgcatcagatcctcacggagacaaccttacctactctgtgttctacaccaaggaagggattgctagggaacgtgttgagaataccagtcacccaggagagatgcaagtaaccattcaaaacctaatgccagcgaccgtgtacatctttagagttatggctcaaaataagcatggctcaggagagagttcagctccactgcgagtagaaacacaacctgaggttcagctccctggcccagcacctaaccttcgtgcatatgcagcttcgcctacctccatcactgttacgtgggaaacaccagtgtctggcaatggggaaattcagaattataaattgtactacatggaaaaggggactgataaagaacaggatgttgatgtttcaagtcactcttacaccattaatgggttgaaaaaatatacagagtatagtttccgagtggtggcctacaataaacatggtcctggagtttccacaccagatgttgctgttcgaacattgtcagatgttcccagtgctgctcctcagaatctgtccttggaagtgagaaattcaaagagtattatgattcactggcagccacctgctccagccacacaaaatgggcagattactggctacaagattcgctaccgaaaggcctcccgaaagagtgatgtcactgagaccttggtaagcgggacacagctgtctcagctgattgaaggtcttgatcgggggactgagtataatttccgagtggctgctctaacaatcaatggtacaggcccggcaactgactggctgtctgctgaaacttttgaaagtgacctagatgaaactcgtgttcctgaagtgcctagctctcttcacgtacgcccgctcgttactagcatcgtagtgagctggactcctccagagaatcagaacattgtggtcagaggttacgccattggttatggcattggcagccctcatgcccagaccatcaaagtggactataaacagcgctattacaccattgaaaatctggatcccagctctcactatgtgattaccctgaaagcatttaataacgtgggtgaaggcatccccctgtatgagagtgctgtgaccaggcctcacacagacacttctgaagttgatttatttgttattaatgctccatacactccagtgccagatcccactcccatgatgccaccagtgggagttcaggcttccattctgagtcatgacaccatcaggattacgtgggcagacaactcgctgcccaagcaccagaagattacagactcccgatactacaccgtccgatggaaaaccaacatcccagcaaacaccaagtacaagaatgcaaatgcaaccactttgagttatttggtgactggtttaaagccgaatacactctatgaattctctgtgatggtgaccaaaggtcgaagatcaagtacatggagtatgacagcccatgggaccacctttgaattagttccgacttctccacccaaggatgtgactgttgtgagtaaagaggggaaacctaagaccataattgtgaattggcagcctccctccgaagccaatggcaaaattacaggttacatcatatattacagtacagatgtgaatgcagagatacatgactgggttattgagcctgttgtgggaaacagactgactcaccagatacaagagttaactcttgacacaccatactacttcaaaatccaggcacggaactcaaagggcatgggacccatgtctgaagctgtccaattcagaacacctaaagcggactcctctgataaaatgcctaatgatcaagcctcagggtctggagggaaaggaagccggctgccagacctaggatccgactacaaacctccaatgagcggcagtaacagccctcatgggagccccacctctcctctggacagtaatatgctgctggtcataattgtttctgttggcgtcatcaccatcgtggtggttgtgattatcgctgtcttttgtacccgtcgtaccacctctcaccagaaaaagaaacgagctgcctgcaaatcagtgaatggctctcataagtacaaagggaattccaaagatgtgaaacctccagatctctggatccatcatgagagactggagctgaaacccattgataagtctccagacccaaaccccatcatgactgatactccaattcctcgcaactctcaagatatcacaccagttgacaactccatggacagcaatatccatcaaaggcgaaattcatacagagggcatgagtcagaggacagcatgtctacactggctggaaggcgaggaatgagaccaaaaatgatgatgccctttgactcccagccaccccagcctgtgattagtgcccatcccatccattccctcgataaccctcaccatcatttccactccagcagcctcgcttctccagctcgcagtcatctctaccacccgggcagcccatggcccattggcacatccatgtccctttcagacagggccaattccacagaatccgttcgaaatacccccaggcactggacaccatgccagcctcttcgtctcaaacatgctgcactgatcaccaggaccctgaaggtgctaccagctcctcttacttggccagctcccaagaggaagattcaggccagagtcttcccactgcccatgttcgcccttcccacccattgaagagcttcgccgtgccagcaatcccgcctccaggacctcccacctatgatcctgcattgccaagcacaccattactgtcccagcaagctctgaaccatcacattcactcagtgaagacagcctccatcgggactctaggaaggagccggcctcctatgccagtggttgttcccagtgcccctgaagtgcaggagaccacaaggatgttggaagactccgagagtagctatgaaccagatgagctgaccaaagagatggcccacctggaaggactaatgaaggacctaaacgctatcacaacagcatgacgaccttcaccaggacctgacttcaaacctgagtctggaagtcttggaacttaacccttgaaaacaaggaattgtacagagtacgagaggacagcacttgagaacacagaatgagccagc

SEQ ID NO: 120744 - DNA, 882 bp, Homo sapiens
atggccatcaatgagagactggataaagaaaatgtggtacataaacaccatggaatactatgcagccataaaaaggaacaagatcatgtcctttggagggacatggatggagctggaggccatcatcctcaacaaactgacaaggaaacagcaaaccaaaccctgcatgttcttacttacaagtgggagttgaacactcctaaaaccttggacgatcggaataatgaatgtcttttgtatgttaatgagaagactggtggctggggactcctagatagcttcaggatggggattggtcaccagaaagaccaagaggagtattcaagctgtagtcggcatccgtgccaaaatgggggcacgtgcataaatggaagaactagctttacctgtgcctgcagacatccttttactggtgacaactgcactatcaagcttgtggaagaaaatgctttagctccagatttttccaaaggatcttacagatatgcacccatggtggcattttttgcatctcatacgtatggaatgactatacctggtcctatcctgtttaataacttggatgtcaattatggagcttcatataccccaagaactggaaaatttagaattccgtatcttggagtatatgttttcaagtacaccatcgagtcatttagtgctcatatttctggatttttagtggttgatggaatagacaagcttgcatttgagtctgaaaatattaacagtgaaatacactgtgatagggttttaactggggatgccttattagaattaaattatgggcaggaagtctggttacgacttgcaaaaggaacaattccagccaagtttccccctgttactacatttagtggctatttattatatcgtacataa

SEQ ID NO: 120745 - DNA, 594 bp, Homo sapiens
tcagaacacggacatttgttgcttagcgccttggctgacattaatctcatcttgtttcactggactgttcccatggcttggtttcaacagagtcaagttatctacttgttttactcccagattgtcttctttactaggttcaacagtaggcactggagacatggagatgactgaggcacaccttgtcctcatgagagcagcataatatactgacacacatattaagtactcaacaaatagtaactctagcttcataagtagtttagtaactaaagggttagatgtgatataggcagtactagaggtataaatttcctccccttgccctccacccctgacaggccccagtgtgtgctgttcccctccctgtgtccgtgtgttctcattgttcaacacccacttatgagtgagaatatctggtgtttggttttcttcctgtgttagtttgctgaggatgatggcttccaggtttatccatgtctcggcaaaggacatgttctcattctttttatggctgcatagtattccatggtgtatatgtcccacattttctttatccagcgtatcattgatgggaatttgggttggttccat

SEQ ID NO: 120746 - DNA, 3624 bp, Homo sapiens
agcgagaaggagaaggaagagttggagcggctgcagaaagaggaggaggagaggaagaagaggctgcagctgtatgtgttcgtgatgcgctgcatcgcctacccctttaatgccaagcagcccaccgacatggctcgccggcagcagaagatcagcaaacagcagctgcagacagtcaaggaccggtttcaggctttcctcaatggggaaacccagatcatggctgacgaagccttcatgaacgctgtgcagagttactatgaggtgttcctgaagagcgaccgtgtggcccgcatggttcagagtggaggctgttccgccaacgactcccgggaggtcttcaagaagcacattgagaagagagtgcgcagcctgcctgagattgacggcctcagcaaggagactgtgctgagctcctggatggccaaatttgatgccatctaccgtggagaagaggacccgcggaagcagcaggcccggatgacagccagcgcagcctccgagctgattctgagcaaggagcaactctatgagatgttccagaacattcttgggatcaagaagttcgaacatcagctcctttacaatgcctgccagctggacaatccagatgagcaagcagcccagatcagacgagagctggatggacgtctacaaatggcagaccaaatagccagggaacgcaaatttcccaagtttgtatccaaagaaatggaaaacatgtacattgaggagctgaagtcatctgtcaacctgctcatggccaacttggagagcatgccggtatccaaaggcggggagttcaagctccagaaactcaaacgcagccacaatgcttccatcatcgacatgggcgaggagagtgagaaccagctctccaagtcagatgtcgtgctgtctttctcattggaggtggtaattatggaagtccaaggcctcaaatctttggctccaaatcgcatcgtatattgcacaatggaggtggaaggaggagagaaactacagactgatcaggccgaggcttctaaaccaacctggggcacccagggtgacttctccacaacccatgcactgccagctgtgaaggtgaagctgttcacagagagcacaggcgtcctggcgttggaggacaaggagcttgggcgggttattctccatcccaccccgaacagccccaaacagtcagagtggcacaaaatgacagtctccaaaaactgccccgaccaagatctcaaaatcaaacttgctgtccgaatggataagcctcaaaacatgaagcattctgggtatttatgggccatcggtaagaatgtctggaagagatggaagaaaaggttttttgtattggtgcaggtcagtcagtacacgtttgccatgtgcagttatcgggagaagaaagcggagcctcaggaacttctacaattggatggctacactgtggattacaccgacccccagccaggtttggagggtggccgagccttcttcaatgctgtcaaggagggagacaccgtgatatttgccagtgacgatgaacaagaccgcatcctgtgggtccaggccatgtatcgggccacggggcagtcacacaagcctgtgcccccgacccaagtccagaaactcaacgccaagggaggaaatgtacctcagctggatgcccctatctctcaattttctggactgaaggacgcagatagagctcaaaaacatggcatggatgaatttatctcttccaacccctgtaactttgaccacgcttccctctttgagatggtacaacgccttactttggatcacagacttaatgattcctattcttgcctgggctggttcagtcctggccaggtgtttgtactagacgagtattgcgcccgaaatggagtccgggggtgtcaccgacatctctgctacctcagagacttgcttgaacgggcagaaaatggcgccatgatcgaccccacccttcttcactacagctttgccttctgtgcatcccatgtccatgggaacaggcctgatggaattggaactgtgactgttgaagaaaaggaacgttttgaagaaatcaaagagaggctccgagttctgctagaaaatcagattacacattttaggtattgctttccatttggtcgacctgaaggtgctttgaaagctactctctcactcttggaaagggttttgatgaaagatattgttaccccagtgccacaagaggaggtaaaaacagttatccgtaaatgtctggaacaggctgcgttagtcaactattctcggctctcagagtatgccaaaatcgaagagaatcaaaaggatgcagaaaatgtaggccggttaatcactcctgccaaaaagcttgaagatacaatacgtcttgctgaactagtcattgaagttcttcagcaaaatgaggagcaccacgcagaggggaaagaggcctttgcgtggtggtcagatttaatggtggagcatgcggagacgttcctgtcactctttgcagtagacatggatgcagccttagaggtgcaacctccagacacatgggacagttttccactatttcagctgctgaatgattttctccgtactgactataatttgtgcaatggaaaatttcacaaacacctgcaagacctgtttgccccacttgttgttagatatgtggatctgatggagtcctcaattgcacaatccattcacaggggctttgagcgggagtcatgggaaccagtcaataatgggtcaggcacctcagaagatctgttttggaaacttgacgcccttcagaccttcattcgggacctgcactggcctgaagaagagtttggaaagcacctggaacaacggctgaagttgatggcaagtgacatgatcgaatcttgtgtcaaaagaaccaggattgcatttgaagttaagctgcaaaaaaccagtcgatcaacagattttcgagtcccacagtcaatatgcaccatgtttaatgttatggttgatgccaaagctcaatcaacaaaactttgcagcatggaaatgggccaagagcatcaataccattcaaaaatagacgaactaattgaagaaactgttaaagaaatgataacactcttggttgcaaagttcgttactatcttggaaggagtgctggcaaaattatccagatatgacgaagggactttgttttcttcttttctgtcatttaccgtgaaggcagcttccaaatatgtggatgtacctaaacccgggatggacgtggccgacgcctacgtgactttcgtccgccattctcaggatgtcctgcgtgataaggtcaatgaggagatgtacatagaaaggttatttgatcaatggtacaacagctccatgaacgtgatctgcacctggttgacggaccggatggacttacagcttcatatttatcagttgaaaacactaattaggatggtaaagaaaacctacagagatttccgattgcaaggggtcctggactccaccttaaacagcaagacctatgaaacgatccggaaccgtctcactgtggaggaagccacagcatcagtgagtgaaggtgggggactgcagggcatcagcatgaaggacagcgatgaggaagacgaagaagacgattag

SEQ ID NO: 120747 - DNA, 609 bp, Homo sapiens
atggcttaccgcagctttgactcctgggctcaggccaccctcccgcctcaccttcctaagtatctggcactacaggtcagtcagtacacgtttgccatgtgcagttatcgggagaagaaagcggagcctcaggaacttctacaattggatggctacactgtggattacaccgaccaacagccagcactgttcacaatagcagagttggaaccaactcaaatgcccatcaatgacagactggataaagaaaatgtggcacatatacaccatggaatactatgcagtcataaaaatgggagtttcctctcccaaaataagaggtcatctacttctcctaagtacttcatcatatcaaaagttctcagaaatctgagaatggttgtcaccagccacttctcggagcacatgatctctcctttttcagcaccacccaaggtcacccagctgctgcccatgaagatgctgccagcagagggtgtccagccagcacaagagccaggcaggccagctccgctgcaattggcagaaagtttcttagcgcaaaggaggggtaaactagcatctgggggaatgtatgaggggcctgaagaagagaatgaaccattatga

SEQ ID NO: 120748 - DNA, 1923 bp, Homo sapiens
  misc_feature (1)...(1923): n = a,t,c or g
ctaaggacacagggggccagatggaggattgagcatcccaggattttggtatctacttgagggtcctggaatcaatcttccacagacaccgagggacaactgtgtaacacggggactggtcatggaccctctcaaaccacacaagcaatgcccagtgaggagctgtcggggatcctctagagtcgacctgcaggcatgcaagctaagcctctgtttgtcaagaagcttggaaaaaccacattgttcccttgggcttgcggcacgcgaaagtgagagtaaagtaattgtcacatcgttgggatcaagacccaatttgcagcacagccccgttttgtccagccggcttgtaaggcccgttaaaagagtttgatacataacccacgcatgtaaaatatcgtgtgagttaataccatcgatcgtcattttgaaaccgcgtgaatcagtgaacaagtaccatttgccgttcatttgaaaaacattcgcgcgctcgatttcatcagttaccgtgtttgaagtgatcagcggcttcattacttttttcaatgtgtaatcattatttaactctatgataccgagggcgccgttcgctaactcagcatcgcgttttttagcgctctgctgaagcttctggctttctttacggaagaagttcgtgccgccgccgtagtacgctttgttaaataaagattcttcgccttggtatccgttttctgttcccgtgttggcttcgaatacaaggtatttatggcctttgtcttcaacgtagtgagggtctctcagcgtatggttgtcgccggatgtataattgccttcatcgataaactgctgaacgttctgatatgtttttccgtctccgtcaaaaatcgttttgtgatcttccactccgttgattttgagtgtgtcatcagattttgacacatttacctgcgctgttgtcaggctttgtttgccgtaatgtttaccggaatagtcagtgtagaataaacggatttttccgtcagatgtaaaggttgcagaaccggaccattcttgcgtctgatctttcaggatcggatcgttggcgtcggggatcctctggccttccttctccttttcttgttcctctctctctttctctccgtagacgtcggactgtgcccagactggtgtcaggggtatctctagaccgagccgggggtatgcccccaaggcactcttggagaatctgacgattatgtgtcttggggttgatcttctcgtggagtatattactggagttctctggatttcctgaatttgaatgttggcctgtcttgctaggttgaggaagtgctcctggatgatatcctgaagcatgttctccaacttggttccattctccccatctctttcaggtgctccaatcaatcgtaaatttggtctttttacataatcccatatgtcttggaaattttgtttgttctttttgggggatcctctagagtcaagccgcggggtcagcaacgctatggcgttatggctgcatagtattccatggtgtatatgtgccacattttcttaatccagtctatcattgatggacatttgggttggttccaagtctttgctattgtgaatagtgctgcaataaacgtacatgtacatttgtctttatagcagcataatttataatcctttgggtatatacccagtaatgggatggctgagtcaagatggtatttctgattctagatccttgaggaatcgccacactgtcttccacaatggctgcactangtttacactcccaccaacagtgtaaaagtgttcctgtttctctacatcctctccagcacctgttgtttcctgactttttaatgatcagatagcctcctattttttaactatgagttggaatttgctgcttttgatatgataagaaagttcaaagtttctcttccttgc

SEQ ID NO: 120749 - DNA, 357 bp, Homo sapiens
atgtgttatgagcattccaagcagagggaacagcatgtgcagcagtacagaagcctgaaagaatatggctacgtcttggtttcaacagtgctggaaacagggatgcaggaaaatctagaagaaatggataaattcctggacacatacaccctcccaagactaaaccaggaagaagttgaatcccagagtacaccaataacaggctctgaaattgaggcaataattaatagcctaccaaccaaaaaaagtccaggaccagacaaattcacagctgaattctaccagagaattcagactcaacactgcaacttcaactctaacctcaacgtccaggccgccagtctgccccagttctga

SEQ ID NO: 120750 - DNA, 683 bp, Homo sapiens
cgccgcagctcctcaacgccgcaacgcgccggcccaactgcaggaaggtctgtctctggagccagggtaaatggttataaaattatacaccatggccctcctaaagacactctaggaaaaccatgtcatcctgatcttaaaacacctgcaagaaagagcacagtacttcaccattaataaagtagatatttcatcctgctcagaaaaccaacatttccagcaatggctttactaccggtgttgtttctggttactgtgctgcttccatctttacctgcagaaggaaaggatcccgcttttactgctttgttaaccacccagttgcaagtacaaagggagattgtaaataaacacaatgaactaaggaaagcagtctctccacctgccagtaacatgctaaagatggaatggagcagagaggtaacaacgaatgcccaaaggtgggcaaacaagtcactttacaacatagtgatccagaggaccgcaaaaccagtacaagatgtggtgagaatctctatatgtcaagtgaccctacttcctggtcttctgcaatccaaagctggtatgacgagatcctagattttgtctatggtgtaggaccaaagagtcccaatattgtcctgctggtaataatatgaatagaaagaataccccgtaccaacaaggaacaccttgtcccggtt

SEQ ID NO: 120751 - DNA, 1386 bp, Homo sapiens
cggtgagaggggcgcgcagcagcagctcctcaacgccgcaacgcgccggcccaactgcaggaaggtctgtgctctggagccagggtaaatggttataaaattatacaccatggccctcctaaagacactctaggaaaaccatgtcatcctgatcttaaaacacctgcaagaaagagcacagtacttcaccattaataaagtagatatttcatcctgctcagaaaaccaacatttccagcaatggctttactaccggtgttgtttctggttactgtgctgcttccatctttacctgcagaaggaaaggatcccgcttttactgctttgttaaccacccagttgcaagtgcaaagggagattgtaaataaacacaatgaactaaggaaagcagtctctccacctgccagtaacatgctaaagatggaatggagcagagaggtaacaacgaatgcccaaaggtgggcaaacaagtgcactttacaacatagtgatccagaggaccgcaaaaccagtacaagatgtggtgagaatctctatatgtcaagtgaccctacttcctggtcttctgcaatccaaagctggtatgacgagatcctagattttgtctatggtgtaggaccaaagagtcccaatgcagttgttggacattatactcagcttgtttggtactcgacttaccaggtaggctgtggaattgcctactgtcccaatcaagatagtctaaaatactactatgtttgccaatattgtcctgctggtaataatatgaatagaaagaataccccgtaccaacaaggaacaccttgtgccggttgccctgatgactgtgacaaaggactatgcaccaatagttgccagtatcaagatctcctaagtaactgtgattccttgaagaatacagctggctgtgaacatgagttactcaaggaaaagtgcaaggctacttgcctatgtgagaacaaaatttactgatttacctagtgagcattgtgcaagactgcatggataagggctgcatcatttaattgcgacataccagtggaaattgtatgtatgttagtgacaaatttgatttcaaagagcaatgcatcttctcccccagatcatcacagaaatcactttcaggcaatgatttacaaaagtagcatagtagatgatgacaactgtgaactctgacataaatttagtgctttataacgaactgaatcaggttgaggattttgaaaactgtataaccataggatttaggtcactaggactttggatcaaaatggtgcattacgtatttcctgaaacatgctaaagaagaagactgtaacatcattgccattcctactacctgagtttttacttgcataaacaataaattcaaagctttacatctgc

SEQ ID NO: 120752 - DNA, 567 bp, Homo sapiens
atggctttactaccggtgttgtttctggttactgtgctgcttccatctttacctgcagaaggaaagctgcttcagctccagtcatggctaaaaggggtcaatgtacagctccggctgtttcttcagcgggtgcaagccccaagtcctggcagtttacatgtggtattgggactgtgggagcacagaagtcaagaattgaagtttgggaacttctgcctacatttcacaggatgtatggaagtgcctggatatccagatagaaacttgctgcaggggaagagctgtcatggagaacctctgctagggcagtgcagaagggaaatgtggggtgcaagcccaaacacagagtcactactaaagcactgtgtagtggagctgagaagagggccaccatcctccagaccccagaatggaacaagcagcgacaatagccttcctccttgcagagcctctgtcactcagtttaaccccacaaatgacctcacaaacaactcatctcattattcttctctaatgagaagtacactgatgatgatgatcatcatcatcattttgatgtcagtctag

SEQ ID NO: 120753 - DNA, 427 bp, Homo sapiens
tggaccagcgtggtggaattccgcggagagaggggcgcgccgcagctcctcaacgccgcaacgcgccggcccaactgcaggaagggttataaaattatacaccatggccctcctaaagacactctaggaaaaccatgtcatcctgatcttaaaacacctgcaagaaagagcacagtacttcaccattatttccagcaatggctttactaccggtgttgtttctggttactgtgctgcttccatctttacctgcagaaggaaaggatcccgcttttactgctttgttaaccacccagttgcaagtgcaaagggagattgtaaataaacacaatgaactaaggaaagcagtctctccacctgccagtaacatgctaaagatggaatggagcagagaggtaacaacgaatgcccaaaggtgggcaaacaa

SEQ ID NO: 120754 - DNA, 981 bp, Homo sapiens
atgtgcctggtgtttctgagcagtagcgaggaggccagtgtgctggaacagagtgagcaagggggaaagggcgggctctacgaggcggtgaatgaggtctacaagaacctcatccccatcctggaagcccaccgtgactacaagaagctggccgcggtgcacggcaaactgcaggaggccttcaccaagatcatgcaccagagttccggctgggagccccagcgcgtgttcgggacgtatttccgcgtgggcttctacggcgcccacttcggtgacctggatgagcaggagtttgtgtacaaggagccatcgatcacgaagctggcagagatctcacaccggctggaggcatgtccttgtgaagatctgggagagttggtgtatacatttattgaagcctttacttcatgccagttggagaaggtgcttcagcaaggggacatcagtgagtgctgtgagccttacatggtgttgaaagaagtggacacagccaagaacaaagagaagctagagaagctgcgcctggcggccgagcagttctgcacccgcctgggccgctaccgcatgcccttcgcctggacggccgtgcacttggccaacatcgtgagcagcgctgggcagctggaccgggactctgactcggagggcgagcgccggccagcctggacagaccgccgccgtcgggggccccaggaccgggcgagtagtggggacgacgcctgcagcttctctggcttccgtccagccacgctaactgtcacaaacttctttaagcaggaggctgagcgactcagtgacgaggacctcttcaagttcctggctgacatgaggcgcccgtcgtccctgctgcggcgactacgtcctgtgactgccactcaacaaacctacactgagagcacctactgtgccaggggcatcagagacccaacgatgaccatgatggacaaatccctgacctcaggggctggctacagcttctaa

SEQ ID NO: 120755 - DNA, 513 bp, Homo sapiens
atgtacaccatcatcaacgggcccagcaagttggtcgcgcagcgccgcacaggtctcacgcagcagcaggtgaagggccagctccaggagctcctgaaaagccggcagcccgcgccgccgaccttgcagccccagcgggcgcagcccttcgcgcagccgctgggaccctggcccctgtcgagtgcagggccaaggcttgtgttcaatcgtgtgaatcgccggcgggacccctccaagtccccatccctccaggggacccaggagacctacacactggcccacaaggagaatgtccgctttgtgtccgaagcctggcagcaggtgcggcagcagctggatggtggcccagccgtcctgctcactgtgcccagggaccagagaccagcccctggggatgtcggagaggagctccaggctaataaagtcgagaaactgccaaaaaaaaaaaaagaaaagaaaagaaaagaaagaaagaaagagaaagggaatgctgataatagatccgcattttga

SEQ ID NO: 120756 - DNA, 255 bp, Homo sapiens
tccgttaagtgcgagccccggcgcaggggccggatctggccgggggccggcggcggtgtgggagcggcgcgtcatgtacaccatcaccaaggggcccagcaagctggtcgcgcagcgccgcacaggtcccacgcagcagcaggtggagggccggctcggcgagctcctgaaatgccggcagcccgcgccgccgacctcgcagcccccgcgggcgcagccctttgcgcagccgccgggaccctggcccctgtcgag

SEQ ID NO: 120757 - DNA, 625 bp, Homo sapiens
  misc_feature (1)...(625): n = a,t,c or g
ggcgtcgagttcatagccgtgcggnggaattcccaggcttgtgttcaatcgtgtgaatggccggcgggccccctccacgtccccatcccttcgaggggacccaggagacctacacagtggcccacgaggagaatgtccgctttgtgtccgaagcctggcagcaggtgcaacagcagctggatggtggcccagccggtgagggcgggccaaggcctgtgcagtacgtggagaggacccccaatccccggctgcagaacttcgtgcccattgacttggacgagtggtgggcgcagcacttcctggctagaatcaccagctgttcctagcggctgctgggaggggggcgctgctacacggccgacctgtcgccaggagagaagcatggcgccctgcccatccactgttgcgcctggctgggtgccggccacacctgaagtgccagcatttggacttttgcacctttttttcccttggcccggctgtcccaaccaagctgccatggccaagggccgaacccgtctgacctcagccctgctcactgtgcccagggaccagcgaccagcccctggggctggcagggaggagctccaggctaataaagtggagaaactgtcaaaaaaaaaaa

SEQ ID NO: 120758 - DNA, 422 bp, Homo sapiens
cactgcacgcccggggctcgtgccagaccccgtcactctccatctcggttatcgttctggttctgcccgaggtccccgaaggctgccgcctcgttttgccccaggctttgggtgtcttcactgaacttggagggtcacgaagcttcgttctgcgtctctctctgtgggtgacccacatatcacttgtacccatgccacttctggtaccagcaccgaacacgaaggattcctaggaaatctgagcgcttatttcccaccccgcctccccaactatcatggaaaggaacatgggactactgaatctgtttgctgtgttgtaacgacagtgaaggccgcgactttcttgtacttagggtgctgaagtaatgatctgagggatttgctcgtcatttgctgtggcagagatgatgttgacaccctgg

SEQ ID NO: 120759 - DNA, 1172 bp, Homo sapiens
gatacccagggggtcagtgggctggcggcttcctgctgctccctgtcagagtcaaagcacagatcctcagggtgggctcaggggccgaggcagcccagggaagctccgggtggggaccgtgtcttcctggggttggtgccctctggccgggaccctttgctggcccatggtccccggtttccaaatttttatgttttttttctacccgggagaaaaatgaaagatactattgtgtccttttcaatgatgaacaccattcatatgaccacgtcatatacagcctacaaagagctcttgactgtgagctcgcagaggcccagttgcataccactgccattgacaaagagatgtttgacacagtgaagcgattaagagaaaaatcttgtttaattgtagcaaccacatcaggatcggaatctattaagaatgatgagattactcatgataaagaaaaagcagaacgaaaaagaaaagctgaagctgctaggctacatcgccagaagatcatggctcagatgtctgccttacagaaaaacttcattgaaactcataaactcatgtatgacaatacatcagaaatgcctgggaaagaagattccattatggaggaagagagaagtggcatgggtacaagtgatatgtgggtcacccacagagagagacgcagaacgaagcttcgtgaccctccaagttcagtgaagacacccaaagcctggggcaaaacgaggcggcagccttcggggaaatcgggcagaaccagaacgatctccgagatggagagtgacggggtctggcacgagccccgggcttgcagcgaactgaaagtccccggtacccctcccctcctcagcaggctcggtcactcggcgaggggtgcggccggaggagggggtcgagactgggggagggcggcgccctggggggtcggggggtgtgtcctacctgggccgtggcggacgcaggggtttctggaggagggctctggtccagctcaggaccgggaccggcgggggttaaccctcggcaggcgggaccgccactgcctgcccatcccccaccgccgactgcggcgggacccgagcgcggcttccagggccggccggctgggtagtcccctggggtaccgtccgcgtttactggcggggggaggccaacacaggccgatcacctga

SEQ ID NO: 120760 - DNA, 742 bp, Homo sapiens
cgtggtgggaatagagaccgtgcgggacctgctccaggagtatggggcacccatcgtggaccccattaacgacatccgcatcattggcgtggtctcggtcactgtgctgctggccatctccctggctggcatggagtgggagtccaaggcccaggtgctgttcttccttgtcatcatggtctcctttgccaactatttagtggggacgctgatccccccatctgaggacaaggcctccaaaggcttcttcagctaccgggcggacatttttgtccagaacttggtgcctgactggcggggtccagatggcaccttcttcggaatgttctccatcttcttcccctcggccacaggcatcctggcaggggccaacatatctggtgacctcaaaggcaggcttcttggcttggcattcaaggctccagcctgcctgtctagcctcatccctgaccagtgccacccttcccatgagcctgctgcagccctgaggctctactgctttgcccgtgttacctcgtccctcctccacgcctttgcctgtgctgcgctctctacctgcaactccgcacagtatccttctaagcaaaaaggtgttttctatgcggaggcccagccactgaccaccagtaccctggccaggggcaccttcggtcattgccctccgtggcccaagaaaggggacagaaccacagcccaagaagccaatagccgcggggaagtcctcacatttctggagaaatag

SEQ ID NO: 120761 - DNA, 461 bp, Homo sapiens
  misc_feature (1)...(461): n = a,t,c or g
natagatnnccctggagagcgctgcacgagccgctttgaaaggaaagggtagtgtccaaacagcattttccagacaagctctgtacttttttgccaaaagaattaactttaaactgaaggcaggggacagttaaacaagagtcggcactgggaacagctgtgcgtagaccagaccagtgacttataaggaggcgatcgagatcggatgacagcaaatcatgaaagctacctcctcatggcaagcacccagaatgatatggaagactgggtgaagtcaatccgccgagtcatatggggacctttcggaggagcaacacagatgtacacacggtggcatcacttcttaagctgtacctccgagaacttccagaaccagttattccttatgcgaagtatgaagattttttgtcatgtgccaaactgctcagcaaggaagaggaagcatgtgttaatgaattagc

SEQ ID NO: 120762 - DNA, 417 bp, Homo sapiens; identical to SEQ ID NO: 117209

SEQ ID NO: 120763 - DNA, 1597 bp, Homo sapiens
aacctttcatcttcaagaatctgatgactgagttttgtaggaatgtacccaacagttggaccagagcctggccagttcccaccaattggagtaagctatttaattgagggttaagaagctcgatagttttttcaatctgttatcagaaaaatattatctaaagacactgatagcagctgactggtaaaactgaaagttggccttagtaaatggaactagtaaaaaatagataaaaatatgtaaaaccttttatgtcctgtcaaggaaaaaaaaataagcaaacttgatttgttttaaaattgtaaatattcattgcaaaacctaaattatacaaaatctatttcgatttgaatctcttaacatatgaaaagccacatcttaagtgcattatgctctgtaaggcatgttattagccagctttgctgaaaaatgtattcttctacagctcagaaagaggagtaaaattgctctagaaatttttgatctcagccactttgcatctaaagaggaacccaactccccactcacaatcccccacacacattttaattataagagttcaacattttccacagatatcattaagccaagcaaggaaactcctctctgtaaaaacaacaaaaaagttgcaatgtaaatagttattttagctattttctttgtgattagaggataagattttgttatttcttttggtacttagtcctttaactatctgaaaatggctcactttgacctgtttctttggtcagccaaactgaagtgaggggcctctgtttatatatagaatcttgtatatgtaactttacttatgtgggaccaatggccagtatattctaatggacacaaatctcccaatccttatgtaggattatctgttcaccttgccatgtccatcttgcaatgagacctaacttgcacctgcctgtttttctgcatgattggactccaaagactattaccaatgatgagaattgtcttgtgtcagtgtttataaaatggacttaaagcacacacacatgcatacccacattcacatgcacccttacagttctagatcaaccctggaaggcaaaaccatgtacgtccagtttctttgcaaggtctgagcagtgagaactaaattcagtcagtctaatgggtaaaatgcaacctcagtgatgcttaataaggatttgaaatcgttcaagtcatttctgtgttctttctcacaccctttcctttctattttgtcttcttttattttcaaaatgtctgtggaacaagaggatgaatcgggggagaacttctgcttcttttgactctttttaggtaatatggagtcaatatattatgatttctgtttcttatggattattaaaatcagaggaaatctgcttctctcaacataaaaccaaatccaaacccagacattgttggagtttgcctgttgacaatggttatgatgctgctcgttgtcttgagttgcatgtaacgacagtagctctgaagggtgtcatgatttcattttggcaactggtaaaagaaacttgtagtgtggtctgattgtgccagggaataaataagaaataaggaatgaaaaaaaaaaaaaaaaaaa

SEQ ID NO: 120764 - DNA, 1173 bp, Homo sapiens
aagagtttatatccccttctacaagaaaacttaaaatatagctaccaccgcttttgaaaggaatggtttgtgtccaaacagcattttccagacaagctctgtactttttttgccaaaagaattaactttaaactgaaggcagtggacagttaaacaagagtcggcactgggaacagctgtgcgtagaccagaccagtgacttataaggaggcgatcgagatcggatgacagcaaatcatgagagctacctcctcatggcaagcacccagaatgatatggaagactgggtgaagtcaatccgccgagtcatatggggacctttccggaggaggcatttttggacagaaactggaggatactgttcgttatgagaagagatatgggaaccgtctggctccgatgttggtggagcagtgcgtggactttatccgacaaagggggctgaaagaagagggtctctttcgactgccaggccaggctaatcttgttaagggagctccaggatgcctttgactgtggggagaagccatcatttgacagcaacacagatgtacacacggtggcatcacttcttaagctgtacctccgagaacttccagaaccagttattccttatgcgaagtatgaagattttttgtcatgtgccaaactgctcagcaaggaagaggaagcaggtgttaaggaattagcaaagcaggtgaagagtttgccagtggtaaattacaacctcctcaagtatatttgcagattcttggatgaagtacagtcctactcgggagttaacaaaatgagtgtgcagaacttggcaacggtctttggtcctaatatcctgcgccccaaagtggaagatcctttgactatcatggagggcactgtggtggtccagcagttgatgtcagtgatgattagcaaacatgattgcctctttcccaaagatgcagaactacaaagcaagccccaagatggagtgagcaacaacaatgaaattcagaagaaagccaccatggggcagttacagaacaaggagaacaataacaccaaggacagccctagtaggcagtgctcctgggacaagtctgagtcaccccagagaaacagcatgaacaatggatcccccacagctctatcaggcagcaaaaccaacagcccaaagaacagtggtcacaagctata

SEQ ID NO: 120765 - DNA, 883 bp, Homo sapiens
aggagctacccgctgtgggtctattgtgaactgttctattgctcaacaaagctcctcttcattttgcttgccctccacttgtctgagttcttggtcgcaggacaagaacttggagcctgctgaatggcagagctaaaagagctacaacacagggctgaaacatgccccttagctctccacgttgcaggcaaagaggagaaaagaaccgtggtccctcagggagctcagacttgggagttccccaggccagggctgtgactccctctttggggtcctgtggtacctgacgttttcaagcttctgggcaccactgcgttccccggtgccagccagtgaagctgcttgcagtgcacctggtctagccgcagcctggctgagagccagtgcctgtgccggcacctggagctgcaggtcccgttgcagcagccacaacacagatgtacacacggtggcatcacttcttaagctgtacctccgagaacttccagaaccagttattccttatgcgaagtatgaagattttttgtcatgtgccaaactgctcagcaaggaagaggaagcaggtgttaaggaattagcaaagcaggtgaagagtttgccagtggtaaattacaacctcctcaagtatatttgcagattcttggatgaagtacagtcctactcgggagttaacaaaatgagtgtgcagaacttggcaacggtctttggtcctaatatcctgcgccccaaagtggaagatcctttgactatcatggaggacattttgaaaataaaagaagacaaaatagaaaggaaagggtgtgagaaagaacacagaaatgacttgaacgatttcaaatccttattaagcatcactgaggttgcattttacccattagactga

SEQ ID NO: 120766 - DNA, 2073 bp, Homo sapiens
tcatttgcgttcccaagtctgtgccgagcttcctgtgggcaggaaggggccctcactgccttctcccttgtgggtcttcgagcccatgaagtgggggcttggccagggcatgaggtgtctttcaaggtcgagctggtgtggcccgggcaccttctcatttgtcattccacaattccccttgtgtgtggtccttgtccacgtgctgcagggcagggtcccaggatggtccttgtccacatgctgcagggcagggtcccgggaagcagaccagctctggcactggtgcaagctcatcaccttggaccagctgcctttaaaaatcattgccaaagcgtttgctcctaaggattggaaacgaccatcggcaggggacgggttaaaccgattaaggtgactgacaccgcgcagtgatgcgcagccagtgtaacggccccactcctgtcctcttgactgcaagacggtggctccaccgccaaggtcacgaggtgtaccaggctggagggagagcagtgtacggtacagccgagggaaaggcttttccagaagcccctgaactgacctgcaggtctcactggcagcgctgggcacatggcccctgccgccactccaggtgagctgtggattgaggaaccctagtcctgatctcccatcggtggtaggaagccgggcatctgtatagaccaagagcggcagcagcccagctaaagtgtggcctttggcagaatggttcaagtctggctctgccctctgtgactggacaagaagcttggcttctttgggcatctgactcctcctcagagctgtctctgtgcccacgaaaacatgccgctcctccacacagtgctgagcacaggcaaatctctcagggcttggcgtcttcttgctggggggcgggaggggacaaggtagtgtctgcttcgatggtggggtcggcacctgggcagtgtccaatgtctgctttgatgacggggtcagcatctgggcaatgtccaggacacccttgctggtctggcacgaatgctgattcatgaggccgtgatcctcacagggcctccaggcttctggccttgcccacggcctcctacgagcaataaccacaaccccactggggctcatggacagcgcacggccagaatgggcttggtatttttttccagcgagtgtcttggtttgtgtgaggacagacgatggtgtcacgcccacgcatttctggcctcggccagcctgtctgtctgtcagcagcgtcaccgcaggcggctcctcttgggtcccatgatccaactccagcaggcagatgaggcctggagccaggcgggcggcagcccagctccagctaaatatacgtgtgggaggctcctcccggcctgtgggtccctcctggcccttttctttcccactaaagctggaggttcgggagaacaaaggcagctcccctgaaagagccaaggccaggcgggaggtgccctggagaccggccgagcccgagagccgaggcagggctgcctcagaccagaaagccggccctgccagccatcggccgtcgaagaaggcgtgcagcttacgcagacctcgggtgattttggagcaaagctcccagcacttagcagcagcgctgtcttcctggatgcagccagccctgctggaaacgggtgggaaggctgtcttcttcactcccgggggcctctgaaggtgggcgtgagtcaggggctcctgggagaaatcgaccgcccttgccggcctccacgggccctggaaagcctgagagcctggcgctcctgccacatccccattgccatggcaacggcagacacaatggtttctgtggagttcggatctataaataatttctagattagtcttggcgaggtggatggggtgggcactgaggggaggttcctggtggccggcggaacgggccactgtccacaggccatgccagggccccacttctggaaaggctccccgctcaagctctgcagagcggttctcgcgacacttcccgtgctggatccgtgccgccagcatggattccttcagcctggctccggcctggggtgggctctgagccgccat

SEQ ID NO: 120767 - DNA, 739 bp, Homo sapiens
aaggtgtctaagcgctcgcggaaggaggaggaagacctggaatcgctcatagcccatttccagacactcgatgccaagaggacggagactgtggaacttccgtgccccccaccctcaccaaggttaaatgcctccctctcggttcatcctgagaaagatgagttaatcctttttggaggtgaatatttcaacggccaaaaaacttttttgtataacgagctctatgtctacaatatcagaaaggacacctggaccaaagttgacatccccagtccacctccgaggcgctgtgctcaccaggcggtggtagtgcctcaaggtggcggacagctgtgggtctttggaggggagtttgcctctcccaacggagagcagttctaccactacaaggatctctgggtcctgcatttggccaccaagacctgggaacaagtcaaatcaacaggcggtccttcgggtcggagtggacatcggatggtggcctggaagagacaattgatcctgtttggtggcttccatgaaagtacacgggattacatctactacaacgacgtgtatgcctttaatctggacaccttcacatggagcaagctgtccccgtcagggacggtgcccacacccagatcaggctgccagatgtccgtcactccccagggcggcatcgtccgtctatgggggctactcgaaacagagagttaagaaagacgtggacaagggcacacggcactcagacatgttc

SEQ ID NO: 120768 - DNA, 1506 bp, Homo sapiens
  misc_feature (1)...(1506): n = a,t,c or g
atgattgtatatctagaaaaccccatcatctcagccccaaatctccttaagctgataagcaacttcagcaaagtctcaggatacaaaatcaatgtacaaaaatcacaagcattcttatacaccaacaacagacaaacagagagcaaaatcatgagtgaactcccattcacaattgtttcaaagagagcaaaatacctaggaatccaacttacaagggatgtgaaggacctcttcaaggagaactacaaaccactgctcaatgaaataaaagaggatacaaacaaatggaagaacattccatgctcatgggtaggaagaatcaatatcgtgaaaatggccatactgcccaaggtaatttacagattcaatgccatccccatcaagctaccaatgacttcctgcacagaattggaaaaaactactttaaagttcatatggaagcaaaaaagagcccgcatcgccaancattcgtgccagaccagcaagggtgtcctggacactgcccagatgctgaccccgtcatcaaagcagacactggacactgcccaggtgccgaccccaccatcgaagcagacactaccttgtcccctcccgccccccagcaagaagacgccaagccctgagagatttgcctgtgctcagcactgtgtggaggagcggcatgttttcgtgggcacagagacagctctggcggtggtagtgcctcaaggtggcggacagctgtgggtctttggaggggagtttgcctctcccaacggagagcagttctaccactacaaggatctctgggtcctgcatttggccaccaagacctgggaacaagtcaagccgggaatgttaaccagtcaaatgaagagtctgctgtgggtggggagggtgcagacagattccctgccctgggcccacctgctggaggaggacatgaccatagccttacagtgggacccggaaggtgctgtgaaggaagaaaagaaaagaaaaggaaaaggaagaaagagagaagaagaagaaaaagaagaacaagaagaagggaagaaaaaagaaccaagaccacaaagaagagaaaagaagaagaagaagaagcgagaaagagagaaaaagagacagagagagaaagagagtgagagaaagattaagcgcacaccctccattccctggacctccaaatccgtactcacaacaggctgtgtctccttatcagacgcacactccacacgaccttccaggaccaagggtgacctgcggaaccacacactggctgccaaggcaaacgtctcaaagcaatgctccgcgaggaccagtcgtctggccgtcttctcccacaaacgctccccggcctttatgctgacactaccactgcaccgccggccccattctgtgacctggcctgagctggtgacggggtccttggggcggccctgtgtgtcttctcctctcctgatgattgaaatgggtcggcgtctgagccgacagccgggctgtgctcctgatgaagcagcatcgtag

SEQ ID NO: 120769 - DNA, 2610 bp, Homo sapiens
atggtgaggaggcgggactttatcttaaacgtgaagggaagccacctgaagcaacaagacggtgacccaggcctccccgatccccggggcacctccggagaacatcacaacgtggaggtggagacggagcccttcctgacctacgtggagggggtgtgcgtggtctggttcaccttcgagttcctcatgcgcatcaccttctgcccagacaaggtggagtttcttaaaagcagcctcaacatcatcgactgtgtggccatcctgcccttctatctcgaggtgggcctctcgggcctcagctccaaggccgccaaagacgtgctgggcttcctgcgggtggtccgcttcgtccgcatcctgcgcatcttcaagctgacccggcacttcgtggggctgcgcgtgctgggacacacgctccgcgccagcaccaacgagttcctgctgctcatcatcttcctggccctgggggtgctcatcttcgccaccatgatttactacgctgagccgcattggcgccgacccgatgacatcctgggctccaaccacacctacttcaagaacatccccattggcttctggtgggctgtggtcaccatgacgaccctgggctatggagacatgtaccccaagacgtggtcggggatgctggtcggggcgctgtgtgccctggcgggggtgctgaccatcgccatgcctgtgcccgtcattgtcaacaactttggcatgtactattcgctggccatggccaagcagaagctgcccaagaagaagaacaaacacatcccccggcccccgcaaccgggctcgcccaactactgcaagcctgacccacccccgccacccccgccccacccgcaccacggcagcgggggcatcagcccgccgccacccatcaccccaccctccatgggggtgactgtggccggggcctacccagcggggccccacacgcaccccgggctgattagggggggagcggccacgcccccgctacctcgctactgctccgacccaatcccgacggtctttccccccggggaacaaaccatgctttctgggggtgtggtcgtcgccaccaaaaatgcggagcttattgggagaatggtactgcgggggccatgggcgcaggatgagagaaacgttgctactcgctggctgctccgtgaccccaccatgtcctctcctaccacgagttccctggatacccccctgcctgcccttatcacacacgagcagaagctcactgtacctctcccggattccaccctcttccaggaaatggcccccctcagcctaggcgccccttcttcttcacccactgtaaaggaggagggtccggagccgtggcccgggggtccggaccctgatgtcccaggcactgatgaggccagctcagcctgcagcacagactgggtcatcccagatcccgaagaggaaccagagcgcaagcgaaagaagggcccagccccgaagatgctgggccacgagctttgccgtgtctgtggggacaaggcctccggcttccactacaacgtgctcagctgcgaaggctgcaagggcttcttccggcgcagtgtggtccgtggtggggccaggcgctatgcctgccggggtggcggaacctgccagatggacgctttcatgcggcgcaagtgccagcagtgccggctgcgcaagtgcaaggaggcagggatgagggagcagtgcgtcctttctgaagaacagatccggaagaagaagattcggaaacagcagcaggagtcacagtcacagtcgcagtcacctgtggggccgcagggcagcagcagctcagcctctgggcctggggcttcccctggtggatctgaggcaggcagccagtgctccggggaaggcgagggccgttgtggctccccggtttggcaaatgggccccaaggccgggttggggagagtccccggtggggttgccgggggccccaattgggccagcctgggtcctgccttttacgtccctgccacatcgtcgtcttcccacgtagagtcactgaccacagagctgtcagctgagcgcagtttctcagccaaagcagagagcgggcggcagcagctggaacggcagatccaggagctacggggacgcctgggtgaggaggatgctggggcccgtgcccgccacaagacccggaaaaaagcaccttcatacgaactaaaaatcagtgggaccaagtttcccattcagtatggaactgggcgggtagatgaaatcctgagtgaggacaagctgactattggtggaatcaagggtgcatccgtgattttcggggaagctctgtgggaatccagcctggtcttcactgtttcccgccccgatgggatattgggcctcggttttcccattctgtctgtggaaggagttcggcccccgctggatgtactggtggagcaggggttgggctctgggcttgacttcactgatgtgcagagctgggaagtagtgggtggagagtttcggggccacagaaaggacccctggacgttagggggatttaagaagcccaaagcctttcctaaagcccatgcctttgttcccctgctcttttcgagcgtggcatcacgaagcttgctttga

SEQ ID NO: 120770 - DNA, 921 bp, Homo sapiens
atgccttatctcatttcgtccacacgaaatttggctgatgtggatgcggaggcagagcagggacagtctactcgtgtgaggtcacgcagcaagcacctcttcccagtgctgatggaatcttggtgcctctcgccctcagctgcacagaagctctgccgcctcttgggactgggggtgacggatttctcccgagccttgctcacccctcgcatcaaagttggccgagactatgtgcagaaagcccagactaaggaacaggctgacttcgcgctggaggccctggccaaggccacctacgagcgcctcttccgctggctgctcacgtgtcctgcgtccctgcagctgaactccttcgagcagctctgcatcaactacaccaacgagaagctgcagcagctcttcaaccacaccatgttcgtgctggagcaggaggagtaccagcgtgagggcatcccctggaccttcctcgactttggcctcgacctgcagccctgcatcgacctcatcgagcggccgcctgcattccattcgggcggacagatgtccctgaaggcccgagggacaccagccgctatgccaggctccaaagaacccgaggcaaaccaacgctggtcccggtctttgaggactccccggcccagtgagggagaccgacaggtcgactacaaggccaacgagtggctgatgaaaaacatggaccctctgaatgacaacgtcgcagccttgctccaccagagcacagaccggctgacggcagagatctggaaagacgccgacctcctcctcgagccctgctcccactaccggttcctgaccaacgggccgtcatcctctcccggccaggagcgggaactcttccaggagacgctggagtcgctgcgggtcctgggattcagccacgaggaaatcatctgtgagtga

SEQ ID NO: 120771 - DNA, 552 bp, Homo sapiens
atgaaggacaaagcaggtcacagcctgcacagccccgtggtccatggtgaggactttggttttactctgggccacgtattacgcgagtatgttcttgttgcgctggttgtcgccgcttctacacgtcgtccgctcggatctgtgttgcgctgtcgttaccggttcgtgctgcatccatgcgtgcggatggtctcagcagttctccagtttggcaacattgccttgaagagagaacggaacaccgatcaagccaccatgcctgacaacacagctgcacagaagctctgccgcctcttgggactgggggtgacggatttctcccgagccttgctcacccctcgcatcaaagttggccgagactatgtgcagaaagcccagactaaggaacaggtagagtcactgaccacagagctgtcagctgagcgcagtttctcagccaaggcagagagcgggcggccgagctggaacggcagatccaggagctacggggacgcctgggtgaggaggatgctggggcccgtgccgccacaagatgaccattgctgcccttga

SEQ ID NO: 120772 - DNA, 690 bp, Homo sapiens
atgcagaggggaaatgtggggttggagcccccacaaagagtcctcactggggcactgcctagtggaaccgtgagaagagggccaccgtcctccagaccccagaatggtagaccgaccaatggcttgcaccgggcacctagaaaagccacagacactcaatgccagcttgtgaaagcagcaactggggctttcccctgcagtgctataggggtagagctgccccaggccttgggagcccaccccttccatcaatgtgacatggatgtgagacatgctgaaggaatagaaaaatcatattcacaatccatcttattagacttgactgacaataggctacagagtaccctgaaaactttgagtttctcatttcctcctaatacagtgactggcagtgaaagagttcagatcactgcaattggagatgttcttggtccttccatcaatggcttagcctcattgattcggatgccttatggctgtggtgaacagaacatgataaattttgctccaaatatttacattttggattatctgactaaaaagaaacaactgacagataatttgaaagaaaaagctctttcatttatgaggcaagaacactatgggataattctgatttgcagtgttctctggtttttagaagcaatgggatatgatggaaaggaccaggaatcgggacgggatgcttga

SEQ ID NO: 120773 - DNA, 261 bp, Homo sapiens
atgaaccgcagccgccaggtgacgtgcgtggcctgggtccgctgcggcgtggccaaagagacaccagacaaggtcagctccggcatccagcagcatctgaaccatcgcctcgtccccacggacgcaggcatacatcaggggagtcatgccctgtgctgctggtcagcatcaaggaaattgaatgcttctgagcatgtggcgttgcccatcattgacatctggtttgacatggtcatttgcaagcaaaaggcaagcaaatga

SEQ ID NO: 120774 - DNA, 1881 bp, Homo sapiens
gccctggcagcggccctgtgcagatccctgagcgtgtggcagcagtgcggtcgtggtccctccctatgcagcctgggtttctagcgtgacacggccttgacttgaggaccatgaaccgcagccgccaggtgacgtgcgtggcctgggtccgctgcggcgtggccaaagagacaccagacaaggtagagctgagtaaaggaggagtaaaacgcctcattgctgaggcagaggagaaattgcaagaagaaggtggtggcagtgatgaagagaagacaggcagtcctttagaagaagggattgcaaagtgcacgcacccaggcacgccccaagagagcccctcgagggatggtgacccagaggattgacaggacgcttgatgatgatgagctggctgagtacgacttagataaatatgatgaggaaggtgacccagatgctgagactcttggttgaatctctcttgggtcttacggtctacgggagtaatgatcaagatccttacgttactctgaaagatacagaacaatatgaacgtgaagatttcttgattaagcccagtgataatcttatagtttgtggccgagctgaacaggaccagtgcaatttagaggtgcatgtttataatcaagaagaagactctttttatgtacaccatgatatactcttgtctgcatatcctctgagtgtggaatggctgaattttgatcctagcccagatgattctactggaaattacattgctgtaggaaacatgacccctgttattgaagtgtgggaccttgatatagtggactctttagagccagtcttcacactcggaagtaaactttcaaaaaagaagaaaaagaaaggaaagaagagttcctcagcagaagggcataccgatgctgtccttgacctttcatggaataagctaatcagaaatgttttagcaagtgcatcagctgacaacactgtaattctgtgggatatgtccttggggaaaccagcagctagcctcgctgtacacacagacaaggtccaaacactgcagtttcatccatttgaagcacagactctgatttctggctcatatgataagtcagtggctttgtatgactgccgaagtccagatgaaagccatcgaatgtggcgattcagtgggcagatagagagagtgacttggaatcacttttcaccttgtcatttcttggccagtacagatgacggctttgtatataatttggatgcacgttcagataagccaatttttacacttaatgcacacaatgatgaaatctctggtcttgatcttagcagtcaaatcaagggctgtctcgtgactgcttcagctgacaaatacgtgaagatctgggacatcttaggagataggccaagtctagttcattctagggacatgaaaatgggagttctcttctgttcttcatgttgccctgatttgccatttatttatgcctttggaggtcaaaaagaagggcttcgggtctgggatataagcacagtctcttcagtaaatgaagcatttggaagacgagagaggcttgttcttgggagtgcaagaaattcatctattagtggcccttttggcagcaggagctcagatacacccatggagtcttaatgaagatcatctaatttcctgcttaccttaactgggaattttaaaaagttggcctaaaaatgttccatgcgtggcagcaaccatgcagagtgactgaaacacaattcatttctgactgacattcctttctgcaactgcggtggcaccacaaatatccggtctttgtgcttgctcttcagatggatggtttgtaaggctcttgttgcatttcttaaaaaagagtaataaaaaggatttttaaaaagtaattccttaaacat

SEQ ID NO: 120775 - DNA, 552 bp, Homo sapiens
atgtcttttgcagcaacttggatggagccagagaccattatcctaagtgaagtaactcaggaatggaaaatcaactatcgatatgggcaggcatacaggcagctgtgtccagagctgatagcaaaattgttctgtagatcagccatcgagatgcatttggcaagcacatcatctctgcaacaggttcagctaccaagcctaggaatccaaccaagttcattcccaagctcaggccagtcagttggcaacttaagagattccagtatgccaaaagagcctgcaggagactttccatttgaggattacagtccacttatatttagaaccatttctgatgggactatcagtggcttcaaaccggagagtgggaagatggatgccaaaaccacagtaggaagggccaagggcaaattgtggctctttggaaagaagccaaaggaggctccagacaatgcccagtgtctggccaaggtgatgagaaggagagaagaaaggagagctgcgaccatttgggcaacccagaccttgaagctccccaagccagggctgtga

SEQ ID NO: 120776 - DNA, 1319 bp, Homo sapiens
gccaaacagcagttgaatctgcgtacgcatatggccgatgaaaataaaaatgaatatgctgcacaattacaaaactttaatggagaacaacataaacatttttatgtagtgattcctcagatttacaagcaactacaagaaatggacgaacgaaggactattaaactcagtgagtgttacagaggatttgctgactcagaacgcaaagttattcccatcatttcaaaatgtttggaaggaatgattcttgcagcaaaatcagttgatgaaagaagagactctcaaatggtggtagactccttcaaatctggttttgaacctccaggagactttccatttgaagattacagtcaacatatatatagaaccatttctgatgggactatcagtgcatccaaacaggagagtgggaagatggatgccaaaaccacagtaggaaaggccaagggcaaattgtggctctttggaaagaagccaaagccacagtccccacccttaacccctactagtttattcacatccagtactcctaatgggtcccagtttctcacattctccattgagcccgtgcattattgtatgaatgaaataaaaacagggaagcccagaattccttctttcagaagcctcaaaagagggtggtcggtgaagatgggccagcactagaagatttcagtcatctgccaccagaacagagacgtaaaaaactacagcagcgcattgatgaacttaacagagaactacagaaagaatcagaccaaaaagatgcactcaacaaaatgaaagatgtatatgagaagaatccacaaatgggggatccagggagtttgcagcctaaattagcagagaccatgaataacattgaccgcctacgaatggaaatccataagaatgaggcttggctctctgaagtcgaaggcaaaacaggtgggagaggagacagaagacatagcagtgacataaatcatcttgtaacacagggacgagaaagtcctgagggaagttacactgatgatgcaaaccaggaagtccgtgggccaccccagcagcatggtcaccacaatgagtttgatgatgaatttgaggatgatgatcccttgcctgctattggacactgcaaagctatctacccttttgatggacataatgaaggtactctagcaatgaaagaaggtgaagttctctacattatagaggaggacaaaggtgacggatggacaagagctcggagacagaacggtgaagaaggctacgttcccacgtcatacatagatgtaactctagagaaaaacagtaaaggtgcagtaacttatatctaa

SEQ ID NO: 120777 - DNA, 744 bp, Homo sapiens
atggagctggcctgggcttccagctgccttttcagaaagcaagtaggaattatagagatgcctaaagttagagcagaaggtgggaggggcaagaaggtggagggaggccagcggacacaacccgaggacccaggcggcctgcgcatccgcgccaagactgggggtggccgatgcaaatgtgaggccggagtaacacagccagagtgtgagacctatgagaagtgctgccccaacgtatgtgggaccaagagctgcgtggcggcccgctacatggacgtgaaagggaagaagggcccaggctctgagtgtgacatctgggatggccagcccgtgtgtaagtgcaaagaccgctgtgagaaggagcccagctttacctgcgcctcggacggcctcacctactataaccgctgctacatggatgccgaggcctgctccaaaggcatcacactggccgttgttacgctagccatcacttcacctggcccaacaccagccccccaccacctgagaccaccatgcaccccaccacagcctccccagagacccctgagctggacatggcggcccctgcgctgctcaacaaccctgtgcaccagtcggtcaccatggatcacctgggagaagcagttggaggatcgggagaatgtggtcatgcggcccaaccatgtgcgtggcaacgtggtggtcaccaacattgcccagctggtcatctataacgcccagctgcaggatgctgggatctaa

SEQ ID NO: 120778 - DNA, 1291 bp, Homo sapiens
atgccattttatatcagcgacttgagcatctgtggagatcggattctaagggccctatgcccccaggaccttccaacatatagcttgcatagtcgtggaaaaatgcgtgcttcttgttctcgtaaattcctggataataattcatctaggctggtatcctgtaacatgggtgctttgatttccatttgggggaccaccactcccccattgcatgcaacaatattggacagtcaaccaactgtccaccctcctctggccaaagactgcctgccctgtggactgcaagcttcagcatcagacctgagggcaagagccttacagagactgtgtcagcagctcccatgggtagggtcccagccacataccaggagcccgtccccacagaggggtgggaagacgggcctcttcgccggcctggcctcctctgtgtccatgcggcccgcatccccgccctctcctgctgcggacagctgttcagcctgtcgtttcttcgcccgtcggccacccttgcgggtgacctgggtaaagccctcctctgccctggcgctctgcgtttccatttcggattccatccccggaaatcttaaagcgctgccggctgaaacacgtgcgcagctgcaccacgcagaagccagcctcagccaaccacccctgcagctccgcccctttcctaaaacgtcacaggccggggacctgcaggatttggggccgtatgtatgtgtgcgaaaggcagtgggtaaaggcgataaacaaattcgtgctgttgtgaaggaacattctgtgcgatcgcaggagcgcatctggcattatccggggataactacagccaacatgccagggcatctggggcagaatacggaaagcgggagggacaaattgccaatgtttggagtctggtttccaggttgccgtttttgggggctctgggtgtggcggttgccgtagctgaaattggctgcaccatgtcggccttcgagaagcctcagatcatcgcccatatccagaagggcttcaactacacggtgtttgactgtaagtgggtgccctgcagcgccaaatttgtgaccatgggcaacttcgcacggggcaccggcgtcattcagctgtacgagatccagcacggggacctgaagctgcttcgggaggtgggtgccgggtcgaggatccggactgccgttgggggcgagtgcggatcctggggtctgcattcctctttgccagagccttcgcccagcgtcccccaaagcatggcttgagccgcgcgagaccagagaagctgaccgccgactga

SEQ ID NO: 120779 - DNA, 576 bp, Homo sapiens
ctctgggtgtggcggttgccgtagctgaaattggttgcaccatgtcggccttcgagaagcctcagatcatcgcccatatccagaagggcttcaactacacggtgtttgactattgaaaaggccaaacctattaaatgtggaacatttggtgcaacatctttacagcagagatatttagctactggagattttggtggaaaccttcatatatggaatttagaagctccagagatgccagtatattctgtaaagggccataaagaaattataaatgccatagatggcataggtggactaggaattggagaaggagcacctgaaattgtgactggcagccgagatggaactgtgaaggtgtgggacccaaggcaaaaagatgatcctgttgctaatatggaacctgtacaaggagaaaacaagagagactgttggactgtggcatttgccatacctgtgattcttcgttccacactaaccagccaggctcagacctctcaatgcttctccaccaatgctgggtcccggagtacgctgttgtggttcaaagttcttaaactcagtattcacagtgtctaa

SEQ ID NO: 120780 - DNA, 486 bp, Homo sapiens; identical to SEQ ID NO: 119292

SEQ ID NO: 120781 - DNA, 999 bp, Homo sapiens
atggtgggaaaggccaaatggaagccaatagagctacctttacttagaaaaatagtaaatcaaaaacagtatcacatccctggaggggttgcaaagattagtgccaccatcaaggacttgaaggacgtgggggtggtaattcccaccacatccccgttcaactctcccatctggcctgtgcagaagacagatggatcctggagaaagtggattatcctagcaaggccagcaatttaccttactgtcctacctcacgggtatatcaactctctggctttgtgtcataatcttattcgaagagaccttgatcacttttcccttccacaagatatcacactggtccattacattgatgacattgtgctgactggatccagtgagcaagaagtagcaaatacactggacttattgacatctcttgactgggctttggtggaaactgaatgtttgactatgggtcatcaagtcaccatgcaacctgaactgactatcatgaactgggcgctttctgacccatctaactataaagtgggttgtgcacagcagcattccattatcaaatggaagtggtatatacgtgatcaggctcgagcaggcaccacctgcaagtggacagctgcagcactacagcccctttctaggacatccctgaaggacagcggtgaaaggaaatcttcccagtgggcagaacttcgagcagtgcacctgatcatgcactttgcatggaaggagaaatggccggatgtacaattatacactgattcatgggctgtagccaatggatcggctggatggtcagggacttggaagaatcatgattggaaaattgccaccactgtcatcgcccaatgggcccatgaacaaagcagccatggtagcaggaatggaggttacacatgggctcagcaacatggacttccactcaccaaggctgacgtggctacggccactgatgaatgcccaatttgccagcagcagagaccaacactgagcccttga

SEQ ID NO: 120782 - DNA, 1383 bp, Homo sapiens
atgcctagcgggtctatttggattttggagtccatgcattcctcatttgggtgtgttacttcagtccatttatctagtgacccaaaaggctgccattctgagtggggtccagaacaggagaaggctctgcaagaggtccaggctgctgtgcaagctgctctgatacttgagccatatgacccagcaggtccagtggtgcttgaggtgtcactggcagatagggatgctgtttggagcctttggcaggcccccataggtgaatcacagcaaaggcctctaggattttggagcaaggccctgccatcttctgcagccataaagcgtgtcatgcacagcagcattccatcatcaaatggaagtggtatatacatgatcgggctcgagcaggtccggaaggcacaaatagttctgcacgatatgcagccaccatgtgaaaatgggacagcttcagcactacagcctctttctaggaaatccttgaaggacagcagtgaagggaaatcttcccagtgggcagaacttcgagccgtgcacctggctgtgcacgttgcatggaaggagaaatggccagatgtgcgattagatactgattcatgggccgtagccaatggtttggccagatggtcagggacttggaaggagcatgataggaaaattggtgacaaagaagtctggggaagaggtacgcggatagaactctctgagtggtcaaaaactgtgacgatatttgtatcccattgcttctaccaagactaccatccatccgtgggctcacagaatgccttatacaccaacatggtattccacacagcattgcctctgaccaaggcactcactttacggctaaagaattgcaacagtgggctcatgctcacggaattcactggtcttaccatgttccccatcatccagggttggggcaaagttctccagaaggccgtgtatgctctgaatcagcgtccaatatatgaatggaaggaagaatcatgcttgcacacaggtgtggctgatgcgctcagaggcaactgggcagaaggccacagggagcacaaggccttgtggctgggcctctggagcacctggtctcagcacccgctcaggtccttgaagacgaccagacaccatccagggcttggtgtactctctgaagatatatgcgaggcagggggagctacagaagagctgtccagggcctctggttttgccacagggtatgggaagagaaaagaagacactaagaagcataagcagcactctgtgtcagatataatagaacagcaacactcattgggattaacagaaaaaacagtaaaaggaacacctacacaaggcatctctatgagacctggactttatcacaaggcaactgagtttcaagagtga

SEQ ID NO: 120783 - DNA, 2232 bp, Homo sapiens
atgaaactcctgaagatcaaggacaaggaaaggatcctacaaccagcaacagaaaataaacaaataacatacaataaagctccaatacatctggcagcagactcttcagtggaaaccttacaggcaaggctgagagctattgtggtgggaaaggaccaatggaagccattacagctgcctctagctagaaaaacagtaaatcaaaaacaatattgcatccctggagagactgcagagattaatgccaaaatcaaggacttgaaagatgcaggggtggtgattcccaccacatccccatttaactctcctatttggcctgtgcaggagacagatggatcttggagaatgacagtggattactgtaagcttaaccaagtggtgactccaattgcagctgctgtaccagatgtggtttcattgcctgaacgaagtaacacagctcctggtacctgctgggaagtccggcaatataccttcactgtcgtacctcaggggcatatcaactctctggttttgtgccatgatgttgttcgcagagatcttggtcactttttccttccacaagatatcaccctggtccattacattgatgacattatgctgattggatctacccctcctataaccaagaagaaggcacaacacctagtgggcctatttggattttggaggcaacttgttcctcatttgggtgtgttactctggcccatttatcaagtgacccaacaggctgccagttttgagtggggtccagaaaaggagaaggctctgcaacaggtccaggctgctgtgcaagctgctttgccacttgggccatatgacccagcagatccaatggtgcttgaggtgtcagtggcagatagggatgctgtttggagcctttggcaggaccccataggtgaatcacagtggaggtctttaggattttggagcaaggccctgccatcttctgcagataactactctccttttgagagacagctcttggcctgttactggggtttggtagaaactaaatgtttgactatgggtcatcaacctgcactgatggcctcgtggggagttccttatgataagttgacagaggaagagaagacaagggcctggtttacagatggctctgcatgtttcagaaaaagccctcaggcccagagatgcagacactggcagctggagggtacagtccccctctggctgctgtcatgggttggcattgagtgccttttccaggcacacagtgcaagcttttccaggcacacagtgcaagctttcagtggatctaccactctggagtctggaggacagtggcccttttctcaaagctccactaggcagtgccccagtggggactctgaatcaacccaaatgcccatcaatagactggataaagaaaatgtggtacatatatgccatggaatactatgcagccataaaaaggaacaagatgtcctttgcaggaagaagcatgacttggggcaagggggctctcttcttgtgaagcaggacatgaaagggctgccagccaaaggctggtatgacagtgctcccaggagctggggcaatgagtgcttctttgaaggggaatctgaacgacacatcttaggttcaccccaagaagtcagtgagaatagtcagagatggctggggacagtcccatccagggcatcacagtgggaagctccagacattcaaaaggctgcacttccattgattatttctttgaaggagattcataagactagagtgatggctttttctcgtttcccttgtgcttatattgatatccagagaataaaatacctagcaatccaacttacaagggatgtgaaggacctcttcaaggagaactacaaaccactgctcaaggaaataaaagaggatgcaaacaaatggaagaacattccatgctcatgggtaggaagaatcaatatcgtgaaaatggccatactgcccaaggtaatttacagattcaatgccatccccatcaagctaccaatgcctttcttcacagaattggaaaaaactactttaaagttcatacggaaccaaaaaagagcccgcatcgccaagtcaatccgaagccaaaagaacaaagctggaggcatcacactacctgacttcaaactatactacaaggctacagtaaccaaaacagcatggtactggtaccaaaacagagatatagatcaatggaacagaacagagccctcagaaataatgccgcatatctag

SEQ ID NO: 120784 - DNA, 789 bp, Homo sapiens
agagacctccagccttttaccagtgtgactgtgcattgcagaaagggaaatgaccagacatttgggggaccactggacgctggctctgagctgacattgattccaggggacccaaaacatcattgtggtcccccagttaaagtaggagcttatggaggccaagtaattaatggagttttagctcagccctcttatttggcttgtgcagaagacagatggatcttgagaatgacagtggactattgtaagcttaaccaagtggtgattccaattgcagctgctgtatcagatgtggtttcattgcttgagcaaattaacacatctcctggtacctggtatgcagccattgacttggcaaatgcctttttctccattcctgtccataaggcccagcagaagcaatttgccttcagctggcaaggccagcaatatacctttactgtcctacctcagtggtatatcaactctccagctttgtgtcataatcttattcggagagaccttgattgcttttcgcttccactagatatcacactggtccattacattgatgacattatgctgattggatccagtgagcaagaagtagcaaacacactggacttattcgtgagacatttgcgtgccagaggatgggaaataaatccaactaaaattcagggaccttctacctcagtaaaatttctagggttccagtggtgtggggcctgtcaagctattccttctaagatgagggataagttgctgcatttagtccctcctacaaccaagaaagaggcacaatgtcta

SEQ ID NO: 120785 - DNA, 553 bp, Homo sapiens
atgacagtggactattgtaagcttaaccaagtggtgattccaattgcagctgctgtatcagatgtggtttcattgcttgagcaaattaacacatctcctggtacctggtatgcagccattgacttggcaaatgcctttttctccattcctgtccataaggcccagcagaagcaatttgccttcagctggcaaggccagcaatatacctttactgtcctacctcagtggtatatcaactctccagctttgtgtcataatcttattcggagagaccttgattgcttttcgcttccactagatatcacactggtccattacattgatgacattatgctgattggatccaagacagctcttggcctgttactggctttggtggaaactgaacatttgactataagtcatcaagtcaccatgcgacctgaactgcctatcatgaactgggtgctttttgacccatctagccataaagtgggttgtgcacagcagcattccatcatcaaatggaagtggtatgtacatgattgggctcgagcaggtcctgaaggcacaa

SEQ ID NO: 120786 - DNA, 266 bp, Homo sapiens; identical to SEQ ID NO: 117721

SEQ ID NO: 120787 - DNA, 582 bp, Homo sapiens
ccaaccctgtcatctcccaatgggcccatgaacaaagtggccatggtggcagggatggagattatgcatgggctcagcaacatggacttccactcaccaaggctgacatggctatggccacagctgagtgcctagtttgccagcagcagagaccaacactgagacctcaatatggcaacggctggggcaaagttctccagaaggccatgtatgctctgaatcagcatccgatatatggtactgtttttcccatacccaggattgatgggtccaggaatcaaggggtggaagtgaaagtggcaccactcaccatcacccttagtgatccactagcaaaatttttgcttcctgttctctcagcattacattctgctggcctagaggtcttagttccagagggaggaatgttgccatcaggagacacagcaatgattccattaaactggaagttaagcttgccacctggatactttgggctcctcctacctttaagtcaacagactaagaagggagttacagatttgggtggggtgattgacctggactatcaagatgaaatcagtctactattccatatcagag

SEQ ID NO: 120788 - DNA, 404 bp, Homo sapiens
gcaccacctgcaagtggacagctgcagcactacagcccctttctaggacatccctgaaggacagcggtgaaaggaaatcttcccagtgggcagaacttcgagcagtgcacctgatcatgcactttgcatggaaggagaaatggccggatgtacaattatacactgattcatgggctgtagccaatggatcggctggatggtcagggacttggaagaatcatgattggaaaattgccaccactgtcatcgcccaatgggcccatgaacaaagcagccatggtagcaggaatggaggttacacatgggctcagcaacatggacttccactcaccaaggctgacgtggctacggccactgatgaatgcccaatttgccagcagcagagaccaacactgagcccttga

SEQ ID NO: 120789 - DNA, 2715 bp, Homo sapiens
atggagaactataccagttcacctttcaatgtgcaaaaaaatgatatacaaaaaattttagttgggaaatataaaagaacaatacagctgaagaggattctgaagtatgtaaagacagatgagaagcaccaggaaagcttcaaatcattttcagtggagcatcagatcactctcattcaggattgtaaagatacccttgaattaatagaaacagagctgacggaagaagaacttgatgtccaggatgaggtcttgaaaaaatgttgcaaagaaaacattcaaccccctatagtgaaatcaggcagtaaggatgacaggcagagatttctgtggaggaaatacattgctagagtgaaaatcacagtacctgcatcttggcccaccagcttacttgcaccaatggcctcatggggaattccctatgatcagttgacagaggaagagaagactagggcctggttcacagatgtttctgcatggtatgcaggaaccacccaaaagtggacagctgcagcactacagcccctttctaagacatccccgaaggacagtgccacccctgccatcgcccaatgggcccatgaacaaagtggccatggtggcagggatggaggttatgcatggactcagcaacatggacttccactcaccaaggctaacctagctgcggccactgctgagtgcccaatttgccagcagcagagaccaacactgagccctcaatatggcaccattcctcggggtgatcagccagttacctggcctttcctttttaacctctccttccggccaagccttcgcgctctcttcccctccctcggtttctatccgctcccgttagctccactccgcacattcctgcaaggtgtccccgttaagaggaggcagctgcgccgcactggctctccaccctccatccggccctggcgcccagtcgtcaggggcctgcggtttcctggcctaccgtctggtgtggtacctacctcctccgtgccggcaacaaccgctcctactctggttctgctgagctccgagcccggaccagtgggcgatgtaggccttcgggaagggagagccccggctctgttttatttagcccagctgctctggcctacgttatggagactggcgggtagattgcggtctccgagtcgcggaatcctctttacgctgggagtggacgggcgagaatgggttggagacttcctgctgtctcagtcagctttgggcgggattagctgttataagagtaacaatgagttacaaggcactaatagttctggatccttgggtggtcttgatgttcgcagacgaattcctataaagctcatctccaaacaagcaaacaaagcgaaacctgcaccgcgaactcaaagaactataaacaggatgcctgcaaaggctccacctggtgatgaagaaggatttgattataatgaagaagaacggtatgactgtaaagggggtgagctgtttgcaaatcagcgaagatttcctggacaccttttttgggactttcagataaacatcttaggtgaaaaggatgatacaccagttcatttctgtgacaagtgtggattgcctattaaaatctatgggagaatgattccatgcaagcatgttttttgctatgactgtgctattttacatgaaaaaaagggagataagatgtgtccaggctgtagtgatcctgtgcagcgaattgagcagtgtacacgaggttctctcttcatgtgtagcattgttcaagggtgcaagagaacatatttgtctcagagagacttacaggctcatatcaaccatcgccatatgagagctggaaaacctgttacccgtgcttcacttgaaaatgttcatcctcctattgccccaccaccaactgaaatccctgagcgttttataatgccaccagacaagcaccatatgagccatattccgccaaagcagcacatcatgatgccaccacctcctttgcaacatgtgccacatgagcactataatcagccacatgaggatattcgtgctcctccagcagaattgtccatggctccacctccacctcgatcggtcagtcaggaaacctttcgtatttcaacaagaaaacacagcaatttaataaccgtccctattcaggatgactcaaattcaggtgctagagaaccaccacctcctgccccagcacctgctcaccatcatcctgaatatcagggtcaaccagtggtatcgcaccctcatcatattatgcctccacagcaacattatgcaccacccccacctcctccaccaccaataagccatccaatgccacatcctccccaggctgcaggtactcctcacttggtatatagccaagctccacctccaccaatgacctctgctccaccaccaataacccctccccctggacatattattgcccagatgccaccttatatgaatcatcctcctccaggacctcccccacctcaacatggtggtccacctgtaactgcaccccctcctcaccattataatcctaactcattaccccagttcactgaagatcaaggaactctgagccctccatttacacaaccagggggaatgagtcctggtatatggcctgcaccaagagggccaccaccacctccacgattgcagggtccgccttctcaaaccccacttcctggaccacatcatccagatcagacaagatatagaccgtattaccaatga

SEQ ID NO: 120790 - DNA, 1506 bp, Homo sapiens; identical to SEQ ID NO: 120217

SEQ ID NO: 120791 - DNA, 636 bp, Homo sapiens
atgaccgtggattatcgtaagtttaaccaagtggtgactccaatggcagctctgtaccagatgcggtttcattgcttgagcaaattaacacatttcctggtacctggtatgcagccattgacttggcaaatgcctttttctccattcctgtccatgaggcccaccagaagcaatttgccttcactacctcaggggtatatcaactttccagctttgtgtcataatcttattcggagagaacttgatttctttttgcttctacaagatatcacactggtccattacattgatgacattctgctgattggatccagtgagcaagaagtagtaaacacactggacttattgattcataagagaagtaaggaagcagagcacactgctgcttccaggattagagtgtcatgcttaccagagcagaaaagtcatgaacagacactgccgtgggaacaagtgcccagctctggagatataaaggagtatttcccaaatgcttttgtcctccttaccacagcttccctgcagggacaagataatacttctcagcttcagctcacatggaaagcacctgaagatataaaaatgagtaagacagatgcagatgcagatgaagaaattgaggctctgagaggttaa

SEQ ID NO: 120792 - DNA, 1103 bp, Homo sapiens
agacctctggccttttaccagggtaactcttcacaggggaaagagaaatgatcagacatttcagggactactggacactggctctgagctgatgttgattccagaggacacaaaacatcactgtggtcctccagttaaagtagaggcttatggaggtcaggtaattaatggagttttagctcagatccaacttacagtgggtccagtgggttcagggactcatcctgtggtcatttacccagtgccagaatgcataattggcataggcatacttagcagctggcagaatccccacattggctccctgactagtaggaagacagatggttcttggagaatgacagtgcattatcataagcttaaccaaatggtgactccaattgcagctgctataccagatgtggtttcattgcttgagcaagttaacacatctcctggtagctggtatgcagccattgacttggcaaatgcctttttcttcattcctgtccataaggcccaccagaagcaattcgccttcagctggcaaggccagcaatatacctttactgtcctacctcagtggtatatcaactctccagctttgtgtcataatcttattcggagagaccttgattgcttttcgcttccactagatatcacactggtccattacattgatgacattatgctgattggatccagtgagcaagaagtagcaaacacactggacttattcgtgagacatttgcgtgccagaggatgggaaataaatccaactaaaattcagggaccttctacctcagtaaaatttctagggttccagtggtgtggggcctgtcaagctattccttctaagatgagggataagttgctgcatttagtccctcctacaaccaagaaagaggcacaatgtctaacagctcttggcctgttactggctttggtggaaactgaacatttgactataagtcatcaagtcaccatgcgacctgaactgcctatcatgaactgggtgctttttgacccatctagccataaagtgggttgtgcacagcagcattccatcatcaaatggaagtggtatgtacatgattgggctcgagcaggtcctgaaggcacaa

SEQ ID NO: 120793 - DNA, 2061 bp, Homo sapiens
atggatgaagctggaagccgtcatcttcagcaaacaaacacaggaacagaaaaccaaacaccgcatgttctcactcttaagtgggagttgaaccatgagaacacatggacacagggagggaaacaacaaacactggggtctgttgggggagaaagaactgagattgtggaaatacagacacaagctcttatcatgcaagtggctgacctgcaacaaaagatgtatacactaaagtccctgcaagcccttagaggtgaggttgagagtgtgacccatgaggaggtgcacacactaaaaaaaaactgttttgagttctctaatttatatgaacagccaatctggagaacaggtgctgtaccagatgtggtttcattgcttgagcaaattaacacatctcctgctacctggtatgcagccattgacttgggaaatgcctttttctcgattcctgtccataatacccaccagaagcaatttgccttcagctggcaaggccagcaatatatctttactatcctacttcaggtgtatatcaactctccagctttgtgtcataatcttattgggagagattttgattgctttttgcttctgcaagctatcacactggtacattacattgatgacattatgctgaatggatccaacacactggactcatgggtgagaaatttgcatgccagaggatggaaaataaatccaacaaaaattcagggagcttctacctcagtaaaatttctagggatccagtggccatatgacccagcagatccaatggtgcttgaggtgttaatggcagatagggatgctgtttggatcctttggcaggcacccataggtgaatcacagcagaggcctctaggattttggagtaaggccctgccatcttctgcagataactactctccttttgagagactgctcttggcctgttactgtgctttcgtggaaactgaacgtttgactatgggtcatcaagtcatcgtgcgacgcgaactgcctatcatgaactgtatgctttctgactcatcaggccacaaagtgggtcacgcacagcagcatcatgaaattgaagtgatatttgtataccatgtgagtgctcaccaatgggtgacttcagcagatgaggagtttaataatcaagtggataagatgacccgttctgaggataccactcagcctctttcctcagccacccctgtcatcacccaatgggcccacgaacaaagtggccatggtggcagggatggaggttacacatgggctcagcaacatggacttccactcaccaaggctgacctgactatggccactgttgagtgcccaatttgccagcagcagagaccaacactgagccctcaatatggcaccattccttggggtgatcagccatccacctggtggcaggttagttatattggaccttttccatcatggaaagggcagaggtttgtcctgactggaataggcacttattccggatatgggtctgcctatcctgcacgcaatgcttctgccaagactaccacctgtggactcaaggaatgcctaatccaccatcatggtattccacacagcattgcttctgaccgaggcactcattttatggctaaagaggtgtggcagtgggctcatgctcgtggagttcactggtcttatcgtgtttcccatcatcctgaagcagatggattgatagaatggtggaatggccttttgaagtcacaattacaacaccaactaggtgacaatactttgcaggactggggcaaagttctccagaaagccacatatgctctgaatcagcatctgatatatgaacattggactccaagttcttcagttttgggacacggactggctctccttccttctcagcttgcagacaacctattgtgggaccttgtggtcatggcctatacgttaaaactacagaatgctgatgaaataaacataaggcgtagatgtctgactagacagccaggaagtactgctcccaccgagagaccaaaatatggagtaaaccaacatgcttcaaacacatcttcagagagaaaacactga

SEQ ID NO: 120794 - DNA, 1173 bp, Homo sapiens
ctgggaagtccggcaatataccttcactgtcgtacctcaggggcatatcaactctctggttttgtgccatgatgttgttcgcagagatcttggtcactttttccttccacaagatatcaccctggtccattacattgatgacattatgctgattggatctacccctcctataaccaagaagaaggcacaacacctagtgggcctatttggattttggaggcaacttgttcctcatttgggtgtgttactctggcccatttatcaagtgacccaacaggctgccagttttgagtggggtccagaaaaggagaaggctctgcaacaggtccaggctgctgtgcaagctgctttgccacttgggccatatgacccagcagatccaatggtgcttgaggtgtcagtggcagatagggatgctgtttggagcctttggcaggaccccataggtgaatcacagtggaggtctttaggattttggagcaaggccctgccatcttctgcagataactactctccttttgagagacagctcttggcctgttactgggttttggtggaaactgaacgtttgacaatgggtgaccccagcagaggaggattttaataatcaagtagataggatgacccattctgtggataccactcagcctctttccccagccacccatgtcatcacccaatgggcccatgaacaaagtggccatggtggcagggatggaggttacacacgggttcagcaacatggacttccactcaccaaggctgacctggctacagcgggcaaagttttccagaaggctgtgtaagctctgaattagcattcaatatatggtactctttctctcatagccaggattcacaggtccaggaatcaaggagtggaagtggaagtggcaccactcaccatcagccccagtgatccaccagcaaaatttttgcttcctgttcccccgacattacgttctgctggcctagagttcttagttccagaggaaggaatgctgccatcaggagacacaacagttccattaaactggaagttaagattgccacctggacactttgggctcctcttccctttacatcaacaggctaataagggagttacagtgttggttggggtgactgacttggactatcaagatgaaatcagtctactaccccacaatggag

SEQ ID NO: 120795 - DNA, 2490 bp, Homo sapiens
atggccgaatcggaacagctccagtctacagctcccagcaagatcaatgcagaaggcaggcaaacagagtctagagtggacctccagcaaactccagcagacctgcagcagaggggcctgaatgttagaaggaaaactaacgaacaaaaaggaatagcatcaacatcaacaaaaaggatgtccactcaaaaaccctatcagaaggatcacaactcgtcggcagcaagggaacaaaactggatggagaatgagtttgatgaattcacagaagtaggcttcagaagttgggtagtaacaaactctttcaagctaaaggatcatgttctaacccaatgcaaagaagctaagaaccttaaaaaaagaattggaaaaaactactttaaagttcatatggaaccaaaaaagagcccatgtagccaagacaatcctaggcaaaaagaacaaacctggaggcatcacagtacctgacttcaaactatactacaaggctacagtgaccaaaacagcacgagacatggatgaagctggaaaccatcattctcagcaaactaacacaggaacagaaaaccaaacaccacatgttctcactcactcattttccggggaggctgtgtaataagatagcccggtgcatccttttaacctctttcaacactaaacggccaaatgaaaacatgactcacaggaaagaagaaaggggttatgggaataatagagtaatttgggaaatcatgaccataggggaaaagaaacgggtgattcacagtacaaggaggcaatatgccatggttaagagcactaactttgaaattggaatgatagaaagagctgaaattgtggaaaaacagacacaagctcttatcatatccaacagtgggagctgcagtcactcaactacaaaatttaactgcaatgggagtaattggatcccatggtgccaggggccaagtagtggcactcaaccgtcaaaggcaaggagacctccaaccttttaccagggtaactgtgcactggggaaaagggaaatgcagatatttgggggactactggacactggctctgagctgacattgattccaggggacccaaaacatcattgtggtcctccagttaaagtaggggcttttggggggtcaggtaattaatggagctttagctcgggtccaacttatagtgggtccagtgggtccctgggcgcatcctgtggtcatttccccagtgccagaatgcataattgacatagacatacttagcagctggcagaacccccacattagctccctgactggtagggtgagagctattatggtgggaaaggccaaatggaagtcattagagctgcctctacctagaaaaatagtaaatcaaaaacaatatcacatccctggagggattgtggagattagtgccaccatcaaggacttgaaagatgcaggggaggtgattccgattcccaccacattcccattaaactctcccatttggcctgtgcggaagacagatggatgttggagaatgacagtggattattgtgagcttaaccaagtggtgactccaactgcagctacagtaccagatgtggtttcattgcttgagcaaattaacacatctcctggtacctggtatgcagacattgacttggcaaatgccgttttctccattcctgtccataaggcccaccagaagcaatttgccttcagctggcaaggccagcaatatacctttactgtcctacctcaggagtatatcaactctctaggtttgtgtcataatcttattcagagagaccttgaccacttttcgcttctgcaagatatcacactggttcattacattgaagacattatgctgattggatccactgagcaagaaatagcaaacacactggacttattgtttatggctaaagaagtgtggcagtgggctcatgctcatggaattcactggtcttaccatgtttcccatcatcctgaagcagctggattgatagaatggtggaaaggccttttgaagttacaattacaatgccaactgggtgacaatactttggagggctggggcaaagttctccagaaaaccgtgtatgctctgaatcaacatccaatatatggtactgtttctcccatagccaggatccacaggtccaggaataaaggggtggaagtggcaccattcaccatcacccccagtgatccactaccacaatttttgcttcctgttcctgctacattatgttctgctggcctggaggtcttagctccagagggaggaacgttgccaccaggagacagaacaacgattccattaaactggaagttaagattgccacctgaagactttgggctcctcccatctttaagtcaacaggctaagaagggagttacagtgttggctggcgtgattcacccagactatcaagatgaaatcagtctactactccacaacggatgtaaggaagatcttctgaatggaatacagcagatccattag

SEQ ID NO: 120796 - DNA, 375 bp, Homo sapiens
tcccaaaggctggtactgaaatgagcacctccatccgccagttcacctcctccagctccatcaagggctcctccggcctggggggcggctcgtcccgcacctcctgccggctgtctggcggcctgggtgccggctcctgcaggctgggatctgctggcggcctgggcagcaccctcgggggtagcagctactccagctgctacagctttggctctggtggtggctatggcaacagctttgggggtgttgatgggctgctggctatgcagccgccccatctgccccacagtctccggcctctccagcctcagccccctgcttcagtcccttccccatgcttccttgcctgatgacaataaagcttgttgactcagc

SEQ ID NO: 120797 - DNA, 3342 bp, Homo sapiens
atgaccacctccatccgccagttcacctcctccagctccatcaagggctcctctggcctggggggcggctcgtcccgcacctcctgccagctgtctggcggcctgggtgccggctcctgcaggccgggatctgctggtggcctgggcagcgccctcgggggtagcagctactccagctgctacagctttggctctggcggtggctatggcagcagcagctttgagggcgttgatgggctgctggtcggaggtgagaaggccaccatgcagaacctcaatgaccgcctggcctcctacctggacaaggtgcgtgccctggaggaggccgacactgagctggaggtaaagatccgtgactggtaccagaggcaggccccggggcccgcccgtgactacagccagtactacaggataatcgaggagctgcagaacaagccacccccatccgatgacctgactactctcccatctccgctgatcctcacagccaccgtggacaatgccaacatcctgctacagaatgacaatgcccatctggctgctgctgacttccgcaccaagtttgagacagagcaggccctgtgcctgagtgtggaggccgacatcaatggcccgtgcagggtgctggatgagctgaccctggccagagccgacccggagatgcacattgagaacctcaaggaggagctggcctacctgaagaagaaccacgaggagatgaacgccccgcgaggccaggtgggcggtgagatcaatgtggagatgggcgctgccccaggtgtggacctgagccgcatcctgaacgagatgcgtgagcagtatgagaagatggcagagaagaaccgcaaggatgccgaggattggttcttcagcaagacagaggagctgaaccgcgaggtggctaccaacagtgagctggtccagagcggcaagagcgagatttcggagctccggtgcaccatgcaggccttggagatcgagctgcagtcccagctcagcatgaaagcatccctggagggcaacctggcggagacagagaaccgttactgcatgcagctgtcccagatccagggactgatcggcagtgtggaggagcggctggcccagcttctctgcgagatggagcagcagaaccaggagtacaagatcctcctggacatgaagatgcggctggagctggagatcaccacctaccaccgcctgctggagggcgaggatgcccaaaccgtacaacacacaccaggctctccatgcgtgcctgagtgggcccatgaccggtgctctctcccagctcagctggatgaatggagctgccaggcccagcgtgggatctgtggacacaggagagagaactgctgggaacggatccccagccagtcctgtttctacaggccaactgctcgctcgctcacctccctccttggcacgatgagcacctgcagccaccagttcacctcctccagatccatgaagggctcctgcagcatcgggggcagcatcgggggcggctccagccgcatctcctctgtcctggctggagggtcctgccatgcccccagcacctacgggggggcctcctgcgggctggggggcggctatggcggtggcttcggcagcagcagcagctttgctagtggctttgggggaggatatggtggtggccttggtgctggcttcggtggtggcttgggtgctggcttgggtggtggctttgctggtggtgatgggcttctggtgggcagtgagaaggtgaccatgcagcacctcggtgaccgcctggcctcctacctggacaaggtgcgtgctctggaggaggccaacgccgacctggaagtgaagatccgtgactggtaccagaggcagcggcccagtgagatcaaagactacagtccctacttcaagaccatcgaggacctgaggcacaagatcattgcggccaccattgagaatgcgcagcccattttgcagattgacaatgccaggctggcagctgatgacttcaggaccaattacgagcacgagctggccctgcagcagactgtggaggctggcgtcaatggcctgtgccgggagatgcttgctctgcgaggtcagaccggtggagaagtgaacgtggagacggatgccgcacctggcgtggacctgagctgcatcctgaatgagatgcgcaaccactgggggctttgggagagcctcacctttcactctgctttcctgtctcagaccaaggagctgaacaaaaaagtggcctccagcagtgaactggtacagagcagccgcagtgaggtgacggagctccagagggtgttccagggcctggagatggagctgcagtcccagctcagcataaaagcgtccctggagaacagcctggaggaaaccaaaggctgccactgcatgcagctgtcccagatccagggactgattggcagtgtggaggagcagctggcccagctatgctgtgagatggagcagcagagccgggagtaccagatcttgctggacatgaagacacggctggagcaggagatcgccacctaccgccacctgctggagggcgaggacgcccatcttcacctcctcttcgtcctcttcgagccgtcagacctggcccatcctcaaggagcagggctcatccagcttcagccagggccagtgctcctagaactgagctgcctctaccacagcctcctgcccaccagctggcctcacctcctgaaggcctggccaactgctcgctcactcacctccctcctcagcaccatgagcacctgcagccgccagttcacctcctccagctccatgaagggctcctgcggcatcgggggcggcatcgggggcggctccagccgcatctcctccgtcctggccggagggtcctgccgcgccaccagcacctacaggggtggcctgtctgtcgcctcctcctgcttctcctctgggggagcctacaggctggggggcggctatggcggtagcttcagcagcagcagcagcttcagtagtggctttgggggaggatatggtgatggccttggtgctggcttcggtggtggcttgggtggtggctttgctggtggtgatgggcttctggtgggcagtgagaaggtgaccatgcagaacctcaacgacagcctggtctcctacctggacaaggcgcgtgccctggaggaggccaacgctgacctggaggtgaagatccatgactggtaccagtggcagcggcctgctgagatcaaagactacagtccctacttcaagaccatcgaggatctgaggaataaggtgggtgaatgggcagcagaaggtgccattccagctagctccttctgggaacaatag

SEQ ID NO: 120798 - DNA, 2274 bp, Homo sapiens
atgaccacctccatccgccagttcacctcctccagctccatcaagggctcctctggcctggggggcggctcgtaccgcacctcctgccagctgtctggcggcctgggtgccggctcctgcaggccgggatctgctggtggcctgggcagcgccctcgggggtagcagctactccagctgctacagctttggctctggcggtggctatggcagcagcagctttgagggcgttgatgggctgctggtcggaggtgagaaggccaccatgcagaacctcaatgaccgcctggcctcctacctggacaaggtgcgtgccctggaggaggccgacactgagctggaggtaaagatccgtgactggtaccagaggcaggccccggggcccgcccgtgactacagccagtactacaggataatcgaggagctgcagaacaagccacccccatccgatgacctgactactctcccatctccgctgatcctcacagccaccgtggacaatgccaacatcctgctacagaatgacaatgcccatctggctgctgctgacttccacaccaaggtgctggatgagctgaccctggccagagccgacccggagatgcacattgagaacctcaaggaggagctggcctacctgaagaagaaccacgaggagatgaacgccccgcgaggccaggtgggcggtgagatcaatgtggagatgggcgctgccccaggtgtggacctgagcctcatcctgaacgagatacgtgagcagtatgagaagatggcaaagaagaaccgcaaggatgccgaggattggttcttcagcaagacagaggagctgaaccgcgaggtggctaccaacagtgagctggtccagagcggcaagagcgagatttcggagctccggtgcaccatgcaggccttggagatcgagctgcagtcccagctcatcatgaaagcatccctggagggcaacctggcggagacagagaaccgctactgcatgcagctgtcccagatccaggggctgatcggcagtgcggaggagcggctggcccagcttctctgcgagatggagcagcagaaccaggagtacaagatcctcctggacatgaagatgcggctggagctggagatcaccacctaccaccgcctgctggagggcgaggatgcccagagcctcctcaagctccaggctgcggcgccttaccgagaagctctggcctcggacgaagggcatttttcggggcagacttcgctcctcagacccccaagagttgttgatctgggtgttacggaccacagcattctcatcaaaacgggggttcatgtggaaggcgatgtggctcccagagcacaggttgatgtggaacctgcggggagagagtcagggaaggagggaatgagagatgaggaccaaagggtgaggagcccagatttgctgagggcctactgtgcacttcgctcatctcagggagctccctcgaatgccaaaagggtaacagcagctcccatccagctgccggtgccctgtgggaatgtgggcccagcataccctaatcttcccatttttcacgtggtgttggccgtccccttttctgggactatccaagggggtctccaggacggatttcagatcactgtcaatggggccgttctcagctccagtggaacccagacgggcttcagtggaaacgacattgccttccacttcaaccctcggtttgaagacggagggtatgtggtgtgcaacacgaggcagaaaggaagatgggggcccgaggagaggaagatgcacatgcccttccagaaggggatgccctttgacctctgcttcctggtgcagagctcagatttcaaggtccctggtaacatttatttttcagcgacattgttccagcctttatccagagtctattacggttatagttctgtaagcacattgcaaattacctttgcaagcacagtaggaacactgggcttgagaagccgaaggagggaccaggagctcaggggtggtccccatcccggcctggggcacctcccccgaaatcacgtagaaggaatgaaagatgaagacaatcatgacttggcaaccaccataataataattgacccaacaaaaataatcaatgaaatgctaaatctagtgggcactttcgagccagcaataggtcagtaccctgctgggatggagcttccagaggaagtggcaggcagccatctttgctgtttcacagacttcactgatgatacctccagctatgggaaaaaccgaggcaactag

SEQ ID NO: 120799 - DNA, 1380 bp, Homo sapiens
atgcccacctggctgccgatgacttctgcaccaagtgaggctgggtctctggagctgccccaggggctggacaagctgaccctgcctggagccaacctggagatgcagcctgagaacctcaaggaggacctggtctacctgaagaagaaccatgaggagctgtcaatggcaatcaagcgtaatgagagcatggccaaaggtctgcagagggctctgctgcagcagcagccagaggatgacagcaagtgcttcccccggccccaggacctgatccggctttatgacatcatcttacagctgacccttgaggaccgggaaggcaagggcctgtcattttcctttgcctgtgtggacaaggatgtcagtgtgaagatggacactgtgcctggagtgaacctgagctgcatcctgaatgagatgcgtgaccaggacaagaaactggtggagaagagctgcaaggatgcccagggctggttcttcagcttgaaagcattgctggagggcagcctggtggagacggaggtgtgttacaggacccagctggcccagctgcaggggctcatcagaagcatggaacagcagctgtgcgagctctgctgtgatgcagagcaccaggaccacgagcaccaggtccttctggacgtgaagacgcagctggagcaggagatcgccacctacagccgcttgctagaggttgaggacgcccagctggccactcagtactccttgtccctggcctcgcagcccacccgggaagacctagaaaaagctattttaaaattcatatggaaccaaaacagagcccaaatagccaagacaatcctaagcaagaagagcaaagctagaggcatcatgctacccagcttcaaaatatactacaagactacagtaaccaaaacagcatggtgctggtacaagaaccgacacatagaccaatggaacagaatagagaacccagaaataagaccacacacctacaaccatgtgatctttgacaaacctgacaaaaggaagcaatggggaaaagattccctatttaataaatggtgctgggagaactggctagccatatgcagcaaattgacactggaccccttccttaacccatatacaaaagttaactcaagatggattaaagacttaaatctacaacccaaaactataaaaatcctgaaagaaaacctaggcaatgccattcaggacacaggcaagggcaaagatttcatgacgaagatgccaaaagcaattgcaacaaaagccaaaattgacaaatgggatctaattaaactaaagagcttctgcacagcattaagaaactatcaacagagtaaaccgacaacctacagaatgggagaaaatttttgcactctatccatctga

SEQ ID NO: 120800 - DNA, 885 bp, Homo sapiens
atgaccacctccatccgccagttcacctcctccagctccatcaagggctcctctggcctggggggcggctcgtcccgcacctcctgccagctgtctgggggcctgggtgccggctcctgcaggccgggatctgctggtggcctgggcagcgccctcgggggtaacagctactccagctgctacagctttggctcttgcggtgtacaccccattgccattgccaccccactgcacatacctgataacgcagccagcccagcagtggaaccaacaccatcagaaccagtgccaagtgctgcctctaggaaacaggcacaaagttaccaaactcaactaaatggtaaaaaacagtgcttagaagacagcagctctgaaattcctcgtttgatatgtgacccagatcccaattgtgaaatcaatgaaagagatgagttcattattgaaaaactgaaatcagctgtaaatgagatagcactaagcaggaataaattacaagatgaaaatcagaagctcttgcaagaactgaaaatgtaccaaagacagtgccaggctcgtttaactcgcagtatcctcggtgaacgctaccagaaaaacaccggggtagcgacggatacccggcagcggactacgaccggtgtcgtcatctataccgcacctatctcctacggtctctccccacgggagagaaggcaggccccagggtctttccccaggatggccttgggtcaggtggacaaggatgtcagtgtgaagatggacactgtgcctggagtgaacctgagctgcatcctgaatgagatgcgtgaccaggacaagaaactggtggagaagagctgcaaggatgcccagggctggttcttcagcgtggtgggtggccgtgtgtaa

SEQ ID NO: 120801 - DNA, 1557 bp, Homo sapiens
  misc_feature (1)...(1557): n = a,t,c or g
tagcgcgcctgaagtaccgggtcgacccacgcgtgcgatctactcttcagcccttctcctgtgtgcctgcctcctgccgccgccaccatgaccacctccatccgcrcagttcacctcctccagcatccatcaagggctcctccggcctggggggcggcgtcgtcccgcacctcctgccggctgtctggcggccttgggtgccggctcctgcaggctgggatctgctggcggcctgggcagcaccctcgggggtaagcagctactccagctgctacagctttggctctggtggtggctatggcagcagctttgggggtgttgatgggctgctggcttggaggtgagaaggccaaccatgcagaacctcaaatgacccgcntgggctcctacctggacaaggtgccgtgcccttggaaggaggccaacactgagctggaggtgaagatcccgtgacctggtaaccagaggcagggccccggggcccgcccgtgactacagccagtactacaggacaattgaggagctgcagaacaagatcctcacagccaccgtggacaatgccaacatcctgctacagattgacaatgcccgtctggctgctgatgacttccgcaccaagtttgagacagagcaggccctgcgcctgagtgtggaggccgacatcaatggcctgcgcagggtgctggatgagctgaccctggccagagccgacctggagatgcagattgagaacctcaaggaggagctggcctacctgaagaagaaccacgaggaggagatgaacgccctgcgaggccaggtgggtggtgagatcaatgtggagatggacgctgccccaggcgtggacctgagccgcatcctcaacgagatgcgtgaccagtatgagaagatggcagagaagaaccgcaaggatgccgaggattggttcttcagcaagacagaggaactgaaccgcgaggtggccaccaacagtgagctggtgcagagtggcaagagtgagatctcggagctccggcgcaccatgcaggccttggagatagagctgcagtcccagctcagcatgaaagcatccctggagggcaacctggcggagacagagaaccgctactgcgtgcagctgtcccagatccaggggctgattggcagcgtggaggagcagctggcccagcttcgctgcgagatggagcagcagaaccaggaatacaaaatcctgctggatgtgaagacgcggctggagcaggagattgccacctaccgccgcctgctggagggagaggatgcccacctgactcagtacaagaaagaaccggtgaccacccgtcaggtgcgtaccattgtggaagaggtccaggatggcaaggtcatctcctcccgcgagcaggtccaccagaccacccgctgaggactcagctaccccggccggccacccaggaggcagggaggcagccgccccatctgccccacagtctccggcctctccagcctcagccccctgcttcagtcccttccccatgcttccttgcctgatgacaataaagcttgttgactcagctatga

SEQ ID NO: 120802 - DNA, 452 bp, Homo sapiens
ctttctgctccccagctccttcagctgtactcactctttgttaagtcccacaattaccattgttcctggcccggacttcaatctggcctcccacattattcctgataccacacctgacccccatgactgtatctctatgatccacctgacattcaccccatttccccatatttccttctttcctgttcctcaccctgatcacgcttgatttattgatggcagttccaccaggcctaatcgccacacaccagcaaaggcaggctatgctatagcacaagccactatcccgcctcttagaacctctcatttcctttccatcgtggaaatctatcctcaaggaaataacttctcagtgttccatgtgctattctactactcctcagggattattcaggccccctcccttccgtacacattaagacgagatcgtcgacccgggacttcaagagcgg

SEQ ID NO: 120803 - DNA, 1794 bp, Homo sapiens
atgacctcgggtcctcagaccagccagcccaaggaacatctcaccaatttcaaatcggatgaacaggaaagagtttcttctctagcccaatctcacactgacaaccaccggcttcatgagccaggcctccaggaaggcattagagcagttccccgagaagatccccaatggaactatcaggcagattcccccagaggccccctggaccatcatagacgccgagcttcaggtaactcacagtggaggcaagccaaactcattgccttaactcgggccctcactcttgcaaagggactacgcatcaatatttatactgactctaaatatgccttccgtatcctgcaccaccatgctgttatatgggctgaaagaggtttcctccctacgcaagggtcctccatcattaatgccactttaataaaaactcttctcaaggccgctttacttccaaaggaagctggagtcattcactgcaagggccatcaaaaggcatcagatcccatcactcagggcaacgcttatgctgataagcctattggttttggattggaaaagttattgacatttcatctctcccaattgcaagaatatagaggaaccaagtggagggaaaaatcccacaggaaagtcaaccatgatgagaacacaagcaaattgacttctttaaatgaagagtataccaaaaataaaacagaatatgaagaagcccaggatgccattgttaaagaaattgtcaatatttcttcaggctatgtagaaccaatgcagacactcaatgatgtgttagctcagctagatgctgttgtcagctttgctcacgtgtcaaatggagcacctgttccatatgtacgaccagccattttggagaaaggacaaggaagaattatattaaaagcatccaggcatgcttgtgttgaagttcaagatgaaattgcatttattcctaatgacgtatactttgaaaaagataaacagatgttccacatcattactggccccaatatgggaggtaaatcaacatatattcgacaaactggggtgatagtactcatggcccaaattgggtgttttgtgccatgtgagtcagcagaagtgtccattgtggactgcatcttagcccgagtaggggctggtgacagtcaattgaaaggagtctccacgttcatggctgaaatgttggaaactgcttctatcctcaggtctgcaaccaaagattcattaataatcatagatgaattgggaagaggaacttctacctacgatggatttgggttagcatgggctatatcagaatacattgcaacaaagattggtgctttttgcatgtttgcaacccattttcatgaacttactgccttggccaatcagataccaactgttaataatctacatgtcacagcactcaccactgaagagaccttaactatgctttatcaggtgaagaaaggtgtctgtgatcaaagttttgggattcatgttgcagagcttgctaatttccctaagcatgtaatagagtgtgctaaacagaaagccctggaacttgaggagtttcagtatattggagaatcgcaaggatatgatatcatggaaccagcagcaaagaagtgctatctggaaagagagcaaggtgaaaaaattattcaggagttcctgtccaaggtgaaacaaatgccctttactgaaatgtcagaagaaaacatcacaataaagttaaaacagctaaaagctgaagtaatagcaaagaataatagctttgtaaatgaaatcatttcacgaataaaagttactacgtga

SEQ ID NO: 120804 - DNA, 219 bp, Homo sapiens
ctgaagactgacactgcccaatcacctcggaagcctacaggaccatcacagatgctttgggtaactcttacagtggaagggtcctccatcattaatgcctctttaataaaaactcttctcaaggctgctttacttccaaaggaagctggagtcattcactgcaagggccatcaaaaggcatcagatcccatcgctcagggcaacgcttatgctgataag

SEQ ID NO: 120805 - DNA, 528 bp, Homo sapiens
aactcttacagtggaaagtaagtccatcaaagcctataaactctccttacaattcccccattttacctgtccaaaaaccggacatgccttacaggttagttcaggctttgttgagtctcccacagttaccattgttcctggcctggacatcaatctggcctcccacactattccggataacactcctgaaccccatgactgtatctctctgatccacctgacattcactccatttccccatgtttccttctttcctgttcctcaccctgatcacacttggtttattgatggcagttccactaggcctaattgccactcaccagcaaagacgggctatgctatagtatcttccacacttatcattgacgctactgctcttcccccctccactacctctcagcaagccgaactcattgccttaactcgagccctcactcttgcaaagggactacccatcaatattcatactgactctaaatatgccttccatatcctgcaccaccatgctgttatataggcagaaagagg

SEQ ID NO: 120806 - DNA, 1923 bp, Homo sapiens
atgtctgacaaaagggaagaaatgaccgtggtggccttctctgaccctgtgggaaaagcctttacccatccagtgaaagtgtctacccagaccaagagggcagaaatgagcatcctggaaaccaatcagtacttgcgctctgaactggaaaagtgcaaacagaacttccaagacctcacagagaaattcctgacatccaaagctactgcctactgcctggccaatcacctgcagaaatgtaagtgtgaagagtgcaaagaccttatagaatctgtgctggaggaggaggtgcagtttcaggagagggagctggccgaattgccgaggtcagctgcaaggctccgggaagtccaggaggaagaaatggatgaagtcctggagtactcactagatgaacagtatttgactcattccagctgccatgactcccaccagcttcccagcagcaatgccttcctctttgatgcacaggaaggcccctcggctgtggaaacagccagccctggcggcggcatggtgaacatagacgtggagttccacatccggcacaactacccctggaacaagttgccggccaacgtgaggcagtcattaagtggagatagctcatcatggaggtcttcatctttgtcttcacatcaaaaggtgctcttgtcatggggtggaggggaaagtaggaggcctgtacaagaagcttcatcggcaactgacactgatacaaatagtcaagaagatccagctgacacagccagtgtaagaagcctgagtctgtctgcaggacacacgaagcacatcgcattcctgtttgactccactcttactgccttcttaatgatgggaaatctttcaccagttcagagcactggtgaaagagaagcacagagatattttgatcatgcgcttactctgagaaacacaatactgtttctgcatcataacaaagatctagttgtgcaaactgcacagccagaccaacccaattatggttttcctctggatctcttatgctgtgaaagccttcttggtctggaccctgcaactggcagcagagttctaaacaaaaattacacactgcttgtttccatggctcccctcaccaatgaaatccggcctgtcagcagctgcacccctcagcatattggaccagctatcccagaagtcagctctgtctggtttaaacagtacatttatgtttatcatatcactggacaaggaccaccatcccttttattatccaaaggtacaagacctcgaaaactgccagatatatttcagagttacgatcgattgctaataacatcttggggtcacgatcctggagtagttcctacctcaaatgtgctcacgatgttgaatgatgctttaacacattctgcagttttaattcaggagcatgccaacttgcaaatagaaaactcagtgatgcttctgatgagagaggaaaacctgatttggcttctggctcagatgttaaatgggagtacagagtcatttgaaatggtcattgaagaagcaactatagattcagcaacaaagcaaacctctggtgccacaacagaagcagattgggttcctctcgagctgtgctttggaattccgctgttcagttccgaattaaaccggaaagtttataggaaaattgctacacatggcctttgcagaaaagagagccttcaaaacctcttacattccagtagaaaactctctctgcaagtccttaactttgttcactcattccaggaaggtgcttcaacattggatattcacacagagcccagtttttcaagtttgctttcacagtcatcgtatgctgacatgggtgttccacttcctgcaaaaaatttaatatttaaagatggtgtcttatcagaacggagtggatggtcaccttcctcacttattgctaatctccatttgcaataa

SEQ ID NO: 120807 - DNA, 2295 bp, Homo sapiens
atgtgtaaaagaatgcctggacttcaggcatctcagaccgtttgcccattttacgacaagaattatctagatctgaaaaggaaaggaactgaaattaagagaagggagagattgaagtgtggcaccaagattgaaaggagaaagaggttgagggatagtgagaggttggagaagagaataaaaagaggctgcttaccggatttaaaattgtctacagaaattcaaataaatagacttagaggcttatatacccttttaagaaaggaaagaaggtttggacttcaagagaccataaattatgcagaagtgactgggatatatgtgaaggaactaattgaagacagggagcatcttaatagtggtaaatacatctttaacatttttgatattaaggtgcctcgtgttgtctttggcataatagatccttacatgttgtgggaaaaaaaggaaggaacaaaagaagggataaaagaaggaatgaagagagagagtcaaaaaagaataaagtgggaaagaagtttcataaccttcattgcccttaacacagcagacaggacactgatgtcatcggcaggatgctacagaaaacaggtgaaaatacacattgatgcccttcctccgccaaacagtcaaaccctgaagaaaagaggaggtgcgagtctcattatttcctttcgaaggcagtcaggaccctctgctgcaggtctgtgggagtttgctagaggtccattccagaccctgtttgcctggttatcaccagcggaggctgcagaacagcaaagattgctgcccgcttcttccgctgaaagcttcatcgcagagggggacccgccagatgccggccagagctctcctccctcaagtctgcatgcagcggctgccactgccctaatgcttttagaggcccttaaaatcacaaactatgctcaactcactctctacagttctcctaacttccaaaatctattttcttcctcacacctgacacatatactgtctgctgactggctccttcagctgtactcactctttgttgagtctcccacaattaccattgttcctggcccggacttcaatccggccttccactttattcctgataccacacctgacccccatgactgtatctctctgatccacctgacattcaccccatttccccatatttccttctttcctgttcctcaccctgatcacacttggtttattgatggcagttccaccaggcctaatcgccacacaccagcaaaggcaggctatgctatggcaggaatactagctactgtgtattatctccagtgggtaattcacccctggtccccaatcctggttctgctcgctgcacagaaggtggcttattatatgcaagagcctgactgtatgaatgggctgctccaggaagatctcccaagtcacaaggttaggcagtcccccagcaatctgttgtttggtagaagtggcacctgtgcaaattggaccctggcagatctggaggacacaaagaataaaatacctaggaatccaacttacaagggatgtgaaggacctcttcaaggagaactacaaaccactgctcaaggaaataaaagaggatacaaacaaatgaaagaaccttccatgctcatgggtaggaagaatcaatatcgtgaaaatggccatactgcccaaggtaatttacagattcaatgccatccccatcaagctaccaataactttctcacagaattggaaaaaactactttaaagttcatatggaaccaaaaaagagcccgcatcaccaagtcaatcctaagccaaaagaacaaagctggaggcatcacactacctgacttcaaactatactacaagcctacagtaaccaaaacagcatggtactggtaccaaaacagagatatagatcaatggaacagaacagagccctcagaaataacaccgcctatctacaactatctgatctttgacaaacctgagaaaaacaagcaatggggaaaggattccctatttaataaatggtgctgggaaaactggctagccatatgtagaaagctgaaactggatcccttccttacaccttatacaaaaatcaattcaagatggattaaagacttaaacattagacctaaaaccataaaaaccctagaagaaaacctaggcattaccattcaggacataggcatgggcaaggacttcatgtctaaaacaccaaaagcaatggcaacaaaagccaaaattgacaaatgggatctaattaaactaaagagcttctgcacagcaaaagaactaccatcagagtga

SEQ ID NO: 120808 - DNA, 892 bp, Homo sapiens
atgatgtttcgggtctccaggaattactatgccagtgttcacacaaaatgtagaaggctgaagactgacactgccctattgcctcggaagcctacaggaccatcacagacactttgggtaactcttagagagcaggtacactttaaacgggttaaagcctgttatcacttgcctgttacagcatggccctttaaagcctataaactctccttacaattcccccattttacctgtccaaaaaaaactggacaagccttacagcaagctgaactcattgacttaactcgggctctcactcttgcaaagggattacttgtcaatatttatactgattctaaatatgccttccatatcctgcaccaccatgctgttatatgggcagaaagaggtttcctcactatgcaagggtcctccatcattaatgcctctttagtaaaaactcttttcaaggtcgctttacttccaaaggaagctggagtcattcaccgcaagggccatcaaaaggcatcagatcccatagctccgggcaatgcttatgctgataaggaatgctctcctttcatggtggccctaccagaaacttggcatttcttgcgcattagattcattcagcatgaggccatcgacattgatcctggggtatattctgtggaatatcaagaaattggatttgagaaggatatatttgcctcagtaatagttgcataccagatactatggactgtgttgctttcttcccatacagttacatctgaaatggcagccactttggtttccccatctgactcaactgcacagtcactgaagaaaatggtcacaggttcctcagacgaagacttagagaaatgtttacactatacttctgtatccacattgcagaaactttatccag

SEQ ID NO: 120809 - DNA, 1286 bp, Homo sapiens
atgcacataaaccagaaaatctacaagaaactgatatatttttggacatatacactcccaagattggaccaggaagagattcggtccctgaatagaccaataacaagttctgaaattgaatcagcaataaatagcctaccaaccaaaaaatttccaagaccagatggattcacagttgaattctaccagatgtacaaagaagagctgacacacaacaagaaaagaaagcttcaggccaatatccttgatgaacatcaatgcaaaaaatcctcaagaaatcccggcaaactgaatccagcagcacatgaaaagctaatccaccatgatcaagcaggctttattcctgggatgcaagctcttgtctgctggataacagtcttcctcctccagtgttcaaaaggaactacagacgctcctgttggctcaggactgtggctgtgccagccgacacccaggtgtgggaacaagatctacaacccttcagagcagtgctgttatgatgatgccatcttatccttaaaggagacccgccgctgtggctccacctgcaccttctggccctgctttgagctctgctgtcccgagtcttttggcccccagcagaagtttcttgtgaagttgagggttctgggtatgaagtctcagtgtcacttatctcccatctcccggagctgtaccagatgctgctgcagggccagtacacagttgtgctcctgccagtgcccaaaacacacctacccgggctcctgcatccccttgccggcaagctgcacccccaccccaccccacccactgcatttttacagaaaaccacaagtagatattgccagcaatgcattatcaacggtgttgctgccagaaagacaacgagagctcttttctcaagccaaactcattgccttaactcgagccctcactcttgcaaaaggactacgcatcaatatttatacagactctaaatatgccttccatatcctgcaccatcatgctgttatatgggctgaaagaggtttcctcattacacaagggtcctccatcattaatgcatctttaataaaaactcttctcaaggccgctttacttccaaaggaagctggagtcattcactgcaagggccatcaaaaggcatcagatcccatcactcagggcaacgcttatgctgataagcctattggttttggattggaaaagttattgacatttcatctctcccaattgcaagaatatagaggaaccaagtggagggaaaaatcccacaggaaagtcaaccatgatgagaacacaag

SEQ ID NO: 120810 - DNA, 1005 bp, Homo sapiens
atgagaataaacaaggagctcagaagtgagtatcagcagttttctcaagaagccttagagttagagtcagggagatacaaagagaaaagggtaggatatcagcctttgttacaacaagaaactgacatgggcaggaaaggaaatgacaaggaggaagccttatcactccttggtctgaaaaggcaaagggagggaaaactatactcagtctttgttgagtctcccacagttaccattgttcctggcctggacttcaatctggcctcccacgttattccagataccacacctgacccgcatgactgtatctctctgatccacctaacattcaccccatttccccatattttcttctttcctgttcctcaccctgatcacatttggtttattgatggcagttccaccaggcctaatcactactcaccagcaaaggaagctggagtcattcactgcaagggccatcaaaaggcatcagatcccattgctctaggcaatgcttatgctgataatgtggctaaagaagcatctagtgttccaacttctgtccctcacagttacaagctgctagcccatctcttagaccctctcatttcctttccatcatggaaatctatcctcaaggaaataacttctcagtgctccacctgctattctactacccctcagggattgttcaggcctcctccctttcctacacatcaagctcagggatttgcccctgcccaggactggcaaattgactttactcacatgccccgagtcaaaaaactaaaatgcctcttggtctgggtagacactttcactggatgggtagaggcctttcccacaaggtcagagaaggcaaccacggtcacttattcccttctgtcagacatagttcctcagtttggccttcccacctctatacagtccaataacagactggcctttactagtcaaatcacccaagcagtttctcaggctcttggtattcagtggaaccttcatatcccttaccgtccttga

SEQ ID NO: 120811 - DNA, 3588 bp, Homo sapiens
atgtcaacagctgccttaattactttggtcagaagtggtgggaaccaggtgagaaggagagtgctgctaagctcccgcctgctgcaggacgacaggcgggtgacacccacgtgccacagctccacttcagagcctaggtgttctcggtttgacccagatggtagtgggagtccagctacctgggacaattttgggatctgggataaccgcattgatgagccaattctgctgccacccagcattaagtatggcaagccaattcccaaaatcagcttggaaaatgtggggtgcgcctcacagattggcaaacggaaagagaatgaagatcggtttgacttcgctcagctgacagatgaggtcctgtactttgcagtgtatgatggacacggtggacctgcagcagctgatttctgtcatacccacatggagaaatgtattatgtttgtaatgtttgagcacaattcctgggtgaaattcgtatttgcctctgtgcgtgttatttgtggcagagaactgtgcctggtcagcagctctagacctggagcccgtggacactatatgcggggcttcagtggaaagagagatctgcttaattttgtcccagcaactcttctgacctctgggactactgcaacagtagccctattgcgagatggtattgaactggttgtagccagtgttggggacagccgggctattttgtgtagaaaaggaaaacccatgaagctgaccattgaccatactccagaaagaaaagatgaaaaagaaaggatcaagaaatgtggtggttttgtagcttggaatagtttggggcagcctcacgtaaatggcaggcttgcaatgacaagaagtattggagatttggaccttaagaccagtggtgtcatagcagaacctgaaactaagaggattaagctatggaattctcctggtgaaatggtcctgctgttcttcctcacctgcacccaatcagccagcatcacctgcactcaatcatgcagcatcacctgcacccagtcatccagcatcacctgcacacaatcagcatcacctgcatccaatcagccagcatcacctgcacccaagcaatcagcatcacctgcacccagtcagccagcatcacctgcacccaatcagccagcatcacccacacccaatcagccagcatcatctgcacccaatcagccagcatcacctgcacccaatcaatcagcatcacttgcacccaatcagccagcatcatctgcacccaatcagccagcatcacccgcacccaatcagccagcatcacctgcacccaatcagcatcacctgcatccaatcagcatcacctgcacccaatcagcatcacctgcatccagtcagccagcatcacctgcacccaatcaaccagcatcacctgcacccaatcagcatcacctgcatccaatcagcatcacctgcacccaatcagcagcacctgcacccagtcaaccagcaccacctgcacccaatcagcatcacctgcacacagccagcatcacctgcacccaatcagccaacatcacctgcacccaatcagccaacatcgcctgcacccagtcatctagcatcacctgcacccagtcatccagcatcacctgcacccaatcggccagcatcacttgcatccagtcagccagcatcacctgcacccaatcagcatcacctgcacccaatcagctaacacctgcacccaatcagccagcatcacctgcacccaatcagccagcatcacctgcacccaatcagcatcacctgcacccaatcagccaacatcacctgcacccattacatcatgctgatgacagcttcctggtcctcaccacagatggaattaacttcatggtgaatagtcaagagatttgtgactttgtcaatcagtgccatgatcccaacgaagcagcccatgcggtgactgaacaggactttgcggcacctagcctgaacactccgacagcccagagggagcttgtcccagacaatcaagaggaaaagacggtaagccataaagagatggagacctgctatcctggcgaagagggaatggtggtccacacacgggattcagcctcggatcaagcccagcaggtggccttgcaccttgggactgggcctgagcagggaggagtcactcatccccttaggctttcaggccctggggagaatcttacaagttacctgaaactaattatcaagcctctatgctacctgtttggtggtctcttcacatggacgcgtgtgacatttggtgccgtgactcggattggggacctcccttgggagatcaatcctctgtcctcctgctctttgctcagtgacaaagatccacctgtgacctcgggtcctcagaccaaccagcccaaggaacatctcaccaattttaaattagtctccaccccaggttttgagtcctttggatcctccttttctacggacccatctgacctctcccctcctccccaggctgctccttgccaggctgagccagaggccctcaaaatcacaaactgtgctcaactcactctctacagctctcataacttccaaaatctattttcttccttacacctgatgcatgtactttctgccccccggctccttcggctatactcactctttgttgagtctcccacaattaccattgttcctggcccggacttcaatccagcctcccacattattcctgataccacacctgacccccatgactgtatctctctgatccacctgacattcactccatttccccatatttccttctttcctgttcctaaccctgatcacacttggtttattgacggcagttccaccaggccaaatcgccactcaccagcaaaggaaggctatgctatagtatcttccacatctatcattgaggctaccactctgcccccctccactacctctcagcaagccgaactcattgccttaatttgggccctcactcttgcaaagggactacatgtcaatatttatattgactctaaatatgccttccatatcctgcatcaccatgctgttatatgggctgaaagaggtttcctcgctatgcgagggtcctccatcattaatgcctctttaataaaaactcttctcaaggccgctttacttccaaaagaagctggagtcattcactgcaagggccatcaaaaggtgtcagatcccatcactcagggcaatgcttatgctgataaggtagctaaagaatcagctagtgtcccaacttctgtccctcgtggccagtttttctccttctcatcagtcactcccacctactctcctactgaaacttccacctatcaatctcttcccacacaaagcaaatggttcttggaccaaggaaaatatctccttccagcctcacaggcctgttttattctgtcgtcatttcataacctcttccatgtagatagtgtcagaattggattggaggacactcagccgctgtccccggcagaattgcttgcttgcctggtgtgtgggaaaaaactcacactcatttggtcacagaagtcttctgtgtggattgttgttaacacagtgagagcccagaaaaaaacactgtga

SEQ ID NO: 120812 - DNA, 4023 bp, Homo sapiens
atggataccagcatctgttctggtggaggtgacaagggggtgattaaaagctttattgctcacacaaagcctgtttggtggtctcctcacacagacacgcatgaaatttggtgctgtgactcggatcgggggacctcccttgggagatcaatcccctgtcctcctgctctttgctccatgaaaaagatccacctacaacctcgggtcctcagacccaccagcccaaggaacatctcaccaattttaaatcgggctgctcatcgccatgccgagctaagtcccaattcttcctcagtctctgctcctccaccctataatccttctatcacctcccctcctcacacctggtctggcttacagtttagttccacgactagctcttccccaccttcccaacaatttcctcttagagaggtggctggagctgaaggcagtcaggatgatcgggaaagagttttttctctagcccaatctcacgctgataaccaccggcttcacgagccagacctccaggaaggcagtagagtagttccccaagaggatccccaatggaactctcaggcaaattccccagatctgcttggcttagcgactgaagatcgacgctgcccgatcgcctcggaagccccttggaccatcacagacgctgagcttcagctccttcagctatgctcactctttgttgagtctcccacaattaccattgttcctggcccggacttcaatccggcctcccacattattccggataccacacctgaccctcatgactgcatctctctgatccacctgacgttcaccccatttccccacatttccttcttccctgtttctcaccctgatcacacttggtttattgatggcagttccaccaggcctaattgccactcaccagcaaaggcaggatatgcaatagtatcttccacatctgttattgacgctaccgctctgcccccctccactacctctgagcaagccgaactagttgccttaactcaggccctcactcttgcaaaaggactatgcatcaatatttatactgactctaaatatgccttccatattctgcaccaccgtgtggtcacatgggctgaaagaggttacctcactacacaagggtcctccatcattaatgcctctttaataaaaactctgctcaaggctgctttacttccaaaggaagctggggtcattgactgtaaggggcatcaaaaggcatcagaacccattgctctaggcaacgcttatgctgataaggtggctagacaagcagctagctctccaacttctgtccctcatggccagtttttctccttcacatcagtcactcccacctactcccccgctgaaacttccacctatcaatctcttcccacacaaggcaaatggttcttagaccaaggaaaatatctccttccagcctcacaggcccattctattctgtcgtcatttcataacctcttccatgcagtttacaagccgctagcccgtctcttagaacctctcatttcctttccatcacggaaatctatcctcaaggagatcacttctcagtgttccatctgctattctactacccctcagggattgttcaggccccctccctttcctacacatcaagctcagggatttgtctctgcccaggactggcaaattgactttactcacatgccccgagtcagaaaactaaaatatctcttagtctgggtagacactttcactggatgggtagaggcctttcccacagggtctgagaaggccactgcagtcatttcttcccttctgtcagacataattcttcagtttggccttcccacctctatacagtctgataacagaccagcctttactagtcaaatcacccaagcagtttctcaggctcttggtattcagtggaaccttcatatctcttaccatcctcaatcttcaggaaaggtagaacagactaatggtcttttaaagacacacctcaccaaggtcagcctccaacttaaaaaggattggacagtacttttacctcttgcccttctcagaattagagcctgtcctcgagatgctacacggtacagtccatttgaacttttatatggatgcactttcttgcttggccccaacctcatcccagacaccagccctctagacgatcatcttccagtcctccaacaggctagacaggaaatttgccaggctgctaatcttctcttgcctactccagatccccagccatatgaagacaccctagctggacaatcagttcttgttaagaatctgacccctcaaactctacaacctcgatggactggaccctacttagtcatctatagtaccccaactgccgtccacctgcaggatcctccccactgggttcaccgttccagagtaaagctgtgtccatcagtcagccagcctaatccctcctcttcctcctggaagtcgcaagtactctcccccacttcccttaaactcactcatatttctgaagaacatgcctacacagctgtccccgccttacagacagactgggcaacatctcccatctccctacacctccgaacttcctttaacagccctcacctttaccctcctgaagaactcatttactttctagacaggtccagcaagacttccccagacatttcacatcagcaagctgccgccctccttcgcacttatttaaaaaacctttctccttatatcaactctactccccccatatttggacctctcacaacacaaactactattcctgtggccgctcctttgtgtatctcttggcaaagacccactggaattcccctaggtaatctttcaccttctcgatgttcctttactcttcatctccgaagtccaactacaaacatcaatgaaacaattggagccttccagctccatattacagacaagccctctatcaatactgacaaacttaaaaacattagcagtaattattgcttaggaagacacttgccctgtatttcactccatccttggctatcttccccttgctcatcagactctcctcccaggccctcttcttgtttacttatacccagccccgaaaataacagtgaaagattgctcgtagatactcgacgttttctcatacaccatgaaaatcgaaccttcccctctacgcagttaccccatcagtccccattacaacctctgacagctgccgccctagctggatccctaggagtctgggtacaagacacccctttcagcactccttctcacctttttactttacatctccagttttgcctcgcacaaggtctcttcttcctctgtggatcctctacctacatgtgcctacctgccaattggacaggcacatgtacactagtcttccttacccccaaaattcaatttgcaaatgggaccgaagagctccctgttcccctcatgacaccgacacaacaaaaaagagttattccactaattcccttgatggtcggtttaggactttctgcctccactgttgctctcggtactggaatagcaggcatttcaacgtctgtcatgaccttccgtagcctgtctaatgacttctctgctagcatcacagacatatcacaaactttatcagtcctccaggcccaagttgactctttagctgcagttgtcctccaaaaccgccgaggccttgacttactcactgctgaaaaaggaggactctgcatattcttaaatgaggagtgttgtttttacctaaatcaatctggcctggtgtatgacaacattaaaaaactcaaggatagagcccaaaaacttgccaaccaagcaagtaattacgctgaacccccttgggcactctctaattggatgtcctgggtcctcccaattgttagtcctttaatacccatttttctccttcttttatttggaccttgtatcttccgtttagtttctcaattcatccaaaaccgtatccaggccatcaccaatcattctatacgacaaatgtttcttctaacatccccacaatatcaccccttaccacaagacctcccttcagcttaa

SEQ ID NO: 120813 - DNA, 1158 bp, Homo sapiens
atgcaggttgccactcgccccgggaagggggagatcaacaggtgggggtctctgcccgggcgatcactctccatggaggacagccccgattgtgccctggggactgtgcaatcccgtattgtctcggagtgttcacaacaaagagctttgtccctgaggactgcccgagggcagaggaggaggagagagaagcagcaaatgaattcccaggttgggaaggaaggagctctgacctccagccctctggcgttaaagataaatcctctacagttcccatccaaacggcatccattactcacaatcagaattgggtggggacctagattccactcccaggaatctcctctgggccaggtacaaaattctgagctacaaccagatgaacagtacttcccaacaacacacagagaggttaatccaagggagaaaaacctgggtcaaatgaaaagatcgaggcttgcagacctcattaagcacagtgcctccctttacacgcagctaccaaacacaccctcagctctctgctgcccacagctgaggttcccagaagagcaaatgctgctgatccggaccgaagttagtctcttcccgctggaagtggcaatgagccaggataaatgtacatgcttcccagactccttgcaggaagggatggccaaagccacacaatcagaagttgttgggtggagattctgggaaaactctttaaaaggagccgacacaacactccttcagctatactcactctttgttgagtctcccacaattaccattgttcctggcccggacttcaatccggcctcccacattattccggataccacacctgaccctcatgactgcatctctctgatccacctgactttcaccccatttccccacatttccttcttccctgtttctcatcctgatcacacttggtttactgatggcagttccaccaggcctaattgccactcaccagcaaaggcaggatatgcaatagtatcttccacatctgttattgacgctaccgctctgcccccctccactacctctcagcaagccgaaccagctgccttaactcaggccctcactcttgcaaaaaggctaggcatcaatatttatactgactctaaatatgcctttcatatcctgcaccaccatgctgttatatag

SEQ ID NO: 120814 - DNA, 346 bp, Homo sapiens
ttcctcatacttgatgcatatactttctgcccccaatctccttcagctatactcactctttgttgagtctcccacaattaccattgttcctggcccggacttcaatctggcctcccacattattctggataccacacctgacccccatgactatctctctgatccacctgacattcactccatttccccatatttccttctttcctgttcctcaccctggtcacacttggtttaacgacggcagttccaccaggcctaatcgccattcaccagcaaaggcaggccatgctatagtattttccacatctatcatcgaggctactgctctgcccccctccactacctt

SEQ ID NO: 120815 - DNA, 1238 bp, Homo sapiens
agccatttatcagctcaaggagccttttggcagagccttcaggattttctaggtataaaatcatatcatcagtgaagagagataatttcagtctgtggtctgacaggaaccgggccacacagcaggaggtgagtggcaggtgactgagtgaagcctcatctgtatacaggaaaaggaggtgagattaacagagtgacttgtcagctagtcagcacggcttgtttccacttgctacagaggtgaggagtagtggtgctgccagctgccctgatagtgactccatctgccctgcccccaccatcgccccaggccgtgccacacctccccaagccaactgctgggcttctgaaggcaccctgagataccaagcgttacctggcaaccgcgcacctgtgagccaggtcagccaggcaggtggtgctaacctgtgtgttcagcagcccaagaaacatctcaccaatttcaaatccggtaagcggcctctttttactctcttctccaacctccaaggaccgagatcgcgtcctgtagcctttttgtccaaacaacttgaccttactgttttaggctggccatcatgtctccgtgcagcagctgctgccgccctaatagttttagaggcccttaaaatcacaaactatgctcaactcactctctacagctctcataatttccaaaatctattttcttcctcccacctgacgcatatactttctgctccccggctccttcagctgtactcactctttgttgagtctcccacaattaccaatgttcctggcccagacttcaatccggcctcccacattattcctgataccacacctgaccctcatgactgcatctctctgatccacctgacgttcaccccatttccccacatttccttcttccctgtttctcaccctgatcacacttggtttattgatggcagttccaccaggcctaatcgccacacaccagcaaaggcaggctatgctatagtacaagccaatagcccgcctcttagaacctctcatatcctttccatcgtggaaatgtatcctcaaggaaataacttctcagtgttccatctgctattctactactcctcagggattattcaggccccctcccttccctacacatcaagctcagggatttgccaccgcctaggactggcaaatcagcgttactcaacatgccccgagtcaggaaactaaaatacctcttggtctaggtagacactttcactggat

SEQ ID NO: 120816 - DNA, 234 bp, Homo sapiens
atggaaaagcagtcatcttttgaggggaagggggtagttcagtatggctgggtctgcgagcatgaggttacattccagctgcagctcttgtctcctagcagcagcattgtcccagcatttaacacggggaccatcacacaagtcattaaagttctgaaccctcagaagaggaactactgttgccagaatgaagaagtaaatagcaatgcttatgcctactatccctttaattaa

SEQ ID NO: 120817 - DNA, 837 bp, Homo sapiens
atgcccaaggcccttgggccctataactactgggttggaatgcccccgtattccttcttactgtttgccaaatcacccgaaattcatactggagtgaagccttatatgtgtaatgagtgcggcaaagccttcagtgtgtattcaagcctaactacccatcaggtcatccatactggagaaaaaccttacaaatgtaatgagtgtggcaaggtcttcactcagaattcacaccttgcaagacatcggggaattcatactggagagaaaccttataaatgtaatgaatgtggcaaggtctttaggcataattcatacctttcaaggcatcagcgaattcatactggagagaaaccttacaagtataatgagtatggcaaagcctttagtgaacattcaaacctaactacccatcaggtcatccatactggtgaaaaaccttacaaatgtaatgagtgtggcaaggtcttcactcagaattcacaccttgcaagacatcggagagttcatactggaggtaaaccttaccagtgtaatgaatgtggcaaagcctttagtcaaacatcaaagcttgcaaggcatcagagagttcatactggagagaaaccatatgagtgtaatcagtgtgggaaagcctttagtgtccgttcaagcctaactacccatcaggcaatccatacggaaatctgtccagggtactactggggaccccacgtcctcaaggtacaagaagcgcacggggaccttgggaaggtcgctagacggttaacaacatacaccaggagcagaaacgtcacgcgtctgcgcgtagcggacccacatcagcgtctcagtgtctga

SEQ ID NO: 120818 - DNA, 854 bp, Homo sapiens
cccgggtcgacccacgcgtccgggggtttctgggtggggggccaacagagtggtgtcagtttcagccccagatagaggagtacgcaggcccagcatgaggcaaccttgacccagaaggtggcccagctatccttgatgaaggtcttttccagttctgctccctcatagctgtgtaaccaaaggctctggttagagaatatgaagggccttagcttttagacctgttctacctcctcaccaaatataatggcagacccatgtgtgtctggaatggccttgaattgctctttccttaaaatagctagctcttcaggagagtatctaaggcccactccatcttacctgaaccaggtggtaagggtaaccatgacatagagtgaggcaaggaagaagacgaagtggaacggcacgaatagttgtaggaaacgatgctggacttggacttggaggaagctggaggggtttcttggtcagctggcctcgcagccccacccctttgccctggagagaggaaatggctgctgggagcagagctgcttgaaacacctcttccccctctcccccaactacctttgttaaggctcttgagggttcttatggcactccacagagatctaccacttcttatggttcctcacttggcactccacctttgtctgcctccactgtttcagggcagcagaaacacagtgaagggcttcttgcaaaacagaacgcaggttttggaatggtcttaaaagatgtgagggtgttaatctaggaaacttaccccgtgaaaagattggtctagtattaaaaagtggaggcacacctgggttcaaattctatctccatcattataagggctgggcggg

SEQ ID NO: 120819 - DNA, 707 bp, Homo sapiens
gtggggacacaaaattgtgactgaaaccctgtaatgtctcaagtatgatattaagtcttttagatggcaggcctgatttttacagctacatagttcacctagccatgagaagtgataacaaaacatgtaaactagaatacctttcccagagggccaccagaagcaccggctcctctgcccagaaaatcctaatcagtgtatatacagctagcaccagctgtacatcatcttttttaaaagccaaaggggtgcagagggatcacgttgagaagctatccctggaggaactctgctccttgcaccttctgctaccaggcctcagcccccagacactccaggccatccctaggcgagtcctggtcggggcttgttcctgcctggcccctgaactgtcacgcctctcagcctgccagaccgcagcactgctgcagacctttcggaagccctcactgtgtttctgctgccctgaaacagtggaggcagacaaagggcaaaggggtggggctgcgaggccagctgaccaagaaacccctccagctcctccagtccaagtccagcatctttcctacaactattctgccttccacttcgtcttcttccttgcctcactctatgtcatggttacccttaccaactggttcagggactcggagatcatgcagcagaagcagaaaaaggcaaacgagaagaaggaggaacccaagtag

SEQ ID NO: 120820 - DNA, 779 bp, Homo sapiens
aaaactttttttttttttttttttggaaattacaaaagctactttttaaatactttggggttgagcccccacagggaattaaaaaaacactgggaaaaggttaaacccccttcacccccccgggaaatggccccaagggggaagagaggcttaccttgaaggggaaaggaaagcacccaaaaagggaccccgctgccaaaactccagggccaaagggaaatgcccatcgggtgcctgggaacctgtgaagcaactaacaggaggaaaaagcgaagccgtggtgggaactggctccccaggcaacacagggcgaagggcaacgagggttggacactgaagccacaaaagctacttggggttcctccttctttctcgttttgccttttttctggcttcttgcttgcattgatctcccgagtcccttgggggtagagatgatggggcactctgcttgcgggcggcagcagaaagcccgtcatctcggcgctttcccttaaccgagtcgctctgcttttttcataattcttctgggcgggcgagctcacgctggttaccgcccgggagggtggtcccgtgaagtagccgtgggcaaagggctcgatttccgggcaccgagtgtgagggtggccacagagcgcgcccagagaaacgccttgctagggaagctacggaaggtcaaagccggcgcctcgccggtggtgtttagggtgaacggaaagaaaagggcaaggagaagggctcgtgccgagttcctgcaggcgggtcaattgtgggggcgc

SEQ ID NO: 120821 - DNA, 605 bp, Homo sapiens
  misc_feature (1)...(605): n = a,t,c or g
agtgtggagaatgtacctcttgcctgaattctgagggcaatttttgtatacaattcaaacagtcaaaaacccaactgatgtctgatggtaccagcaggtttacctnnaagggaaaatcaatatatcactttggtaataccagcaccttctgtgaatacacaatgataaaggaaatctcagttgccaagattgatgcagtcgctcctctagagaaagtatgcctaattagctgtggcttttccactgggtttggtgctgcaatcaatactgccaaggtgactccaggttctacctgtgctgtgtttggcctgggaggagtcggcttgtctgttgtcatgggttgtaaagcagcaggagcagccaggatcattggaagtggatgtcaacaaggagaaatttaagaaggcacaggaattgggtgctactgagtgcctcaaccctcaggacttaaagaaacccattcaagaagttttatttgatatgacagatgctggtatagacttctgctttgagggccattggaaatctggacgttccgggctggaagagcagacagcacatccctaaactgggttggctgattatatggccgagaaantggatcc

SEQ ID NO: 120822 - DNA, 870 bp, Homo sapiens
ttacattttggcatgattttgcagcggctggtagcggttgttcctttccatgtttagcgcttccttcaggagctctcttagggcaggcctggtggtgacaaaatctctcagcatttgcttgtctgcaaagtattttatttctccttcgcttatgaagcttagtttggctggatatgaaattctgggttgaaaattcttttctttaagaatgttgaatattggcccccactctcttctggcttgtagggtttctgccgagagatccactgttagtctgatgggctcccctttgagggtaacccgacctttctctctggctgcccttaacattttttccttcatttcaactttggtgaatctgacaattatgtgtcttggagttgctcttctcgaggagtatctttgtagcgttctctgtatttcctgaatctgaacattggcctgccttgctagattggggaagttctcctggataatatcctgcagagtgttttccaacttggttccattctccccatccctttcttccagttgatcgcatcggctcctgaggcttctgcattcttcacgtagttctcgagccttggttttcagctccatcagctcctttaagcacttctctgtattggttattctagttatacattcttctaaacctttttcaaagttttcaacttctttgcctttggtttgaatgtcctcccgtagctcagagtaatttgatcgtctgaagccttcttctctgagctcgtcaaagtcattctccatccagctttgttccgttgctggtgaggaactgcgttcctttggaggaggagagtcgctctgctttttagagtttccattttttctgttctgttttttccccat

SEQ ID NO: 120823 - DNA, 1410 bp, Homo sapiens; identical to SEQ ID NO: 118421

SEQ ID NO: 120824 - DNA, 1836 bp, Homo sapiens
atggagaatggctttgacgagttgagagaagaaggcttcagacgatcaaactactccgagctacaggaggaaattcaaaccaaaggcaaagaagttaaaaacattgaaaaaaatttagatgaatgtataactagaatacccaatacagagaagtgcttaaagaagctgatggagctgaaaaccaaggctcgagaactacgtgaagaatgcataagcctcaggagccgatgcgaccaactggaagaaagcgtatcagtgatggaagatgaaatgcatgaaatgaagcgagaagggaagtttagagaaaaaagaataaaaagaaatgaacaaagcctccaagaaatatgggactatgtgaaaagaccaaatctacgtctgattggtgtacctgaagacagatcaatgagacagaaagttaacaaggatacccaggaattgaactcagctctgcaccaagcggacctaatagacatctacagaactctccaccccaaatcaacagaatatacatttttttcagcaccacaccacacctattccaaaattgaccacatagttggaagtaaagctctcctcagcaaatgtaaaagaacagaaattataacaaactatctctcagaccacagtgcaatcaaactagaactcaagattaagaagctcactcaaaacttctcaactacatggaaactgaacaacctgctcctgaatgactactgggtacataacaaaatgaaggcagaaataaagatgttctttgaaaccaacgagaacaaagacacaacttaccagaatctctgggacacattcaaagcagtgtgtagagggaaatttatagcactaaatgcctacaagagaaagcaggaaagatccaaaattgacaccctaacatcacaattaaaagaactagaaaagcaagagcaaacacattcaaaagctagcagaaggcaagaaataactaaaatcagagcagaactgaaggaaatagagacacaaaaaacccttcaaaaaattaatgaatccaggagctggttttttgaaaggatcaacaaaattgatagaccgctagcaagactaataaagaaaaaaagagagaagaatcaaatagacgcaataaaaaatgacaaaggggatatcaccaccgatcccacagaaatacaaactaccatcagagaatactacaaacacctctacacaaataaactagaaaatctagaagaaatggataaattcctcgacacatacaccctcccaagactaaaccaggaagaagtggaatctctgaatagaccaataacaggatctgaaattgtggcaataatccatagcttaccaaccaaaaagagtccaggaccagatggattcacagcccaattctaccagaggtacaaggaggaactgaataaaatacctaggaatccaacttacaagggatgtgaaggacctcttcaaggacaactacaaaccactgctcaaggaaataaaagaggatacaaagaaatggaagaacattccatgctcatgggtaggaagaatcaatatcgtgaaaatgggcatactgcccaagcctctcggcttattggactgaaggcggaccatggtatgaatggaggctacaagcagcagttgacaagtgtttcaatacagattagcctaattttaaaggaatacaacacacaaaatatctccaaagcaaccatgaaaggtcagcaaactagtgtgcttgagcagctgactttagctatcgtaaaatccatttgcatttctgtgaagatacacttagaatataaaccccctaattttgagccagtaaacaaaacagtaaaagagatttactga

SEQ ID NO: 120825 - DNA, 1206 bp, Homo sapiens
tcaggtagtgtgatgcctccagctttgttcttttggcttaggattgacttggctatgcgggctcttttttggttccatatgaactttaaagtagtttttttccaattctatgaagaaagtcattggtagcttgatggggatggcattgaatctataaattaccttgggcagtatggccattttcatgatattgattcttcctacccatgagcatggaatgttcttccatttgtttgtatcctcttttatttcattgagcagcagtttgtagttctccttgaagaggtccttcacgtcccttgtaagttggattcctaggtattttattctctttgaagcaattgtgaatgtgagttcactcatgatttggctctctgtttgtctattatcagtgtataagaatgcttgtgatttttgtacattgattttgtatcctgagactttgctgaagttgcttatcagcagttcctccttgtacctctggtagaatttggctgtgaatccatctggtcctggactctttttggttggtaagctattgactattgccacaatttcagagcctgttattggtctattcagagagtcaacttcttcctggtttagtcttgggagggtgtatgtgtcgaggaatttatccatttcttctagattttctagtttatttgcatagaggtgtttgtagtattttctgatggtagtttgtatttctgtgggatcggtggtgatatcccctttatcattttttattgcatctatttgattcttctctcttttcttctttactagtcttgctagtggtctatcaattttgttgatcttcatttcattcatttcatcttccatcactgataccctttcttccagttgatcgcatcgcctcctgaggcttctgcattcttcatgtatttctcgagtcttggctttcagctccatcagttcctttaagcaattctctgtattggttattctagttatacattcatctaaatttttttcaaagttttcatcttctttgcctttggtttgaatttcctcctgtagctcggagtagtttgatcttctgaagccttcttctctcaactcatcaaagtcattctccatccagctttgttccattgctggtgaggaactgcgttcctttggaggaggagaggtgctctgctttttagagtttccagtttttctactctgttttttccccat

SEQ ID NO: 120826 - DNA, 1710 bp, Homo sapiens
ttaatcgtgcttgttttccccttgcattttctgatgctttgacatcttactgtccttgctgacattggaggaattgcccttccctggaatagctaattccttgtagattctggatattagacctttgtcagatggatagattacaaaaatgctctcccgttctgtaggttgcctgtacactctgatgatagtttcttttgctgtgcagaagctctttagtttaattagatcccatttgtcaattttggcttttgttgccattgcttttggtgttttagtcatgaagtctttgtccatgactatgtcctgaatggtattacctaggttttcttctagggtttttatggttttaggttttacatttaaatctttaatccatcttgagttaatttctagtttattgagtgtttttagcatgaagcgatgttcagttttattgaaggccttttctgcatctattgagataatcatgtggtttttgtcgttggttctttggtctttgctgttgatgagtttttccttcagatggagtttttgcatggtcatcctttttcttgatgttgatgctattgctttctgtttgttagttttccttagaacagtcaggcacttctgcaggtctcctgaagtttgctgggggtccattccagaccctgtttgcctgggtatcaccagcagaggcttgggcagtatggccattttcacgatattgattcttcctacccatgagcatggaatgttcttccatttgtttgtatcctcttttatttcattgcgcagtggtttgtagttctccttgaagaggtccttcacatcccttgtaagttggattcctaggtattttattctctgcaagtcacaggggatgcgatggcttggcttgggctcagaggcctgatattcctgccttcttatattaataagaaaaataacacaaaatagtgttgaagtgttggggcggcgaaaatttttgggcggtggtatggagagagaatgggtgatgtttctcagggctgcttcaagcgggattaggggcagcgtgggaaccaatttcaaatccgagtcacggcaccaaatttcatgtgcgtctgtgtgaagagaccaccaaacaggctttgtgtgagcaataaagctgtttatttcacctgggtgcaggtaggctttcagatttttgaaaagcctgaacccattgaagagatatgcaaggtatgttggaggccgatggcttagagaggattgggcctttgagaggctaaggtaagcttttatttgaattgatattctaatacaaagagttagatgctcagttattaaatcaaattctggattagcctgatgagaatggagtttttttaataagcaatcttccagttgatcgcatcggctcctgaggcttctgcattcttcacatagttctcgagccttggttttcagctccatcagctcctttaagcacttctctgtattggttattctagttatacattcttctaaatttctttcaaagttttcaacttctttgcctttggtttgaatgtcctcccgtagctcagagtaatttgatcgtctgaagccttcttctctcagctcgtcaaagtcattctccatccagcttttttccgttgctggtgaggaactgcgttcctttggaggaggagaggtgctctgctttttagagtttccagtttttctgttctgttttttccccat

SEQ ID NO: 120827 - DNA, 2796 bp, Homo sapiens
atggagaatgactttgatgagttgagagaagaaggcttcagacgatcaaactactccgagctacaggaggaaattcaaaccaaaggcaaagaagttgaaaactttgaaaaaaatttagatgaatgtataactagaataaccaatacagagaagtgcttaaaggagctgatggagctgaaagccaaggctcgagaactacgtgaacaatgcagaagcctgaggagcctatgcgatcaactggaagaaagggtatcagtgatggaagatgaaatgaatgaaatgaaacacagactggcaaattggataaagagtcaagacccatcagtgtgctgtattcaggaagcctatctcacatgcagagacacacataggctcaaaataaaaggatggaggaagatctaccaagcaaatggaaaacaaaaaaaggcaggggttgcaatcctagtctctgataaaacagactttaaaccaacaaagatcaaaagagacaaagaaggcctttacataatggtaaagggatcaattccacgagaagagctaactatcctaaatatatatgcacccaatccagaagcacccagattcacaaagcaagtcctgagtgacctacaaagagacgtagactcccacacaataatactgggagactttaacaccccactgtcagcattagacagatcaatgagacagaaagttaacaaggatacccaggaattgaactcagctctgcaccaagcggacctaatagacatctacagaactctccacccaaaatcaacagaatatacatttttttcagcaccacaccacacctattccaaaattgaccacagagttggaagtaaagctcttctcagcaaatgtaaaagatcagaaattataacaaactgtctctcagaccacagtgcaatcaaactagaactcaggattaagaaactcactcaaaactgctcaactacatggaaactgaacaacctgctcctgaatgactactgggtacataacgaaatgaaggcagaaataaagatgttctttgaaaccaatgagaacaaagacacaacataccataatctctgggacacattcaaagcagtgtgtagagggaaatttatagcactaaatgcccacaagagaaagcaggaaagatccaaaattgacaccctaacatcacaattaaaagaactagaaaagcaagagcaaacacattcaaaagctagcagaaggcaagaaataactaaaatcagagcagaactgaaggaaatagagacacaaaaaacccttcaaaaaattaatgaatccaggagctggttttttaaaaagatcaacaaaattgatagaccgctagcaagactcataaagaagaaaagagagaagaatcaattagactcaataaaaaatgataaaggggatatcaccacctatcccacagaaatacaaactacaatcagagaatactacaaacacctctacacaaataaactagaaaatctagaaaaaatggataaattcctcgacacatacaccctcccaagactaaaccaggaagaagttgaatctctgaatagaccaataacaggatctgaaattgtggcactaatcaatagcttaccaaccaaaaagagtccaggaccagatggattcacagccgaattctaccagagcatcatcctgataccaaagccgggcagagacacaaccaaaaaagagaattttagaccaatctccttgatgaacattgatgcaaaaatcctcaataaaatactggcaaaccgaatccagcagcacatcaaaaagcttatccaccatgatcaagtgggcttcattgctgggatgcaaggctggttcaatatatgcaaatcaataaatgtaatccagcatataaacagaaccaaagacaaaaaccacatgattatctcaatagatgcagaaaaggcctttgacaaaattcaacaacccttcatgctaaaaactctcaatgaattaagtattgatggaacgtatctcaaaataataagagctatctatgacaaacccacagccaatatcatactgaatgggcaaaaactggaagtattccctttgaaaactggcacaagacagggatgccctctctcaccactactattcaacatagtgttggaagttctggccatggcaattaggcaggagaaggaaataaagggtattcaattaggaaaagaggaagtcaaattgtccctttttgcagatgacatgattgtatatctagaaaaccccatcgtctcagcccaaaatctccttaagctgataagcaacttcagcaaagtctcaggatacaaaatcaatgtacaaaaatcacaagcattcttatacaccaataacagacaaacagagagccaaatcatgagtgaactcccattcacaattgctttaaagacaataaaatacctaggaatccaactgacaagggacgtgaaggaccttttcaaggagaactacaaaccactgcttaatgaaataaaagaggatacaaacaactggaagaacattcatgctcatggtgcagctgccccactcccacttggacacgatggccacagaacagttcctctgagagaccaattcccggagggcagcaacaagcttttggcagttgtcactaccactgcttctgcccctaccgtgcacagaccagcacagcttaggggacttgccctcctcagtgaaaggcttatagcctatagctgcccttccctggtgaacattttaactgcagcccagagaccttctgaaaacccaactcccacagacctgtga

SEQ ID NO: 120828 - DNA, 2784 bp, Homo sapiens
ttagttccatatgaactttaaagtagttttttccaattctgtgaagaaagtcattggtagcttgatggggatggcattgaatctgtaaattcccttgggcagtatggccattttcacaatattgattcttcctacccatgagcatggaatgttcttccatttgtttgtatcctcttttatttcctggagcagtggtttgtagttctccttgaagaggtccttcacatcccttgtaagttggattcctaggtattttattctctttgaagcaattgggaatgggagttcactcatgatttggctctctgtttgtctgttattggtgtataagaatgcttgtgatttttgtacattgattttgtatcctgagactttgctgaagttgcttatcagcttaaggagattttgggctgagacaatggggttttctagatatataatcatgtcatctgcaaacagggacaatttgacttcctcttttcctaattgaataccctttatttccttctcctgcctaattgccctggccagaacttccaacactatgttgaataggagtggtgagagagggcatccctgtcttgtgccagttttcaaagggaatgcttccagtttttgcccattcagtatgatattggctgtgggtttgtcatagatagctcttattattttgaaatacgtcccatcaatacctaatttattgagagtttttagcatgaagggttgttgaattttgtcaaaggctttttctgcatctattgagataatcatgtggtttttgtcttttgctctgtttatatgctggattacatttattgatttgcgtatattgaaccagccttgcatcccagggatgaagcccacttgatcatgggggataagctttttgatgtgctgctggattcgttttgctagtattttattgaggatttttgcatcaatgttcatcaaggatattggtctaaaattctctttttttgttgtgtctctgcctggctttggtatcagaatgatgctggcctcataaaatgagttagggaggattccctctttttctattgattggaatagtttcagaaggaatggtaccagttcctccttgtacctctggtagaattcggctgtgaatccatctggtcctggaatctttttggttggtaagctattgattattgccacaatttcagagcctgttattggtctattcagggattcaacttcttcctggtttagtcttgggagagtgtatgtgtccaggaatttatccatttcttctagattttctagtttatttgcatagaggtgtttgtagtattccctgatggtagtttgtatttcagctcctggattcattaattttttgaagggtttttttgtctctatttccttcagttctgctctgatattagttatttcttgccttctgctagcttttgaatgtgtttgctcttgcttttctagttcttttaattgtgatgttagggtgtcaattttggatctttcctgctttctcttgtgggcatttagtgctataaatttccctctacacactgctttgaatgcgtcccagagattctggtatgttgtgtctttgttctccttcgtttcaaagaacacctttatttctgccttcacttcgttatgtacccagtagtcattcaggagcaggttgttcagtttccatgtagttgagtggttttgagtgagattcttaatcctgagttctagtttgattgcactgtggtctgagagatagtttgttataatttctgttcttttacatttgctgaggagagctttacttccaactatgtggtcaattttggaataggtgtggtgtggtgctgaaaaaaatgtatattctgttgatttggggtggagagctctgtagatgtctattaggtccgcttggtgcagagctgagttcaattcctgggtatccttcttgactttctgtctcgttgatgtgtctaatgttgacagtggggtgttaaagtctcccattattaatgtgtgggagtctaagtctctttgtaggtcactcaggacttgctttgtgaatcttggtgctcctgtattgggtgcatatatttttaggatagttagctcttcttgttgaattgatccctttaccattatgtaatggccttctttttctcttttgatctttgttggtttaaagtctttctctctggctgcccttaacattttttccttcatttccactttggtgaatctgacaattatgtgtcttggagttgctcttctcgaggagtatctttgtggcgttctctgtatttcctgaatctgaacgttggcctgccttgctagattggggaagttctcctggataatatcctgcagagtgttttccaacttggttccattctccccatcattcatttcattcatttcatcttccatcactgataccctttcttccagttgatcgcatcggctcctgaggcttctgcattcttcacgtagttctcgagccttggttttcagctccatcagctcctttaagcacttctctgtattggttattctagttatacattcttctaaatttttttcaaagttttcaacttctttgcctttggtttgaatgtcctcccgtagctcagagtaatttgatcgtctgaagccttcttctctcatctcgtcaaagtcattctccatccagctttgttccgttgctggtgaggaactgcgttcctttggaggaggagaggcgctctgctttttagagtttccagtttttctgttctgttttttccccat

SEQ ID NO: 120829 - DNA, 550 bp, Homo sapiens
atggggaaaaaacagaacagaaaaactggaaactctaaaaagcagagcacctctcctcctccaaaggaacgcagttcctcaccagcaacggaaaaaagctggatggagaatgactttgacgagctgagagaagaaggcttcagacgatcaaattactctgagctacgggaggacattcaaaccaaaggcaaagaagttgaaaactttgaaagaaatttagaagaatgtataactagaataaccaatacagagaagtgcttaaaggagctgatggagctgaaaaccaaggctcgagaactatgtgaagaatgcagaagcctcaggagccgatgcgatcaactggaagattgcttattaaaaaaactccattctcatcaggctaatccagaatttgatttaataactgagcatctaactctttgtattagaatatcaattcaaataaaagcttaccttagcctctcaaaggcccaatcctctctaagccatcggcctccaacataccttgcatatctcttcaatgggttcaggcttttcaaaaatctgaaag

SEQ ID NO: 120830 - DNA, 1661 bp, Homo sapiens
ctctggtagaattcggctgtgaatccatctggtcctggactctttttggttggtaagctattgattagtgccacaatttcagatcctgttattggtctattcagagattcaacttcttcctggtttagtcttgggagggtgtatgtgtcgaggaatttatccattttttctagattttctagtttatttgtgtagaggtgtttgtagtattctctgattgtagtttgtatttctgtgggataggtggtgatatcccctttatcattttttattgagtctaattgattcttctctcttttcttctttatgagtcttgctagcggtctatcaattttgttgatctttttaaaaaaccagctcctggattcattaattttttgaagggttttttgtgtctctatttccttcagttctgctctgattttagttatttcttgccttctgctagcttttgaatgtgtttgctcttgcttttctagttcttttaattgtgatgttagggtgtcaattttggatctttcctgctttctcttgtgggcatttagtgctataaatttccctctacacactgctttgaatgtgtcccagagattatggtatgttgtgtctttgttctcattggtttcaaagaacatctttatttctgccttcatttcgttatgtacccagtagtcattcaggagcaggttgttcagtttccatgtagttgagcagttttgagtgagtttcttaatcctgagttctagtttgattgcactgtggtctgagagacagtttgttataatttctgatcttttacatttgctgagaagagctttacttccaactctgtggtcaattttggaataggtgtggtgtggtgctgaaaaaaatgtatattctgttgattttgggtggagagttctgtagatgtctattaggtccgcttggtgcagagctgagttcaattcctgggtatccttgttaactttctgtctcattgatctgtctaatgctgacagtggggtgttaaagtctcccagtattattgtgtgggagtctacgtctctttgtaggtcactcaggacttgctttgtgaatctgggtgcttctggattgggtgcatatatatttaggatagttagctcttctcgtggaattgatccctttaccattatgtaaaggccttctttgtctcttttgatctttgttggtttaaagtctgttttatcagagactaggattgcaacccctgcctttttttgttttccatttgcttggtagatcttcctccatccttttattttgagcctatgtgtgtctctgcatgtgagataggcttcctgaatacagcacactgatgggtcttgactctttatccaatttgccagtctgtgtttcatttcattcatttcatcttccatcactgataccctttcttccagttgatcgcataggctcctcaggcttctgcattgttcacgtagttctcgagccttggctttcagctccatcagctcctttaagcacttctctgtattggttattctagttatacattcatctaaatttttttcaaagttttcaacttctttgcctttggtttgaatttcctcctgtagctcggagtagtttgatcgtctgaagccttcttctctcaactcatcaaagtcattctccat

SEQ ID NO: 120831 - DNA, 2094 bp, Homo sapiens
atggggaaaaaacggagcagaaaaactggaaactctaaagagcagagcgcctctcctccaaaggaacccagctccttaccagcaatggaacaaagctggatggagaatgactttgacgagttgagagaagaaggcttcagacgatcaaactactctgagctacaggaggaaattcaaaccaaagacgaagaagttgaaaactttgaaaaaaatttagatgaatgtataactagaagaaccaatacggagaagtgcttaaaggaggtgatggagctgaaagccaaggctcgagaactacctgaagaatgcagaagcctaaggagccgatgcgatcaactggaagaaagggtatcagtgatggaagatgaaatgaatgaaatgaatgcaatcaaactagaactcaggattaagaaactcactcgaaactgctcaactacatggaaactgaacaacctgctcctgaatgactactgggtacataacgaaaagaaggcagaaataaacatcttctttgaaaccaacgagaacaaagacacaacataccagaatctctgggacgcattcaaagcagtgtgtagagggaaatttatagcactaaatgcccacaagagaaagcaggaaagatccaaaattgacaccctaacatcacaattaaaagaactagaaaagcaagagcaaacatattcaaaagctagcagaaggcaagaaataactaatatcagagcagaactgaaggaaatagagacacaaaaaacccttcaaaaaattaatgaatccaggagctggttttttgaaaggatcaacaaaattgatagaccactagcaagactaataaagaagaaaagagagaagaatcaaatagacgcaataaaaaatgataaaggggatatcaccaccgatcccaccgaaatacaaactaccgtcagagaataccacaaacacctctatgcaaataaactagaaaatctagaagaaatggataaattcctcgacacatacaccctcccaagactaaaccaggaagaagttgaatctctgaatagaccagtaacaggctctgaaattgtggcaataatcaatagcttaccaaccaaaaagcgtccaggaccagatggattcacagccgaattctaccagaggtacaaggaggaactggtaccattccttctgaaactattccaatcaatagaaaaagagggaatcctccctaactcattttatgaggccagcatcatcctgataccaaagccgggcagagacacaaccaaaaaagagaattttagatcaatatccttgatgaacattgatgcaaaaatcctcaataaaatactggcaaacagaatccagcagcacatcaaaaagcttatccaccatgatcaagtgggcttcatccctgggatgcaaggctcgttcaatatacgcaaatcaataaatgtaatccagcatataaacagaaacaaagacaaaaaccacacgattatctcaatagatgcagaaaaggcctttgacaaaattcaacaacccttcatgctaaaaactctcaataaattagtgttggaagttctggccagggcaatcaggcaggagaaggaagtaaagggtattgaattaggaaaagaggaagtcaaattgtcccagtttgcagaagacatgattgtatatctagaaaaccccattgtctcagcccaaaatctccttaagctgataagcaacttcagcaaagtctcaggatacaaaattaatgtacaaaaatcacaagcattcttatacaccaataacagacaaacagagagccaaatcatgagtgaactcccattcacaattgcttcaaagagaataaaataccttggaatccaacttacaagggacgtgaaggacctcttcaaggagaactacaaaccactgctcaatgaaataaaagaggatacaaacaaatggaagaacattccatgctcacgggtagaaagaatcaatatcgtgaaaatggccatactgcccaaggtaatttatagattcaatgccatccccatcaagctaccaatgcctttcttcacagaattggaaaaaactactttaaagttcatatggaactaa

SEQ ID NO: 120832 - DNA, 1458 bp, Homo sapiens
atgcagagtgcctctcctcctccaaaggaactcagttcctcactagcaatggagcaaagctggacggagaatgactttgatgagctgagagaagaagtcttcagacgatcaaattactccgagctacgggaggaaattcaaaccaaaggcaaagaagttgaaaactttgaaaaaagtttagaagaatatataactagaataaccaatacagagaagtgcttaaaggagctgatggagctgaaaaccaaggctcgagaactacgtgaagaatgcagaagcctcaggagcagatgcgatcaactggaagaaagggtatcagtgatggaagatgaagtgaatgaaatgaagcgagaagggaagtttagagaaaaaagaagcaagcaaagcctccaagaaatatgggactatgtgaaaagaccaaatctacatctcattggtgtacctgaaagtgatggggagaatggaaccaagttggaaaacactctgcaggatattatccaggagaacttccccaatctagcaggcaggccaactccatatctggtgcttttcagtcgtctgggaaattatcctgcccagtggctggatgagtctctggcgcgtggcgaattaatggaatactgggcgcatgaagcctgctttatgccgcgtagcgactttcgtcttattcgccaccgcatgctggcacctgaaaaaatgggctggaaatacaaagacgcctggatgcaggaacatgaggcggaaattgcacagttaattcagcatattcatgataaggggccgatccaagattttcccatggggctacgtctagatttgacacaagttatttctctaatggccaaggttttgaggttacgctctaagaaaggaaagcattattctgtaggaaccaatgacaaaagccacatgattatctcaatagatgcaaaaaaggccttccacaaaatccaacagcctttcatgctaaaaactctcaataaactaggtattgatggaacatacctcaaaataataagagctatttatgacaaacccacagccagtatcatactgaatgggcaaaagctggaagcattccctttgaaaactagcacaagacaagaatgccctctctcaccactcctattcaacacagtgttggaagctctggccagcgcaatcaggcaagagaaagaaataaagcgtattcaattaggaaaagaggaagtcaaattgttcctgtttgcagatgacatgattgtatatttagaaaaccccattgtctcagcccaaaatctccttgagctgctaaacaacttcagcaaagtctcaggatacaaaatcaatgtgcaaaaatcacaagcattcctatacaccattaacagacaaacagagagccaaatcatgagtgaactcccattcacaattgctacaaagagaataaaatacctaggaatccaacttacaaggatgtga

SEQ ID NO: 120833 - DNA, 627 bp, Homo sapiens
atggggaaaaaacagaacagaaaaactggaaactctaaaacgcagagcgcctctcctcctccaaaggaacgcagttcctcaccagcaacagaacaaagctggatggagaatgattttgacgagctgagagaagaaggcttcagacgatcaaattactctgagctacgggaggacattcaaaccaaaggcaaagaagttgaaaactttgaaaaaaatttagaagaatgtataactagaataaccaatacagagaagtgcttaaaggagctgatggagctgaaaaccaaggctcgagaactacgtgaagaatgcagaagcctcaggagccgatgcgatcaactggaagaaaggatttctatagtagttgatggtggaaagaaggtggtggaatttatgtttcaagccacagagggagatgtgttgaactacatttttagaaatcgagaactccgtcctttgtttgatcgtcagtggcacaaacttggcattagtatacaatcccaggtcatttcactttatatggattgtaatttaattgcgaggaggcagactgatgaaaaggacactgtggatttccatggacggacagttattgctacgcgagcttcagatggcaagcctgtggat

SEQ ID NO: 120834 - DNA, 1296 bp, Homo sapiens
tcaaaaccagttctcatccgggttttgccctttaccaacttcatccgtttcacgtacaacattttttagaaccatgcttccccaggcatccggaatttgttcctccatccacggggactgagagccattactattgctgtattctgtaagcaaaatacgtacatcaggctcgaaccctttaagatcaacgttcttgagcagatcacgaagcatatcgaaaaactgcagtgcggaggtgtagtcaaacaactcagcaggcgtgggaacaatcagcacatcagcagcacatacgacattaatcgtgccgatacccaggttaggcgcgctgtcaataactatgacatcatagtcatgagcaacagtttcaatggccagtcggagcatcaggtgtggatcggtgggcagtttaccttcatcaaatttgcccattaactcagtttcaatacggtgcagagccagacaggaaggaataatgtcaagccccggccagcaagtgggctttattgcataagtgacatcgtccttttccccaagatagaaaggcaggagagtgtcttctgcatgaatatgaagatctggtacccatccgtgatacattgaggctgttccctgggggtcgttaccttccacgagcaaaacacgtagccccttcagagccagatctttttctaattggttataggcagtgccagaaataagccttgctagattggggaagttctcctggataatatcctgcagcgtgttttccaacttgcttccattctccccatcactttcaggtacacccatcagatgtagatttggtcttttcacatagtcccatatttcttggaggctttgctcatttctttttattcttttttctctaaacttcccttctcgcttcatttcattcatttcatcttccattgctgataccctttcttccagttgatcgcatcggctcctgaggcttctacattcttcatgtagttctcgagccttggttttcagctccatcagctcctttaagcacttctctgtattggttattctagtcatacattcttctaaatttttttcaaagttttcaacttctttgcctttggtttgaatgtcctcctgtagctcagagtaatttgatcgtctgaagccttcttctctcagggggatcttgcaagtgcagggctgacaggaatccacgaggacggcttctgttgctggagaggcttcacgaagtttccaatcaaggcgacaggtgatgggtagccagcatatcccatagcaggagcaagcataaggtgaaagtgccat

SEQ ID NO: 120835 - DNA, 895 bp, Homo sapiens
cttgtggttttatgttatggagacaccttctttccttaaacgtcatgaaccgatctctgccagtttcaaactttccttctgcagcttcctcacctctttcaggctttacagaattgatgagagttaaagccttactctggattaggctttggtttaagggaatattgtggctagttagatcttctttctctctggctgcccttaacattttttccttcatttcaactttggtgaatctgacaattatgtgtcttggagttgctcttctcgaggagtatctttgtggcattctctgtatttcctgaatctgaatgttggcctgccttgctagattggggaagttctcctggataatatcctgcagagtgttttccaacttggttccattctccccgtcactttcaggtacaccaatcagacgtagatttggtcttttcacatagtcccatatttcttggaggctttgttcgtttctttttattcttttttctctaaacttcccttctcgcttcatttcattcatttcatcttccatcactgataccctttcttccagttgatcacatcggcccctgaggcctctgcattcttcatgtagttctcgagccttggctttcagctccatcggctcctttaagcacttcactgtattggttattgtagttatacattcatctaaatttttttcaaagtttttaacttctttgcctttggtttgaatttcctcctgtagctcggagtagtttgatcgtctgaagccttcttctctcaactcgtcaaagtcattctccgtccagctttgttctgttgctggtgaggaactgcattcctttggaggaggagaggcactctgctttttagagtttccagtttttctgctctgttttttccccat

SEQ ID NO: 120836 - DNA, 3570 bp, Homo sapiens; identical to SEQ ID NO: 116242

SEQ ID NO: 120837 - DNA, 1464 bp, Homo sapiens
ctataatttcacgatattgattattcctacccatgagcatggaatgttcttccatttgtttatatcctcttttatttccttgagcagtggtttgtagttctccttgaagaggtccttcacgtcccttgtaagttggattcctaggtattttattctctttgaagcaattgtgaatgggagttcactcatgatttggctctctgtttgtctgttattggtgtttaagaatgcttgtgatttttgtacattgattttgtatcctgagactttcctgaagttgctttccagcttaaggagattttgggctgagacagtggggttttctagatatacaatcatgtcatctgcaaacagggacaatttgacttcctcttttcctaattgaatacactttatttccttctcctgcctaattgccctggccagaacttccaacactatgttgaataggagtggtgagagagggcatccctgtcttgtgccagttttcaaagggaatgcttccagtttttgcccattcagtatgatattggctgtgggtttgtcatagacagctcttattattttgagatatgtcccatcaatacctaatttattgagagtttttagcatgaagcgttgttggattttgtcaaaggccttttctgcatctattgagataatcatgcggtttttgtctttggttctctttatatgctggattacatttattgatttgtgtatattgaaccagccttgaatcccagggatgaagcccacttgatcatggtggataagctttttgatgtgctgctggattcggtttgccagtattttattgaggatttttgcatcaatgttcatcaaggatattggtctaaaattctcttttttggttgtgtctctgcccagctttggtatcaggatgatgctgccctcataaaatgagttagggaggattccctctttttctattgattggaatagtttcagaaggaatggtaccagttcccccttgtacctctggtagaattcggctgtgaatccatctggtcctggactctttttggttggtaagctattgattattgccacaatttcagagcctgttattggtctattcagagattcaacttcttccctttcttccagttgatcgcatcggctcctgaggcttctgcattcttcacgtagttctcgagccttggttttcagctccatcagctcctttaagcacttctctgtattgattattctagttatactttcatctaaatttttttcaaagtttttaacttcttccccttcggtttgaatttcctcctgtagcttggagtagtttgatcgtctgaagccttcttctctcaactcgtcaaagtcattctcagtccagctttgttccgttgctggtgaggaactgtgttccacctccccatttcccatcctctctgcattttgccttcggtcttctgtggctcccctcat

SEQ ID NO: 120838 - DNA, 594 bp, Homo sapiens
atggagaatgacttcggtgaattgagagaagaaggcttcagacgatcaaaccactctgagctacaggaggaaattcaaaccaaaggcaaagaagttgaaaacattgaaaaaaatttagatgaatgtataactagaataaccaatacagagaagtgcttaaaggagctaatggagctgaaagccaaggctcgagtactacatgaagaatgcagaagcctcaggagccgatgcgatcaactggaagaaaggacaaccacatgccaggcagccagttctctttcaattgaagaaatgcaagttgagcctctaaaggctgggggagtttgtattaaggtgactccaggttctacctgtgctgtgtctggcctgggaggagtcggcttgtctgttgtcatgggttgtaaagcagcaggagcagccaggatcattggagtggatgtcaacaaggagaaatttaagaaggcacaggaattgggtgctactgagtgcctcgaccctcaggacttaaagaaacccattcaagaagttttatttgatatgacagatgctggtatagacttctgctttgaggccattggaaatctggacgttctg

SEQ ID NO: 120839 - DNA, 1425 bp, Homo sapiens
atggggaaaaaacagagcagaaaaactggaaactctaaaaggcagagcgcctctcctcctccaaaggaacgcagttcctcaccagcaatggaacaaagctggatggagaatgactttgacgagctgagagaagaaggcttcagacgaacaaactactctgagctacaggagggaattcaaaccaaaggcaaagaagttaaaaactttgaaaaaaatttagacgaatgtataactagaataaccaatacagagaagtgcttaaaggagctgatggagctgaaagccaaggctcgagaactacgtgaagaatgcagaagcctcaggagccgatgcgatcaactggaagaaaggcaccacaccacacctattccaaaattgaccacatacttggaagtaaagctctccccagcaaatgtaaaagaacaagttataacaaactgtctctcagaccacagtgcaatcaaactagaactcaggattaagaaacccactcaaaacccctcaactacatggaaactgaacaacctgctcctgaatgactactgggtaaataaagaaatgaagtcagaaataaagatgttctttgaaaccaacgagaacaaaaacacaacataccagaatctctgggacgcattcaaagcagtgtgtagaggcaaatttatagcactaaatgcccacaagggaaagcaggaaagatccaaaattgacaccctaacatcacaattaagagaactagaaaagcaagagcaaacacattcaaaagttagcagaaggcaagaaataactaaaatcagagcagaaccgaaggaaatagagacacaaaaaacccttcaaaaaattaatgaatccaggagctggttttttgaaaggatcaacaaaattgatagacggctagcaagactaataaagaagaaaagagagaagaatcagagagacgcaataaaaaatgatgaaggggatatcaccaccgatcccacagaaatacaaactaccatcagagaatactacaaacacctctatgcaaataaactagaaaatctaaaagaaatggataaattcctcaacacatacaccctcccaagactaaaccaggaagaagctgaatctctgaatagaccaatagcaggctctgaaattgtggcaataattaatagcttaccaaccaaaaagagtccaggaccagatggattcacagccgaattctaccagaggtacaaggagaaactggtatttggtgcaggttattttggaatgtgggccttggctgcacttcccagcaacttgctaaagctgtctcaactctgtcaggaggcagcagaagtgaacgtcctggtacaatttgtctgtatttgtcctgcacaggaacctaccgaaattgacgtgcttttttctgtgttaccccctctttcccttatcttaaactag

SEQ ID NO: 120840 - DNA, 1719 bp, Homo sapiens; identical to SEQ ID NO: 119497
  misc_feature (1)...(1719): n = a,t,c or g

SEQ ID NO: 120841 - DNA, 1098 bp, Homo sapiens
atgagggaaaaacattcagaccctcataacattgttctggaatccaatataagggacaagcactcagaacccagcagcattgttccagaatcctatgtgagggacaaacactcagaacccagcagcagtgttctggaatcctatgtgagccacaaacattcagaacttcatagcagagttctggaatcttatgtgagggacaaacactcagaacccagcagcagtgttctggaatcctatgtgagggacaaacactcagaacccagcagcagtgttctggaatcctttgtgagggacaaacattcagaacctcatagcagtgttctggaatcgtatgaatgcagttcctcaccagcaatggaaaaaagctgggcggagaatgactttgacgagttgagagaaggcttcagacgatcaaactactctgagctacaggaggaaattcaaaccaaaggcaaagaagttaaaaactttgaaaaaaatttagacgaatgtatatctagaataaccaatacagagaagtgcttaaaggagctgatggagctgaaagccaaggctcgagaactacgtgaagaatgcagaagattcaggagccgatgtgatcaactggaagaaagggatattatccaggagaactcccccaatatagcaaggcaggccaacattcagattcaggaaatacagagaatgccacaaagatactccttgaaaagagcgattccaagacacataattgtcagattcaccatagctgaaatgaaggaaaaaatgttaagggcagccagagagaaaggtcgggttacccacaaagggaagcccatcagactaacagtggatctcttggcagaaactctagaagccagaagagagtgggggccaatattaaacattcttaaagaaaagaattttcaatgcagaatttcatatccagccaaactaagcttcataagtgaaggagaaataaaatactttacagacaagcaaatgctgagagattttgtcaccaccaggcctgccctaaaagagctcctgaaggaagcactaaacatgaaaaggaacaaccagtaccagccgctgcaaaatcatgccaaaatgtaa

SEQ ID NO: 120842 - DNA, 1782 bp, Homo sapiens
atgaagaagaaagcacttagctgtgtctgcagacatcctcctggaagagcagatgtgggccttggctgtcaaaggacaagaaatatttgcatagcaacattacaggaagagcaaattgtatgtgtaaaggctcagaacaatgagaaagcattgcacagattgagaaccacagaactcaggattaagaaactcattcaaaaccgcacaactacctggaaactgaacaatctgctcctgaatgactacggggtaaataacgaaatgaaggcagaaataaacaagttctttgaaaccaatgagaacaaagacacaacttccccagaatctctgggacacagggagaaagcaggagagatccaaattgacaccctagaacaaagctggacggagaatgactttgacaagttgagagaagaaggcttcagacgatcaaactattccgagctacaggaggaaattcaaaccaaaggcaaagaagttaaaaaccttgaaaaaaatttagatgaatgtataactaaaataaccaatacagagaagtgcttaaaggagctgacggagctgaaagccaaggctcgagaactatgtgaagaatgcagaagcctcaggagccgatgcgatcaactggaagaaagggtatcagtgatggaagatgaaatgaatgaaatgaagcgagaagggaagtttagagagaaaagaataaaaggagacgaacaaagcctccaagaaatatgggactatgtgaaaagaccaaatctatgtctgattggtgtacctgaagacagatcaatgagacagaaagttaacaaggatacccaggaattgaactcagctctgcaccaagcggacctaatagacatctacagaactctccaccccaaatcaacagaatatacatttttttcagcaccacaccacacctattccaaaattgaccacatagttggaagtaaagctctcctcagcaaatgtaaaagaacagaaattataacaaactatctctcagaccacagtgcaatcaaactagaactcaagattaagaagctcactcaaaacttctcaactacatggaaactgaacaacctgctcctgaatgactactgggtacataacaaaatgaaggcagaaataaagatgttctttgaaaccaacgagaacaaagacacaacttaccagaatctctgggacacattcaaagcagtgtgtagagggaaatttatagcactaaatgcctacaagagaaagcaggaaagatccaaaattgacaccctaacatcacaattaaaagaactagaaaagcaagagcaaacacattcaaaagctagcagaaggcaagaaataactaaaatcagagcagaactgaaggaaatagagacacaaaaaacccttcaaaaaattaatgaatccaggagctggttttttgaaaggatcaacaaaattgatagaccgctagcaagactaataaagaaaaaaagagagaagaatcaaatagacgcaataaaaaatgacaaaggggatatcaccaccgatcccacagaaatacaaactaccatcagagaatactacaaacacctctacacaaataaactagaaaatctagaagaaatggataaattcctcgacacatacaccctcccaagactaaaccaggaagaagtggaatctctgaatagaccaataacaggatctgaaattgtggcaataatccatagcttaccaaccaaaaagagtccaggaccagatggattcacagcccaattctaccagaggtacaaggaggaactg

SEQ ID NO: 120843 - DNA, 3339 bp, Homo sapiens
atgggggtaggaccctctgatccaggtgtgggatatagtctcgtggtgcgccgttttttaagccggtctgaaaagcgcaatattcgcgtgggagtgacccgattttccagggattttgccgatttcggaaccaccatcaaacaggattttcgcctgctggggcaaaccagcgtggaccgcttgctgcaactctctcagggccaggcggtgaagggcaatcagctgttgcccgtctcactggtgaaaagaaaaaccaccctggcgcccaatacgcaaaccgcctctccccgcgcgttggccgattcattaatgcagctggcacgacaggtttcccgactggaaagcgggcaccggtctgaaaagcgcaatattcgcgtgggagtgacccgattttccagctgggtgaggcagcctttgagagagatggtagtgctcttggagagggtgtctacaatcaccttgggggcaacgacagatgagaacatgacatccaaaagggacaagaagggattttgccgatttcggacccaccatcaaacaggattttcgcctgctggggcaaaccagcgtggaccgcttgctgcaactctctcagggccaggcggtgaagggcaatcagctgttgcccgtctcactggtgaaaagaaaaaccaccttggcgcccaatacgcaaaccgcctctccccgcgcgttggccgattcattaatgcagctggcacgacaggtttcccgactggaaagcgggcagaagaattgcatgatgcatcctgtgaaggagatggttctgtcttccacaaccaagttctccagcagtttgggtgtaactgtggtggaataacagaaatcaacaaaggacaagtggctgaggaaaaagtacatgcgggtgtggagtttggggttgatcctgatgatcatgatcatgcccaggtttcccaatacagtgattgtgtagatgggccaggcggtgaagggcaatcagctgttgcccgtctcactggtgaaaagaaaaaccaccctggcgcccaatacgcaaaccgcctctccccgcgcgttggccgattcattaatgcagctggcacgacaggtttcccgactggaaagcgggcagtgagcgcaacgcaattaatggattttgccgatttcggaaccaccatcaaacaggattttcgcctgctggggcaaaccagcgtggaccgcttgctgcaactctctcagggccaggcggtgaagggcaatcagctgttgcccgtctcactggtgaaaagaaaaaccaccctggcgcccaatacgcaaaccgcctctccccgcgcgttggccgattcattaatgcagctggcacgacaggtttcccgactggaaagcgggcaccacttgtcctctgtagatttctgctactcctcaataattgtgccaaaaatgttggctaatatctttaacaaggacaaagccatctccttcctagggtgcatggtgcaattctacttgttttgcacttgtgtggtcactgaggtcttcctgctggccgtgatggcctatgaccgctttgtggccatctgtaaccctttgctatacacagtcaccatgtcttggaaggtgcgtgtggagctggcttcttgctgctacttctgtgggacggtgtgttctctgattcatttgtgcttagctcttaggatccccttctatagatctaatgtgattaaccactttttctgtgatctacctcctgtcttaagtcttgcttgctctgatatcactgtgaatgagacactgctgttcctggtggccactttgaatgagagtgttaccatcatgatcatcctcacctcctacctgctaattctcaccaccatcctgaagatgggctctgcagagggcaggcacaaagccttctccacctgtgcttcccacctcacagctatcacaccaaaagtagataaaaccacaaagatggggaaaaaacagaacagaaaaactggaaactctaaaaagcagagcgcctctccacctccaaaggaacgcagttcctcaccagcaacagaaaaaaggtggatggagaatgattttgacgagctgagagaagaaggcttcagacgatcaaattactctgagctacgggaggacattcaaaccaaaggcaaagaagttgaaaactttgaaaaaaatttagaagaatgtataactagaataacaaatacagagaagtgcttaaaggagctgatggagctgaaaaccaaggctcgagaactatgtgaagaatgcagaagcctcaggagccgatgcgatcaactggaagaaaggggattttgccgatttcggaaccaccatcaaacaggattttcgcctgctggggcaaaccagcgtggaccgcttgctgcaactctctcagggccaggcggtgaagggcaatcagctgttgcccgtctcactggtgaaaagaaaaaccaccctggcgcccaatacgcaaaccgcctctccccgcgcgttggccgattcattaatgcagctggcacgacaggtttcccgactggaaagcgggcagtgagcgcaacgcaattaatggattttgccgatttcggaaccaccatcaaacaggattttcgcctgctggggcaaaccagcgtggaccgcttgctgcaactctctcagggccaggcggtgaagggcaatcagctgttgcccgtctcactggtgaaaagaaaaaccaccctggcgcccaatacgcaaaccgcctctccccgcgcgttggccgattcattaatgcagctggcacgacaggtttcccgactggaaagcgggcaggattttgccgatttcggaaccaccatcaaacaggattttcgcctgctggggcaaaccagcgtggaccgcttgctgcaactctctcagggccaggcggtgaagggcaatcagctgttgcccgtctcactggtgaaaagaaaaaccaccctggcgcccaatacgcaaaccgcctctccccgcgcgttggccgattcattaatgcagctggcacgacaggtttcccgactggaaagcgggcatacaacaagctatgatgatggtgttacagctttgcttggtcgtgatgatggtgtagtgcaggtgcttgcagatggctatgtagtggtcataggccattgctttgagtatgaagatctcaatgtctccaaggaaaccagaagtctgaatcaaggtgctggcaggactctgctgcctctgaaggcagtggaggagaaactttccttgctccacggcttgtggcagcaaaacaccatttccctctgtctgcacatgactttcctccctgtgtgtcttcctgttgtcctttattatctcttataa

SEQ ID NO: 120844 - DNA, 5367 bp, Homo sapiens
atgaggaaaaaacagagcagaaaaactggaaactctaaaaagcagagcacctctcctcctccaaaggaacgcagttcctcaccagcaatggaacaaagctggacggagaatgactttgacgagttgagagaagaaggtttcagacgatcaaactactccaagctacaggaggaaattgaaaccaaaggccaagaagttgaaaacttggaaaaaaatttagacaaatgtataactagaataaccaatatagagaagtgcttaaaggagctgatggagctgaaagccaaggctcgagaactacatgaagaatgcagaagcctcaggagccgatgcgatcaactggaagaaagggtatcagtaatggaagatgaaatgaatgaaatgaagcaagaagggaagtttagagaaaaaagaataaaaagaaatgaacaaagcctccaagaaatatgggactatgtgaaaagaccaaatctacctccgattgatgtacctgaaagtgacagggagaatggaaccaagttggaaaacactctgcaggatgttatccaggagaacttccccaacctagcaaggcaggccaacattcagattcaggaaatacagagaatgccacaaagatactcctcgagaagagcaactccaagacacataattgtcagattcaccaaagttgaaatgaaggaaaaaatgttgagggcagccagagagaaagcattcaagcaggcctcccggagagaagatgacattgccaaggtaaccagtggcatgagagttttattcaagccaggaaccacagaggtacaggagctggccctttgctatggtggaatggccaacagaaccatctcagccctcaagaccactcagaggcagctttccaagctctggaaggaggagctgctgcaggacgtgtgtgcaggactggcagaggagctgcatctgcctcccgatgcccctggtggcatggtggacttccggtgcaccctcaccctcagcttcttcttcaagttctacctgacagtccttcagaagctgggccaagagaacctggaagacaagtgtggtaaactggaccccactttcgccagtgcaactttactgtttcagaaagaccccccagccgatgtccagctcttccaagaggtgcccaagggtcagtctgaggaggacatggtgggccggcccctgccccacctggcagcggacatgcagcctctggtgaggccgtgtactgtgacgacattcctcgctacgagaatgagctgtctctccggctggtcaccagcacccgggcccacgccaagatcaagcatcgagatgaagttcaagaatatgctgtttcctatgattgtctgcccagcctggatccctgagctgaattcggtagaacatggacccgacggtatctcctttggagctgcttgccccctgagcattgtggaaaaaaccctggtggatgctgttgctaagcttcctgcccaaaagacagaggtgttcagaggggtcctggagcagctgcgctggtttgctgggaagcaagtcaagtctgtggcgtccgttggagggaacatcatcactgccagccccatctccgacctcaaccccgtgttcatggccagtggggccaagctgacacttgtgtccagaggtgagctgcctgaagcagaggtccaggaagaaggacttgggggagaaaagtctcaccagataggtcattttctggagaaacagagctcaaagttcagtgacccagctttccctgtgatttggatccagggaagcatggagaatgtacctggtttggtggacgggaaagctggatattttctctgtagagaattcacagcaggaactgctacctgcatgccttacctagtggggcaccaggagaactgtccagatggaccacaccttcttccctggctacagaaagaccctgctgagcccggaggagatactgctctccatagagatcccctacagcagggagaaatacaaactaccatcagagaatactacaaacacctctccgcaaataaactagaaaatctagaagaaatggataaattcctcgacacatacactctcccaagactaaaccagaaagaagttgaatctctgaatagaccaataacaggagctgaaattgtgccaataatcaacagcttaccaaccaaaaagagttcaggactagatggattcacagccgaattctaccagaggtacaaggaggaactgcatataaacagaaccaaagacaaaaaccacatgattatctcaatagatgcagaaaaggcctttgacaaaattcaacaacccttcatgctaaaaactctcaataaattaggtattgatgggacgtatctcaaaataataagagctatctatgacaaacccacagccaatatcatactgaatgggcaaaaactggaagcattccctttgaaaactggcacaagacagggatgccctctctcaccactcctattcaacatagtgttggaagttctggccagggcaatcaggcaggagaaggaaataaagggtattcaattaggaaaagaggaagtcaaattgtccctgtttgcagatgacatgattgtatatctagaaaaccccattgtctcagcccaaaatccccttaagctgataagcaacttcagcaaagtctcaggatacaaaatcaatgtacaaaaatcacaagcattcttatacaccaataacagacaaacagagagccaaatcatgagtgaactcccattcacaattgcttcaaagagaataaaatacctaggaatccaacttacaagggacgtgaaggacctcttcaaggagaactacaaaccactgctcaatgaaataaaagaggatacaaacaaatggaagaacattccatgctcatgggtaggaagaatcaatatcatgaaaatggccatactgcccaaggtaatgtatagattcaatgccatccccatcaagctaccaatgcctttcttcacagaattggaaaaaactactttaaagttcatatggaaccaaaaaagagcccgcatcatcaagtcaatcctaagcccaaagaacaaagctggaggcatcacgctacctgacttcaaactatactgcaaggctacagtaaccaaaacagcatggtactggtaccaaaacagaaatatagatcaatgcaacagaacagagccctcagaaataatgccacatatctacaactatctgatctttgacaaacctgacaaaaacaagcaatggggaaaggatcccctatttaataaatggtgctgggaaaactggctagccatatgtagaaagctgaaactggatcccttccttacaccttacacaaaaattaattcaagatggattaaagacttaaacattaggcctaaaaccataaaaaccctagaagaaagcctaggcattaccattcaggacataggcatgggcaaggacttcatgtctaaaacaccaaaagcaatggcaacaaaagacaaaattgacaaatgggatctaattaaactaaagagcttctgcacagcaaaagaaactaccatcagagtggacaggcaacctacagaatgggagaaaattttcacaacctactcatctgacaaagggctaataatatccagaatctacaatgaactcaaacaaatttacaagaaaaaatcaaacaaccccatcaaaaagtgggcaaagcatatgaacagatgcttctcaaaagaagacatttatgcagccaacagacacatgaaaaaatgctcatcatcactggtcatcagagaaatgcaaattcaaaccacaatgagataccatctcacaccagttagaatggcgatcattaaaaaatcaggaaacaacagatgctggagaggatgtggagaaataggaacacttttacaccattggaattgtcgtgtgaaaatgacgcaacaaatgcaaaatttacatctctgtcagtcaaaaaaacatagtgctccctcatctcccaacgcagccaaacgcctgtacaggaacctctctgagaaactgaaagggagccactcttccttcgatgaggcctattttaggacaagaactgatcggctgagtctcaggaagacctcggtgaatttccagggcaatgaagccatgtttgaggcagtcgaacagcaggacatggatgctgtgcagatcctcctgtatcagtacacaccagaagaacttgacctcaacacacctaacagcgagggcttgacacccctggatattgccatcatgaccaacaatgtgcccattgcaaggattcttctgaggacaggggcccgagaaagtccacactttgtcagcctggaaagccgagcaatgcacctcaacacactggtccaggaagcccaggagagggtgagtgaactgtctgcccaggtggagaatgaaggattcactctggacaacacagagaaagagaagcagctgaaagcttgggagtggaggtatcggctctacagacgcatgaaaacaggctttgagcatgccagagcccctgagatgccaaccaatgtctgtctcatggtaaccagcagcacatcactcactgtcagcttccaagagcctcttagcgtcaatgcagctgtagtaaccaggtataaagaacgcagttcctcaccagcaacggaacaaagctggacagagaatgactttgatgagttgagagaagaaggcatcagacgatcaaactactccgagctacaggaggcaattcaaaccaaaggcaaacaagttgaaaactttgaaaaaaatttagatgaatgtataactagaataaccaatacagggaattgcttaaaggagctgatggagctgaaagccaaggctcgagaactacgtgaagaatgcagaagcctcaggagccgatgcaatcaactggaagaaagggtatcagtgatagaagatgaaatgaatgaaatgaagcgagaagggaagtttagagaaaaaagaataaaaagaaacgaacaaagcctccaagaaatatgggactatgtgaaaagaccaaatctacgtctgattggtgtacctgaatgtgacggggagaatggaaccaagttggaaaacactctgcaggatattatccaggagaacttccccaatctagcaaggcaggccaacattcagattcaggaaatacagagaacgccacaaagatactcctcgagaagagcaactccaagacacataattgtcagattcaccaaagttgaaatgaaggaaaaaatgttaagggcagccaaagagaaaggtcgggttacccacaaagggaagcccatcagactaacagcggatctctcgttacccacaaaaggaagcccatcagactaa

SEQ ID NO: 120845 - DNA, 2505 bp, Homo sapiens; identical to SEQ ID NO: 117590

SEQ ID NO: 120846 - DNA, 1413 bp, Homo sapiens
acagtcgcctgtgtacctttgtactttctacagtgaaagttgctacaggatctccctttctcaataaattcatctgcggtggagaaaatcagcatgagtactacaggccaagtcatcagatgcaaagcagccatactctggaagcctggtgcaccattttctattgaagaggtagaagtggccccaccaaaggcaaaggaggttcgcataaaggttgtggccaccggactgtgtggtacagagatgaaagtgttggggagtaaacacttggacctcttgtatcccaccatcttgggccatgaaggggctggaatcgttgagagtattggagaaggagtaagcacagtgaaaccaggtgacaaagttatcacactctttctgccacagtgtggagaatgtacctcttgcctgaattctgagggcaatttttgtatacaattcaaacagtcaaaaacccaactgatgtctgatggtaccagcaggtttacctgcaagggaaaatcaatatatcactttggtaataccagcaccttctgtgaatacacagtgataaaggaaatctcagttgccaagattgatgcagtcgctcctctagagaaagtatgcctaattagctgtggcttttccactgggtttggtgctgcaatcaatactgccaaggtgactccaggttctacctgtgctgtgtttggcctggggaggagtcggcttgtctgttgtcatgggttgtaaagcagcaggagcagccagggattcattggagtggatgttcaacaagggaggaaattttaaggaagggcacaggaattgggtgcgactgagtgccctcaacccctcaggccttaaagaaaccccatttcaaagaagttttatttgatatgacagatgctggtatagacttctgctttgaggccattggaaatctggacgttctggcagctgccctcgcctcctgcaatgagagctatggggtctgtgtggttgttggggtgttgcctgccagtgttcaactcaaaatcagtggccagttgttcttctcaggacgttctttgaagggttctgtttttggaggctggaagagcagacagcacatccctaaactggttgctgattatatggcagagaagttgaatctagatccactaattactcatactctgaatcttgataaaatcaatgaagcagttgaattaatgaaaactggaaaatggtaaactgcccacataaattttatgtctgtgtgtttgagaccaagagaaagggtgtattggcttgggagtagaagaagggtcgtccctgctgcagaagctgtatactgataattgaagaggctttcaggaatttgtaaagcatctccttcccctctgcattttgttttatttctagctaataaaatacataatcctgaaagta

SEQ ID NO: 120847 - DNA, 2280 bp, Homo sapiens
atggggaaaaaacagagcagaaaaaccggaaactctaaaaagcagagcgccactcctcctccaaaggaacgcagttcctcaccagcaacggaacaaagctggacagagaatgactttgacgagttgagagaagaaggcttcagacgatcaaactactctgagctacaggaggaaactcaaaccaaaggcagagaagttgaaaactttgaaaaaaatttagacgagtgtataactagaacaaccaatacagagaagtgcttaaaggagctgatggagctgaaagccaaggcttgggaactacgtgaagaatgcagaagcctcaggagccgatgcaatcaactggaagaaagggtatcagtgatggaagatgaaatgaatgaaatgaagcgagaagggaagtttagagaaaaaagaataaaaagaaatgaacaaagcccccaagtaatacgggactatgtgaaaagaccaaatctacgtctgattggtgtacctgaaagtgacgggaagaatggaaccaagttggaaaacactctgcaggatattatccaggagaacttccccaatctagcaaggcaggccaacattcagattcaggaaataccgagaacgtcaaaagatactcttcagaagagcactccattattggccttattggtcgattcccaagttgaaggacggacatgtttagggccccaaaaaagcgggaacaaaaaaggaacaacagaaagattcaaaaagaagaaggaggacgaaccgcaccaactgggatctgagctgggcatttctgaaagaaacacagcagccccagtcagggactgtgggcgcagctttagcagacttaaacgttcctgcctgctggctctgaagacagcagcagatctcccagtacagcattcgagctatgctaagggacagactgcctcctcaagtaggtacctgacccatgtgcctcctcatggggagacacctcccagcagagatcgacagacatctcatacaggagagctccagctggcatctggtgagtgcccctctgggatgaagcttccagaagaaagaaaaggcagcaatcttttctgttctgcagcctccgctggtgatactcaggcaaacagggtctggagtggacctccagcaaactccaacagacctgcagctgagggtcctgtctgttagaaggaaaactaacaaacagaaaggacatccacaccaaaaacccatctgtacatcacccttcatcaaaggcccaaaagtagataaaacccacaaagatggggaaaaaacagagcagaaaaactggaaactctgaaaagcagagcacctctcctcctccaaaggaacgcagctcctcaccagcaatggaacaaagctggatggagaatgactttgacaagttgagagaagaaggcttcagacgatcaaactactctgagctacggggaggacattcaaaccaaaggcaaagaagttgaaaactttgaaaaaaatttagaagaatgtataactagaataaccaatacagagaagtgcttaaaggagctgatggagctgaaagccaaggctcgagaactacgtgaagaatgcagaagcctcaggagccaatgcgatcaactggaagaaagggtatcaatgatggaagatgaaatgaaggaaatgaagcgagaagggaaaccaaatctacgtctgattggtgtacctgaaagtgatggggagaatggaaccaagttggaaaacactctgcaggatattatccaggagaacttccccaatctagcaaggcaggccaacgttcagattcgggaaatacagagaacgccacaaagatactcctcgagaagatcaacaccaagacacataattgtcagattcaccaaagttgaaatgaaggaaaaaatgttaagggcagccagagagaaaggtcgggttaccctcaaagtgaagcccatcagactaacagcggatctctcggcagaaactctacaagccagaagagagtggggaccaatattcaacattcttaaagaaaagaattttcaacccagaatttcatatccagccaaactaagcttcataagtgaaggagaaataaaatactttacagacaagcaaatgctgaaagattttgtcaccaccaggcctgccctaaaagagctcctgaaggaaagtgctaaacatggaaaggaacaactggtaccagccactgcaaaatcatgccaaaatgtaacaaccatcgagactaggaagaaactgcatcaactaacgagcaaaataaccagctaa

SEQ ID NO: 120848 - DNA, 4821 bp, Homo sapiens
atgggagactttaacaccccactgtcaacattagacagatcaacgacacagaaagtcaacaaggatacccaggaattgaactcagctctgcaacaagcagacctaatagacatctacaaaactctccaccccaaatcaacagaatatacattcttctcagcacctcatcacacttattctaaaattgaccacataattggaagtaaagcactcctcagcaaatgtaaaagaacagaaatcacaacaaactatctctcagatcaccgtgcaatcgaattagaaatcaggattaagaaacttactcaaaaccacacaactacatggaaactgaacaacctgctccggaatgactactgggtaaataatgaaatgaaggcagaaataaagatgttctttgaaaccaacgagaacaaagacacaacgtaccagaatctctgggacacatttaaagcagtgtgtagagggaaatgtacagcactaaatgcccacaagagaaagcaggaaagatctaaaatcaacaccctaacatcacaattaaaagaactagagaagcaagaggaaacaaattcaaaagctagcagaaggcaagaaataactaagatcagagcagaactgaaggagataaagacacaaaaaacccttcaaaaaatcagtgaatccgggaggaggagccaagatggccgaataggaacagctccggtctacagctcccagcgtgagcgacgcagaagacaggtgatttctgcatttccatctgagggcacagacaaacaaaaagacagcagtaacctctgcagacttacgtgtccctgtctgacagctttgaagagagcagtggttctcccagcacgcagctggagatctgagaacgggcagactgcctcctcaaaaggaaaactaacaaacggaaaggtccatccacacccatactcccattctgtccttcaccattcatcagaggacctaaggttgattcaacccacggtgcatggggacaaaaacagcaccgataaactgggatattctaaagaagcagagcgcctcttctcctccctccaaagggacaccagttccttcaccagcaaccggaaccaaaagcttggattggagaatgactttgacgagctgagagaagaaggcttcagacgatcaaattactctgagctacgggaggacattcaaaccaaaggcccaagaagttgaaaaccttgaaaaaaaatttagaagaatgtataacttagaataaccaatacagagaagtgcttaaaggagctgatggagctgaaaaccaaggctcgagaactacgtgaagaatgcagaagccttaggagctgatgcgatcaactggaagaaagggtgtcagcaatggaagatgaaacgaagaaatgaatgaaatgaagccgagaaggaaagtttagagaaaaaagaataaaaagaaatgagcaaagcctccaagaaatatggggactatgtgaaaaagaccaaatctacctctgactggtgtacctgaaagtgatggggagaatggaaccaagttggaaaacactctgcaggatattatccaggagaacttccgccaatcttagcaaggcaggccaatgttcagattcaggaaatacagagaacaccacaaagatactcctcaagaagagcaactccaagacacataattgtcagattcaccaaagttgaaatgaaggaaaaaatgttaagggcagccagagagaaaggtcgggttaccctcaaaggggaaggccatcagactaaacagtggatctcttggcagaaactcttcaagccagaagagagtgggggccaatattcaacattcttaaagaaaagaattttcaacccagaatttcatatccagccaaactaagcttcataagtgaaggagaaataaaatactttatagacaagcaaatgctgagagattttgtcaccaccatgcctgccctaaaagagctcctgaaggaagcgctaaacatggaaaggaacaactggatcaacaaaattgatagactgctagcaagactaataaagaagaaaagagagaagaatcaaatagatgcaataaaaaatgataaaggggatatcaccactgatcccacagaaatacgaactaccatcagagaatactacaaacacctctacgcaaataaactagaaaatctagaagaaatggataaattccttgacacatacaccctcccaagactaaaccaggaagaggttgaatctctgaatagaccaataacaggctctgaaattgtggcaataatcaatagcttaccaatgaaaaagagtccaggaccagatggattcacagccgaattctaccagaggtacaaggaggaactggtaccattccttctgaaactattccaatcaatagaaaaagagggaatcctccctaactcattttatgaggccagcatcatcctgataccaaagccgggcagagacacaaccaaaaaagagaattttagaccaatatccttgatgaacattgatgcaaaaatcctcaataaaatactggcaaacagaatccagcagcacatcaaaaagcttatccaccatgatcaagtgggcttcatccctgggatgcaaggctggttcaatatacgcaaatcaataaatgtaatccagcatataaacagaaccaacgacaaaaaccacatgattatctcaaaagatgcagaaaaggcctttgacaaaattcaacaacgcttcatgctaaaaactctcaataaattaggtattgatgggacatatctcaaaataataagagctatctgtgacaaacccacagccaatatcatactgaatgggcaaaaactggaagcattccctttgaaaactggcacaagacagggatgccctctctcaccactcctattcaacatagtgttggaagttctggccagggcaattaggcagaagaaggaaataaagggtattcaattaggaaaagaagaagtcaaattgtccctgtttgcagatgacatgattgtatatctagaaaaccccattgtctcagcccaaaatctccttaagctgataagcaacttcagcaaagtctcaggatacaaaatcaatgtacaaaaatcacaagcattcttatacaccaataacagacaaacagagagccaaatcatgagtgaactcccattcacaattgcttcaaagagaataaaatacttaggaatccaacttacaagggacatgaaggacctcttcaaggagaactacaaaccactgctcaatgaaataaaagaggatacaaacaaatggaagaacattccatgctcatgggtaggaagaatcaatatcgtgaaaatggccatactgcccaaggtaatttacagattcaatgccatccccatcaagctaccaatgcctttcttcacagaattggaaaaagctactttaaagttcatatggaaccaaaaaagagcccgcattgccaagtcaatcctaagccaaaagaacaaagctggaggcatcacactacctgacttcaaactatactacaaggctacagtaaccaaaacagcatggcttcagcacgcagtgccggctaatgatggcaccacaagatccccatcaatagacagcattcagaaggaccccagcgagtttgcctggcgtgatcctgagttgcctgaggtcattcacatccttcagcaccagttcccatctgttcaggcaaatgcagcagcctacctgcagcacctgtggtttggtgacaacaacgtgaagatgaaggtgtgtaggttatggggaatcaagcttctggtttaccttttgggccacagagttttggaagttcagaagaatgcttgtgatgcccttcgaaatctctttttcggcaagtctacaggtgaaaataaaataacaatgaaggatgttgccacattggatctgagtttcattctcagcaaactaacacaggaacagaaaaccaaatacctcattgttctcactcataagtgggagttgaacaatgagaacacatggacacaggaaggggaacaacacttactggggcctatcggggggcaaatctccaaggactcaagttgggccaaggaatgcagctcctcaccagcaacggaacaaagctggatggagaatgactttgatgagctgagggaagaaggcttcagacgatcaaattactctgagctacgggaggacgttcaaaccaaaggcaaagaagttgaaaactttgaaaaacatttagaagaatgtataactagaataaccaatacagagaagtgcttaaaggagctgatggagctgaaaaccaaggctcgagaactacgtgaagaatgcagaagcctcaggagccgatgggatcaactggaagaaaggggtctgtcatcatacctacatatagcagaagctcaagaaatatttgttgaaagaattaaagaattagtgaaccggctgggtgtagtggctcatgccggtaatcccagcactttgggaggccaagtctctgaaggaacaaaatcaaaactgcttgaacaagtatcccggctggaggaaaaactggaggctgtggaccacaaggaagccagtgggggaccatatgaaaaaatggttcttgtgaaagaccagtgcatccagaaattgcaagctgaagtaaaagcttcccaggagcaacttatagcccagttgacacccagtgatggtgctcgtttgaggacttggaattcactaagaattcctctaggttcaggcctccatccctttgcagagtcttattacccaaaggacctgtgtacaagtggagtacgctctctgctgtcttaa

SEQ ID NO: 120849 - DNA, 640 bp, Homo sapiens
ggcacgagggctcttgggttttttgtggcttccttcgttattggagccaggcctacatcccagcaaccatgtccaagggacctgcagttggtattgatcttggcaccacctactcttgtgtgggtgttttccagcacggaaaagtcgagataattgccaatgatcagggaaaccgaaccactccaagctatgtcgcctttacggacactgaacggttgatcggtgatgccgcaaagaatcaagttgcaatgaaccccaccaacacagtttttgatgccaaacgtctgattggacgcagatttgatgatgctgttgtccagtctgatatgaaacattggccctttatggtggtgaatgatgctggcaggcccaaggtccaagtagaatacaagggagagaccaaaagcttctatccagaggaggtgtcttctatggttctgacaaagatgaaggaaattgcagaagcctaccttgggaagactgttaccaatgctgtggtcacagtgccagcttactttaatgactctcagcgtcaggctaccaaagatgctggaactattgctggtctcaatgtacttagaattattaatgagccaactgctgctgctattgcttacggcttagacaaaaaggttggagc

SEQ ID NO: 120850 - DNA, 999 bp, Homo sapiens
atgaagatccattcctgtgcttttgtgattgaacaagaggagaaaaagaaaacagaagctcataaagaaggagatggagtgaagagggctgataagattctgggggttaccaaagatcctggaaccattgctggtctcaatgtagttagaattatcaatgagccaactgctgcttctattgcttatggcacagacaaaaagtttggagctgaaagacatgtgctcatctatgacttaagagatgaaatttttgatgtgtctgtccttactcttgaggatgaaatctttgagatcaaatctacagctggagacacccacttaggtgaagaagattttgacaaccaaatgatcaaccattttattgctgagttcaaatacaagcataaggacagtagagcagatatttatacctccattacccatgcccaatttgaagaactgaatgctgtcctgttccgtggcacccaggaccccatagagatagcccttcaggacaccaaactagacaagttgcagatccatgttattgtcctgacccagaccttcactacctaccctgacaaccaacctgatgtcctcattcaagtttatgaaggtgagagtgccataaccaaggataacaatttgcttgttatccagggcaagtttgagctcacaggcatacttcctgctccctttgctgttcctcaaattaaagtcacttgtgatattgatgtcaatagcagcctcaatatctctgctgtaggtaagagtacagaaaaagagaacaaaattatcatcactaatgaccaggggcatttgagcaaggaagacattgagaatatggtccaggaagctgagtacaaagctgaagatgagaagcagaagaacaaggtggcatcaaagaattcacttgactcttatgcattcaacatgaaagcaactgagaaacttcaaggcaagatcaacaataaggataaacagaagatacttgacaagtgtaataaaatcatcaactga

SEQ ID NO: 120851 - DNA, 936 bp, Homo sapiens
  misc_feature (1)...(936): n = a,t,c or g
ataaacaagttcctggtggtctttatgaagttcgctgaggcagaattgctgacaagtgtcaaagatacaaacagtgaggaaatcctgctaatccagtgtgccctccctgtcacccgcaactctcctcccatagtccagaaagtccacaccatctattccacttggctgttctgtaaattgcaagatttaataaaaaaacgcaaagcaatgattaaaggatgctcaccaatgaaactcatggaaacacttaaccagagcataaacgctggtcatgaaatgacgaaggctatcgccattgcacagtttaatgatgacagcccggaagcgaggaaaataacccggcgctgcacaataggtgaagcagcggatttagttggggggtttttcagaccttgtccctgcctgggctcggacctcagtagcacctgccatcgtgactggaagatccggcaagagcacaaggccagcggggagcatggcctcctccagctaggactttcttgctcacctcttttccagctgttggggcaggtaaatgtgtcaaaatctgatgaccccctcaaaatcaacggagtggaagatcacaaaacgatttttgacggagacggaaaaacatatcagaacgttcagcagtttatcgatgaaggcaattatacatccggcgacaaccatacgntgagagaccctcactacgttgaagacaaaggccataaataccttgtattcgaagccaacacgggaacagaaaacggataccaaggcgaagaatctttatttaacaaagcgtactacggcggcggcacgaacttcttccgtaaagaaagccagaagcttcagcagagcgctaaaaaacgcgatgctgagttagcgaacggcgccctcggtatcatagagttaaataatgattacacattgaaaaaagccctcacccgctga

SEQ ID NO: 120852 - DNA, 1131 bp, Homo sapiens; identical to SEQ ID NO: 119642

SEQ ID NO: 120853 - DNA, 229 bp, Homo sapiens
cccatttatcgagtgacccaaaagactgcctgttttgaacgcagtttagaaaaggagaaggctctgcaacaggtccaggctgctgtgcaagctgctctgccacttgggctgtgtgactcagcagatccagtggtgcttgagcataaagtggatcatgcacagcagcatttcatcatcaaatggaagtggtatacatgtgatcaggctcgagcaggtcctgaaggcataa

SEQ ID NO: 120854 - DNA, 1011 bp, Homo sapiens; identical to SEQ ID NO: 119645

SEQ ID NO: 120855 - DNA, 740 bp, Homo sapiens; identical to SEQ ID NO: 119649

SEQ ID NO: 120856 - DNA, 354 bp, Homo sapiens; identical to SEQ ID NO: 118356

SEQ ID NO: 120857 - DNA, 593 bp, Homo sapiens; identical to SEQ ID NO: 119651

SEQ ID NO: 120858 - DNA, 798 bp, Homo sapiens; identical to SEQ ID NO: 119652

SEQ ID NO: 120859 - DNA, 636 bp, Homo sapiens
atggagtttaatgactctatgcataatacctttgaccatatatggagaaccaaggaatatgatgaagctggttggttgctcctaagttcattggacaaagcgatgaaagaaaatgatgaactcagggattctaattcacagattcagaagcagatactgagccttcaatcttctaagatcatcctgaatctaacagagggaactgtggttactcaactacaaaatttaaattcagtgggaataattggatcccaaggtggtaggggccaagtggcagcactcagccttcaaaggcaaggtgccagttttgagtggagtccagaacaggagaaggctctgcaacaggtccagactgctgtgcaagctgctctgccacttgggccatatgacccatcagatccaatggtgtttgaggtgtcagtggcagatgggaatgctgtttggagcctttggcaggcccccataggtgaattacagtggaggactctagaattttggagcaaggccttgccatcttctgcagataactactctccttttgggagacagctcttggcctgttactgggctttggtggaaactgaacatttgactgtggatcatcaagtcaccagtgacctgaactgcctatcatga

SEQ ID NO: 120860 - DNA, 675 bp, Homo sapiens
atgctgattggacccagtgagcaagaagtagcaaacatcctggacttattggtttccagttttgagtgggaaccagaacacaagaaggctctgcaacaggtccaggctgctatgcaagctgctctgccacttgggccatatggcccagcagatacaaaggtgcttgaggtgccagtggcagataggaatgctgtttggagcctttggcaggcccccatagctgacctggctatggccactgctgagtgcccagtttaccagcagcagagatcaacactgagccctcaatatggcaatatttctcggggtgatcaacaagctacctggtggcaggttgattatattggatctcttccctcatggaaagagcagaggtttgtcctcactggaatagacacttattccagatataggtttgcttatcccgcacccagtgcttctgccaaaactaccatccatggactcacagaatgccttatccaccgttgtggtattccacacagcattgcctctgaccaaggcactcacttgcgacagtgggcaaatgctcatgaaattcactggtcttaccatgttgcccattatcctgaagcagctggattgacagaatggtggaacggccttttgaagtcacaattacaatgccaactagatgaccatactttgcagggctga

SEQ ID NO: 120861 - DNA, 470 bp, Homo sapiens
ctggcaactaaatgcttgccctagaagtgacactggttcttctttctataacgcatcagccagaacgagttccgtggtcccacccaaccatgaggtgggcccagaaaggcaattaatctagtggcatcaacagcttttactcttcccaaatagactctcagcttcgtgaaagcagctgccagctctgcttgttttaaccaatgtgcccagcacacactgccctgataaaaatatgtgttcaacagataaaggactcccttcctggtaaaatgagtaagggactcttacaacagcaacaaaaacctaaggtaggcactcactctgggattcaccaaagttagctgagcaggagaaagacagggggtgggggcacctggacttacctgttgtgcccatttcttcttttcctcctcatgttgctggagaatatctggtatatccttctggtgccgctcagcctcctctgatgg

SEQ ID NO: 120862 - DNA, 1911 bp, Homo sapiens; identical to SEQ ID NO: 119293

SEQ ID NO: 120863 - DNA, 1218 bp, Homo sapiens
atgggaataattggatcccgaggtggcagaggccaagtggcagcactcaaacgtcaaaggcaagtaaccaaaaaagctgccagttttgagtggggtccagaagaggagaaagctctgcaacaggttcaggctgctgtgcaagctgctctgccacttgggccatatgacccagcagatccaatagtgcttgaggtgtcagtggcagatagaggtgctgtttggagcctttggcaggtccccataggtgaatcacagcagaggcctctaggattttggagcaaggccttgccatcttctgcagataacgactctccttttgagagacagctcttggcctgttactgcgctttggtagaaactgaacgtttggatatgggtcatcaagttaccatgagacctgaagtgcttatcataaactgcgtgctttctgacccatctagccataaaggatggaggttatgcatggattcagcaacatggacttccacttaccaaggtgacctggctatggccactgctgagtgcccaatttgccagcagcagagaccaacactgatccctcgatatggcaccattccttgggtaattagccagctacttggtgataggttgattacattggacctcttcaatcatggaaggggcagaggtttgtcctcactggaacagacacttactccggatatgagtttgcctatcctgcacacaatgcttttgcgaagactacatccatggattcacgaaggtcttatctaccatcatggcattccacatagcactgcctctgatcaagacactcaccttacagctaaagaagtgtggcagtgggctcatgctcatggaattcactggttttaccatgttccccatcatcctgaagcagctggattaataggatggtggaatggccttttgaagtcacaattacaatgccgactaggtgacaatactctgcagggctggggaaaagttcttcagaaggctgtgtgtgctctgaatcagcatccaatatatggtactgtttctcccgtagccaggattcatgggtccaggaatcaaggggtggaagtggaagtggcaccattcatcatcacttctagtgacccactagcaaaatttttgcttcctgtttcctcgacatcatgttctgctggacttaaggttgtagttctgatggaggaatgctgccaccaggagacacaacaacaatttcattga

SEQ ID NO: 120864 - DNA, 1142 bp, Homo sapiens
tcaaatggccagcgtgacacagactgcccctgggaaagcctcggaacttctcggattgggacagagtgctggggcagggaggaaatgtctcctcttgctttattccctttggcccaacttcaagggaagacgctttctcggggccttccaagaacccttgtgggtgattccatgtaactcaaggccccagggctcactgggcacacacccaggatctccatctcgctcccaccctcgttccttcctggaaaagaactgagaggctcctgctgtcttctccagaaaaaccttggaaggagctgtgacttcaggcgtcgtggtgggcccaggccctgcaccctatgtggcgaggaaagagacctcagtgggagtgacaggggccagagggaaggcaggcgaggcattggccccaaggacccggtacaacagctcctccttctcctgctggagctgtcgccgcagttgcacctccttatccagggcctcgcgcgtgagaagcaggtcttctgacagctgccttgacaggaccacctggttgcggcttcgaacatggaggtcctcgttttcctgttgcagggtggtaattttttcctccaatatcagatctttctctttcactgtttccatgaggatcagccgccggtccagctcatgaatacgctcattattcatttggatgacaaagtgtaagctatccagctcctgctcccagaactgggtggggctcccataatcctggatatgtttgttatagtttcggctcagaatggactcctccaccctcttcattttggcctggaaagcctccagctgtgaggtcagtctgtctatggtctcctgctgggtagaactggcctcccggaaagagtgggtaagcgcttctttctcctgttcatatgaggcccggaggacttgcagggcctcttcattctttccttccaggaccctttgctgctcatccagtctgtctcgaagctctagctccctttccttctccacctgttgtgcccatttcttcttttcctcctcatgttgctggagaattctggttatatccttctggtgccgctcagcctcctctgatgcacagagctggacagttatagctgtgtctccattgaggggacttaattcatggggct

SEQ ID NO: 120865 - DNA, 1452 bp, Homo sapiens
atgggagaagagcgtagatggaggcccagcagcaacgggaagcatggtgcatttgcggaactggacaaaggctggttggtgtggctggaaggaaaaggtgtaattggggcaagaagaagctggagagcacacagtgccctgataaaaatatgtgttcaacagataaaggactcccttcctggtaaaatgagtaagggactcttacaacagcaacaaaaacctaagcacctgctccatgatctgtataaggcaatgagcaccagatggggagtgcagaaagccaggctcaactgcacagctttgccaccaactggctgtgtgactttggacccatcgttcctcactgagcctcagtttccccggcagctgtcagaagacctgcttctcacgcgtgaggccctggagaaggaggtgcagctgcggcgacagctccagcaggagaaggaggagctgttgtaccgggtccttggggccaatgcctcgcctgccttccctctggcccctgtcactcccactgaggtggagaaggaaagggagctagagcttcgagacagactggatgagcagcaaagggtcctggaaggaaagaatgaagaggccctgcaagaccctagattggtagatccactgacatcttgcactgtgcactttgaaaagccacagatgctcaacgccagactatggaagcatgcagggagggaggctgtagcctgcaaagtcagagggtcagagctgcccaagacaatgggaacctaccccttgcatcagcatgacctggatgtgagacatggagtcaaaggagatcattttggagctttaagatttgattgccctgctggattttggacttgcatggggcctttagccccttcattttggccaatttctcccatttggaatggaccaccacttgatatcagcggataccctgccacttctacacagaagtccactatgtgtctgaggatcattgatactcgactgcatccagagagtcgactcaagcagcagtcaaactttgcactgaacgctagggagaaggctctgcaacaggtccaggctgctgtgcaagctgctctgccacttgggccctatgacccagcagatccaatggtacttgaggtgtcactggcagatagggatgctgtttggagcctttggcaggcccccttaggtgaatcacaccataaagtgggtcgtgcacagcagcattccatcatcaaatggaagtggtatatatgtgatcgggctcgagcaagtcctgaaggcacaagtaagttacatgaggaagtggcccaaatgcccatggtctccactcctgccaccctgccttctctccccaagcctgcactgatggccttatggagagttccctatgatcagttgacagaggaagagaagactagggactggttcacagatggttctgcaggatatgcaggcaccacctga

SEQ ID NO: 120866 - DNA, 2269 bp, Homo sapiens
tgggttggtgtttatctcctcccagccttgagggagggaacaacactgtaggatctggggagagaggaacaaaggaccgtgaaagctgctctgtaaaagctgacacagccctcccaagtgagcaggactgttcttcccactgcaatctgacagtttactgcatgcctggagagaacacagcagtaaaaaccaggtttgctactggaaaaagaggaaagagaagactttcattgacggacccagccatggcagcgtagcagccctgcgtttcagacggcagcagctcgggactctggacgtgtgtttgccctcaagtttgctaagctgctggtttattactgaagaaagaatgtggcagattgttttctttactctgagctgtgatcttgtcttggccgcagcctataacaactttcggaagagcatggacagcataggaaagaagcaatatcaggtccagcatgggtcctgcagctacactttcctcctgccagagatggacaactgccgctcttcctccagcccctacgtgtccaatgctgtgcagagggacgcgccgctcgaatacgatgactcggtgcagaggctgcaagtgctggagaacatcatggaaaacaacactcagtggctaatgaagcttgagaattatatccaggacaacatgaagaaagaaatggtagagatacagcagaatgcagtacagaaccagacggctgtgatgatagaaatagggacaaacctgttgaaccaaacagctgagcaaacgcggaagttaactgatgtggaagcccaagtattaaatcagaccacgagacttgaacttcagctcttggaacactccctctcgacaaacaaattggaaaaacagattttggaccagaccagtgaaataaacaaattgcaagataagaacagtttcctagaaaagaaggtgctagctatggaagacaagcacatcatccaactacagtcaataaaagaagagaaagatcagctacaggtgttagtatccaagcaaaattccatcattgaagaactagaaaaaaaaatagtgactgccacggtgaataattcagttcttcaaaagcagcaacatgatctcatggagacagttaataacttactgactatgatgtccacatcaaactcagctaaggaccccactgttgctaaagaagaacaaatcagcttcagagactgtgctgaagtattcaaatcaggacacaccacaaatggcatctacacgttaacattccctaattctacagaagagatcaaggcctactgtgacatggaagctggaggaggcgggtggacaattattcagcgacgtgaggatggcagcgttgattttcagaggacttggaaagaatataaagtgggatttggtaacccttcaggagaatattggctgggaaatgagtttgtttcgcaactgactaatcagcaacgctatgtgcttaaaatacaccttaaagactgggaagggaatgaggcttactcattgtatgaacatttctatctctcaagtgaagaactcaattataggattcaccttaaaggacttacagggacagccggcaaaataagcagcatcagccaaccaggaaatgattttagcacaaaggatggagacaacgacaaatgtatttgcaaatgttcacaaatgctaacaggaggctggtggtttgatgcatgtggtccttccaacttgaacggaatgtactatccacagaggcagaacacaaataagttcaacggcattaaatggtactactggaaaggctcaggctattcgctcaaggccacaaccatgatgatccgaccagcagatttctaaacatcccagtccacctgaggaactgtctcgaactattttcaaagacttaagcccagtgcactgaaagtcacggctgcgcactgtgtcctcttccaccacagagggcgtgtgctcggtgctgacgggacccacatgctccagattagagcctgtaaactttatcacttaaacttgcatcacttaacggaccaaagcaagaccctaaacatccataattgtgattagacagaacacctatgcaaagatgaacccgaggctgagaatcagactgacagtttacagacgctgctgtcacaaccaagaatgttatgtgcaagtttatcagtaaataactggaaaacagaacacttatgttatacaatacagatcatcttggaactgcattcttctgagcactgtttatacactgtgtaaatacccatatgtcct

SEQ ID NO: 120867 - DNA, 704 bp, Homo sapiens
gttgactgtaacatggagacgtctacagaagagaaggaaaacttacccggaggatacagtggaagtgttaaaaatagaccaacaaggcatgatgttttagatgactcatgtgacggctttaaggacctcatcaaacctcatgaggaattgaagaaaagtgggagaggcaaaaagccaacaagaacattagtcatgacaagcatgccatctgaaaagcagaatgtcgtcatccaggttgtggataaattgaaaggcttttcaattgcaccagacgtctgtgagaacacgactcacgtgctttccgggaagccacttcgcaccctgaatgtgctgctgggaattgcgcgtggctgctgggttctctcttatgattgggtgctatggtctttagaattgggtcactggatttctgaggagccgttcgaactgtctcaccacttccctgcagctcccctgtgccgaagcgagtgccacttgtctgcagggccgtaccgcggaaccctctttgccgaccagccagcgatgtttgtctcgcctgccagcagccccccagtggccaagctctgtgaactagtccacctgtgcggaggttgcagtgagccaaggttgcagtgaatcaagattgctccactgcactccagcctgggcaacagagtaactctccttctcaaataaataaataaataaataagaaaaaaaaaaaa

SEQ ID NO: 120868 - DNA, 1077 bp, Homo sapiens
atggaggtgtcaggtgttaggtcttccttcactttctctcctggtccttatctcgtctctctgtcctacacctgggatgactcgttttcacttatctttcagcttcagcttgagaattatatccaggacaacatgaagaaagaaatggtagagatacagcagaatgcagtacagaaccagacggctgtgatgatagaaatagggacaaacctgttgaaccaaacagcggagcaaacgcggaagttaactgatgtggaagcccaagtattaaatcagaccacgagacttgaacttcagctcttggaacactccctctcgacaaacaaattggaaaaacagattttggaccagaccagtgaaataaacaaattgcaagataagaacagcacagagatgaactgtaaggagacagtggagggcagcgtaaggagtggctgcagtggtgcaggagggatgatccaggcatcaggggagagaggagggaaggagaaaacagaagaagtcaaacaactatttcagaagcagggccatggtcttgatgggggaagaaggagatgtcaaggacgattgcacgtttctggcttgagctttgacgaagacgagacagctggtgtgaaggaaggatggacacgcaccagactactgggagttggaaaatggaaaatgccttataccctggcattggctctacaggagcctccttgccggagggaagagcccaggcctgaatgccgactacaagctaagcaggttacatcatctccaaagcagaatgtcgtcatccaggttgtggataaattgaaaggcttttcaattgcaccagacgtctgtgagaccacgactcacgtgctttccgggaagccacttcgcaccctgaatgtgctgctgggaattgcgcgtggctgctgggttctctcttatgattgggaagaaacgattcctatttgcatgttttattcttatctccaacctagtcatgctgctttgtgctccaatgagaaagaccttgatgattataatccgaagaaagaacagctaaaagtcgaccgctgtatggtgaaaaagaaagtcaaataa

SEQ ID NO: 120869 - DNA, 399 bp, Homo sapiens
ctgaaagtgaatctgctccaggaagccttttctgttctgactgttcaggtctgggtccttattccttcctgtgccttcttttggttcacttttcagatagagactataagatggttaaaaacaaaccatatgttgaccaccaaccaggcatgggcacagactgagcatccttaaagacattattccactagagtctcataagagttcattgagggacgtattattatccctactttataaatgatgaaattcggagtcatgacccttcataacttgatccataggcaagcaggcagtaaatgcagatgactaacaatatggcaggattcaaatccagggtcttgcttaattattaaaacccacagtctttaccccagtttcaccgaagtgtaaattaaa

SEQ ID NO: 120870 - DNA, 637 bp, Homo sapiens
aactctttttcttcggacaaaactgaaatcctgtacccatcaaacaacaatgccctacttcccccttccccagtctctagcaactactattctactttctgtttctatgaatttgacaactctgtgtaccccacagctaacgttaatgcaacagataactttctgtggactccacttcattttgcatgccatgcaggccaacaagacattgttgagcttcttgttgaatctggagctttaatagatgcagcttcaatcaacaactcaactcctttaaatagagccattgaaagctgcagactggatacagtaaaatacctacttgatattggtgctaaattccagctggaaaatagaaaagattctctcagaagaacggagccaagagttcaggagcaaatgatgtgtgaaggaagtgctcccaggggagagcagtatggggtgaggggtatgaaacatggacacggaaatgaaaggagccaaacaagggtgcgctttcagatgaaaccacagcttctgagtagcccgtggggagctgtagcgcacaggcaaggagctgggcttctggggttcctgtatcagtgagcagctgcagggattgagggtgtactggccgaggctgttccagtgctcgagg

SEQ ID NO: 120871 - DNA, 489 bp, Homo sapiens
atggctgagcagttctggaataaagtcactgagctgcttcagggtccacaccgaagaccaagttctgcagatctgcctcagatggcacaaatggcatgcttccttctgggtccctgtgtaggcagaaatgttcctgaaccacagctgaaaacacctgtatccaggtccctgagtgggcagaactacatccagatagcagcaaaaaaaacactggactcagattacagggccatctcaagatcttcaggtagaccaaagccagtagttctgcctccaggaacacagatggatgtgtctccttccatgtcttttgcaggcccctctgctgcaggtctgctggagtttgctggaggtccactccccatcctgtttgcctggttatcacaagtggaggctgcagaacagcaaaggttgctgcctgttccttcctctggaagcttcatcccagagggtcacccgccatatgccagccagagttcttctgtatga

SEQ ID NO: 120872 - DNA, 1003 bp, Homo sapiens
gaatgacatgatcagtgaaattccacagcattataggaaaccaggcataaaacttcaagacgtttttcctcaggaagtggcacagatgacaagtgacaaagagcagagacctgctgaagcatccaaaaatccaacgggaagtctgccagagaacaaggctgaagccagggaaccaagtgatctagctcagcagatccccacccccatggaggccagcaagctaagatccactggcttgaaattctcgcagccagcacaacagtctgaagtcgacctgggacactcgagcttggagaactccagctggcatctggcgggtgaccctctgggacgaagcttccagaggaaggaacaggtagcaatctttgctgttctgcagcctccactagtgataactaggcaaacagggtctggagaggacctccagcaaactccagcagacctgcagcagaggggcctgactgttagaaggaaaactaacaaacagaaaggaatggcatcaacatcaacaaaaaggacgtccactcaaaaaccccatccgaaggtcaccaacatcgaaaaccaaagaaccaattacaaaaaccacatgattatctcaatagatgcagaaaaggccttcaataaaattcaacaccccttcacgctaaaaactctcaataaactaagtactgatggaatgtatctcaaaataataagagctatttatgacaaacccacagccaatatcatactgaatgggaaaaagctggaagcattctctttgaaaactggtacaagacaaggatgccctctctcaccactcctattcaacatcatagtggaagttctggccagggcaatcaggcaagagaaagaaataaagggtattcaaacaggaagagaggaagtcaaattgtctctgtttgcagatgacctgattgtatatttagaaaaccctatcatctcagccaaaaatctccttaaactgataagcaacttcagcagtctcagaatacaaaattaa

SEQ ID NO: 120873 - DNA, 2310 bp, Homo sapiens; identical to SEQ ID NO: 120375

SEQ ID NO: 120874 - DNA, 436 bp, Homo sapiens
  misc_feature (1)...(436): n = a,t,c or g
ttcagtatgaaagcaatttctgcaccgtggccctgcagtttatagaagaggaaaagaactacgccttgccttctccagcaaccacagagggagggagtttgaccccagtgcgagacagcccgtgcacccccagacttcgttctgtgagctcctatggaaacatccgtgctgtcgccacagccaggagcctcaacaaatctttgcagaacctgagtttgacagaggaatctggtggcgcggtggcgttctcccccggaaacctcagcaccagcagcagcgccagcagcaccctgggcagccccgagaatgaggagcatatcctgtccttcgagaccatcgacaagatgcgccgcgccagctcctactcctccctcaactccctcatcggagnttcctttaacagtggttacactcagatttggagagtcctgctgca

SEQ ID NO: 120875 - DNA, 1779 bp, Homo sapiens
atgcatggggtccaggatgaccagctcagcctcccctcgccctgcagggctgcaaaagttttgcatgcagaaatgtgtcagtctggtgcctggcgtcacactggatttgatagaaaatcgtgccaagcggacctcgtgaaggacaacggccacaagtacttcctgtcggtcctggcggacccctacatgccagctgaacaccggaccatgacggctttcattctcgccgtgatcgtcaacagctatcacacggggcaggaagcctgccttcagggaaacctcattgccatctgcctggagcagctcaacgacccgcaccccttgctgcgccagtgggtggccatctgcctcggcaggatctggcagaacttcgactcggcgaggtggtgcggcgtgagggacagcgctcatgagaagctctacagcctcctctccgaccccattcccgaggtccgctgcgcagcggtcttcgcccttggcacgttcgtgggcaactctgcagagaggacggaccactccaccaccatcgaccacaacgtggccatgatgctggcccagctggtcagcgacgggagccccatggtccggaaggagctggtggtggctctgagtcatcttgtggttcagtatgaaagcaatttctgcaccgtggccctgcagttcatagaagaggaaaagaactacgccttgccttctccagcaaccacagagggagggagtttgaccccagtgcgagacagcccgtgcacccccagacttcgttctgtgagctcctatggaaacatccgtgctgtcgccacagccaggagcctcaacaaatctttgcagaacctgagtttgacagaggaataccaaaaggagggtcccgggagcaccccactgaccccgttgcgtctcgggcagctggtggcgcggtggcggttctcccccggaaacctcagcaccagcagcagcgccagcagcaccctgggcagccccgagaatgaggagcatatcctgtccttcgagaccatcgacaagatgcgccgcgccagctcctactcctccctcaactccctcatcgctctaatttgggattcccagctaaagacaagtgggaaagtgggtcctacgtacacacgagaggccatggtggtgggcttcggcggcagcagccagccctgtgaggtttggcagcacacgacagcagaagccactggagcagcgcacctgcggtctcacctcaactaccaaactcctttcgaagccactggacagcagcggcccgtgcaagatggcccagcgcgggggcaccgtggggcgcagcagcccgacgccgtgagaaggccgtgccacaaatcagcttcaatttggcacagctgccccctgggtgttcacattcactgctttgccaggaagcctggagcccgagcctggtgtgagtcactcctgctcgcctcttccttcccgcgggccgagcggctgactaaagctcccttcatgctcacgtcagtcgccagggcagtacgcagatgcgtgcccaggttcttcatccctgatgtccgtcaaacccaaccatggggacacagtgacacccggcagaagggtgccagggaccaggaggaggccagggcggtgcttccctgccccagcctagcaattaagggcatcgccgctgtgattctacatgaacacagttcactccgctgtacctgggctgggccggaggccctggctgctggcagtggctgcaccagtgaccgctacagtggccgggtgccgctggctgctctcttctag

SEQ ID NO: 120876 - DNA, 1143 bp, Homo sapiens
atgaccggcttcccgtttcaggcagaaaccactgtctatgttattgtgagatgtaagctggatgacagggtggcgacagaagcagagttttctcctgaggattctccctctgtaaggatggaagccaaggtggagaatgagtacaccatttcagtgaaggctcccaacctttcatctgggaacgtttctctgaagatatattctggagacttagtggtgtgtgaaaccgttatcagctattatactgacatggaagaaattgggaatttattgtccaatgccgcgaatcctgtggaattcatgtgtcaggcctttaaaattgtgccctacaacacagagacccttgataaactgctaaccgaatccctgaagaacaatatccctgcaagcggactgcacctctttggaatcaaccagctggaagaagaagatatgatgacaaatcagagggatgaagagctgcccaccctgttgcattttgctgcgaagtatggactgaagaacctcactgccttgttgctcacctgcccaggagccctgcaggcgtacagcgtggccaacaagcatggccactaccccaacaccatcgctgagaaacacggcttcagggacctgcggcagttcatcgacgagtatgtggaaacggtggacatgctcaagagtcacattaaagaggaactgatgcacggggaggaggctgatgctgtgtacgagtccatggcccacctttccacagacctgcttatgaaatgctcgctcaaccccggctgtgacgaggatctctatgagtccatggctgcctttgtcccagctgccactgaagacctctatgttgaaatgcttcaggccagtacatctaacccaatccctggagatggtttctctcgggccactaaggactctatgatccgcaagtttttagaaggcaacagcatgggaatgaccaatctggagagagatcagtgccatcttggtcaggaagaagatgtttatcacacggtggatgacgatgaggccttttctgtggacctggccagcaggccccctgtcccagtgcccagaccagagaccactgctcctggtgctcaccagctgcctgacaacgaaccatacatttttaaaggcaagtatggcagggaatga

SEQ ID NO: 120877 - DNA, 561 bp, Homo sapiens
atgccgtcttcccggcgccgcgctcccagagctcgcgccgcctcccggggcgccgcgcgggtggcgcagatggtactgagaggatctgtcttcctctctcagtggacacgacagattcatcgctgtgtgggggacaccgagtgtgagcgtcagggtcagcagcagggccttggaggcagaggggaccctgcacaagacctaaatgtcattgaagaagtgattcgaatgatgttagagatcatcaactcctgcctgacaaattcccttcaccacaacccaaacttggtatacgccctgctttacaaacgcgatctctttgaacaatttcgaactcatccttcatttcaggatataatgcaaaatattgatctgcaagtactgagtaacaagcagcagcatctgctgctgggaaagatcaagggcatggatacacaccctgctctgggacccaggtatgcagaactcactgaaagcagaacgtggagcatgaacgttgaaaaacctgtggcacttcagatcccagcaaagcacaaggcatcattagaggatgtggtacactga

SEQ ID NO: 120878 - DNA, 1056 bp, Homo sapiens
cccacgcgtccgaatattttttagtatcacttggtattcattacgagttttaactgaaatctccttgtgggggggcctgatcctggtggtaataataaccattcaatacgacatgactaggacacgaaacaagtaccttcacacaaatagtttggtagctttagcaaatatgtcggcacagtttcgtttctctccatcagtatgctgcgccagaggatcatcaggttattttctttgctgtctaaaaaacacaacaaagttctggaacaagccacacagtccttgagaggttcgctgagttctaatgatgttcctctaccagattatgcacaagacctaaatgtcattgaagaagtgattcgaatgatgttaggagatcatcaactcctgcctggacaaattcccttcaccacaacccaaacttgggtattacgccctggcttttacaaacggcgatctctttggaacaattttcggaactcatccttcatttcagggtattaatggcaaaatattgatctgggtcatcttccttctttaggcttcaagggttggctggcaagctgggagctgagctgtcagtggaacgggtcctggaaatcattaagcaaggcgttcgttgcgctgcccaaagacagactgaagaaatttccagaattgaaattcaaatatgtggaagaggagcagcccgaggagttttttatcccctatgtctggtctcttgtctacaacttcagcagtcggcctgtactgggaattccacaggacattccagctgtttcaccatgggtttccgactgagggcaggatgctctcccacccggacccctccagccaagcagcccttcaagttcttttatttctgggtaacagaagtagacagacaggttacttggtgtatcttctgttaaagagggtttgcacgagtgtgttttcctcacacactttgatttggagaattggtgctagttggcaatagataactcagcgtagatagtattgcaaaaaggggaggaaatacacaacaataataaatgtaaaaacctgctattaaaa

SEQ ID NO: 120879 - DNA, 206 bp, Homo sapiens
tgccctcagccagcagacccgcctggcacgctcccgcactgcatccctcaccagtgccagctcgtggatggcagccgcccacaggcctgcacccactcagagagcagcgagggctgggccagcacatgtgacaatcatctggacaacagccacaagggggcgtcggaccaggcagccactttcctggtgctctctgggcccagctg

SEQ ID NO: 120880 - DNA, 601 bp, Homo sapiens
gcgaatacaaccctctatgatgtgagacttccttcctgtcatccacggcactgccaggactggggagcaggaaggggactggatttgagctgtccagaggtgtggggcctgagtttgccccagtccctggaagaggatgtccggatgtcatcccaccagttggaatgatcgtggactaagaatggccccatagctctaagagatgggttcctgcgaccaatggcaaaggccttgtgttccctgggaggcagtggttatgccaagagatccacaaagatggcgttggctgtggtctggccgaagatgaaggctcccagggtgaccaagaggactccgtagctgaccagcacccaccagctggctggtttgacctcttccatctcagagagtttggcttgaatgaggcacagccctgggaagacgaagatgaagcaggcggccaggcctccaatgactgagatcaccttgccgatgtcagggatgaagagcgccagcagcagggtgagcaggaaccagaccagcgtctgcagcactcgccgccgccgctcccgccccacgtcctcctccactggcaccccctggtagcgcagccacaggcctt

SEQ ID NO: 120881 - DNA, 1407 bp, Homo sapiens
atggaggaaatcctggggggaaggatggaacaggggcctcaggacttgccccttgttcctggggtctttgttcccaagtgccacgtcagcagtgtgcccgtcttcaacagcatgcagcagcctgaagtgaagacctggggtggagtggtgacagctgccatggtcatagccctcgctgtctacatggggacaggtggtcttggcacaggcagcctgactggtataggaactggtgctcttggactccctgcagtgaataacgacccttttgtacagaggaaactgggcacctctggactgaatcagcctacattccagcagagtaagatgaaaccttcggacttgtctcaggtgtggccagaggcaaaccagcactttagtaaagagatagatgatgaagcaaacagctatttccagcgaatatataatcatccaccacatccaaccatgtctgttgatgaggtattagaaatgctgcagagatttaaagactctactataaagagggaacgagaagtatttaactgtatgctaaggaacttgtttgaagaatatcgtttttttccccagtatcctgataaagagttacatataacagcctgcctatttggtggtataattgagaaaggactggtcacttacatggcactaggtctggctctacgatatgttcttgaagccttacgcaagccttttggatccaaaatgtattatttcgggattgctgcactagatagatttaaaaacagcacatgtgacaatcatctggacaacagccacaagggggcgctcggaccaggcagccactttcctggtgctctctgggcccagctgcccgttctgcgctcgcgccgcggtctcctgcagttcccagcggcctctctgggggtcggacctggtcactgcgcgcacttatctcaggtggcggggcccgtggacggcggcgacctggatcctgtggcctgcttcctgagctggtgccggcgggtggggctggagctgagtcccaaggtggcggtcagccggcagggcacggtggccggctacggcatggtggccgggagagcgtgcaggcggagaactgctgtaagtggtgccgcgggccgcgctcctgtcgacagaaacctggcccaatcgggggccgctggagcaagtggcaccgcggcgggcaaggcccggggcggccaggcggaagggcgggcactgggccccccaaagtccctgaaggtttgcttgcccgagctttacagcctggcactaggtcaatcggagctcctttgggaccttcagcatagctgtggcttctggtgggtgctggtcagctacggagtcctcttggtcaccctgggagccttcatcttcggccagaccacagccaacgccatctttgtggatctcttggcataa

SEQ ID NO: 120882 - DNA, 2111 bp, Homo sapiens
cctgaagatggcagactctggagggctgccccaggtcacacagccagggaagctgactgaagccttcaaatacttcctgcaaggcatgggctacatgccctcagccagcatgacccgcctggcacgctcccgcactgcatccctcaccagtgccagctcggtggatggcagccgcccacaggcctgcacccactcagagagcagcgaggggctgggccaggtcaaccacaccatggaggtgtcctgttgaagcccttgatcccgctgacgacgcccacgtcgaggccccaccgccatccttgcgccggctcatgttccctttagtttatttttgtgagggcaaaggggaggaaatggggttctgtttgaaaaaaatgaggggatcttagatgctgcagcagaacagtctccaggtgttttaaggggctcagtcctcctctattccatctcactctccgtgggaacttaaccaacttgacccctctcatcccactcccggcggcccaggcacagaagggcagggccatagggagggagattcgctacggatccaggtcattcctgggtgagcccttgggcaggcatgtttggagatgagagaggcttcgagagggtgggtgctgggccacaggggtgcggggccagctcaggcactggcgtgggagccctgggagaccccttcccccaccctttcaccaagcacacctgtttctgtctcatagcacatgtgacaatcatctgggacaacagccacaagggggcgcttgggaccagggcagccactttcctggtgctcttttgggcccagctggtgctgtagggccacgcaggcaggggcgtcaaggggtttctctgcccaaggaagacagaacatggagaaccgtcagggcaggaaccccacagactgtcccttccagcccacactctgccacctcctggccctgtcccaattctgagccaaggcctccccgaggcagaagttgcctggtcctctgtccccacagtgacctgactgggggtgagggagaaggaggagagagcccatgtgtggtgtgtgggccccttagaacctttgggtgaacggcctttgggagcccgcagtgggccagaggcaggggtagctgagttcctgggagaccccttttttgcccccaggtttccccagaaggcaacgcattcagttagcagtgtggtgtttcaggcagagctctggccaggctgtgccagtgtgtcccggacgcatcactaaggaagagagagtttatttagtcaactggcccaaggcagcgaggcttctacagtcccacaccccatagccgcctgggctggggcttactgggggctgaaggttctggacatgaacaagggtcaggtagaagagaaaggcttcccctacaccccagcctcctgctgtcccctgaagcccaggactgcgttgtatgctttccatccactcaccttaccccatagcatcttgcggcccagaaaccagagccatttgtctcagaccctaaatcaataatcacaaaccccaaaacgggagagagcagtgaaaacatgcagggctgtggacgggggaagggttgtggcgggtgttctgaggctgagaggacacctatatgcgtatttcctctacacacatcaccccccttctataatcttaagccatgactagcctggtggcgtgttagtttctgcccagttctaccccctcatgtgcttcttctgaatactgaatgtgactgtttgaaagctggtagaattcatccctcttactgtagataacactgcaaatcttggaattttgttttttgctgtttccagatgtatctataaatatctatacattatatgtgtgtgtgtgtgtgtgtgtgtgtacatcgggtcctcccatgtgtggtgttcttctggaggttgtctctttggtcaaggtgaacttttaatgtttattattttcttctccgcacaaagtaaagagcctaattttgtgtattctggtggctgctgtcatgagatgataaaatgtaaaacaaaactctagtcaacgtagaaagagttaactgtgctgaaaaactaataaagaacctaagaagaaaaaaaaaaaaaaaaaa

SEQ ID NO: 120883 - DNA, 554 bp, Homo sapiens
atgtttgaaacagtctctaaggaggttgcctggtatgaattagctataagctattctataaaaagagctacaagctttaaaagcctagcagcaaatcgagtagaagtgattttagatgagagcagcagcaagagagaaaaggtggtgctcaaacctaatgatgtttcagtatttacgacgctcaccattaatggacgcctgtttgcttgcccgcgagagcaattcgattcactggtaggtgtggatggcctgctcagagcagcattgcaatcagaaaaacttgtctggagcctaattttgcagtcacactgaacccagtggctaaaaaatcttgaatggtacttagctttttctttttctgcagactattaggtaagcctcaggtgttcatttgagatgctcaaggcttttgattttcttttgtgaaaattagccaagtagcaccactattagggcataattcagctttcagaactctttgttgtaattcgcctcattggtatgtccccagtttaaatattaagaatctgaatacttacaccaggatggaaata

SEQ ID NO: 120884 - DNA, 402 bp, Homo sapiens
atggtccttgtgcctgccgagtctgcttctgcatggatgggtccacaggacaagctggagatctggatggagtcatcagaagtgcagaagcctgaaaagacattacaaaaggccaatcttacgttctgcaatggcctcatgcgctcacgggttcggggggccgatgctgcccaagccaaggtcctgaccttcctggacagtcactgcgagtgtaatgagcactggctggagcccctcctggaaagggtggcggagatacacaatagggagttcttcaagctgatctgtgcctgtgcatttggcaaggacaaaagcagatgctctgatgtgactgtttcctggttcttcctctttgcattgaaacctgctctctccgatcttcggcaaattcgccccgaggaa

SEQ ID NO: 120885 - DNA, 753 bp, Homo sapiens
atgaaggtcttattagagtcagttaaagaaagagcggaagaagagaaattggcagcagcacatcttaggagttttgctgcaaaaaaagcaaagaaatatgatagtgtcaaaaaggaaaaaactcttcaggatgtggacttaactcagcatcagcacaaacagacccgagctctgtctggaggcctgaagaggaagctctcccttggcattgctttcatgggcatgtcgaggaccgtggttctggatgagcccaccagtggggtggacccttgctcccggcatagcctgtgggacattctgctcaagtaccgagaaggggaagaacaaccatttgcctggctattcattaccagtgtcatccgagctgatccccctgttggtgttgcaggggcagcttggtttgttggaaggactcctgtgttgggtaccattaaacaagctaattacaccttttatattgtggacaaactaaaaactttatcagaaacactgctggaaatgtccagccttttccagagaagtggaagtggccagatgttcaaccagctgcaggaggccctgagaaacaaatttgtaagaaactttgtagaaaaccagttgcacattgatgtagacaaacttactgaaaaactccagacatacgccactgctgaaggtattcctagcattcttctaggcactggggacggtggccaagaagacagacaagctcctgcccctcatgaagcttatattacagcaggcgacaaataa

SEQ ID NO: 120886 - DNA, 496 bp, Homo sapiens
  misc_feature (1)...(496): n = a,t,c or g
gaagttacgagnnncnnnnaattgagnccctgacgatcataggcagngcggnggaattctattaataaacaccatctccatcggactgattacaagactatcatcgtcttgcaagcttccacctccttcatggagccttgtataggcctcccttcccagaagccctgcnnnnnnnnnnnnnnnnnnnnnnnnnnnnnnnnnnnnnnnnnnnnnnnnnnnnnnnnnnnnnnnnnnnnnnnnnnnnnnnnnnnnnnnnnnnnnnnnnnnnnnnnnnnnnnnnnnnnnnnnnnnnnnnnnnnnnnnnnnnnnnnnnnnnnnnnnnnnnnnnnnnnnnnnnnnnnnnnnnnnnnnnnnnnnnnnnnnnnnnnnnnnnnnnnnnnnnnnnnnnnnnnnnnnnnnnnnnnnnnnnnnnnnnnnnnnnnnnnnnnnnnnnnacaggatgcttcatagaaatattaaaaaaatgagagcacggttgagatataaagaacaaggg

SEQ ID NO: 120887 - DNA, 875 bp, Homo sapiens
atgcgtctgctgaggctcaagttaaaagtggagcagcacgtggagctgtaccagaaatacagcaacaattcctggcgatacctcagcaaccggctgctggcacccagcgactcgccagagtggttatcttttgatgtcaccggagttgtgcggcagtgggttggagccgtggaggggaaattgagggctttcgccttagcgccccactgctcctgtgacagcagggataacacactgcaagtggacatcaacgggttcactaccggccgccgaggtgacctggccaccattcatggcatgaaccggcctttcctgcttttcatggccacaccgctggagagggcccagcatctgcaaagctcccggcaccgccgagccctggacaccaaatattgcttcagcttccacggagaagaactgctgcgtgcggcagctgtacattgacttccgcaaggacctcggctggaaagtggatccacgaggcccaagggctaccatgccaacttttgcctcgggccctgcccctacatttggagcctggacacgcagtacagcaaggtcctggccctgtacaaccagcataacccgggcgcctcggcggcgccgtgctgcgttccgcaggcgctggagccactgcccatcgtgtactacgtgggccgcaagcccaaggtggagcagctgtccaacatgatcgtgcgctcctgcaagtgcaacttaggtcccgccccgccccgccccgccccggcaggcccggccccaccccgccccgcccccgttgccttgcccatgggggctgtatttaaggacacccgtgccccaagcccccctggggccccattaaagatggaaagaggaaaaaaaaaaaaaaaaaaaaa

SEQ ID NO: 120888 - DNA, 635 bp, Homo sapiens
tttttttttttttttttcacatttgatggtgtttattaatattattatttacatccatctccatcggactgattacaagactatcatcgtcttgcaagcttccacctccttcatggagccttgtataggcctcccttcccagaagccctccgtctcaccagactggaggattccctggcctttgtggggccggagttccctcgctccagggctccagggctccttgccaagagtccagatgctggcgctggcaccggccccactcccagggagaacagatgggcgtctgcaagtgcacttggctcagccagtttctggcagacgacagaagcagggagacccacgggagggtagacgagagcaaatacagcaacaattcctggcgatacctcagcaaccggctgctggcacccagcgactcgccagagtggttatcttttgatgtcaccggagttgtgcggcagtggttgagccgtggaggttcctgctgtgtgcctggccatgtgctgggtggtgtgggggacatagtgataaccaagacagccctcagttctgccctcatggggcccacagtcacttctggacacctaagagatcttgtcaaggccccaccaggcaggaatgacctagaatga

SEQ ID NO: 120889 - DNA, 2010 bp, Homo sapiens
cgccgggtaccgccgtagggagccgcggcctcaggggaagagacggatgatgaacaagctttacatcgggaacctgagccccgccgtcaccgccgacgacctccggcagctctttggggacaggaagctgcccctggcgggacaggtcctgctgaagtccggctacgccttcgtggactaccccgaccagaactgggccatccgcgccatcgagaccctctcgggtaaagtggaattgcatgggaaaatcatggaagttgattactcagtctctaaaaagctaaggagcaggaaaattcagattcgaaacatccctcctcacctgcagtgggaggtgttggatggacttttggctcaatatgggacagtggagaatgtggaacaagtcaacacagacacagaaaccgccgttgtcaacgtcacatatgcaacaagagaagaagcaaaaatagccatggagaagctaagcgggcatcagtttgagaactactccttcaagatttcctacatcccggatgaagaggtgagctccccttcgccccctcagcgagcccagcgtggggaccactcttcccgggagcaaggccacgcccctgggggcacttctcaggccagacagattgatttcccgctgcggatcctggtccccacccagtttgttggtgccatcatcggaaaggagggcttgaccataaagaacatcactaagcagacccagtcccgggtagatatccatagaaaagagaactctggagctgcagagaagcctgtcaccatccatgccaccccagaggggacttctgaagcatgccgcatgattcttgaaatcatgcagaaagaggcagatgagaccaaactagccgaagagattcctctgaaaatcttggcacacaatggcttggttggaagactgattggaaaagaaggcagaaatttgaagaaaattgaacatgaaacagggaccaagataacaatctcatctttgcaggatttgagcatatacaacccggaaagaaccatcactgtgaagggcacagttgaggcctgtgccagtgctgagatagagattatgaagaagctgcgtgaggcctttgaaaatgatatgctggctgttaaccaacaagccaatctgatcccagggttgaacctcagcgcacttggcatcttttcaacaggactgtccgtgctatctccaccagcagggccccgcggagctccccccgctgccccctaccaccccttcactacccactccggatacttctccagcctgtacccccatcaccagtttggcccgttcccgcatcatcactcttatccagagcaggagattgtgaatctcttcatcccaacccaggctgtgggcgccatcatcgggaagaagggggcacacatcaaacagctggcgagattcgccggagcctctatcaagattgcccctgcggaaggcccagacgtcagcgaaaggatggtcatcatcaccgggccaccggaagcccagttcaaggcccagggacggatctttgggaaactgaaagaggaaaacttctttaaccccaaagaagaagtgaagctggaagcgcatatcagagtgccctcttccacagctggccgggtgattggcaaaggtggcaagaccgtgaacgaactgcagaacttaaccagtgcagaagtcatcgtgcctcgtgaccaaacgccagatgaaaatgaggaagtgatcgtcagaattatcgggcacttctttgctagccagactgcacagcgcaagatcagggaaattgtacaacaggtgaagcagcaggagcagaaataccctcagggagtcgcctcacagcgcagcaagtgaggctcccacaggcaccagcaaaacaacggatgaatgtagcccttccaacacctgacagaatgagaccaaacgcagccagccagatcgggagcaaaccaaagaccatctgaggaatgagaagtctgcggaggcggccagggactctgccgaggccctgagaaccc

SEQ ID NO: 120890 - DNA, 3667 bp, Homo sapiens
tatatcatgtaagctagtcacacctatttgaattcacttttctttgtttcttgatttcttatggctattattgcaacaatcaaacaaattttgaataccttttgtgagctagcactgtggaaatatgagggaagtttattgtgttcttactttaaatagtttgcagttttattgtgtatacaaatgtatgcatgtgaaatatacagattttaaaaaagcagatcattaaagattaggtcataaggtgtagtctgtacatggaggaagagctaagttgattcagaataacatggttagatttcgaagctagcctggatttgaatcttggatccaccactgactagctatgtaagcttagtcaagcaactcaacggaggaggcgaggagcgccgggtaccgggccgggggagccgcgggctctcggggaagagacggatgatgaacaagctttacatcgggaacctgagccccgccgtcaccgccgacgacctccggcagctctttggggacaggaagctgcccctggcgggacaggtcctgctgaagtccggctacgccttcgtggactaccccgaccagaactgggccatccgcgccatcgagaccctctcgggtaaagtggaattgcatgggaaaatcatggaagttgattactcagtctctaaaaagctaaggagcaggaaaattcagattcgaaacatccctcctcacctgcagtgggaggtgttggatggacttttggctcaatatgggacagtggagaatgtggaacaagtcaacacagacacagaaaccgccgttgtcaacgtcacatatgcaacaagagaagaagcaaaaatagccatggagaagctaagcgggcatcagtttgagaactactccttcaagatttcctacatcccggatgaagaggtgagctccccttcgccccctcagcgagcccagcgtggggaccactcttcccgggagcaaggccacgcccctgggggcacttctcaggccagacagattgatttcccgctgcggatcctggtccccacccagtttgttggtgccatcatcggaaaggagggcttgaccataaagaacatcactaagcagacccagtcccgggtagatatccatagaaaagagaactctggagctgcagagaagcctgtcaccatccatgccaccccagaggggacttctgaagcatgccgcatgattcttgaaatcatgcagaaagaggcagatgagaccaaactagccgaagagattcctctgaaaatcttggcacacaatggcttggttggaagactgattggaaaagaaggcagaaatttgaagaaaattgaacatgaaacagggaccaagataacaatctcatctttgcaggatttgagcatatacaacccggaaagaaccatcactgtgaagggcacagttgaggcctgtgccagtgctgagatagagattatgaagaagctgcgtgaggcctttgaaaatgatatgctggctgttaacacccactccggatacttctccagcctgtacccccatcaccagtttggcccgttcccgcatcatcactcttatccagagcaggagattgtgaatctcttcatcccaacccaggctgtgggcgccatcatcgggaagaagggggcacacatcaaacagctggcgagattcgccggagcctctatcaagattgcccctgcggaaggcccagacgtcagcgaaaggatggtcatcatcaccgggccaccggaagcccagttcaaggcccagggacggatctttgggaaactgaaagaggaaaacttctttaaccccaaagaagaagtgaagctggaagcgcatatcagagtgccctcttccacagctggccgggtgattggcaaaggtggcaagaccgtgaacgaactgcagaacttaaccagtgcagaagtcatcgtgcctcgtgaccaaacgccagatgaaaatgaggaagtgatcgtcagaattatcgggcacttctttgctagccagactgcacagcgcaagatcagggaaattgtacaacaggtgaagcagcaggagcagaaataccctcagggagtcgcctcacagcgcagcaagtgaggctcccacaggcaccagcaaaacaacggatgaatgtagcccttccaacacctgacagaatgagaccaaacgcagccagccagatcgggagcaaaccaaagaccatctgaggaatgagaagtctgcggaggcggccagggactctgccgaggccctgagaaccccaggggccgaggaggggcggggaaggtcagccaggtttgccagaaccaccgagccccgcctcccgccccccagggcttctgcaggcttcagccatccacttcaccatccactcggatctctcctgaactcccacgacgctatcccttttagttgaactaacataggtgaacgtgttcaaagccaagcaaaatgcacaccctttttctgtggcaaatcgtctctgtacatgtgtgtacatattagaaagggaagatgttaagatatgtggcctgtgggttacacagggtgcctgcagcggtaatatattttagaaataatatatcaaataactcaactaactccaatttttaatcaattattaatttttttttctttttaaagagaaagcaggcttttctagactttaaagaataaagtctttgggaggtctcacggtgtagagaggagctttgaggccacccgcacaaaattcacccagagggaaatctcgtcggaaggacactcacggcagttctggatcacctgtgtatgtcaacagaagggataccgtctccttgaagaggaaactctgtcactcctcatgcctgtctagctcatacacccatttctctttgcttcacaggttttaaactggttttttgcatactgctatataattctctgtctctctctgtttatctctcccctccctcccctccccttcttctccatctccattcttttgaatttcctcatccctccatctcaatcccgtatctacgcaccccccccccccaggcaaagcagtgctctgagtatcacatcacacaaaaggaacaaaagcgaaacacacaaaccagcctcaacttacacttggttactcaaaagaacaagagtcaatggtacttgtcctagcgttttggaagaggaaaacaggaacccaccaaaccaaccaatcaaccaaacaaagaaaaaattccacaatgaaagaatgtattttgtctttttgcattttggtgtataagccatcaatattcagcaaaatgattcctttctttaaaaaaaaaaaatgtggaggaaagtagaaatttaccaaggttgttggcccagggcgttaaattcacagatttttttaacgagaaaaacacacagaagaagctacctcaggtgtttttacctcagcaccttgatcttgtgtttcccttagagattttgtaaagctgatagttggagcatttttttatttttttaataaaaatgagttggaaaaaaaataagatatcaactgccagcctggagaaggtgacagtccaagtgtgcaacagctgttctgaattgtcttccgctagccaagaacctatatggccttcttttggacaaaccttgaaaatgtttatttaaaaaaaaaaaaaaaaaa

SEQ ID NO: 120891 - DNA, 352 bp, Homo sapiens; identical to SEQ ID NO: 118591

SEQ ID NO: 120892 - DNA, 1774 bp, Homo sapiens
gtccaagagtgatcttgtggtgaatgacgtcaggcctggatctttcaatttaatgcagcagcctccgctctggcccaaggtggatccagaaatgctgatgaggggccaaggcctgaaattggtgtccctaggagagcccactcgttgctccatcactctatcatcaagcttgtactcaagctcaggagtctctccccatggctaccacatctggaaatgctctgggtcacccccaaatccagttctatactgggtgtcacccaaggcccacagtgaatactacctgattaccactaaggtgtattcaaggcccaagggctctttaggcaaacttaacccacccagacctgtgctggcccttgcttctactgggttatcagagcaattgttaaattttcaagaattttgtaagctcttcgatgtcacattcacaacttatattggcaatgctgcttcaaatgtcaccatttgcacttcatcttgctctcgttccatgctctccatttcccacatttctgggtctgctaatggccacattctgcgcccctgggccagtggctgcggagggtgtactgggtcccccagcagtgccagcccactgacgctgcgctcgatttctcaccgggccttagctgccttcccgctgggcagggctcgggacctgcagcccaccgtgcctgagcctcccaccctctccgtgggctcctgtgcggccggagcctccccgacgagtgccacaccctgctccacggggcccagtcccatggaccacccaagggctgagcagtgcaggtgcaccatgcaggactggcaggcagctccacctgcagcccccgtgtgggatccactaggtgaagccagctgggctcctgagtctgcacgctcagatgtttttcatgtaaaacattgcaaccctgtctgctttgttgtattggtcaaatttgactcatccgttaaatcaagagttagaaatgggagacttcctcttgatgttgcagaagtgaacactccacatgaaagcaggactgcaatggactcttgcagacagcctattgtgggacctagtgattgtcttcagaagcagacactgagcctcaaatctgctaagattgccctgagtgagagtcttatctcctgtagagaaagagctgaaactgtgaaaaaacagacaagctcttatcatacgagtgagtggtgtacctgcaaggaaagatgcatgcacagccttgccaggagacggctctgcaacgggtacaggctgctgtgcaagctgctcccgcttgggccatatgacccagatccagcagatccaatggagcttgaggtgtcagtggaagatagggatgctgtttggagcctttggcaggcccccaaagccacccctgtcatcgcccaatgggcccatgaaaaacgtggccgtggtggcagagatggaggttacacatgggctcagcaacatgaacttccattcacaaaggctgacctggctatggcccctgctgagtgcccaatttgccagcaggagagaccaacactgagccctcgatatagcaccattccttggggtgatcagcaagccacctggtggcaggttgatcatattcaacttcttccatcatggaaagggcagagccttgtcctcactgaaatagactcttactctggatatgggtttgcctgtactgcatgcaatgcttctgccaagactgccattggtggactcatggaatgccttatccatacaatattgcctctgaccaaggcactcacttaa

SEQ ID NO: 120893 - DNA, 1018 bp, Homo sapiens
atgcaagtggctgacctacaacaaaaggtgtatgctcagcctcaccacctgtctactgataaagtaagggcaatgattggaaaagaatgggaccctgcatcttggaatggggaaatgtgggaggaccctgatgaagctggggacgctaagcttgtaaactctgataagcctttcttgccagaggaaacagcctccctgcccccagtggtggcaacattccctcctccactcacactgccatcagtcttgccacctttgaattaaggtgattaaccatacactgcctgaggcaacagtgatggcctctcttgaggcagttgccaggcaagataatgctgattctcctcaggaactacccccaacacccctgtttgcttctagacctgtaaccaaagtcctggcaggcctcaagagatcttacagtggaaccacagtcactcaattagaaaatttaaaagcaatgggaataattggatcccgaggtggcagggaccaagtggcagcactcaactgtcaaaggcaagacctccaacctttcaccagagtaactgtgcaatggggaaagaggaatgttcagactttttggggattattgtacactggatctgagttgatgttcattccaggggaccaaaatgtcactgtggtcctccagttaaaccgggggcttacagaggggtatatcatctccccggctttgtgccagaatcttgtttgcagagatcttgatcacttttcccttctacaagatatcacatgggtccgttacattgattacactatgctgattggatctaatccaatggtgcttgaggtgtcagtggcagatagggatgctatttggagcctttggcaggcccccatagatgaattacagcaaaggtctctaggattttggagcagggccctgccatcttctgcagataaccatcctcctttcgacatgcacctcttggcttgttatcgggctttgatagaaactgaatgtttgactatgggtcatcaagtcaccatgtga

SEQ ID NO: 120894 - DNA, 1937 bp, Homo sapiens
atgcaggcaggtgtggacgtttggctcctcagaatagggagtccccagacagcgatgccggctcagcctgctcatcctggaaactggcggcccttgcgagggcggcgacagtggaatgcgttgaggactgccctgctaatgagattagttcgtctgaaacgtggaaatggtgcagatcacatcatatatcgtttaggaaccgttctgattactactaacaggacgcacgatggctgcgggatcccagtcatcatgttcacattccaggagtgcagaaaagaaaaaactgcaaacacagccggacatcagaaggaacaaacgggggacacgctgcctttaagaaacataacaggcaccgtgagggtccacggcttcattcttgaagttagtgagaccaagaacccacctaatcccgggcacaaaaccacctcaatctcccaaagaccgaaagccctggtgtcgctgggaccagaggtgagacgtggaacacgtggggaagatgagaaggcgctggagaaggagggtggtggtcgcagatgggaatgtggtgaagccaatgagctgtgcgggagacctccagccttcaccagggtaactgtgcattggggaaagggaaatgatcagacatttcaggacctattggacactggctctgagctgacattgattccaggggacccaaaacgtcattgtggtcctccagttaaaataggggcttatggaggtcagataattaatggagttttagctcaggtccaacttacagtggatgcagtgggtccctggactcatcctgtggtcattttcccagtgccagaatgcataattggcatagatatgcttagtagcaggcagaacccccacactggctccctgactggtagggtgtggactattatggtgagaaaggccaaatggaagccattagagctgcctctacctagaaaaatagtaaatcaaaaacagtatcacatccctgaagggattgtggagattagtgccaccatcaaggacttgaaggatgcaggggtggtgattcccaccacatccccattcaactctcccatctggcctgtgcagaagacagacggatcttggagaatgacagtgggttactgtaagcttaaccaagtggtgactccaattgcagctgctgtaccagatgtggtttcattgcttgagcaaattaacacacctcctggtacctggtatgcagccattgacttggcaaatgactttttccccattcctgtccataaggcccaccagaagcaatttgccttccgctggcaaggccggcaatacacctttactgtcctacctcaggggagatgggaaataaatatgactaaaattcagggaccttctacctcagtaaaatttctaggggtccagtggtgtggggcttgtcaagatattccttctaaggtgaaggataagttgctgcatttagtccctcctacaatcaagaaagaggcacaacgcctagtgggccaattaggattctggaggcaacacattcctcatctgggtgcgttactctggctcatttatcaagcgacccaaaaggctgccagttttgagtggggtccagaacaggagaaggctctgcaacaggtccaggttgctgtgcaagctgctctaccacttgggccatacgacccagcagatccaatggtgcttgaggtgtcagtggcagatagggatgctgtttggagcctctggcaggcccccttagccacacctgtcattgcccaatgggcccatgaacaaagtggccatggtggtagggatggaggttatgcatgggctcagcagcttggacttccactcaccaaggctgacctggctacagccgctgctgagtgcccaatttgccagcagcagagaccaacactgagccctcaatatggcaccattcctcgtgctgctacctg

SEQ ID NO: 120895 - DNA, 376 bp, Homo sapiens
  misc_feature (1)...(376): n = a,t,c or g
agtttaacttttccttttttgctgtctagtcatcctcgtcggtcttctgcttcttggtatcgacatcgtcatcctcatcatcttcagctgcccgcttgcccgtagctgactcagcttcctcatcttcatctccatcctcttcctcaccatcaccttcttcttcctcctcctcttcatcccaaccttcttcctcttcttcgtccttggtggtgatttcggagctggtgtctacggctgcgtctgacatggtggggcacgccggtgatccgatgcaggggattaaaaagaaagcgagagttcagggactctggcgataaagctgccggagtccgcggcggtgggnngaggcgcgcggcggaggcggctgcggcgagca

SEQ ID NO: 120896 - DNA, 398 bp, Homo sapiens
  misc_feature (1)...(398): n = a,t,c or g
catgtcagacgcagccgtagacaccagctccgaaatcaccaccaaggaagaggaggaggaagaagaaggtgatggtgaggaagaggatggagatgaagatgaggaagctgagtcagctacgggcaagcgggcagctgaagatgatgaggatgacgatgtcgataccaagaagcagaagaccnacgaggatgactagacagcaaaaaaggnaaagttaaactaaaaaaaaaaaggccgccgtgacctnttcaccctccacttcccgtctcagnaatctaaacgtgggtcaccttcgagtagagaggcccgnccgccccaccgtgggcagtgcccccccgcagntnncacggggttttccaccacccaaccccaaaccttgaggtttttncaacnggggg

SEQ ID NO: 120897 - DNA, 410 bp, Homo sapiens
cagttaatgtgcaggtttcatgatggagcctggagggtgttgactggagaagggtctctggggtgggcttggcttggctgggctgtagatgcagccgccagcctctggtgggaggccgggcatcaggagcaacgctctgtccagcctggggccagctggtaatgacatggcctgttttctgtcgaggagaatgaggaaaatggggagcaggaggctgacaatgaggtagacgaagaagaggaagaaggtggggaggaagaggaggaggaagaagaaggtgatggtgaggaagaggatggagatgaagatgaggaagctgagtcagctacgggcaagcgggcagctgaagatgatgaggatgacgatgtcgataccaagaagcagaagaccgacgaggatgactagacagc

SEQ ID NO: 120898 - DNA, 959 bp, Homo sapiens
atttgctttttttacaaggttttttttctcctttgagattataatgaacatggtcacaccacaagtaaagtcagaagtaggacagagaacgctccgaaggctggtttggtcatcccgagatcattaaaaaatggctgaccccttaacaattatgtaccaaaaaatataaaatgtaaaataaaaaaatacaaaacaaaattccctttttaaaagtacttttaaagaaaaaaagcagggccttggaaagttttggttccttttttccctcccctgttgcaaaatcctcatggtttgggttgggtggtgaaaaacgcgtgtcaatctgcggggggcaacttgcccacggtgggcgggcgggcctctctactcgaaggtgaccacgtttagattctgagacgggaagtggacgggtgaatacggtcacggcggccttttttttttttagtttaacttttcctttttttgctgtctagtcatcctcgtcggtcttctgcttcttggtatcgacatcgtcatcctcatcatccttcagctgcccgcttgcccgtagctgactcagcttcctcatcttcatctccatcctcttcctcaccatcaccttcttcttcctcctcctcttcctccccaccttcttcctcttctttcgtctaccctcattgtcagcctcctgctccccattttcctcattagcattcccgttagcaggggcgtctcttccattttctgcctcttccacaacttccttcttctcctttaagtccttggtggtgatttcggagctggtgtctacggctgcgtctgacatggtggggcacgccggtgatccgatgcaggggattaaaaagaaagcgagagttcagggactctggcgataaagctgccggagtaagcggcggcagaggaggcgcgcggcggaggcggctgcggcgagcaaggaggcggatgaggaacaatgcaag

SEQ ID NO: 120899 - DNA, 420 bp, Homo sapiens
atggggcttatcaatgtgaccttaagtgagaagggcactttgatggcgacgttaccggctaacgtccctggcgatatcccggcgattggctttatttctcatgtggatacctcaccggattgcagcggcaaaaatgtgaatccgcaaattgttgaaaactatcgcggtggcgatattgcgctgggtattcagcttggcttctggtcgctgctgttctcgcatatcaccttctgcctgccatttgtggtggtgacggtgtattcgcgcctgaaaggttttgacgtgcgaatctgccatatctcccggcaagacaaagcgcccaggctgaataaagtgcagcccctgctctttacagtggtggagataatcggtccacgcggcggcaatgtccgccagccggttttcgtcggcaggcgctag

SEQ ID NO: 120900 - DNA, 325 bp, Homo sapiens
atgccgggaccccttagaagcgaacgacgccgacagctaccgtttattctggcagtaatccatccgtatgcatcccgatcaggataccctgaaagccatgatgcaggatgccggattcgaaagtgtcgactactacaatctgacggcagggtattgcgcgtggaggtaaaaggcttttcgacgtcattgattctggtgttcagcgaacgccaggttgatgtactgggcgaatgggcaggcgatgctgactgcaccgttatcgcctacgccagtgtgttgccgaaacttcgcgatcgccagcagcttaccgcactgattcgcagtg

SEQ ID NO: 120901 - DNA, 288 bp, Homo sapiens
aggctcaacaccacatggaagcttccaaggcttggggcttacaccctctgaagccatggcctgagctctatgttggccccttttagccatggctggagcagctgagatgcagggcatcaagtccctaggctgtttcggcctgcctatttgcatacttaataggccggataaggcgtttacgccgcatccggcatccgagcaccattgcctgatgcgacgcttacgcgtcttatcaggcctacaaacctgtgcctgaaccgtaggccggataaggcgtttacgccgcat

SEQ ID NO: 120902 - DNA, 849 bp, Homo sapiens
tgcgcccttaacgccggattgttggtgaaaatgaggcaaaaaaacgccgctcgaaagtgactcaggaagccgattttccgggctcaatggacggggcaagtaactttgttcgcggcgatgccatcgccgggatcctcatcatggtcattaacattgtcggcgggttgttggtcggcgtgctgcaacatggcatgagcatgggacacgcggcggaaagttatgcgctattgaccattggcgacggtctggtggcacaaattccggcgctggtgatttctaccgccgcgggggtcatcgttacgcgtgtcagcaccgatcaggatgttggcgagcagatggtgaatcagcttttcagtaacccaagcgttatgttgttaagcgccgccgtgctcggtttactcggcctggtgcctggaatgccgagcctggtatttttgctgttcactgccggattgctcgggctggcctggtggatacgcggacgcgaacaaaaagcgcctgccgaacccaaaccggtaaaaatggcagagaataataccgttgtcgaagcgacgtggaacgatgtacaactggaagattctctgggaatggcaactggtctactcacctgaccccgatgggagattgctcctcctgatgctccacccgctcggaccgcatacccctgtctcccccaatcactctttccccgcatttggcgatctcccccgcgtcaccggcggctccccctgttgcacctcccatcgacgccctgctaccacaacttcactgcgactggtaccccttcgccaacgactctcccttgccgctgcggcttctattgtccagccgggcagctatcccttcggc

SEQ ID NO: 120903 - DNA, 1383 bp, Homo sapiens
ggcggatcgccattgatgacaaagtaagcaaagcggatctggaaatttttgttgatcccttaagcaagccgctgccgttcagcgaagttactggatcgaaaggtaaagcggataaagaaaaggtgggcgattacgtttttggcctgaaggcgcagggactatataacggtgaaccgctcacgggtacggaaaaaataggcggtatgctggcgctgcgtggcgaagggacgccgtttccggtacaggctgatttccgatctggtaacacccatgttgcttttgatggcgtcgtgaatgacccaatgaagatgggcggtgtccatttacagcttaaattttctggcgattcactgggggatctttatgaactgacgggcgttctgctgcccgataccccgccggttgaaacagatggtcggctggtacagaaaatcgacactcctagacgaaccctagctcgtaccctccccattcttccccagccgtttggtcagggcatcaacagcacgctcgacggcagccgtctcttccgcaaaccaggccacttcaagcggaccgggtgccatacgccactcttcagtaatggcttccgccacataacgttgctggcgcttaatgccgtgatgcaggaactttgcgcctccgcgcatggctttgctgattccttcagcggcgatatcaccggtataaggggccagcagttccgcagggtcgaactctgccagatctgccagcgcaacgaagttttgcaccacctgaatatcgccctgcacttccagctcaccactgcgaatcagtgcggtaagctgctggcgatcgcgaagtttcggcaacacactggcgtaggcgataacggtgcagtcagcatcgcctgcccattcgcccagtacatcaacctggcgttcgctgaacaccagaatcaatgacgtcgaaaagccttttacctccacgcgcaatactttacccagcagacgcgagcgggccgttttcagcgcggctgagcgatacaggaaggtgttgagcacactttccattcctgccgtcactaaagggttaaaaggcattttcggcctcctgccagaacttataaccaccatgcaccgccacaacccctgccgtcatactgtattagtccccactttcaaatccggtattctgcatcatggcttttagggtatcctgatcgggatgcatacgcttggattctgccagataacggtagctgtcggcgtcgttcgcgaccagttcctcaacttctggcggcgtatagttttcatcgtgtttcgccagcacttctttcgcgaggatatgattgcctttttccagttcgccctgcaccacaacgccctgcccttcacggaacagatccggcaaaatgccttc

SEQ ID NO: 120904 - DNA, 1038 bp, Homo sapiens
cggctgacgtaactcaggctgatgaaccacgtctcccggacgtagataccaggcatcgccttcctcttcggtcgaatcacatcctgcgcttacatcacgctacgcttaacaccatgtgttgccagtgttacttaccgttcctgtcaccttgtcgaaggaccatttaagaaattctcatgctcaatggcttcaccgccgagcatgatgacaaacgtttttccccgggtggcgcatttggcatcgacgcatgactgccggatgcggcgtaaacgccttatccggcctacggttcaggcacaggtttgtaggcctgataagacgcgtaagcgtcgcatcaggcaatggtgctcggatgccggatgcggcgcacaaattccggcgctggtgatttctaccgccgcgggggtcatcgttacgcgtgtcagcaccgatcaggatgttggcgagcagatggtgaatcagcttttcagtaacccaagcgttatgttgttaagcgccgccgtgctcggtttactcggcctggtgcctggaatgccgaacctgccattgcccaaacagcattgttcattgattctggtgttcagcgaacgccaggttgatgtactgggcgaatgggcaggcgatgctgactgcaccgttatcgcctacgccagtgtgttgccgaaacttcgcgatcgccagcagctatttactcgacagcacccggagctgcccgcggctgggaaaggggaggaggccgaaggggtggagttggggagggtccctcgcgggccccctcgccgcgccccctgcagggcgcacccccggcgggagcgcaaggagctggggcgctcgggacaagggcgcacggaacagccacaatgttatgacactaccacactgccgccgtacgtcgcggcgcaccaaactgcctgctgctggctgacctgccgtttatggcgtatgccacgccggaacaagccttcgaaaacgccgcaacggttatgcgtgccggtgctacggcacaagtctatttcggaaaaacggtcgaccaactga

SEQ ID NO: 120905 - DNA, 413 bp, Homo sapiens
accttcttttcaagggcctgtttcccttccctccataactgttgtgagtattgacagccaggcttctaaacctcttaaaactcctcaactctggtgccaacttagacaatactcttttaagcactcctttttagttgtccccacctgcccagttcccttattaggctgagacactttaactaaattatctgcttccctgactattcctggactacagccacatctcattgccacccaccttaacccacaagtagaagatacctctattccctccttggcaacctatcatgcaccccttaccatctcattaaaacctaatcacccttacccctctcaatgccaatatcccatcccacagcatgctttgaaaggattaaagcctgttatcactcacctgctacagcactcgtgcc

SEQ ID NO: 120906 - DNA, 346 bp, Homo sapiens
  misc_feature (1)...(346): n = a,t,c or g
ctcaggcctcctccttttcctacgcatcaggctcatggntttcctccgacacaagattggcaaattgactttattcatatgccgcgtgtctgtaaatttaaatatctcctggtttgggccaataccttcaccggatgggtcgaggcctttcccactagctctgaaaggctactacagtcatttnttcccttctgacagatataatcccccaatttggcctccctacttccacagtttctcaggctcttggtattcagtggaaacttcataccccctaccgtcctcaatcttcaggaaaggtagaacggntgaatggtcttttaaaaacacaactcaccaagctcag

SEQ ID NO: 120907 - DNA, 500 bp, Homo sapiens
tcaaatcacccaagcagcttctcaggctcttggtattcagtggaaacttcatatcccttatcgtcttcaatcttcaggaaaggcagaacggactcgtggtctttgaaagacacacctcaccaagctcagcctccaacttaaaaaggactggacagtacttttacctcttgcccttctcagaattaagagcctgtcctcgagatgctacagggtacagtccatttgaacttgtatacggatgcgctttcttactcagccccaacctcgtcccagacaccagccccctagacaggtccagcaaaacgtccccagacatttcacaccagcaagctgccgccctcctccacacttacataaaaaacctttctccttatatcaactctactccccccatatttggacctctcacaacacaaactactattcctgtggccactcctttatgtatctctcagcaaagacccactggaattcccctgggtaacctttcaccttcttga

SEQ ID NO: 120908 - DNA, 1023 bp, Homo sapiens
ctgtactcactctttgttgagtctcccacaattaccattgtttctggcccggacttcaatccggcctcccacattattccggataccacacctgaccctcatgactgcatctctctgatccacctgatgctctccccatttccccacatttccttcttccccatttctcaccctgatcacacttggtttattgatggcagttccaccaggcctaatcgccactcaccagcaaaggcaggctatgctataatatcttccacatctatcgttgaggctaccactctgcctccctccactacctctcagcaagccaaactagttgccttaactcaagccctcactcttgcaaaaggactacgcgtcaatatcttactgattctaaatatgcctttcatattcggcaccaccatgcagtcatatgggctgaaagagggattgttcaggtctcctccctttcctacacatcaagctaggggatttgcccctgcccaggactggcaaattgactttactcacatgcctcgagtcagaaaactaaaatatctcttagtctgggtagacgctttcactggatgggtagaggccttccccacagggtctgagaaggccactgcggtcatttcttcccttctgtcagacataatccctcggtttggccttcccgcctctacacagtctgataacggaccggcctttactagccaaatcacccaagcagtttctcaggctcttggtattcagtggaaccttcatatcatttaccgtcctcaatcttcaggaaaggtagaacggactaatggtcttttaaagacacacctcaccaagctcagcctccaacttaaaaaggattggacagtacttttaactcttgctcttctcagaatcagagcctgtcctcgagatgctacagggtacagtccatttgaactcttatatggacacactttcttgcttggccccaacctcatcccagacaccagccctctaggcaactatcttccagtcctccaacaggctagatag

SEQ ID NO: 120909 - DNA, 423 bp, Homo sapiens
atggaccagcctttactagccaaatcacccaagcagtttctcaggctcttggtattcagtggaaacttcatatcccttaccatcctcaatcttcaggaaagagtgaaggtaggctcgagcgtggttattgaggacaagtcgacgagagatcccgagtacatctacaatcagccttacgtaagacaaggttcaaaagagccctaccctgatttggtggcaaggctacaagatgttgctcaaaagtcaattgctgatgaaaatgcctgtaaggtcatagtggagttgatggcatacgaaaacgccaatcctgagtgtcaatcagccattaagccattaaaaggaaaggttcccgcaggatcagatgtaatctcaggtgtacccaacagctccgaagagacagcgaccatccagaacgggccatga

SEQ ID NO: 120910 - DNA, 1290 bp, Homo sapiens
atggcgggcgcccttcccccagcctcgctgccgccttgcagtttgatctcagactgctgtgctagcaatgagcgtagctccatgggcataggaccctctgagccatgtgcaggatataatctcctggtgtgccgtttgacaaagaaaaaaagaataagaagtacgaacaaagtctgggattatgttaaacgaccaaatctaaggataattggtgttcctgaggaagaagagaattctaaaagttgtgaaaacatacttggggaaataattgaggaaaacttccccagccttgctacagacctagacatccaaatacaagaagcacaaagaacaccccagaaattcatcacagaaagatctttgcctaggtacattgtcatcagattatccaaagttaagacaaaggaaagaatcttaagagctgtgagacagaagcaccagatcttcttgactcagcggctgaagactaacactgcccaatcacctcagaagcttcctggaccatcacagacacttctggtaactcttacaagggagattaccattgttcctggcctggacttcaatccggcttcccacattattgcagataccacacctgacccccatgactgtatctctctgatccacctgacattcattcaatttccccatatttccttctttcctgttcctcatcctgatcacacttggttcatcaatggcagttccaccaggcctaatcgccactcaccagcaaaggcaggctatgctatagtatcttccacatctatcattgaggctacaactctgccctcctccactacctctcagcaagctgaattcattgccttaactcaggccctcattcttgcaaagggactatgcatcaatatttatgctgactctaaatatgcttccatatcctgcaccaccatgctgttatatgggctgaaagagacactttcactggatgagcagacgcctttccccacagggtctgagaagcccaccacagtcatttcttcccttctgtcatatataattccttggtttggccttcccacctctaaacagtctgataatggactggcctttattagtcaaatcacccaagcagtttctcaggctcttggtattcagtggaaccttcataccccttatcatcctcaatcttcaggaaagggaagggcaggaagaaatgtggagaagggaaaggcccccatggctgttgggtctggtggggtagcagggatgctgctccctgccggggtgaccatcaagggctggaatctagccagggttctctaa

SEQ ID NO: 120911 - DNA, 1272 bp, Homo sapiens
attatttgctctaggacaggggtccccaacccccaggctgcagactggtatcagtccgaggcctgtcaggaaccgggcagcacagcaggaggcgaacgatggcatgctttaaaaggattaaagcctgttatcgctcgcctgttacagcatggccttttaaagcctataaactctccttacaattcccccattttaccatccaaaaaccggacaagtcttacaggttacacgctgctagcccgcctcttagaatctctcatttcctttccatcgtggaaatctattctcaaggaaataacttctcagtgttccatctgctattctacgactcctgagggattgttcaggccccctctcttccctacacatcaagctcggggatttgcccctgtccaggactggcaaattgactttactcacatgccccgagtcaggaaactaaaatacctcttggtctgggtagacactttcactggatgggtagaggcctttcccacagggcctgaaaaggccactgtggtcatttcttcccttccgtcagacataattcctgggtttggccttcccacctctataatacagtctgataacggattggcctttattagtcaaatcgcccaagcagtttctcaggctcttggtattcagtggctcctggttttacctcaaaccaccacccttaagtctctcttaaagtggataaaagatcttcagtggcaaggtcttacaaacaagctgttattccaagaatctcttcaaaaaacagcaacaaggctttcagctttcagctgggaggaggccaaggtgcaactttcttgggtcgtcctgaatctagccacctctgccatgctgccgaagttctaccccaatgagatcaaagtcacatacctaaggtgtactggggatgaagtgggtgccacgtctgtgttggcccccaagatcagccccctaggtctgtcttcagaaaagaacagagaggcccagattgaggtggtgacttctgcctctgccctgatcatcaaagccctcaaggaaccgccaagagacagaaagaaacagaaaaacattaaacacagtggaaatatcacttttgatgagattgtcaatgttgctcaacacatgtggcaccgatctttagccagagaactctctggaatcattaaagagatcctggggactccccagtctgtgggctgcaatgttgatggctgccaccctcatgatatcatagatgacatcaacggtggtgctgtggaatgcccagctaattaa

SEQ ID NO: 120912 - DNA, 744 bp, Homo sapiens
atggggaaggaagagcacagatctccacatttcttgaatgtttctcatatgctaggaatgttcatgtctgtgaattcatttgatcatcacaaaaactgttcagtgaagtacaactctactccctccttggcgactgatcatgcaccccttaccatcccattaaaacctaatcacccttaccccactcaacgccaatatcatatcccacagcatgctttaaaaggattaaagcctgttatcactcgcctgctacagcatggccttttaaagcctttaaactccccttacaattcccccattttgccagtcctaaaaccagacaaggcttacagtctggtaatgaaccggcctttactaggtcaaatcacccaagcagtttctcaggctcttggtattcagtggaaccttcatatcccttaccgtcctccatcttcaggaaagaccttctcaccagctcaggtgtctcaacaatgccagacccacatcaaaggttacttagctttagtgtccagtgaatcagccaacttagtaaatgtggaaataagcagattacctgagaaaatgaaagccgagtgggggcctgagagtgctggtgggacgctcctcatttatacagattggcaggaaaggcggacctggcaaagtgacatttcagtagagtctgtgttaagtgaaggggacactctgcagacatctgggggaagagctttgttggaggaggcgccacaatttggaaggccctga

SEQ ID NO: 120913 - DNA, 2250 bp, Homo sapiens
atggataccagcatctgttctggtggaggtgacaagggggtgattaaaagctttattgctcacacaaagcctgtttggtggtctcctcacacagacacgcatgaaatttggtgctgtgactcggatcgggggacctcccttgggagatcaatcccctgtcctcctgctctttgctccatgaaaaagatccacctacaacctcgggtcctcagacccaccagcccaaggaacatctcaccaattttaaatcgggctgctcatcgccatgccgagctaagtcccaattcttcctcagtctctgctcctccaccctataatccttctatcacctcccctcctcacacctggtctggcttacagtttagttccacgactagctcttccccaccttcccaacaatttcctcttagagaggtggctggagctgaaggcagtcaggatgatcgggaaagagttttttctctagcccaatctcacgctgataaccaccggcttcacgagccagacctccaggaaggcagtagagtagttccccaagaggatccccaatggaactctcaggcaaattccccagatctgcttggcttagcgactgaagatcgacgctgcccgatcgcctcggaagccccttggaccatcacagacgctgagcttcagctccttcagctatgctcactctttgttgagtctcccacaattaccattgttcctggcccggacttcaatccggcctcccacattattccggataccacacctgaccctcatgactgcatctctctgatccacctgacgttcaccccatttccccacatttccttcttccctgtttctcaccctgatcacacttggtttattgatggcagttccaccaggcctaattgccactcaccagcaaaggcaggatatgcaatagtatcttccacatctgttattgacgctaccgctctgcccccctccactacctctgagcaagccgaactagttgccttaactcaggccctcactcttgcaaaaggactatgcatcaatatttatactgactctaaatatgccttccatattctgcaccaccgtgtggtcacatgggctgaaagaggttacctcactacacaagggtcctccatcattaatgcctctttaataaaaactctgctcaaggctgctttacttccaaaggaagctggggtcattgactgtaaggggcatcaaaaggcatcagaacccattgctctaggcaacgcttatgctgataaggtggctagacaagcagctagctctccaacttctgtccctcatggccagtttttctccttcacatcagtcactcccacctactcccccgctgaaacttccacctatcaatctcttcccacacaaggcaaatggttcttagaccaaggaaaatatctccttccagcctcacaggcccattctattctgtcgtcatttcataacctcttccatgcagtttacaagccgctagcccgtctcttagaacctctcatttcctttccatcacggaaatctatcctcaaggagatcacttctcagtgttccatctgctattctactacccctcagggattgttcaggccccctccctttcctacacatcaagctcagggatttgtctctgcccaggactggcaaattgactttactcacatgccccgagtcagaaaactaaaatatctcttagtctgggtagacactttcactggatgggtagaggcctttcccacagggtctgagaaggccactgcagtcatttcttcccttctgtcagacataattcttcagtttggccttcccacctctatacagtctgataacagaccagcctttactagtcaaatcacccaagcagtttctcaggctcttggtattcagtggaaccttcatatctcttaccatcctcaatcttcaggaaaggtagaacagactaatggtcttttaaagacacacctcaccaaggtcagcctccaacttaaaaaggattggacagtacttttacctcttgcccttctcagaattagagcctgtcctcgagatgctacacggtacagtccatttgaacttttatatggatgcactttcttgcttggccccaacctcatcccagacaccagccctctagacgatcatcttccagtcctccaacaggctagacaggaaatttgccaggctgctaatcttctcttgcctactccagatccccagccatatgaagacaccctagctggatga

SEQ ID NO: 120914 - DNA, 3998 bp, Homo sapiens
taatgcccccgctcgcaggaattcggcacgagccccttcttaatcaatacggaggctactcactccccattaccttcttttcaagggcctgtttcccttgcctccataactgttgtgggtattgacggtcaggcttctaaacctcttaaaactccccaactctggtgccaacttagacaatactcttttaagcactcctttttagttatccccacctgcccagttcccgtattaggctgagacactttaactaaattatctgcttccctgactattcctggactacagctatatctcattgccgcccttcttcccaatccaaagcctcctttgcgtcctcctcttgtatcccccgaccttaacccacaagtataagatacctctactccctccttggtgaccgatcatgcaccccttaccatctcattaaaacctaatcacccttaccccactcaacaccaatatcccatcccgcagcatgctttaaaaagattaaagcctgttatcacttgcctgctacagcatggccttttaaagcttataaactctccttacaattcccccattttacctgtcctaaaaccagacaaggcttacagcataattctcataaaaacacacgtgctctccctgattatcgtctccggctaatctcccaaaccccaatcccttctacaaaacaacaactcctttccttcctaggcatggttagtaaggtcagaattcttacacaagagctgggaccacgtcctatagcctttctgtccaaacaactggaccttactgttttaacccaaccctcatgtctgcatgcagcggctgccgctgccttaatacttttaaaggccctaaaaatcacaaagtatgctcaactgactctctacagttctcataacttccaaaatctattttcttcctcatacctgatgcatatactctctgctccctggctccttcagctatattcactctttgttgagtctcccacaattaccattgttcctggcacggacttcaacccggcctcccacattattctggataccacacctgaccctcatgactgtatctctctgatccacctgacattcaccccatttccccgtatttccttctttcctgttcctcaccctaatcacatttggtttattgatggcagttccaccaggcctaaatgccactcaccagcaaaggcaggctatgctatagtatcttccacatctatcattgaggctaccgctctgcccccctccactacctctcagcaagccgaactagttgccttaacccaagccctcactcttgcaaaaggactatgcgtcaatatttatactgactctaaatatgcctttcatatcgtgcaccaccatgcagtcatatgggctgaaagaggtttcctcactacacaagggtcctccatcattaatgcctctttaataaaaactctgctcaaagccgctttacttccaaaagaagctggggtcattcactgcaaggggcatcaaaaggcatcagatcccattgctctaggcaatgcttatgttgataaagtggctagacaagcagctagctctccaacttctgtccctcacggccagtttttctccttcacttcagtcactcccacctactcccccactgaaacttccacctatcaatctcttcccacacaaggcaaatggttcttagaccaaggaaaatatcttcttccagcctcacaggcccattctattctgtcatcatttcataacctcttctatgtagacataattcctcggtttggccttcccacctctatacagtctgataacggaccagcctttactagccaaatcacccaagtagtttctcaggctcttggtattcagtggaaccttcataccccttaccgtcctcaatcttcaggaaaggtggaacggactaatggtcttttaaaggcacacctcaccaagtttagcctccaacttacaaaggattggacagcacttttacctcttgctcttctcaaaatcagagcctgtcctcgagatgctacaggatacagtccatttgaacttttatatggacgcactttcttgcttggccccaacctcatcccagacaccagccctctaggcgactatcttccagtactccagcaggctagacaggaaattcgccaggctgctaatcttctcttgcctactccagatccccagccatatgaagacaacctagctggacgatcagttcttgttaagaatctgacccctcaaactctacaacctcgatggaccggaccctacttagtcatctatagtaccccgactgccgtctgcctgcagaatcctccccactgggttcaccattccagaataaagctgtgtccatcggacagccagcctaatccctcctcttcctcctggaagtcgcaagtactctcccccacttcccttaaactcactcatatttctgaagaacatgcctacacagctgtccccgccttacagacagactgggcaacatctcccatctccctacacctccgaacttcctttaacagccctcacctttaccctcctgaagaactcatttactttctagacaggtccagcaagacttccccagacatttcacatcagcaagctgccgccctccttcgcacttatttaaaaaacctttctccttatatcaactctactccccccatatttggacctctcacaacacaaactactattcctgtggccgctcctttgtgtatctcttggcaaagacccactggaattcccctaggtaatctttcaccttctcgatgttcctttactcttcatctccgaagtccaactacaaacatcaatgaaacaattggagccttccagctccatattacagacaagccctctatcaatactgacaaacttaaaaacattagcagtaattattgcttaggaagacacttgccctgtatttcactccatccttggctatcttccccttgctcatcagactctcctcccaggccctcttcttgtttacttatacccagccccgaaaataacagtgaaagattgctcgtagatactcgacgttttctcatacaccatgaaaatcgaaccttcccctctacgcagttaccccatcagtccccattacaacctctgacagctgccgccctagctggatccctaggagtctgggtacaagacacccctttcagcactccttctcacctttttactttacatctccagttttgcctcgcacaaggtctcttcttcctctgtggatcctctacctacatgtgcctacctgccaattggacaggcacatgtacactagtcttccttacccccaaaattcaatttgcaaatgggaccgaagagctccctgttcccctcatgacaccgacacaacaaaaaagagttattccactaattcccttgatggtcggtttaggactttctgcctccactgttgctctcggtactggaatagcaggcatttcaacgtctgtcatgaccttccgtagcctgtctaatgacttctctgctagcatcacagacatatcacaaactttatcagtcctccaggcccaagttgactctttagctgcagttgtcctccaaaaccgccgaggccttgacttactcactgctgaaaaaggaggactctgcatattcttaaatgaggagtgttgtttttacctaaatcaatctggcctggtgtatgacaacattaaaaaactcaaggatagagcccaaaaacttgccaaccaagcaagtaattacgctgaacccccttgggcactctctaattggatgtcctgggtcctcccaattgttagtcctttaatacccatttttctccttcttttatttggaccttgtatcttccgtttagtttctcaattcatccaaaaccgtatccaggccatcaccaatcattctatacgacaaatgtttcttctaacatccccacaatatcaccccttaccacaagacctcccttcagcttaa

SEQ ID NO: 120915 - DNA, 531 bp, Homo sapiens
acaaaggagacacgttttatccgtggacccaaaactccggcgccggtcacggactgggaaggcagccttcccttggtgtttaatcattgcagggacgcctctctgattattcacccaggttttagaggtgtcagaccacgcagggacgcctgccttagtccttcacccttagcgaatttaattaacctcaccttcaaggtgtacaataatagaaaaaagttgcaattccttgccttcactgtgagacaaacctcagccatgtctccagcacacaagaacttccaaacgcctgaacctcagcggccaggcattcctccagaacctcctcccccaggagcttgctacaagtgccagaaatccggccaccaggccaaggaatgcctgcagcccaggattcctcctaagccacgtcccatctgtgcgggaccccactggaaattggactgtccaactcacctggcatccactcccagagcccctggaactctggcccaaggctctctgactgcttcccagatcttcttggcttag

SEQ ID NO: 120916 - DNA, 522 bp, Homo sapiens
ctaagccaagaaggagtcagtcagagagccttgggccagagttccaggggctctgggagtggctgccaggtgagttgaacagtccgatttccagtgtggtcccgcacagatgggacatggcttaggaggaatcccgggttgcgggcattccttggcctggtggtcagatttctggcacttgtagcaagctcttgccccttccccagaaaagcgggacttgctgctaagggtgaaggaccaaggcaggcgtccctgcgtggtctgacacctttgaaacgtgggtgaataatcaggcatctctgcaatgattaaacaccaagggaaggctgccttcccagtccgtgaccagcaccggagttttgggtccatggataaaacgtgtctcctttgtctctctagagcaaagagcaggaggacaggggatttatctcccaagggaggtcccctgatctgagtcacggcaccaaatttcatgtgcgtccgtgtgaagagaccaccaaacaggctttgtgtgagcaacat

SEQ ID NO: 120917 - DNA, 882 bp, Homo sapiens
gatcgggggacctcccttgggagatcaatcccccgtcctcctacactttgctctgtgagaaagatccacctacaacctcaggtcctcagaccaaccagcccaagaaacattctcaccaatttcaaatccgagacaaaggagacacgttttatccgtggacccacaactccggcgccagtcacggactgggaaggcagccttcccttggtgtttaatcattccagggacacctctctgattattcacccaggcttcagaggtgtcagaccacgcagggacgcctgccttggtccttcacccttagcggcaagtcccacttttctggggaaggggccagctgctcctcgccagaccgagctaggtcccaattcttcctcagcctccgctcctccaccctataatccttttatcgcctcccctcctcacacctggtccggcttacagtttccttccatgactagccctccccctcctgcccagcaatttactcttaaaaaggtggctggagctaaaggcatagtcaaggatttaattaacctcaccttcaaggtgtacaataatagaaaaaagttgcagttccttgcctccactgtgagacaaaccccagccacatctccagcacacaagaacttccaaacgcctgaactgcagcagccaggtgttcctccagaacctcctccccgaggagcttgctacaagttccagaaatctggccaccgggccaaggaatgcctgcagcccaggattcctcctaagccacatcccatctgtgtgggaccccactggaaatcggactgtccaactcacctggcagccactcccagagcccctggaactctggcccaaggctctctgactccttcccagatcttcttggcttag

SEQ ID NO: 120918 - DNA, 331 bp, Homo sapiens
agggcgagccactttaactaaattatctgcttccctgactattcctggattacagctacatctcattgctgcccttcttcccagtccaaagcctcctttgcgtcctcctcttatattcccccaccttaacccacaaatataagatacctctactccctccttggtgaccgatcatgcatcccttaccatctcattaaaacctaaccacttttaccccgattaatgccaatatcccatcccacagcatgctttgaaagggttaaagcctgttatcacttgcctgctacagcatggccttttaaagcctataaactctccttaccctcgtgcc

SEQ ID NO: 120919 - DNA, 786 bp, Homo sapiens
atggggtttcgccatgttgcccaggctggtctctttctcttgggctcaagtgatctgcctgccgtggccccccaagtgctgggattgcaggtgataaaaagctttattgctcacacaaagcctgtttggtggtctcttcacacggacgcgcatgaaatttggtgccgtgactcagatcgggggacctcccttgggagatcaatcccctgtcctcctgctctttgctccgtgaaaaagatccacctacgacctcaggtcctcagacccaccagcccaaggaacatctcaccaattttaaatcggcacgctttaaaaagattaaagcctgttatcactcgcctgctacagcatggccttttaaagcctataaactctccttacaattcccccattttacctgtcctaaaaccagacaagccttacaagttagttcaggatctgtaccttatcaaccaaattgttttgcctatccaccccatggtgccaaacccatatactctcctatcctcaatacctccctccacaacccattattctgttctggatctcaaacatgctttctttactattcctttgcacccttcatcccagcctctcttcgctttcacttggactgaccctgacacccatcaggctcagcaaattacctgggctgtactgccacaagccttcacagatagcccccattacttcagtcaagcccaaatttcatcctcatctgttacctatctcggcataattctcataaaaacacacgtgctctccctgctgttcgtgtttgactaa

SEQ ID NO: 120920 - DNA, 645 bp, Homo sapiens
atggacgccgagcttcgggtaactctcatagtggaggcacgctttaaaaggattaaagcctgttatcactcgcctgctacagcatggccttttaaggcctataaactctccttacaattccccctttttacttgtcctagaaccagacaagccttacaggaaaagaaagtaaatatcacctccaaacaggcatattttagcctccgtggaggtgctaaagaatcaagtgaacagtcacgaattcgagagaagtgctctgattcacacattgacatctggcttggctccatgcagtcttcacaaaatgtgcagcaaactccccagaagctttctgagtgttggcagtggcaccgggaaggaagcacgaagcaaaatattaacatttcgcacagcaagcaggcatttggtgctctgaaatggaggtggattccaaagaaagaacaaaaaagagggaaaggggaagataaagaaagagagaaagaaggaggtggaaaagaagaaaacaagaaagaggaagaggaggatgaaaaagaagaagaaagaaggagaaaaaggagaggggataagaaaggaggaagaaaaagcagagaaggagaagcttcaataagaggaccacacaaagagttgaattacacacagagttga

SEQ ID NO: 120921 - DNA, 1377 bp, Homo sapiens
atgagtgaactcccattcacaattgcttcaaagagaataaaatacctaggaatccaacttacaagggatgtgaaggacctcttcaaggagaactacaaaccactgctcaaggaaataaaagaggatacaaacaaatggaagaacattccatgctcatgggtaggaagaatcaatatcgtgaaaatggccatactgcccaaggtaatttacagattcaatgccatccccatcaagctaccaatgactttcttcacagaattggaaaaaactactttaaagttcatatggaaccaaaaaagagcccgcattgccaagtcaatcctaagccaaaagaacaaagctggaggcatcacactacctgacttcaaactatactacaagcctacagaaaccaaaacagcatggtactggtacctaaacagagatatagatcaatggaacagaacagagccctcagaaataacgccgcatacctacaactatctgatctttgacaaacctgagaaaaacaagcaatggggaaaggattccctatttaataaatggtgctgggaaaactggctagccatatgtagaaagctgaaactggatcccttctttacaccttatacaaaaatcaattcaagatggattaaagatttaaacgttagacctgaaaccataaaaaccctagaagaaaacctaggcattaccattcaggacataggcgtgggcaaggacttcatgtccaaaacaccaaaagcaatggcaacaaaagacaaaactggcaaatgggatctaattaaactaaagagcttctgcacagcaaaagaaactaccatcagagtgaacaggcaacgggttgcagcactgctaaattcagctgttttccagaatgctgtggaagtggtggtttggcccagttcagaagttcatgtcaagtttctgttttgcaagattataagctgtgcagggcagaaacaaccaattaaatttgatggcagcagtagtctgtctggagtggccactgccatgatgtcagctacaatagcacacttgaaaaggattaaagcctgttatcgctcacctgttacagcatggacttttaaagcctataaactctccttacaattccctcattttacctgtccaaaaaccggacaagccttacaggaagctggagtcattcacttcaaaggccatcaaatggcatcagatcccatcactcagggaaacacttatgctaataaggtagctaaagaagcagctagcgttctaacttctgtccctcatggccaatttttctccttctcatcagtcactcctacttacttccccactgaaattgactttacttacatgccccaagtcaggaaactaaaacacctcatggtctga

SEQ ID NO: 120922 - DNA, 892 bp, Homo sapiens; identical to SEQ ID NO: 120808

SEQ ID NO: 120923 - DNA, 2146 bp, Homo sapiens; identical to SEQ ID NO: 119355

SEQ ID NO: 120924 - DNA, 858 bp, Homo sapiens; identical to SEQ ID NO: 119356

SEQ ID NO: 120925 - DNA, 381 bp, Homo sapiens
atgacctctggtcctcagaccaaccagcccaaggaacacctcaccaattttaaatctgcatgctttaaaaggattaaagcctgttatcattcgcctgttacagcatggccttttaaagcctataaactctccttacaattcccccattttacctgtccaaaaaccggacaagccttacaggttagttcaggatctgagccttatcaaccaaattgttttgcctatccaccccatggtctctcagccatggataccagcacccgctctggtggaggtagcagtgaagtaaactggactcagtgtgatcccttggttgtaattttgtttagtgcactggttttctggaatcctgattgtgctagcagtgaagttgtcatgtga

SEQ ID NO: 120926 - DNA, 2208 bp, Homo sapiens
atgggaaacctacagccagggcttctgaggggccctgggtggctagaggttattgctccacttcctctggaaaatttcagtgaagatgaagatgagttgataaactttggagctaaaccaaagatgactgatttagatctgcagtggtacgaaggtccaacaccagccccatgggcttcctccggccgggatcatgctccccagtaccagcagacacagcacagacagttggacgaaggctctccactgggtcttctaggccttactcaccttcccctttggttggtaccattcctgagcaattcagtcagtgctgctgtgggcatcctcagggccatgactccaggagtagaaactcctcaggttaatgttacatttgttttcttgttaggttctccagtgccacaagctcagtccccacagtctctcttatcgggtgctagactgcagagcgcccccaccctcactgacatctatcagaacaagcagaagctcagaaaacagcactctgaccccgtgtgcccatcccatactggggctgggtacagctactcgcctcagcccagtcggcctggcagccttggaacttctcccaccaagcacttggggtcctctccacggagttctgactggttctttaaaactcctttgccaacaatcattggctctcctactaaggtttgtttattaaacccttttgtagaccacagctcctttcaaatccctaaaactcaagcatcttccaacctgttagccttggttactcgtcatgggcctgctgaagaacagtcgaaagatgggaatgagccacgggaatgtgcccatgccctcttagtgcaaggaagtgagaggcagcgggccgagcagcagagcaaggcagtgtttggcagatctgtcagtaccgggaagttatcagatcaacaaggaaagactcctatatgtcgacatcagggcagcacagacagtttaaatacagaacgaccaatggatatagtagagacaaggagacacattttatccatggacccaaaactccagtgccggtcacggactcgggaggacagtcttcccttgtggctgaagactgacactgcccgatcgccttggaagcctacaggaccatcacagacgctttgggtgacttacagtggaggttcgaagccttcttcgcatcctccccttgtatctccccaccttaatccacaagtatgggacacctctactccctccttggtgaccgatcatgcacgccttaccatcccattaaaacctaatcacccttactccaatcaacgccaatatcccatcccatggcatgctttaaaaggattaaagcctgttatcactcgcctgctacagcatggtcttctaaagcctataaactctccttacaattcccccattttacctgtccaaaaaccagacaagtcttacagttcccataactttcaaaatctattttcctcctcacacttgacacatatactttctgccccccagctccttcagctatgctcagtctttgttgagtctcccacaattacaattgttcctggcccagacttcaatccgaactcccacattattatggatatcagaactgacccccatgactgtatctctctgatccacctgacagtcaccacatttccccatatttccgtctttcctgtttctcaccatgatcacacttggtttattgatggcagttccaccaggcctaatcaccactcaccagcaaaggcaggctatgctatagtatcctccacatctatcattgaggctactgctctgcccgcctccactacctctcagcaagccaaactcattgccttaacttgggccctcactcttgcaaagggactacacgtcaatatttatactgactctaaatatgccttccgtatcctgcaccaccatgctgttacatgggcagaaagaaatttcctcactacacaagagtcctccatcattattgcctccttaataaaaacgcttcttaaagtcgctttacttccaaaggaagctggagtcattcactgcaagggccatcaaaaggcatcagatgtcatcgctcagggcaacgcttatgctgataagcagtcactaaacatcatcatctccatttctacagatggcacagaggcccagagaggtgaaggaaagcctaaggtcctacagccaggatgtggcacaatttggaactga

SEQ ID NO: 120927 - DNA, 2082 bp, Homo sapiens; identical to SEQ ID NO: 119357

SEQ ID NO: 120928 - DNA, 1614 bp, Homo sapiens
atgggcctcgtgcatctgcagagacagtcatattggacagtgcagaggagctccataaatcacttcctaggctgcaacccacatactgggaaagataaaacgctttacatgagatggacaaaaagctttaggaaagtagaagatccacctacgacctcaggtcctcagaccgaccagcccaagaaacatctcaccaagtttaaatccgagacaaaggagacacgttttatccatggacccaaaactccggcgccggtcatggactgggaaggcagccttcccttggtgtttaatcattgcagggacgcctctctgattatacactcacatttcaagggtgtcagaccacgcagggatgcctgccttggtccttcacccttagcggcaagtcccgcttttctggggaaaaggcaacacgctttaaaaagattaaagcctgttatcactcacctgctacagcatggccttttaaagcctaaaaactctccttacaattcccccattttacctgtcctaaaaccagacaagccttacaagtttgttcaggatctgtgccttatcaaccaaattgttttgcctatccaccccatgctgtactcactctttgttgagtctcccacaattaccattgtttctggcccggacttcaatccggcctcccacattattccggataccacacctgaccctcatgactgcatctctctgatccacctgatgctctccccatttccccacatttccttcttccccatttctcaccctgatcacacttggtttattgatggcagttccaccaggcctaatcgccactcaccagcaaaggcaggctatgctataatatcttccacatctatcgttgaggctaccactctgcctccctccactacctctcagcaagccaaactagttgccttaactcaagccctcactcttgcaaaaggactacgcgtcaatatcttactgattctaaatatgcctttcatattcggcaccaccatgcagtcatatgggctgaaagagggattgttcaggtctcctccctttcctacacatcaagctaggggatttgcccctgcccaggactggcaaattgactttactcacatgcctcgagtcagaaaactaaaatatctcttagtctgggtagacgctttcactggatgggtagaggccttccccacagggtctgagaaggccactgcggtcatttcttcccttctgtcagacataatccctcggtttggccttcccgcctctacacagtctgataacggaccggcctttactagccaaatcacccaagcagtttctcaggctcttggtattcagtggaaccttcatatcatttaccgtcctcaatcttcaggaaaggtagaacggactaatggtcttttaaagacacacctcaccaagctcagcctccaacttaaaaaggattggacagtacttttaactcttgctcttctcagaatcagagcctgtcctcgagatgctacagggtacagtccatttgaactcttatatggacacactttcttgcttggccccaacctcatcccagacaccagccctctaggcaactatcttccagtcctccaacaggctagatag

SEQ ID NO: 120929 - DNA, 2070 bp, Homo sapiens
atgtctgcaaaattgggaaagtcatcatcactcctaacacaaacttcagaggagtgtaatgggattctgacagagaagatggaagaggaagagcagacctgtgatccagactctagcctccactggagcagcagctacagcccagagaccttccgccagcaattcaggcagtttggctaccaggattcacctgggccccatgaggctctgagccggctctgggaactttgtcatctctggctgaggccggaagtgcacaccaaggagcagatcctggagctgctggtgctggagcagttcctggccatcctcccaaaagagcttcaggcctgggtgcagaagcatcatccagagaatggagaggaaactgtgactatgctggaggatgtggagagagagcttgatggaccaaagcagatcttttttggacgaaggaaggacatgattgcagagaagctagcaccttcagaaatcactgaggaattgccaagtagccagctcatgcccgtgaagaagcagctccagggagcatcatgggagcttcagtccttaagaccacatgatgaagacatcaaaactacaaatgtgaaatctgcttcaaggcaaaagacttctttaggcatagaactgcattgcaatgtttccaatatccttcatatgaatggctcccagagttccacatatagaggaacctatgaacaagatggtaggtttgaaaagagacaaggaaacccttcttggaaaaaacaacagaaatgtgatgaatgtggcaaaatctttagtcagagctcagcccttattttacatcagagaatccacagtggaaagaaaccttatgcatgtgacgagtgtgcaaaggcattcagccgaagcgcaattctgattcagcatcgacgaacccatactgactcagcccgcctgcacccaggtgaaataaacagtcttgttgctcacacaaagcctgtttggtggtctcttcacatggacgcgcatgaaatttggtgccgtgactcggattgggggacctcccttgggagatcaatcccctgtcctcctgctctttgctccatgagaaagatccacctacgacctcgggtcctcagaccgaccagcccaaggaacatctcaccaatttcaaatccgatgaagactgaccctacccaatcgccttggaagcctacaggaccatcacagacactctgggtaactatcacagtggaggttcaaaacctccttcacatcctccccttgtatctccccaccttaacccacaagtatgatacctctactccctccttggtgaccgatcatgcaccccttaccatcccattaaaacctaatcaaccttaccccgatgaatgccaatatcccatcccacagcacactttaaaaggattaaagcctgttatcactcacctgttacagcatggccttttaaagcctagaaactctccttacaattcccccattttacctgtcctagaaccaaacaagccttactggttagttcaggatctgcgccttatcaaccaaattgttttgcctatccaccccatgctccttcagctgtactcactctttgttgagtctcccacagttaccatttttcctggcccggacttcagtccggcctcccacattattcctgatgctacacctgacccccataactgtatctctctgatccaactgacattcaccccatttccccatatttccttctttcctgttcctcaccctgatcacacttggtttattgatggcagttccaccaggcctaatcgctacacaccaacaaaggcaggctatgctataagcatcctggaggctggaggcttgctcctcagtggcttcaggagcagaggcctctcctatgtcctaggagtctgccatgggggcttcttccagggcttctttgcccaggaccaaaaaaatcttcatcgaattggacagtatgaagatccttggtcccctttcctagaactgtttacagggaaggctttgagtgaacgtgaagattgcaatcagctgatgactaaattagaggagcagaaaggaggcattaagtag

SEQ ID NO: 120930 - DNA, 1155 bp, Homo sapiens
atgggagactttaacaccccactgtcaatattagacagatcaacaagagagaaaatcaacaaggatattcaggacttgaactcagctctggaccaagtggacctaatagacatctacagaactctccacctccaatcaacagaatatacattcttctcagcacgacatcacactttttctaaaattaaccacatgattagaaggaaccaaaaaagagcccgtatagccaaggcactcctaagcaaaaagaacaaagctggaggcatcatgctacctgacttcaaactacactacaaggctatggtaaccaaaacagcatgtgacatggatgaagctggaaaccatcattctcagcaaactaacacagaaacagaaacccaaacaccacgtgttctcactcataagtgggaattggacaatgagatcacatggacacagggaggggaacatcacacaccagggcctgtgccacagttgcatggctgtgcactatatcactcctggggattaccatccatttggactgcagaatcagaggagactctagagttgtacgccgtgctggcatctcacaggcaggctctggggtattactgcagtgagacaaaagagacacgttttatccgtggacccaaaactccggcaccagtcacggactgggaaggcagccttcccttggtgtttaatcattgcagggacgcctctctgattatacacccacgtttcaagggtgtcagaccacgcagggatgcctgccttggtccttcaccctttgcagcaagtcccgcttttctggggaaggggaaacacgctttaaaaggattaaagcctgttatcactcgcctgctacagcatggccttttaaagcctataaactctccttacaattcccccattttacctgtcgtaaaaccagacaagccttacaagttagttcagaatctgcgccttatcaaccaaattgttttgcctatccaccccatggtgccaaacccatatactctcctatcctcaatacctgcctctacaacccattattctgttctagatctcaaacgtgctttctttactattcctttgcacccttcatcccagcctctcttcgctttcacttggactgaccctgacacccatcaagctcagcaaattacctag

SEQ ID NO: 120931 - DNA, 801 bp, Homo sapiens; identical to SEQ ID NO: 114663

SEQ ID NO: 120932 - DNA, 788 bp, Homo sapiens
ttttctcaaattcaaagcttccttcacatcctcccctggtatctcccactttaatccacaagtatgggacacttttactccttccctggtgaccaatcatgcaccccttaccatcccattaaagcgtaatcacccttaccccgctcaatgccaatatcccatcccacagcatgctttaaaaggattaaagcctgttatcgctcgcctgttacagcatggccttttaaagcctataaactctccttacaattcccccattttaccatccaaaaaccggacaagtcttacaggttacacgctgctagcccgcctcttagaatctctcatttcctttccatcgtggaaatctattctcaaggaaataacttctcagtgttccatctgctattctacgactcctgagggattgttcaggccccctctcttccctacacatcaagctcggggatttgcccctgtccaggactggcaaattgactttactcacatgccccgagtcaggaaactaaaatacctcttggtctgggtagacactttcactggatgggtagaggcctttcccacagggcctgaaaaggccactgtggtcatttcttcccttccgtcagacataattcctgggtttggccttcccacctctataatacagtctgataacggattggcctttattagtcaaatcgcccaagcagtttctcaggctcttggtattcagtggctcctggttttacctcaaaccaccacccttaagtctctcttaaagtggataaaagatcttcagtggcaag

SEQ ID NO: 120933 - DNA, 765 bp, Homo sapiens
tatacaaagatcttcagaaactctctcgcctctttaaagaccagctggtgtatcctcttctggcttttacccgacaaggtaagagatgaaatactgtatttgggttggtcgtcctcccattggaactgaaactacggatcttccgacttctggatgttcgttccgtcttgtctttgtctgcggtttgtcgtgacctctttactgcttcaaatgacccactcctgtggaggtttttatatctgcgtgattttcgaggtgatttccgtaatgacatctattcctggacaacaaaggatttcgaatattacataaatttagttgacaaaacagaagcaaggtttgagaaggttgactctgattttgaaagttttactgtgggtaaaatgccatcaaacagcatcgcatgtacagagaaatctttcatgaaaggaagagtgagtcaatgtgacaaaaagcctgttatcactcgcctgctacagcatggccttttaaagcctataaactctccttacaattcccctattttacctgtcctaaaaccagacaagccttacaagttagttcaggatctgcaccgtatcaaccaaattgttttgcctatccacccctgtggtgcccaaccccatacactcttttgtcctcaataccttcctccacaactcactattcccgtgcctgatcttaaagatgcttttttcactattcccctgcaaccctcgtcccaagcctctctttgctttcacttagactgaccctgacacccat

SEQ ID NO: 120934 - DNA, 2471 bp, Homo sapiens
atgggcacttattaccagaaacaccagacagccagagatctgctggccctggggggcaatcctttcctttctttgcttggtaaagggtgggtccagttgatgaagacggtctggtcctctcttccaggcaaagagaggacggagattgggctggggccaggtatctgggagctgggtctgctctcctgggtggagctttcccaggccagtggtgcagaccaatggggactgaagttggagatcctggtaagacagctccagggatacccaaaggaaaaaaccaagctaatggaggcagccagaaaacaggacacaccgcagaacaaaagatggatcaccaagtggaaaaatgaagcagaggagatcggaggagggctccacagttttacaagtaaagaagataattatactctagttgttgacatgaactgcttggatgttcagggttgtggtgatgacgtgaacaacagacttcttcactctgcaagttacccaacagcaagctgggtggatgaagccatgccaacagcatctggcaggagccagcaccaagcacaccttacacagcttcgacagagctgcacggagaacacatatgcttgctccctctgtctctcatacaaagtaccttatagtgtgagctccagacacacagacactgccatcctgcctacaaagaaaggaatgcagacacagccaacgtcagcattcggggtgggaccacagtggaacgcatacatcctttcacagctgccaaggccttctgggaagtccaatgcctgcccccacatctctcagagccaaacatcttcttctgcactttccacaagttacaattatgtatttacctgtgtgcttactgccctaacctcctacttatggactgatgtttatgtccctccaaagttcacatgcactgctgttaggatcaaagtgaccatccatgatgcacagagcacgtaccagggtaaagttccagctgggacgcaggcatcagcaattgtagaatttgggttctcccttcctcagatccctgactgtccttggtcattcaagaaagattcactgtccctaggccaagagtcaggagcaaaacaggaacaccaagggtatggtctgaggatgttgtcagcagggagcaacgaccaagcaggacactgggagctgctgtcccgtctgcaggcgggactccatgaaggcccctgtctgcccttccagcctttgccacaaaccctcgaacgctggctgcacactggaatcacttggggagcttttaaaagatacggaggcctgggtctgactcccgcccaggacctcagaaagggcctgccccgcgcgaatccccagtcgctgggacttacttggccaccaggtttacagacttcgcagccgctgagagctagagaagagcccggagagcgccatggtccggggacgccggggccgggaagcgccgtggcccgggaggacgctgctcccgcagtagcgcgagggaggggcaggaccggggcggctgcctcgcgggcccggaacgggaactggctgcgactacagccgcagccgcgcccctctgttggcgcgcccaagagcctgccggctgctgggagaggccgccgaagggcgggggcggtcaaggcagggtcccacggtgctgccattcgcccgggtgaaataaacagctttattgctcacgcaaagccttttggtggtctcttcacacggacacgtgtgacatttggtgccgaagacccgggacaggaggactccttcaggagaccagtcccctgtcctcaccctcactctgtgaggagatccacctatgacctcgggtcctcagaccaaacagcccaaggaacatctcaccaatttcaaatcggatcttctcggactgacgctgcccgatcgcctcagaagcctcctggaccatcacagatgctttgggtaactcttacagtggaggcatggccttttaaatcctataaactctccttacaattcccccattttacctgtccaaaaaccggacaagccttacaggttagttcaggctttgttgagtctcccacagttaccattgttcctggcctggacatcaatctggcctcccacactattccggataacactcctgaaccccatgactgtatctctctgatccacctgacattcactccatttccccatgtttccttctttcctgttcctcaccctgatcacacttggtttattgatggcagttccactaggcctaattgccactcaccagcaaagacgggctatgctatagtatcttccacacttatcattgacgctactgctcttcccccctccactacctctcagcaagccgaactcattgccttaactcgagccctcactcttgcaaagggactacccatcaatattcatactgactctaaatatgccttccatatcctgcaccaccatgctgttatataggcagaaagagg

SEQ ID NO: 120935 - DNA, 1289 bp, Homo sapiens
atggaggctgagaagttccatcagatgccatctgtgagccggagaaccaggaaagccagtggtgtaattcagtccaaatctgagaacctgagaaccaggggagccaatagtcacgctttaaaaagattaaagcctgttatcactcgcctgctacagcatggccttttaaagcctataaactctccttacaattcccccattttacctgtcctaaaaccagacaagccttacaaacggtttctcgccttttacggttggagtccacgttctttaatagtggactcttgttccaaactggaacaacactcaaccctatctcgggttattcttgtgatttataagggattttgccgatttcggaaccaccatcaaacaggattttcgcctgctggggcaaaccagcgtggaccgcttgctgcaactctctcagggccaggcggtgaagggcaatcagctgttgcctgtctcactggtgaaaagaaaaaccaccctggcgcccaatacgcaaaccgcctctccccgcgcgttggccgattcattaatgcagctggcacgacaggtttcccgactggaaagcgggcagtgagcgcaacgcaattaatggattttgccgatttcggaaccaccatcacacaggattttcgcctgctggggcaaaccagcgtggaccgcttgctgcaactctctcagggccaggcggtgaagggcaatcagctgttgcctgtctcactggtgaaaagaaaaaccaccctggcgcccaatacgcaaaccgcctctccccgcgcgttggccgattcattaatgcagctggcacgacaggtttcccgactggaaagcgggcaatcttctcagcttagcagcttaagactgacactgcccgatcgcctcagaagccccctagaccatcacggacgccgagcttcaggtaactctcacagtggacagatggccttttaaagcctatgaactctccttacaattcccccattttacctgtcctgaaaccagacaagccttacaagttaagttcaggatctgcgccttatcaaccaaattgttttgcctatccaccccgtggtggccaaacccatatactctcctatcctcaatacctccctctactacccattattctgttctagatctcaaacttgctttctttactatccctttgcacccttcatcccagcctttcttcgctttcacttggactgaccctgacacccatcaagctcagcaaattacttaggctgtactgcctcaaagcttctcagacagcccccacgaaa

SEQ ID NO: 120936 - DNA, 474 bp, Homo sapiens; identical to SEQ ID NO: 111075
  misc_feature (1)...(474): n = a,t,c or g

SEQ ID NO: 120937 - DNA, 1441 bp, Homo sapiens
actaaaccaggaggaaggtgaatctctgaatagaccaataacaggctctgaaattgaggcaataattaatagcttaccaaccaaaaagagtccaggaccagatggaatcacagccgaattctaccagaggtacaaggaggaactggtaccattccttgtaaaactattccaatcaacagaaaaagagggaatcctccctaactcattttatgaggccagcatcatcctgataccaaagcctggcagagacacaacaaaaaaagagaattttagaccaatatccctgatgaacatcgatgcaaaaatcctcaataaaatactggcaaaccgaatccagcagcacatcaaaaagcttatccacaatggtcaacatataaacagaaccaacgacaaaagccatataattatctcaatagatgcagaaaagacctttggcaaaattcaacagcccttcatgctaaaaactctcaataaattaggtattgatgggacatatctcaaaataataagagctatttatgacaaacccacagccaatatcatactgactgggcaaaaactggaagcattccctatgaaaactggcacaagagagggatgccctctctcaccactcttattcaacatagtgttggaagttctggccagggcaattaggcaggagaaagaaataaagggtattcaattaggaaaagaggaagtcaaattgtccctgtttgcagatgacatgattgtatacctagaaaaccccatcgtctcagcccaaaatctccttaggcttataagcacctttagcaaagtctctggatacaaaatcaatgtgcaaaaatcacaagcattcttatacaccaataacagacaaacagagagccaaatcctgagtgaactcccattcacaattgcttcaaagagaataaaatacctaggaatccaacttacaagggatgtgaaggacctcttcaaggagaactacaaagcactgctcaatgaaataaaagaggatataaacaaatggaaaaacattccatgctcatgggtaggaagaatcaatatcgtgaaaatggccatactgcccaaggtaatttatagattcaatgccatccccatcaagctaccaatgactttcttcacagaattggaaaaaactactttaaagtttatatggaaccaaaaaagtgcccgcatcgccaagtcaatcctaagccaaaagaacaaagctggaggcatcatgctacctgacttcaaactatactacaaggctacagtaaccaaaacagcatggtactggtaccaaaacagagatatagatcaatggaacacaacagagccctcagaaataatgttgcatatctacaactatcgatctttaacaaacctgagaaaaacaagaaatggggaaaggattccctatttaacaaatggtgctgggaaaactggctag

SEQ ID NO: 120938 - DNA, 2418 bp, Homo sapiens
cagcctaaatgggaggcaccccccagtaggggcggacagacacctcacacggccaggtactcctctaagacaaaacttccagaggaacgatcaggcagcagcgtttgcggttcaccaatatccgctgttctgcagccactgctgctgatatccaggcaaacagggtctggagaggacctccagcaaactccaacagacctgcagctgagggtcctgactgttagaaggaaaactaacaaacagaaaggacatccacaccaaaaacccatctgtacatcaccatcatcaaacaccaaagaaatacaaactaccatcagagaatactataaacacctctatgcaaataaactagaaaatgcagaagaaagagataaattcctcaacatatacaccctcccaagactaaaccagaaagaagttgaatctctgaatagaccaataacaggctctgaaattgaggcaataattaagagcttaccaaccaaaaaaagtccaggaccagatggattcacagccaaattctaccagaggtacaaggaggagctggtaccattccttctgaaactattccaatcaatagaaaaagagggaatcctccctaactcattttatgaggccagcatcatcctgataccaaagcctggcagagacacaaccaaaaaagagaattttagaccaatatccttgatgaacattgatgcaagaatcctcaataaaatactggcaaacctaatccagcagcacatcaaaaagcttatccaccatgatcaagtgggcttcatccctgggatgcaaggctggttcaacatatgcaaatcaataaacataatccagcatatgaacagaaccaaagacaaaaaccacatgattatctcaatagatgcagaaaagccctttgacaaaattcaacaacctttcatgctaaaaactctcaataaattagatattgatgggacgtatctcaaaatagtaagagctaaatatgacaaacccacagccaatatcatactgaatgggcaaaaactggaagcattccctttgaaaacgggcacaagacagggatgccctctctcaccactcctattcaacatagtgttggaagttctggccagggaaatcaggcaggagaaggaaataaagggcattcaattaggaaaagaggaagttaaattgtccctgtttgtagatgacatgattatatatttagaaaaccccattgtctcagcccaaaatctccttaagctgataagcaacttcagcaaagtctcaggatacaaaatcagtgtgcaaaaatcacaagcattcttatacaccaataacagacaaacagagagccaaaccatgagtgaactcccattcacaattgcttcaaagagaataaaatacctaggaatccaacttacaagggatgtgaaggaccgcttcaaggagaactacaaatcactgctcagtgaaataaaagaggatacaaacaaatggaagaacattccatgctcatgggtaggaagaatcaatatcgtgaaaatggccatactgcccaaggtaatttatagattcaatgccattcccatcaagctaccaatgactttcttcacagaattggaaaaaactactttaaagttcatacggaaccaaaaaagagcccgcatcgccaagtcaatcctaagccaaaagaacaaagctggaggcatcacactacttgacttcaaactatactacaaggctacagtaaccaaaacagcatggtactggtaccaaaacagacatgtagaccaatggaacagaacagagccctcagaaataatgctgcatatctacaactatctgatctttgagaaacctgacataaacaagcaatggggaaaggattccctatttaataaatggtgctgggaaaactggctagccatatgtagaaagttgaaactggatcccttccttacatcttatacaaaaattaattcaagatggattaaagacttaaatgttagacctaaaaccataaaaaccctagaagaaaacctaggcaataccattcaggacataggcatgggcaaggacttcatgtctaaaacaccaaaagcaatggcaacaaaagccaaacttgacaaatgggatctaattaaactaaagagcttctgcacagcaaaagaaactaccatcagagtgaacaggcaacctacaggatgggagaaaatttttgcaacctactcatctgacaaagggctaatatccagaatctacaatgaacacaaacaaatttacaagaaaaaaacaaacaaccccatcaaaaagtgggcaaaggatatgaacggacacttctcaaaagaagacatttatgcagccaacagacacatgaaaaaatgctcatcatcactggccatcagagaaatgcaaatgaaaaccacaatgagatag

SEQ ID NO: 120939 - DNA, 2361 bp, Homo sapiens; identical to SEQ ID NO: 120356

SEQ ID NO: 120940 - DNA, 1443 bp, Homo sapiens
atggataaattcctcgacacatacaccctcccaagactaaaccaggaagaatttgaatctctgaatagacaaatagcaggctctgaaattgaggcaataatcaatagcttaccaaccaaaaaaagcccaggaccagatggattcacagccgaattctaccagaggtacaaggaggagctggtaccattccttctgaaactattccaatcaacagaaaaagagggaatgctccctaactcattttatgaggccagcatcatcctgataccaaagcctggcagagacacaacaaaaaaagagaattttagaccaatatccctgatgaacattgatgcaaaaatcctcaataaaatactggcaaaccgaatccagcagcacatcaaaaagcttatccaccatgatcaagtgggcttcatccctgggatgcaaggctggttcaacatatgcaaatcaataaacgtaatccagcttataaacagaaccaaagacaaaaaccacatgattatctcaatagatgcagaaaaggcctttgacaaaattcaacaacccttcatgctaaaaactctcaataaattagctgcttcaaagagaataaaatacctaggaatccaacttagaagggacgtgaaggaccttttcaaggagaactacaaaccactgctcaatgaaataaaagaggatacatacaaatggaagaacattccatgctcatgggtaggaagaatcaatatcgtgaaaatggccatactgcccacggtaatttatagattcagtgccatcctcatcaagctaccaatgactttcttcacagaattggaaaaaactactttaaagttcacatggaaccaaaaaagagcccgcattgcgaagtcaatcctgagccaaaagaacaaagctggaggcatcacattacctgacttcaaactatactacaaggcaacagtaaccaaaacagcatggtactggtaccaaaacagaaatatagaccaatggaacagaacagagccctcagaaataatgccacatatctacaactatctgatctatgacaaacctgacaaaataaagcaatggggaaaggattccctatttaataaatggtgctgggaaaactggctagccatatgtagaaagccgaaactggatcccttccttacacctaatacaaaaattaattcaagatggattaaagacttaaatgttagacttataactgtaaaaaccctagaagaaaacctaggcaataccattcaggacataggcatgggcaaggacttcaggtctaaaacaccaaaagcaatggcaacaaaagccaaaattgacaaatgggatctaattaaactaaagagcttctgcacagcaaaagaaactaccatcagagtgaataggcaacctacagaatgggagaaatttttgcaatctactcatttgacaaagggctaa

SEQ ID NO: 120941 - DNA, 2916 bp, Homo sapiens
atgttgattgaaccagccttgcatcccagggatgaagccgacttgatcgtggaggataagctttttgacgtgctgctggattcggtttgccagtattttattgaggattttcgaattgagtcaggatcctctgctgcaggtctcctggagtttgctggaggtccactccagaccctgtttgcctgggtatcaccagcagatgctgcagaacagcaaagtttgttgcctgttccttcctctggaagcttcatcccagaggggcacctgcagatgccagccatagctctcctgtatgaggtgtctgtcagctcctactgggagggggcatccagtacagcagtgacacacagtaaaggcttgcaaacatttgccaaatgcaaaaaattagtaacatttcaagaaggcatgagatgtccagaacagagctatccaaaggtgcagcaagttttagaaaatggggttagcaagagagtggattctgaggttccttgttttaattcttcaggaaatacgatcaatgagacagaaagagaacaaggatatccaggacttgaactcagctctgcaccaagcagacctaatagacatctacagaactctccaccccaaatcaacagaatatacattcttctcagcaccacattgcattgcacttattccaaaattgaccacacacttggaagtaaagcactcctcagcaaatgtaaaataacagaaattataacagactctcagaccacagtgctatcagaactcaggattaagaaactcactcaaaaaccgctcagctacatggaaactgaacagctcctgaatgactactgggtacataatgaaatgaaggcagaaataaagatgttctttgaaaccaatgagaacaaagacacaacataccagaatctctgggatacatttaaagcagtgtgtagagggaaatttatagcactaaatgcccacaagagaaagcaggaaagatctaaaattgacaccctaatgtcacaattaaaagagctagagaagcaagagcaaacacattcaaaagttagcagaagaccaataccaagttctgaaattgaggcaataattaatagcttaccaaccaaaaaaagtccaggaccagatggattcacagccgaattctaccagaggtacaaggaggagctggtaccattccttctgaaactattccaatcaatagaaaaagagggaatccttcctaactcattttatgaggccagcatcattctgataccaaagcctggcagagacacaacagaaaaagagaattttagaccaatatccctgatgaacatcgatgcaaaaatcctcaataaaatactggcaaaccgaatccagcagcacatcaagaagcttctccaccatgatcaagtgggcttcatccctgggatgcaaggctggttcaacatatgcaaatcaataaatgtaattcagcatataaacagaaccagtgacaaaaaccatacgattatctcaatagatgcggaaaaggccttcaacaaaattcaacagctgttcatgctaaaaactctcaataaactaggtaccaatgggatgtatctcaaaatagtaagagctatttatgacaaacccacagccaatatcatactgaatgggcaaaaactggaagcattccctttgaaaactggcacaagacagggatgccctctctcaccactcctattcaacatagtattggaagttctggccagggcaatcaggcaggagaaagaaatacagggtattcaattaggaaaagaggaagtcaaattgtccctgtttgcagatgacatgattgtatacttagaaaaccccattgtctcagcccaaaacctccttaagctgataagcaacttcagcaaagtctcaggatacaaaatcaatctgcaaaaatcacaagcattcttatacaccaataacagacaaacagagagtcaaatcatgagtgaactcccattcacaactgcttcaaagagaataaaatacctaggaatccaacttacaagggatgtgaaggacctcttcaaggagaactacaaaccactgctcaatgaaataaaagaggacacaaacaaatggaggaacattccatgctcatgggtaggaagaatcaatatcgtgaaaatggccatactgcccaaggtaacttatagattcaatgccatccccatcaagctaccaatgactttcttcacagaattggaaaaaactattttaaagttcagatggaaccaaaaaagagcccacattgccaagacaatcctaagtcaaaagaacaaagctggaggcatcagactacctgacttcaaactattttacaaggctacagtaacaaaaacagcacggtactggtacgaaaacagagatatagaccaatggaacagaacagagcccctggaaataatgccacacatctacaaccatctgatctttgacaaacctgacaaaaacaagcaatggggaaaggattccctatttaataaatggtgctgggaaaactggctagccatatgtagaaagctgaaactggaccccttccttacatcttatacaaaaattaattcaagatggattgaagacttaaatgttagacctaaaaccatagaaaccctagaagaaaacctaggcaataccattcaggacataggcatgggcgaagactttatgactgaaacaccaaaagcaatggcaacaaaagcccaaattgacaaatgggatctaattaaactaaagagcttgtgcactgcaaaagaaactaccatcagagtgaacaggcaacctacagaatgggagaaactttttatagtctacccatctgacaaaggcctaatatccagaatctacaaagaacttaaacaaatttacaagaaaaaatcaaaccaccccatcgaaaagtag

SEQ ID NO: 120942 - DNA, 1680 bp, Homo sapiens
atggcacgagaactacgtgatgactgcacaagcttcagtagccgattcgatcaactggaagaaagggtatcagtgactggagatcaaatgaatgaaatgaagccagaagagaagtttagagaaaaaagagtaaaaagaaacgaacaaagcctccaagaaatatgggactatgtgaaaagaccaaatctacgtctgattggtgtacctgaaagtgactgggagaatggaaccaagttggaaaacactctgcagggtattatccaggagagcttccccaatctagcaaggcaggccaacattcacattcaggaaatacagagaatgccacaaagatacacctcgagaagagccactccaagacacataattgtcagattcaccaaagttgaaatgaaggaaaaaatattaagggtagccagagagaaagacagatcaacgagacagaaagttaacaaggatatccaggaattgaactcagctctgcaccaagcggacctaatagacatctacagaagtctccaccctaaatcagcagaacatacattcttctcagcacatcacacttattccaaaattgaccacacagttggaagtaaagcactcctcagcaaatgtaaaagaacagaaattgtaacaaactgtctctcagaccacagtgcaatcaaactagaacttaggattaagaaactcactcaaaaccgctcaactacatggaaactgaacaacctgctcctgactgactactgggtacataacaaaatgaaggcagaaataaagatgttctttgaaacctatgagaacaaagacacaacataccagaatctctgggacacatttaaagcagtgtgtagagggaaatttatagcattaaatgcccacaagagaatgcaggaaagatctaaaattgacaccctaatatcacaattaaaagaacttgagaagcaagagcaaacacattcaaaagctggcagaaggcaagaaataactaagatcagagcagaactgaaggagatagagatacaaaaaacccttcaaaaaatcaatgaatccaggagctggttttttgaaaagatcaacaaaattgatagactgctagcaacactaataaagaagaaaagagagaagaatcaaatagacgcaataaaaaatgataaagcggatatcaccaccgatcccacagaaatacaaactaccatcagagaatactataaacacctctacgcaaataaactagaaaatctagaagaaatggataaattcctggacacatacacactcccaagactaaaccaggaagaagttgaatccctgaatagaccaataacgggctctgaaattgaggcaataattaatagcttaccaaccaaaaaaagtccaggaccagatggattcacagccgaattctaccagaggtacaaggaggagctggtaccattacttccgaaactattccaatcaatagaaaaagagggaatcctccctaactcattttatgaggccagcatcatcctgataccaaagcctggcagagacacaacaaaaaagaattttagaccaatatccctgatgaacattgatgcaaaaatcctcaataaaatactggcaaaccgaatccagcagcacatcaaaaagcttatccgccatgatcaagtgggcttcatctctgggatgcaaggctga

SEQ ID NO: 120943 - DNA, 2403 bp, Homo sapiens
atcaatgagacagaaagagaacaaggatatccaggacttgaactcagctctgcaccaagcagacctaatagacatctacagaactctccaccccaaatcaacagaatatacattcttctcagcaccacattgcattgcacttattccaaaattgaccacacacttggaagtaaagcactcctcagcaaatgtaaaataacagaaattataacagactctcagaccacagtgctatcagaactcaggattaagaaactcactcaaaaaccgctcagctacatggaaactgaacagctcctgaatgactactgggtacataatgaaatgaaggcagaaataaagatgttctttgaaaccaatgagaacaaagacacaacataccagaatctctgggatacatttaaagcagtgtgtagagggaaatttatagcactaaatgcccacaagagaaagcaggaaagatctaaaattgacaccctaatgtcacaattaaaagagctagagaagcaagagcaaacacattcaaaagttagcagaagaccaataccaagttctgaaattgaggcaataattaatagcttaccaaccaaaaaaagtccaggaccagatggattcacagccgaattctaccagaggtacaaggaggagctggtaccattccttctgaaactattccaatcaatagaaaaagagggaatccttcctaactcattttatgaggccagcatcattctgataccaaagcctggcagagacacaacagaaaaagagaattttagaccaatatccctgatgaacatcgatgcaaaaatcctcaataaaatactggcaaaccgaatccagcagcacatcaagaagcttctccaccatgatcaagtgggcttcatccctgggatgcaaggctggttcaacatatgcaaatcaataaatgtaattcagcatataaacagaaccagtgacaaaaaccatacgattatctcaatagatgcggaaaaggccttcaacaaaattcaacagctgttcatgctaaaaactctcaataaactaggtaccaatgggatgtatctcaaaatagtaagagctatttatgacaaacccacagccaatatcatactgaatgggcaaaaactggaagcattccctttgaaaactggcacaagacagggatgccctctctcaccactcctattcaacatagtattggaagttctggccagggcaatcaggcaggagaaagaaatacagggtattcaattaggaaaagaggaagtcaaattgtccctgtttgcagatgacatgattgtatacttagaaaaccccattgtctcagcccaaaacctccttaagctgataagcaacttcagcaaagtctcaggatacaaaatcaatctgcaaaaatcacaagcattcttatacaccaataacagacaaacagagagtcaaatcatgagtgaactcccattcacaactgcttcaaagagaataaaatacctaggaatccaacttacaagggatgtgaaggacctcttcaaggagaactacaaaccactgctcaatgaaataaaagaggacacaaacaaatggaggaacattccatgctcatgggtaggaagaatcaatatcgtgaaaatggccatactgcccaaggtaacttatagattcaatgccatccccatcaagctaccaatgactttcttcacagaattggaaaaaactattttaaagttcagatggaaccaaaaaagagcccacattgccaagacaatcctaagtcaaaagaacaaagctggaggcatcagactacctgacttcaaactattttacaaggctacagtaacaaaaacagcacggtactggtacgaaaacagagatatagaccaatggaacagaacagagcccctggaaataatgccacacatctacaaccatctgatctttgacaaacctgacaaaaacaagcaatggggaaaggattccctatttaataaatggtgctgggaaaactggctagccatatgtagaaagctgaaactggaccccttccttacatcttatacaaaaattaattcaagatggattgaagacttaaatgttagacctaaaaccatagaaaccctagaagaaaacctaggcaataccattcaggacataggcatgggcgaagactttatgactgaaacaccaaaagcaatggcaacaaaagcccaaattgacaaatgggatctaattaaactaaagagcttgtgcactgcaaaagaaactaccatcagagtgaacaggcaacctacagaatgggagaaactttttatagtctacccatctgacaaaggcctaatatccagaatctacaaagaacttaaacaaatttacaagaaaaaatcaaaccaccccatcgaaaagtag

SEQ ID NO: 120944 - DNA, 1518 bp, Homo sapiens
atggtcagggaaggcttccctgaggaagtgacatttgagctgaagaatgagttagaaattagcaagggacagcaaatgggcaaaaacattccagacactggagcatctagcgcaaaggctctaggagagagagagctgggtaccttggataaaatgaaaaacagcccaagtgatggaagcaaaaaggatattcgaacccatcgcaaggaagctaaaaaccttgaaaaaagattagacgaatggctaactagaataaacagtgtagagaagaccttaaatgacctgatgcagctgaaaaccatggcacgagaacttcatgatgcatgcacaagcttcaatagccaattcgatcaagtggaagaaaggatcaacaaaatagatgtacggctagcaagactaataaagaagaaaagagagaagaatcaaatagatgcaataaaaaatgataaaggggatatcagcaccgatcccacagaaatacaaactaccatcagagaatactataaacacctctacgcaaataaactagaaaatctagaagaaatggataaattcctggacacatacaccctcccaagactaaaccaggaagaatttgaatctctgaatagaccaataataggctctgaaattgaggcagtaagtaatagcctaccaaccaaaaaaagtccaggaccagatggattcacagctgaattctaccagaggtacaaagaggagctggtaccattccttctgaaactattccaatcaatagaaaaagagggaatcctccctaacgcattttatgaggccagcatcatcctgataccaaagcctggcagagacacaacaaaaaaagagaatttcagaccagtatccctgatgaacattgatgcaaaaatcctcaataaaatactggcaaaccgaatccagcagcacatcaaaaagtttatccaccatgatcaagtcagcttcatccctaggatgcaaggctggttcaacatatgcaaatcaataaacataatccatcacataaacagaactaatgacaaaaaccacatgattatctcaatagatgcagaaaaggccttcgacagaattcaacagcccttcatgctaaacactctcaataaactaggtattgatggaatgtatctcaaaataataagaactatttatgacaaacccacagccaatatcatactgaatgggcaaaaactggaagcattccctttgaaaaccggcacaagacaaggatgccctctgtcaccactcctgttcaacatagtgttggaagttctgaccagggcagtcaggcaagagaaagaaataaagggtattcaattagaaaatgaggaagtcaaattgtctctgtttgcagatgacatgattgtatatttagaaaaccccatcgtctcagcccaaaatctccttaaactgataagcaaattcaggaaagtctcaggatacaaaatcaatgtgcaaaaatcacaagcattcctatactccattaacagacagagagccaaatcatga

SEQ ID NO: 120945 - DNA, 1431 bp, Homo sapiens
atgttctttgaaaccaatgagaacaaagacacaacataccagaatctctggggcacctttaaagcagtgtgtagagggaaatttatagcactaaatgcccacaaaagaaagcaggaaagatctaaaatcgacaccctaacatcacaattaaaagaactagagaagcaagagcaaacacattcaaaagctagcagaaggcaggaaataactaagatcaaagcagaactgaagaagatagagacacaaaaaacccttcaaaaaatcaatgaatccaggagctggttttttgaaaagatcaacaaaattgatagactactagcaagactaataaagaagaaaagagagaagaatcaaatagatgcaataaaaaatgttaaaggggatatcaccacctatcccacagaaatacaaactaacatcagagaatactataaacacctctatgcaaataaactagaaaacctagaagaaatggataaattcctggacacatacaccctcccaagactaaaccaggaagaagttcaatctctgaatagaccaataacaggagctgaaattgaggcaataattaatagcttaccaaccaaaaaaagtccaggaccagatggattcacagctgaattctaccagaggtacaaagaggagctgctaccatcccttctgaaactattccaatcaatagaaatagagggaatcctccctaactcattttatgaggccagcagcatcatgataccaaagcctggcagagacacaacaaaaaaagagaattttagaccaatatccctgatgaacattgatgcaaaaatcctcaataaaatactggcaaaccgaatccagcaacacatcaaaaagctaatccaccatgatgaggtgggcttcatccctgggatgcaaggctggttcaacatacgcaaatcaataaatgtaatccagcatataaacagaaccaacgacaaaaaccatatgattatctcaatagatgaagaaaaggcctttgacaaaattcaacagcacttcatactaaaaactctcaataaattaagtattgatgggacgtatctgaaaatagtaagagagaataaatacctaggaatccaacttacaagggatgtgaaggacctcttcaaggagaactacaagccactgctcaacgaaataaaagaggatacaaacaaatggaagaacattccatgctcatgggaaggaagaatcaatatcgtgaaaatggccatactgcccaaggtgattttcactactgtcaatgtgagatccactggtgttgaccttatcctgaagtctatcatggttactgtccagcgaacttgctcactgccatcccacgcagaaagggcttccaggaaacagctgctctatgaggtaaagtttattgccctcattttacagaaggagacactcaggttctga

SEQ ID NO: 120946 - DNA, 1923 bp, Homo sapiens
atggaacaaagctggacagagaatgactttgacaagttgagaaaagaaggcttcagacgatcaaactactccaagctaaaggaggaagttcaaacccatggcaaagaagttaaaaaccttaaaaacaaattagacaaatggctaactagaattaccagtgcagagaagtccttaaaggacctgatggagctgaaaaccatggcacgagaactacgtgacgaatgcacaagcctcagcagccaattcagtcaactggaagaaagggtatcagggatggaagatcaaacgaatgaaacgaaagacacacataggctcaaaataaaaggatggaggaagatctaccaagcaaatggaaaacaaaaaaaggcagaggcagcaatcctagtcttggataaaacagattttaaaccaacaaagatcaaaggagacaaacaaggccattacataatggtaaaaggatcaattcaacaaggacagctaactatcctaaatatatatgcacccaacacaggagcatccagattgataaagcaagtccttagagacctacaaagggacttagactcccacacaataataatgggagactttaacacccgactgtcaacattagacagatcaacaagacagagacttaacaaggatatccaggaattgaactcagctctgcaccaagtggacctaatagacatctacagaattctccacaccaaatcaacagaatatacattcttttcagcaccacaccacacctattccaaaattgaccacacagttggaagtaaagcactcctcagcaaaggtaaaagaacagaaattataacaaaccgtctctcagaccacagtgcaatcaaactagaactcaggattaaggaactcactcaaaaccgctcaactacatggaaactgaacaacctgctcctgaatgactactggaatctctgggacacattcaaagcagtgtgtagagggaaatttatagcactaaatatccagaagagaaagcaggaaaggtctaaaattgacaccctaacatcacaattcaaagaactagagaagcaagagcaaacacattcaaaagctagcagaaggcaagaaataactaagatcagagcagaactgaaggaaagggagacacaaaaatcccttcaaaaaatcagtgaatccaggagctggttttttgaaaagatcaacaacattgatacaccgctagcaagactaataaagaagaaaagagagaagaatcaaatagacacaataaaaaatgataaaggggatatcaccactgatcccacagaaatacaaactaccatcagacaatactataaacacctctatgcaaataaacaagaaaatctagaagaaatgaataaattcctggacacatacaccctcccaagactaaactgggaagaagctgaatctctgaatagaccaataacaggctctgaatttgaggcaataattaacagcttaccaatcaaaaaaagtccaggaccagatggattcacagccaaattctaccagagctacaaggaggagctggtaccattccttctgaaactattccaatccatagaaaaagagggaatcctccctaactcattctatgaggccagcatcatcctgataccaaagcctggcagagacacaacaaaaaaagataattttagaccaatatccctgatgaacatcgatgcaaaaatcctcaataaaatactggcaaacaaaatccagcagcacagcaaaaagcttatccaccataaccaagtgggcttcatccctgggatgcaaggctggttcaacacatgcaaatcaataaatataatccagcatataaacagaaccaaagacaaaaaccacatgattatctcaatagatgcagaaaaggcctttgacaaaattcaacaaccttcatgctaa

SEQ ID NO: 120947 - DNA, 1797 bp, Homo sapiens; identical to SEQ ID NO: 120371

SEQ ID NO: 120948 - DNA, 1931 bp, Homo sapiens
tgcacccaatacaggagcacccagattcataaagcaagtcctgagtgacctacaaagagacttagactcccacacaataataatgggagactttaacaccccactgtcaacattagacagatcaatgagacagaaagttaacaaggatatccaggaattgaactcagctctgcaccaagcggacctaatagacatctacagaactctccaccccaaatcaacagaatatacattcttttcagcaacacaccacacctattccaaaattgaccacatagttggaagtaaagctctcctcagcaaatgtaaaagaacagaaattataacaaactgtctctcagaccacagtgcaatcaaactagaactcaggattaagaaactcactgaaaaccgctcaactacatggaaactgaacaacctgctcctgaatgactactgggtacataacgaaatgaaggcagaaataaagatggtctttgaaaccaatgacactctcccaagactaaaccaggaagaagttgaatctctgaatagaccaaaaacaggctctgaaattgaggcaataattaatagcctaccaaccaaaaaaagtccaggaccagatggattcacagctgaattctaccagaggtacaaggaggagctggtaccattccttctgaaactattccaatcaatagaaaaagagagaatcctccctaactcattttatgaggccagcatcatcctgataccaaagcctggcagagacacaacaaaaaaaaagagaattttagaccaatatccctgatgaacattgatgcaaaaatcctcaataaaatactggcaaaccgaatccagcagcacatcaaaaagcttatccaccatgatcaactgggcttcatccctggtatgcaaggctggttcaacatatgcaaatcaatgaacgtaatccagcatataaacagtcccaaagacaaaaaccacatgattatctcagtagatgcagaaaaggcctttgacaaaattcaacagcccttcatgctaaaaactctcaataaattaggtattgatgggacttatctcaaaataataagagctatctatgacaaacccacagccagtatcatactgaatggacaaaaactggaagcattcactttgaaaactggcacaagacagggatgccctctctcaccactcctattcaacatagtgttggaagttctggccagggcaatcaggcaggagaaggaaataaagggcattcaattaggaaaagaggaagtcaagttgtccttgtttgcagatgacatgattgtatatctagaaaaccccatcatctcagcccaaaatctccttaagctgataggcaacttcagcaaagtctcaggatacacaatcaatgtgcaaaaatcacaagcattcttatacaccaataacagacaaacagagagccaaatcatgagtgaactcccattcacaattgcttcaaagagaataaaatacctaggaatccagcttacaagggatgtgaaggacttcttcaaagagaactacaaaccactgctcaatgaaataaaagaggataaaaacaaatggaagaacattccatgctcatgggtaggaagaatcaatattgtgaaaatggccatacctcccaaggtaatttatagattcaatgccatccccatcaagctaccaatgactttctttggcatgatctttctatcccagaaatatggccatgtcactctgctgtttagactccttcagtggctcctcaacgttgccaggaacaacaacaaagtattttacaagatctataaagttggtcataaactgtcttctgcttatgtcctgtgtcttacctgttcacacttttctgtaagcttcctttagtccacctatgcttgctttcttcctggtctttacattcttttctctggcta

SEQ ID NO: 120949 - DNA, 1506 bp, Homo sapiens
atgagttgggagatggagcaagacgaagtgtacaaagaaatgagcataaatcataaaaatgagggaactagggttgaaaaacccaacaggtaccggattattcacatccaacctgatgcaattaaccacgtctcaagaaaaaaggacgttccgtccgcctcgggcgccggccacagcagaagcagcaccggcagcaggcccggggtccgccgcctgtggcccctgctcctccgctctgcgccctcggggccactgaacaacgctgtccccgccccaggcaagggacccgggcgatggggcggcagccccagcctctcccggagcggcggaaaggcaagcacgagggtcgcacccggcctgtctgcacacagtcaagccgcaagcggggtcccagaaccagctgaaccccaacaccaacggacgaaggccagtgggtctcggcggcgaagcctgcgggttgttccagaagccccgaagcccagaacgaggacggcgcgggaagggaaaggcgcaggcgcgggacacactggaggggcccaggagcagagacggcgcaggcgctgggcctgccggggtctgcggggacgcccgggcgcggtcagcccgggcggcgctgaggcgataaaccaactcgccagcgaacactgcgggaacccggctgctgctcttcatcgctgcatcgcatcgctccctcgcaatctcctggtttgggctgggcgaatgctgatgcctaagaaaaaccggattgccatttatgaactcctttttaaagaggaagtcacggtggtcaagaaggatgtccacatgcctaagcacctggagttggcagacaagaattcccgaggctactacgtgaaggaacagtttgcctggagacatgtctactggtaccttaccaatgaggatatccagtatctccgtgattaccttcatctgcccctggagattgtgcctgccaccctacgccgcagccgtccagggactggcaggcctcggtctaaaggtctggaggctttccctgtcctcttctccaacggcatctgtgactcccaccacccgaagccgaataagagaagaaaggaaagaccctctctcagcattggccagagaatatggaggatcaaagaggaacgccttgctgaagtggtgtcagaagaaaacagaaggctatcaggaagtagaccaataacaggctctgaaattgaggcaataattaatagcttaccaaccaaaaaaagtccaagaccagatggattcacggccgaattctaccagaggtacaaggaggagctggtaccattcattccgaaattattccaatcaatagaaaaagagggaatactccctaactcgttttatgaggccagcatcatcctgataccaaagcctggcagagacacaacaaaaaaagagaattttagatcaatatccctgatgaacattgatgcaaaaatcctcaataaaatactggcaaacgaaatccagctgctgctggatccaccatga

SEQ ID NO: 120950 - DNA, 6637 bp, Homo sapiens
atgactcctgaatcaagggatactacagatttgtctccagggggtacccaggagatggaaggcatcgtgatagtgaaggtggaggaggaagatgaagaagaccattttcaaaaggaaagaaacaaagtagagtcatcgccacaagttctcagtcgctctacaactatgaatgagagagccttattgtcatcgtatttagttgcatatagagtggcaaaagagaaaatggctcacacagcggctgaaaaaattatccttccagcatgtatggacatggtacggacaatttttgatgacaaatcagctgataaactaagaactatacctcttagtgataatacaatatctcgtcgaatctgtacgattgcaaaacatttggaagcaatgcttattacacggctgcagtccggtatagactttgcaatccaactcgatgagagcactgatattgcaagttgtcccacactcttggtttatgtcagatatatcccgctgaaattacgcttaggaggacttcttcaaccagaaaaacccattgttctaaaggttgagtcaagggatgggaccattcagtacaactctcaacagcacataaatctttcagcagcttggctgaagactgctgtgcagggcagggaagctccaggcaaacagcccagcaaacagcagcactcagctaaaaggaagactcacagaacacagttgaagaaggaaagtggcgatggacctcatcccaaatttggcggtggaaacctggcttctcctggctgtcagcctggtgctcctctatctagatacttcacgtacagaggcagtgaactgactgctttctggttgaccaccttgaaaaagatgagtgtgcctggcactgtgcttctcagatatgggacccgtacacatggactttttaagagactgggaattccagggcccacacctctgcctttgttgggaaatgttttgtcctatcgtcagaagttggtgaaaattgaagaggtggctgatgtggctgtatccttcatcctggaggaatgggggcatttggaccagtcccagaagtccctttatagggatgacaggaaggagaactatgggagtattacttccatgggttatgagtccagggacaatatggagctcatagtgaagcagatttctgatgactctgaatcacactgggtggcgccagaacacaccgaaaggagcgttcctcaggatccagactttgcagaagtcagtgaccttaaaggcatggtacaaaggtggcaggtcaaccccactgtggggaaatcaaggcagaatccttcccagaaaagggatctggatgcaatcacagacatcagccctaagcaaagcacacatggcgagagagggcacagatgcagcgattgtggcaaattcttcctccaagcctcaaactttattcagcatcggcgcatccacactggagaaaaaccgtttaagtgcggagaatgtgggaagagctacaatcagcgggtgcacctcacccagcaccagcgcgtccacacaggggagaaaccctacaaatgtcaggtgtgcggaaaggctttccgggtgagttcccacctggttcagcaccacagtgtccacagcggagagaggccctatggctgcaatgagtgtgggaagaacttcggtcgccattcgcatctgatcgaacacctaaaacgccacttcagggagaaatcccagagatgcagtgacaaaagaagtaagaacacaaaattaagtgttaagaagaaaatttcagaatattcagaagcagacatggaactatctggaaaaacccaaagaaatgtttctcaagttcaagattttggagaaggctgtgagtttcaaggcaagctggatagaaagcagggaattcccatgaaagagatactaggacaaccatcttcaaagaggatgaactacagtgaagtcccatatgtccacaaaaaatcctccactggagagagaccacataaatgtaacgagtgtgggaaaagcttcattcagagtgcacatcttattcaacatcaaagaatacacactggggagaaaccattcaggtgtgaggaatgtgggaaaagctacaaccaacgcgtgcacctaactcagcatcagcgcgtccacacaggtgagaagccctacacctgtcccttatgtgggaaagccttcagagtgaggtcccaccttgttcagcatcagagcgtgcacagtggggagagacccttcaagtgtaacgaatgtgggaaaggctttgggaggcgttcccacctggctggacatcttcgactccactcccgagagaaatcccatcagtgtcgtgaatgtggggaaatcttttttcagtacgttagcctaattgaacatcaggtgctccacatgggtcagaaaaatgaaaaaaatggcatctgtgaggaagcatatagttggaacttgacagtgattgaagacaagaagattgagttacaagagcagccttatcagtgtgatatctgtggaaaagcctttggttatagctcagacctcattcagcattacagaactcatacagcagagaagccctatcaatgtgatatatgtagagaaaatgttggccagtgttcccacaccaaacaacatcaaaaaatctactccagcacaaaatcccatcaatgtcatgaatgtggcagaggcttcactctgaagtcacatcttaatcaacatcagagaatccatactgatcgcgactgtggccgaggcaggggcaccagcaaccagtggcgctcagtgaagggcaggctgggtctgttccgccatttgccggaccggggtggccgagccgaggacctggaggagaagcgccctgcgccctcgacatctctgaatagcttccttcaactgccagtgaaagatagcaggcctgatttcattggacgcaactgttttcagccccaattagagggtctctggaaatttgacacagagtgctataaaaagtatggaaaaatgtggggaacgtatgaaggtcaactccctgtgctggccatcacagatcccgacgtgatcagaacagtgctagtgaaagaatgttattctgtcttcacaaatcgaaggatgttccccatcattgcccagtatggagatgtattggtgagaaacttgaggcgggaagcagagaaaggcaagcctgtcaccttgaaagacatctttggggcctacagcatggatgtgattactggcacatcatttggagtgaacatcgactctctcaacaatccacaagacccctttgtggagagcactaagaagttcctaaaatttggtttcttagatccattatttctctcaataatactctttccattccttaccccagtttttgaagcattaaatgtctctctgtttccaaaagataccataaattttttaagtaaatctgtaaacagaatgaagaaaagtcgcctcaacgacaaacaaaagaggccagccgaaggatgtctgcaggtcagggagacaggaccaggtaacccagctgtcactgaagattatatagagtttgagaatgttggaatatttgaaaatgctcccccaaaaaagctgctgatgagttctggaaatgtcaggagattaatctatacggacactgctgaagaaaaagctctgtctgatctggagctcgcagcccagtcaataatcttcatttttgctggctatgaaaccaccagcagtgttctttccttcactttatatgaactggccactcaccctgatgtccagcagaaactgcaaaaggagattgatgcagttttgcccaataaggaacgcagctccgcaccagcaacggaaagctggatggagaatgactttgacgagttgagagaagaaggcttcagacgatcaaactactccgagctaaaggaggaagttcgaacccatggcaaagaagttaaaaaccttgaaaaaagattagacaaatggctaactagaataatcaatgcagagaagtccttaaaggacctgatggagctgaagaccatggcacgagaactacgtgatgaatgcacaagcctcagtagccaattcaatcaactggaagaaagggtatcagtgatggaagatcaaatgaatgaaatgaagaaagaagagaagtttagaagaaaaagaataaaaagaaaggaacaaagcctccaagaaatatgggactatgtgaaaagaccaaatctacgtctgattggtgtacctgaaagtgacggggagaatagaacgaagttggaaaacactctgcaggatattatccaggagaacttccccaatctagcaaggcaggccaacattcaaattcaggaaatacagagaacgccacaaagatactcctcgagaagagcaactccaagacacataattgtcagattcaccaaagttgaaatgaaggaaaaaatgttaagggcagccagagagaaagaaatacaaactaccatcagagaatactataaacacctctatgcaaataaactagaaaatctagaagaaatggataaattcctcgacacatacactctcccaagactaaaccaggaagaagttgaaactctgaatagaccaataacaggttctgaaattgaggcaataattaatagcttaccaaccaaaaaaagtccaggaccagatggattcaccgccgaattctaccagaggtacaaggaggacctggtaccattctttctgaaactattccaatcaatagaaaaagagggaatcctccctaactcattttatgaggccagcatcatcctgataccaaagcctggcagagacacaaccaaaaaagagaattttagaccaatatccctgatgaacagtgatacaaaaatcctcaataaaatactggcaaaccgaatccagcagcacatcaaaaagcttatccaccatgatcaagtgggcttcatccctgggatgcaaggctggttcaacatacgcaaatcaataaacataatccagcatataaacagaaccaacgacaaaacccacatgattatctcaatagatgcagaaaaggcctttaacaaaattcaacagcccttcatgctaaaaactctgaataaattagtgttggaagttctggccagggcaatcaggcaagagaaagaaataaagggtattcaattaggaaaagaggaagtcaaattgtccctgtttgcagatgacatgattgtatatctagaaaaccccatcgtctcagcccaaaatctccttaagctgataaacaacttcagcaaagtatcaggatacaaaatcaatgtgcaaaaatcacaaatattcttatacaccaataacagacaaacagagagccaaatcatgagtgaactcccattcacaattgcttcaaagacaataaaatacctaggaattcaacttacaagggatgtgaaggacctcttcaaggagaattacaaaccactgctcaatgaaataaaagaagatacaaacaaatggaacaacattccatgctcatgggtaggaagaatcaatatcatgaaaatggccatactgcccaaggtaatttatagattcagtgccatcgccatcaagctaccaatgactttcttcacagaactggaaaaaactactttaaagttcatatggaaccaaaaaagagcccgcattgccaagtcaatcctaagccaaaagaacaaagccggaggcatcatgctacctgacttcaaactatactacaaggctacagtaaccaaaacagcatggtactggtaccaaaacagagatattgatcaatggagcagaacagagccctcagaagtaatgccacacatctacaactatctgatctttgataaacttgacaaaaacaagaaatggggaaaggattccctatttaataagtggtgctgggaaaattggctagccatatgtagaaagctgaaactggatcccttccttacaccttatacaaaaattaattcaagatggattaagtacttaaatgttagacctaaaaccagaaaaaccctagaagaaaacctaggcaataccattcaggacataggcatgggcaaggacttcatgtctgaaacaccaaaagcaatggcaacaaaagccaaaattgacaaatgggatctaattaaactaaagagcttctgcacagcaaaagaaactatcatcagagtgaacaggcaacctacagaatgggagaaaatttttgcaacctactcatctgacaaagggctaatatccagaatctacaatgaactccaacaaatttataagaaaaaaacaaacaaccccatcaaaaagtgggccaaggatatgaacagacacttcttaaaagaagacacttatgcagccaaaaaacacgtggaaaaaacgctcatcatcactggccatcagagaaatgcaaatcaaatccacaatgagataccatctcacaccagttagaatggtgatcattaaaaagtcaggaaatgacaggtgctggagaggatatggagaaataggaacacttttacactgttggtgggactgtcaactagttcaaccattgtggaagtcagtgtggcgattcctcagggatctagaactagaaataccatttgacctagcaatcccattactggatatatacccaaagcattaa

SEQ ID NO: 120951 - DNA, 3045 bp, Homo sapiens
atggggaaaaaacagagcagaaaaactggaaactctaaaaatcagagcgcctctcctcctccaaaggaacgcagctcctcaccagcaatggaacaaagctggatggagaatgactttgatgacttgagagaagaaggcttcagacaatcaaactactctgagctaaaggaggaagttcgaacccatggcaaagaagttaaaaaccttgaaaaaaaattagacgaatggctaactagaataaccaatgcagagaagtccttaaaggacctgatggagctgaaaaccacagcccgagaactacatgatgaatgcacaagcctcaaaagggtatcagtgacggaagatcaaatgaatgaaatgaagcgagaagagaagtttagagaaaaaagaataaaaagaaatgaacaaagcctccaagaaatatgggactatgtgaaaagaccaaatctacacctgattggtgtacctgaaagtgacagggagaatggaaccaagttggaaaacactctgcaggatattatccaagagaacttccccaatctagtaaggcaggccaacattcaaattcaggaaatacagagaacgccacaaagatactcctcgagaagagcaactccaagacacataattgtcagattcaccaaagttgaaatgaaggaaaaaatgttaagggcagccagagagaaaggtcgggttacccacaaagggaagcccatcagactaacagctgatctcttggcagaaactctacaagccagaagagagtgggggccaatattcaacattcttaaagaaaagaattttcaacccagaatttcatatccagccaaactaagcttcatagacagatcaacgagacagaaagttaacaaggatacccaggaattgaactcagctctgcaccaagcggacctaatagacatctacagaactctccaccccaaatcaacagaatatacattcttttcagcaccacaccacacctattccaaaattgaccacatagttggaagtaaagcactcctcagcaaatgtaaaagaacagaaattataacaaactgtctctcagaccacagcgcaatcaaactagaactcaggattaagaaactcactcgaaaccactcaactacatggaaactgaacaacctgcttctgaatgactactgggtacataatgaaatgaaggcagaaataaagatgttctttgaaaccaacgagaacaaagacaaaacataccagaatctctgggacacattcaaaacagtgtgtagagggaaatttatagcactaaatgcccacaagagaaagcaggaaagatctaaaattgacaccctaacatcacaattaaaaggacttgagaagcaagagcaaacacattcaaaagctagcagaaggcaagaaataactaagatcagagcagaactgaaggaaatagagacacaaaaaacccttcaaaaaatcaacgaatccaggagctggttttttgaaaagatcaacaaaattgatagaccgctagcaagactaataaagaataaaagagaggagaatcaaatagacgcaataaaaaatgataaaggggatatcaccactgatcccacagaaatacaaactgccatcagcgaatactataaacacctctacgcaaataaactggaaaatctagaagaaatggataaattcctcgacacctacaccctcccaagactaaaccaggaagaagttgaatctctgaatagaccaataacaggctctgaaattgaggcaataattaatagcttaccaaccaaaaaaagtccaggaccagatggattcatggccgaattctaccagagggacaaggaggagctggtaccattccttctgaaactgttccaatcaatagaaaaagagggaatcctccctaactcattttatgaggccagcatcatgctgataccaaagcctggcagagacacaacaaaaaaagagaattttagaccaatatccctgatgaacatcgatgcaaaaatcctcaataaaatactggcaaaccgaatccagcagcacatcaaaaagcttatccaccatgatcaagtgggcttcatccctgggatgcaaggctggttcaacttacgcaaatcactaaacgtaatccagcatataaacagaaccaatgacaaaaaccacatgattatctcaatagatgcagaaaaggcctttgacaaaattcaacagcccttcatgctaaaaactctcaataaattaggtattgatgggatgtatctcaaaataataagagctatctatgacagacccacagccaatatcatactgaatgggcaaaaactggaagcattccctttgaaaactggcacaagacagggatgccctctctcaccactcctattcaatatagtgttggaagttctggccagggcaatcaggcaggagaaggaaataaagggtattcaattaggaaaagaggaagtcaaattgtccctgtttgcagatgacatgactgtatatttagaaaacgccatcgtctcagccccaaatctccttaagctgataggcaacttcagcaaagtctcaggatacaaaatcaatgtgcaaaaatcacaagcattcttatacactaataacagacaaacagagagccaaatcatgagtgaactcccattcagaattgcttcaaagagaataaaatacctaggaatccaacttacaagggatgtgaaggacctcttcaagcagaactacaaaccactgctcaatgaaataaaagaggatacaaacaaatggaagaacattccatgctcatgggtaggaagaatcaatatcgtgaaaatggccatactgcccaaggggacccagaggccctatgccaaggttagagttcaactgaacagtggagaggaattgcacttcttaggccttttagataccagtacacaggtgactgtgatccccacaaacccttgcatcaagatgaggagaaaacagatcgtgttctctgactttgggctcctactaacctccgttgtcatggcccccactactgaatga

SEQ ID NO: 120952 - DNA, 2764 bp, Homo sapiens
atggcacgagaactacatgacaaatgcacaagcttcagtagccgattcgatcaactggaagaaagtttatcagcgatggaagatcaaatgaatgaaatgatgcgagaagagaagtttagagaaaaaagaagaaaaagaaatgaacaaagcctccaagaaatatgggactatgtgaaaagaccaaatctacatctgattggtgtacctgaaagtgacagggagaatggacccaagttggaaaacactctgcaggatattatccaggagaacttccccaatctagcaaggcagggcaacattcaaattcaggaaatacagagaatgccacaaagatactcctcgagaagagcaactccaagacacataattgtcagattcaccaaagttgaaatgaaggaaaaaatgttaagggcagccagagagaaagaaatacaaactaccatcagagaatactataaacacttctatgcaaatgaacttgaaaatctagaagaaatggataaattctttgaaacatacaccctcccaagactaaaccaggaagaagttgaatctctgaatagaccaataacaggctctgcaattgaggcaataattaatagcttaccaaccaaaaaaagtccaggaccagatggattcacagccgaattctaccagaggtacaaggaggagctggtaccattccttctgaaactattccaatcaatagaaaaagagggaatcctccctaactcatttcatgaggccagcatcatcctgataccaaagcctggcagagacacaacaaaaaaagagaattttataccaatatccctgatgaacatcgatgcaaaaatcctcaataaaatactggcaaacagaatccagcagcaccatcaaaaagcttatccaccatgatcaagtgagcttcatccctggggatgcaaggctcctttcaatatacacaaatcaataaatgtaatccagcatataaacgggaaccaaagacaaaaaccacatggttatcttcaataggatgcaggaaaagggccttttgacaaaattcaacagcccttcatgctaaaaactctcaataaattagttattgatgggacatatctcaaaataataagagctatctatgacaaacccacagccaatatcatactgaatgggcaaaaactggaagcattccctttgaaaactggcacaagacagggatgccctctctcaccactcctattcaacatagtgttggaagttctggccagggcaatcaggcaggagaaggaaataaagggtattcaattaggaaatgaggaagtcaatttgtccctgtttgcagatgacaagattgtatatctagaaaaccccattgtctcagcccaaaatctccttaagctgataagcaacttcagcaaagtctcaggatacaaaaatcaatgtgcaaaattcacaagcattcttatacaccaataacagacaaacagagagtcaaatcatgagtgaactcccattcacaattgcttcaaagagaataaaatacctaggaatccaacttacaagggatgtgaaggacctcttcaaggagaactacataccactgctgaatgaaataaaggaggatacaaagaaatggaagaatattccatggtcctgggtaggaagaatcaatatcatgaaaatggccatactgcccaaggtaatttatagattcaatgccatccccatcaagctaccaatgactttcttcacagaattggaaaaaagtactttaaagttcatatggaaccaaaaaagagcccgcatcgccaagtcaatcctaagccaaaagaacaaagctggaggcatcacactacctgacttcaaactatactacaaggctacagtaaccaaaacagcatggtactggtaccaaaacagagatatagatcaatggaacagaacagagccctcagaaataacgctgcatgtctacaactatctgatctttgacaaacctgacaaaaacaagcaatggggaaaggattccctatttaataaatggtactgggaaaactggctagctatatgtagaaagctgaaactggatcccttccttacaccttatacaaaaattaattcaagatggcttaaagacttaaatgttagacctaaaaccataaaaaccctagaagaaaacctaggcattaccattcaggacataggcatgggcaaggacttcatgtctaaaacaccaaaagcaatggcaacaaaagccaaaattgacaaatgggatctaattaaactaaagagcttctgcacagcaaaagaaactaccatcagagtgaacaggcaacctacaatatgggagaaaattttcgcaacctactcatctgacaaagggctaatatccagaatctacaatgaactcaaacaaatttacaagaaaaaatcaaacaaccccatcaaaaagtgggtgaaggatatgaacagacacttctcaaaagaagacatttatgcagctaaaaaacacatgaaaaaatgctcatcatcactggccatcagagaaatgcaaatcaaaaccacaatgagataccatctcacaccagttagaatggcgatcattaaaaagtcaggaaacgacaggtgctgtagaggatgtggagaaataggaacacttttacactgttggtgggactgtaaactagttcaaccattgtggaagtcgctgtgccaagcaggatctagaatattctttgtcagtgaagtagaagctgttgaagtaacttctgcaataggacag

SEQ ID NO: 120953 - DNA, 3549 bp, Homo sapiens
atgcagctggagatccgagaatgcacagactgcctcctcaagtggcctccactgctgatactcaggcaaacagggtctggagtagacctccagcaaactccaacagacctgcagctgagggtcctgactgttagaaggaaaactaacaaacagaaaagacatccacaccaaaaccccatctgtacgtcaccatcatcaaagaccaaagaactagagaagcaagagcaaacacattcaaaagctagcagaaggcaagaaataactaagatcagagcagaactgaaggatatagagacacaaaaaacccttcaaaaaatccatgaatccaggagctggttttctgaaaagatcaacaaaattgatagaccgctagcaagactaataaagaagaaagagaagaatcaaatagatgcaatacaaaatgataaaggggatatcaccaccgatcccacagaaatacaaaccaccatcagagaatactataaacacctctatgcaaataaactagaaaatctagaagaaatggatacattcttcgacacatacaccctcccaagtctaaaccaggaagaagttgaatctctgaatagaccaacaacaggctctgaaattgaggcaataattaatagcttaccaaccaaaaaaagtccaggaccagatggattcacagccgaattctaccagaggtacaaggaggagctggtaccattccttctgaaactattccaatcaatagaaaaagagggaatcctccctaacacattttatgaggccagcatcatcctgatactaaagcctggcagagacacaacaaaaaaagagaattttagaccaatatccctgatgaacatcgacgcaaaaatcctcaataaaatactggcaaaacaaatccagcaacacatcaaaaagcttatcgaccatgatcaagtggacttcatccctgggatgcaaggctcgttcaatacatgcaaatcaataaacgtaatccagcatataaacagaatcaaagacaaaaaccacatgattatctcaatagatgcagaaaaggcctttgacaaaattcaacaagtcttcctgctaaaaactctcagtaaattagcctctgctagtgataccccagcaaacagggtccggggtggacctctagcagactccaacagatctgcagacagatcaacgagacagatggttaacaaggatatccaggacttgaactcagctctgcaccaagcagacctaatagacatctacagaactctccatcccaaatcaacagaatatacattcttctcagcaccacatcatacttattccaaaattgaccacatagttggaagtaaggcactcctcagcaaatgtaaaagaacagaaatcacaacaaactgtctctcagacaacagtgcaatcaaattagaacccaggattaagaaactcattcaaaaccgcacaactacatggaaactgaacaacctgctcctgaatgactactgggtaaataatgaagtgaaggcagaaataaagatgttctttgaaactaatgagaacaaagacacaacataccagaatctctgggacacattcaaagcagtgtgtagagggaaatttatagcactaaatgcccacaagagaaagcaggaaagatctaaaattgacaccctaacatcacaattaaaagaactagagaagcaagagcaaacacattcaaaagctagcagaaggcaagaaataactaagatcagagcaggactgaaggaaatagagacacaaaaaaaccttcaaaaaatcaatgaatccaggagctggtttttgtgaaaagatcaaccaaatttgatagaccgctagcaagactaataaagaagaaaagagagaagaatcaaatagacacaataaaaaatgataaaggggagatcaccactgatcccacagaaatacaaactgccatcagagaatacctataaacaccctctacgcaaataaattagaatatcctagaagaaatgggataaattccctggacacatacactcttccaagactaaccccaggaagaagttgaatcccttcagtagactaataacaggctctgaaattgaggcaataattaatagcttaccaacccaaaaaaagtccaggaccagatggattcgacgagccgaattctaccagaggtacaaggaggagctggtatcattccttctgaaactattccaatcaatagaaaaagagggaatcctccctaactcattttatgaggccagcagcatcctgataccaaagcctggcagagacacaacaaaaaaaagagaattttagaccaatatccctgatgaacatcgatgcaaaaatcctcaataaaatactggcaaaccgaatccagcagcacatccaaaagcttatccaccatgatcaagtgggcttcatccctgggatgcaaggctggttcaacatacgaaaatcaataaatataatccagcatataaacagaaccaacgacaaaaaccatatgattatctcaatagatgaagaaaaggcctttgacaaaattcaacaacgcttcatgctaaaaactctcaatgaattaggtattgatgggacgtatctcaaaataataagagctatctatgacaaacccacagccaatatcatactgaatgggcaaaaactggaagcattccctttgaaaactggcacaagacagggatgccctctctcacctcaccactcctattcaacatagtgttggaagttctggccagggcaatcaggcaggagaaggaaataaagggcattcaattaggaaaagaggaagtcaaattgtccctatttgcagatgacatgattgtatatctagaaaaccccatcgtctcaccccaaaatcttcttaagctgataggcaacttcagcaaagtctcaggatacaaaatcaatgtgcaaaaatcacaagcattcttatacaccaataacagacaaacagagagccaaatcatgagtgaactcccattcacaattgcttcaaagagaataaaatacctaggaatccaacttacaagggatgtgaaggacctcttcaaggagaactacaaaccactgctcaaggaaataaaagaggatacaaacaaatggaagaacattccatgctcatgggtaggaagaatcaatatcgtgaaaatggccatactgcccaagctaatttatggattcaatgccatccccatcaagctaccaatgactttcttcacagaattggaaaaaactactttaaaattcatatggaaccaaaaaagagcccccattgccaagacaatcccatgccaaaagaacaaagctggaggcatcaccctacctgacttcaaactatactacaaggctacagtaaccaaaacagcatggtactggtaccaaaacagagatatagaccaatggaacagaacagaagcctcagaaataatgccacatatctacaactatctgatctttgacaaacctgacaaaaacaagaaatggggaaggattccctatttaataaatggtgctgggaaaactggctag

SEQ ID NO: 120954 - DNA, 653 bp, Homo sapiens
gcgccccttaaaacctttaattcttaaggacgggccccccccaaataggtcttttcttgcattcccccccagcttttatgagagctcaaccattctcactttggttgttgtggctgtaaagtttatttcaatgcaaaagaatctctctccaatttttactgaaggtggctgacaccgtccacgaccbaaatccgcctctaaactggaatttcgggttgcttgacccaagccccagcctcggctttcttgtcaggcaccaggtggcacaggyactcccgtcttgtaggtatctcttgtcagcttcccctcttgtgagtctcgcaggtcgctcaccctcccagacctttaggccgaggcctgccagtctctggacggctacggcgtaggtgtggcaggcacaatctccgggggcagatgaaggtaatcacggagatactgggataccctcattgggtaaggtaccagtagaaaatgtctccaggcaaacttgttcctttcacgtaggcctcggggactttgagagacttgcatgggcttcatgaccatgaaggttgggcacatttctgttctgccagctcggggtgcgtaggcatgtggacatcctttctgggcaccatgactccctcccttaaaaggagtttcataaagggaat

SEQ ID NO: 120955 - DNA, 629 bp, Homo sapiens
gaatccccacgagctgggtgctgtcgtagttggaggtggcctgaggagctcagttccctcagcgcccgtatcttcggcggagtctgcgcgatgggcgacccggaaaggccggaagcggccgggctggatcaggatgaggtcgacttatcaaaggatctccctcactggaacaagcttaaagcagatgagaagtacttcatctctcacatcttagccttttttgcagccagtgatggaattgtaaatgaaaatttggtggagcgctttagtcaggaggtgcaggttccagaggctcgctgtttctatggctttcaaattctcatcgagaatgttcactcagagatgtacagtttgctgatagacacttacatcagagatcccaagaaaagggaatttttatttaatgcaattgaaaccatgccctatgttaagaaaaaagcagattgggccttgcgatggatagcagatagaaaatctacttttggtctcctgggtctgtggatctctcagggactcttggaccacactgaagaaccagtgatatagtgcgtatatgggccagcatgtagtataccagggatgaagcagatatgtttgcctccttgccttcagttcatttcaagaatgag

SEQ ID NO: 120956 - DNA, 400 bp, Homo sapiens
aaagtataaagtgttttggaaaaaaaggaaaaaaatctatataaaaatctcttcacatataaaatcctgaagaaggtgcaaggtgagacccagtgcgaggggcgtgctcagatatgcagtgtgtgtgtgtgtgtgtgtgtgtgtgtatccgtgtgtacatgtgtgcacgtgtgtgcgtatgtgtctgtgtgtctgtgtgtgtgtgtgtgaagctcagtggagattcactgtgggggtcagggatgtgcacgctgcatttgcctccagccccaagaaggggggtgcactgagcaggctgtggctctgcactgtgccgcccagctctggaggaacaggcttaagctgatgaagcagcctgtggcccgggtctgatgggatctctgcaacaaccccgtgttgc

SEQ ID NO: 120957 - DNA, 1092 bp, Homo sapiens
  misc_feature (1)...(1092): n = a,t,c or g
cagtacgacgtttaaacacggccatgcaagcaaaattaccccactaaaggaataagttcggcccatctttttttttttttttttgctgctggaacgttttattaagttaagaggttcagggagcagaagagaaacaccttttgggtggcttctggcggttctgcacccaagcacagcctcgaaggaggctgtggggccatggaggcccagctgctagctccctctgtcctgagccccatggtacgggtccaaatggggcaggaagtgttagtaggaggtagggcaggaagagggtgngcaggctcccgcctctcccctgtagagacaccgccgccatggcttgctgcctgggcctccgccagacctctgggccagggccaccagctcagaagcccaagcacagcggtggctggagacagagggggaccagggttggaggcacacagccaccaggaattgctttttttttttttttttttaaagtataaagtgttttggaaaaaaaggaaaaaaatctatataaaaatctcttcacatataaaatcctgaagaaggtgcaaggtgagaccccagntgcgaggggcgcgcatcagatatgcagtgtgtgtgtgtgtgtgtgtgtgtgtgtatccgtgtgtacatgtgtgcacgtgtgtgcgtatgtgtctgtgtgtctgtgtgtgtgtgtgtgtgtgtgtgtgtgtgtgtggtgggtgcaagtgcacgtgtggcccaacagagggtggggagaaagcttggctttttacttccatccaggagggaaggaggtgcggctggtcctccagcctgagagggtctgcagctgggcgggacctctactcagccaggctgtttgcgcatcgactccttctcctggagggccggccatggcaagacgcaggtgctccttcagctgctcgaatctcccgctcagagccgtggtcttgatggtggctcagctccacatagaacgtcctggtactttcccgaggtgaagcgcttgtccttctgcatcatctggagctcgtcccggaggcacctgccctactttcttaagtactggagttccgtttcttttaaccgaaaccacac

SEQ ID NO: 120958 - DNA, 741 bp, Homo sapiens
aagatggaaaggactgagatgattttctcaattaactcccagctggaatttaagaggaagccttttcctttaggctcctcttcccggcggttggtaaaaagaggtgaattgacagcctatgttgaagacactgtgcttttctcaagaaggacatccaaacagcaagtctacttctttctctttaacgatgtgctcattatcaccaagaagaagagtgaagaaagttacaacgtcaatgattattccttaagagatcagctattggtggaatcttgtgacaatgaagagcttaattcttctccagggaagaacagctccacaatgctctattcaagacagagctctgccagtcacctctttactctgacagtccttagtaaccacgcgaatgagaaagtggagatgctactaggagctgagacgcagagcgagcgagcccgctggataactgccctgggacacagcagcgggaagccgcctgcagaccgaacctcactgacccaggtggaaatcgttaggtcatttactgctaagcagccagatgaactctccctgcaggtggctgacgtcgtcctcatctatcaacgtgtcagcgatggctggtatgagggggaacgactacgagatggagaaagaggctggtttcctatggaatgtgccaaggagataacatgtcaagctacaattgataagaatgtggagagaatgggacgcttgctaggactggagaccaacgtgtag

SEQ ID NO: 120959 - DNA, 570 bp, Homo sapiens
atgcaagacaaagcccttcccattttttcctctcgtcttctcaagcagaaggaaggggtctcttttggagccccagctgtgcttgccagcactcacttggctgccacagctggtgtctcattggttcgactatgcaatgagggcgcccggaagatggaaaggactgagatgatgtacacaattaactcccagctggaatttaaaattaagccttttcctttagtctcctcttcccggtggttggtaaaaagaggtgaattgacagcctatgttgaagacactgtgcttttctcaagaaggacatccaaacagcaagtctacttctttctctttaacgatgtgctcattatcaccaagaagaagagtttcttacagctgctgtatcaaagtgccacaaacaaatgctactgggggggaatgtcagagccattaaattcctcagagggatttaatgcacgacagtctagaagaggatcttggagagtgtccccaaagaagaatgacttagaaatgtcacagaaggcattagaagatagagtttcaggattcacagttgctcagtgtcactag

SEQ ID NO: 120960 - DNA, 1416 bp, Homo sapiens
atgatcgaaacagtcagctatgagtgtggggaagtggtaggttcctcgtactacgtgagcgactgtagcgtcagctacgggtcgaccgacgcacatcagtatagcgccgcgcgggtatggtgtgtgagtgtagtagacgaggagaggtgggagagtacctggaggcgatgcagactcttggtaatagggtcgctggagagcaagtgtaagtcaggcgagaagaaggtggacgccctcctgaaggagaagcggcgcctggaggcagagctggagaccgtgtcccggaagacccatgacgcctcgggccagctagtcctcatcagccaggagctgctgcggaaggagcgacaaggtctcactcagttgcccaagctgggagtgcagtggtatgatcaaagctcactgcagcctcaatcttccaaactccagctgaccacagtggccgagaagtcgcgcgtgctgcagctggaggaggagctcaccctgcgccgaggtgaaatcgaggagctccagcagtgcctgttgcactcgggtcccccacttcgggaccacccagacgccgccgagatcctgcggctacgggagcggctgctctcggccagcaaggaacaccagagggagagtggggtgctgcgggataaatacgagaaggccctgaaggcctaccaggcggaggtggacaagctccgcgcggccaacgagaagtacgcacaggaggtggcgggcctgaaggacaaggttcagcaggccaccagcgagaacatggggctaatggacaactggaaatccaagctggactcgctggcctcggaccaccagaagtccctggaggacctcaaagccaccctgaactcgggcccaggcgcccagcagaaggagatcggcgagctgaaggcagtgatggagggcatcaagatggagcaccagctggagctgggtaacttgcaggccaagcatgacctggagaccgccatgcacgtgaaggagaaggaggccctgcgagagaagctgcaggaggcccaggaggagctggctgggctgcagcggcactggcgggcccagctggaggtgcaagccagccagcaccggctggagctgcaggaggcccaggaccagcgccgggatgccgagctgcgtgtgcacgagctggaaaaactggacgtggagtaccggggccaggcgcaggctatcgagttcctcaaggagcagatctcgctggccgagaagaagatgttggactacgagcggctgcagcgggcagaagcccagggcaaacaggaggtcgagagtttgcgggagaagctcctggtggctgagaacagactccaggcggtcgaggccctgtgctcctcccagcacacacacatgattgagtcgaatgacttttcagaggagacgatcaggaccctcgtccaa

SEQ ID NO: 120961 - DNA, 1268 bp, Homo sapiens
gcacctatactgtgccaggcttgcataccggcaaagaagaaacaataactaatgaaacaagatctctgccctcaataaggcggctgcagctagaggcaccactgtcatcatgggaactacagaacattaaagctggaagtggtgaaagcgtaagtgcaaggggctccttattcgtggacataaataatagactgaaagtcatgagtcccattctcagtgaggaagcagaggcaacacagacagataatgagagggggcgactttcacagcctcaagtacactcctctctgttaaatttccctgtgtcttggaaaagaggcggaagtagtaaagagatgaaaacagaagaccctggactgatggtctggggaaagggggaagagttgactggccaggattatcctgaagacacaacactctgcccaaatccaatgaaacacttcacgttgttcagcagtcctgacagggttgaaacggtagccacttacagacttaagacctgcctcccttatactgtggcctgtccttgtactgatcaggccagcccgtccacagatagagatggcatccttatgtttataccgggaagctacactaagagagatgacccttcattgtctgtggactttttctggtctcatatgacacccggagctgctgcacaagaggaaccagtagacaagtgtagacagtacagtgaagacatagagggcaccagagtcatcaataccattgttcagccagcgtgtcatgtggaaacagcacactgtgtccagaagcgccccgtggcacggttggcctggaatctccaacatctccccacacagcagcaggcagccctggatgaccaggtcagccaaaaagttaagaaaacgactgaagccaccttgcagacgatacaagatatggtcaccatcgaggactatgatgtttctgaatgcttccagcacagtcgttccacagaatcagtgaagtccactgtctctgaaacctacctgagtaaacccagcatcgccaagagaagagccaaccagcaggaaactgaacagttctacttcatgaaactcagagaatatttggaaggcagtaatctcatcacaaaacttcaagccaaacatgacttgctgcagaggaccctgggagaagcaaagcagatgagttatggccttggagcccatggagaattcccggaggaatcttatatccctggcatagcacagtggactccttgctgtctcaggtcaacagaaccagaaggagataattag

SEQ ID NO: 120962 - DNA, 552 bp, Homo sapiens
aatgctctccctggtagaaagagccgtgtcttctctgggtgcgtctctgctgacacctggaagccaccatcctctgcaaaggtcacggagaccaaaggagccagcccggccttcctcagagcaggccaacctcggttggtgcctggggaaactttggaaaagagcttggggccagggaaagacccacaagttgagccccagcacccagttcacctcccaggtatctcctctgagggctttccctgggacggcttcaatgagcagacacctaaagactcttcccaacagagatggaggcgcgtgggttctgggctacagagcgggaccagcctgtccatttttgcttcatgaggaaagggagaagtcaaacaggagcgaattgtacttggatctccatcctgaccacagcctgactgagcaggatgacaggactcctggcagacttcaagctgtctggccacccccaaagacaaaagacacagaagaaaaagtgggactgaagtacactgaagcagaataccaagctgctattttacacttgaagagggagca

SEQ ID NO: 120963 - DNA, 564 bp, Homo sapiens
atgcataatgattctgttcccagaaatgaagatgaacaaggcacagttcctgccctggagaacacacacattagtgacttggctcagatgacgctgtttaggaactgtatctcctctgagggctttccctgggacggcttcaatgagcagacacctaaagaccttcccaacagagatggaggcgcgtgggttctgggctacagagcgggaccagcctgtccatttttgcttcatgaggaaagggagaagtcaaacaggagcgaattgtacttggatctccatgtagaagcaaggtgttgtctccatttcaaagatgtggaaaatgagtataacgaagatgctgatcaggaagaaggcctaaggttggtcagtgggctccttgacatgaattcaaacaacttcagtgaagtaattaaacaggatgagtgttgccatgtatttgtaacacaggggccccacgttgaacactgtgcattggattcctggtgctccacctcagagccagcttccatggccacgtcagttctttcatctgtgactccttccagacggtcttacagctga

SEQ ID NO: 120964 - DNA, 2658 bp, Homo sapiens
gttcccgctgggattccccatctccaaccccgcaggcaaggacgccgtgaccttgcaaggcatccctgagggagcctttgatgaagtgacctcatgcctggtgaaggtgccagagaagacagaaggtggcaacaacatggctctggttgagaatgtcaccacccttcagaagagccaggatctgctggaggcagaaggagaaaagaagaccatgataaagaagattatgccacacccagcccaccctgggcatgcgggagaggtcggagctggtgaacgtgtgtgtgcacagcgtgttctccctgccctccgtgcaggcgatgcaggagaaggacgaggccaaggctgagaccatccaggctctttaccatcagaccctggaggccctgcagacactgctcaaagccctctttatcgaggaccccactcctgctgggctgaagagcatcttggaggccctggggccttggatgaactctgggaaggcccatgagcgagcacgggctgtgaacaccaatgtctctgtgttgaaccacatgcttctaactctgcctttctttatgcccttggggttcccggcgctggggcttctgctggggagactcatccttcacattggggatcctgatgaggagattggctgtgaggctctggacggcatcatcatcctctacactattctggagctccaaaaacgagccagagataaggaagagaccaacaaaaaggagctatatgagagcaacaagcatttcctggggccctacaaccctgtgagcccgtgccagaacattctgcgggtgatcgaggaatttggagacttcctggggccccagcagataaaggacctgctgctggccgccctggaagggctgaaaggcagctcagaggctccagggaaggactccagggagatgatgcagctggcctcggaggtcatgctcagctcggtgctggagtggtaccgccacagggcgctggaggtgatcccagaaatcatgcaaggcatctacatgcagctgagccacatccaggagcctcgggcccgccaggtggccctgctgcccgtctccctcctggctagctccttcatgaccgaggttgtggtggccctgctcatgtgccccctcccactgaacaggcagccagcggcctgtgcgagctcctgtccgtcaacagctgcatgggccgtgtgaggcgcatctaccctcagctgctcctggccctgctcattcaggtccattaccacatcggcctcaacctgcctggctgcgtggctcctcccaaggacaccaagaagggtgcacagccctctcccttcgtacctgtgcgctgggtggtgaaagtggtgaaaaccctgctactgaggatgggctgctcttatgagaccacgtttctggaggaccagggtggctgggagctcatggagcaggtggagagccaccaccgcggagtggccttgctggcaagggccatggtgcagtactcctgccaggagctgtgccgcatcctctacctgctcatcccgctcctggagcgaggcgacgagaagcacaggatcacggccaccgccttcttcgtggagatggagcaggtgcgccggatccccgaggaatactctctggggcggatggcagaaggcctgagccaccacgaccccatcatgaaggtgctgtccattcgaggcctggtcatcctggcccgcaggtctgagaagaccgccaaggtgaaggccctcctgccctccatggtgaagggcctgaagaacatggatgggatgctggtggtggaagcggtccacaacctcaaggctgtcttcaaggggcgggaccagaagctgatggacagtgcggtctatgtggagatgctgcagatcctgctgccgcacttcagcgacgcacgagaggacgtgcgctcctcctgcatcaacctgtatgggaaggtggtccagaagcttcgggcaccacgcactcaggccatggaggagcagctggtcagcaccttggtgcccctactgctgaccatgcaggagggcaactccaaggtaagccagaagtgtgtgaagaccctgttacgctgttcttacttcatggcttgggagttgccaaaaagagcttatagccggaagccctgggacaaccaacagcagacagtggccaaaatttgcaagtgccttgtgaacacccaccgagacagcgccttcatattcctcagccagagcctggagtatgccaagaactcacgggcctccctccggaagtgctcagtcatgttcatagggtccctggtcccctgcatggagagcataatgacagaagatcgtctgaatgaagtgaaagctgctctggataacttgagacatgacccagaagcatcagtgtgcatctacgcagcccaggtccaggaccacatcctggccagctgctggcagaactcctggctgccgcacgggaactcatgggtgtgttactcagccaccacccaccgctggagccccagctgtgagaacctgcccacttcccaccagcggcgctcctggatcatgcaggcactgggctcctggaagatgtccttgaagaagtgacgtccctgagccccaaaccctcctcagggtggttgagttccagccatgctccctataaatgtcatgtggcttac

SEQ ID NO: 120965 - DNA, 731 bp, Homo sapiens
ctaggcatgaattaaacccatttataaggcaccgttccagagaaggtctggttctgggccactgcatctctaggccaagctcaaaagcactccttattccaacctcaaactcttctctggaccttgactccaatccattgctcaacatgggctcaagaaacacctccaagctgaacctcaatgtagctccagattctcatgggaccctaatcccagacacaaatgagaccatcactttggcttcacataatatctctgagtctgtttcaaaaggagcctttagtaccacctggagcacaagttcaaaggaaaccatgaatgtggcttccagcggccactccagatctgatttgagcgtgaccatcactcaagcctcgtatgtgaccctgattcctggctccagctatggtatcagcctgcactccagcacccatgggcccaactccaccatctctccaccctcatgcatgactctaatcctgggttccaatgagactctgagcctggactccagcctcctgttcagcgacacctccaccttgacgctgagcagtcagcaggatgatgccaaggacaacagcatccacactgtgcccctggaggagaatctggagagttggagtgagatggccagcattaaggtgggccagttcccgctgggattccccatctccaaccccgcaggcaaggacgccgtgaccttgcaaggcatccctgaggggctcaagtga

SEQ ID NO: 120966 - DNA, 1221 bp, Homo sapiens
ggagcggaagtgtatgcaaggaaaatatgcaggagctatggaatctgaaccctgtgtctgcactgaggctgattttgattgcgactatggttatgagcgacacagcaatggccagtgcctgccggcattttggttcaatccatcctctctgtcaaaggattgcagcttgggacagagttacctcaatagtactgggtacaggaaggtggtttccaataattgcactgatggcgtaagggaacagtacactgccaaaccgcagaagtgcccagggaaagccccgcgggggctgcgggatagtcacggctgatggaaagctgacagcgggaacaaggacacaacgtcactctcatggtgcaattagaagagggtgatgttcagcggacactcatccaagtggactttggcgatggtatcgcggtgtcttacgtcaatctcagctccatggaagatgggatcaaacacgtctatcagaacgtgggcattttccgtgtgaccgtgcaggcacttgtccggctgcccccccacatctcacagtgtgacgaagtcttccggttcttcgaggctcgacccgaggatgtcaaccctccaaaagaccaggctctcctgcttggggaactgggtccggccgtggagctgtgtctgaaggaggagcgctttgctgatgccattatcctggcccaggctgggggtacagatctgctgaagcaaacacaggagcgctacttggccaagaagaaaaccaaaatctcctcgcttctagcctgtgttgtgcaaaagaattggaaggatgtggtgtgtacctgtagcctgaagaactggagagaggcactggctttgctactgacatactcaggcacagagaaatttcccgagctctgtgacatgctgggaactcgcatggaacaggagggcagcagggcactaacctccgaagccagactctgttatgtgtgctcagggagtgtggagcggctggtggagtgctgggcaaaatgccaccaggctttgtcccccatggctctgcaggacatgcatgttatcagcaccgatgagaatcaggtgttcgcagcggtccaagaatggaaccagaatgacacgtacaacctctacatctcagacacacgtggtgtctacttcaccctggccttggagaatgtccagagcagcagaggccctgagggcaacatcatgatcgacctctatgaggtcaccatctag

SEQ ID NO: 120967 - DNA, 1662 bp, Homo sapiens
atgcctgaaaaaggagatgaggaaggaagaatagaggactctaatttaattttggaggtggcttcaccaggactagacaggttaaagcacttgagagctatccccatcttcggaaatggcagtggggtgaaggaagatgattcacattatctaacttgccgaatgcagaactgtacagaggccaacaggaatcagccttttccaggctacattgacccagactctttgattgttcaggatcattatgtgtttgttcagtgtaacaccatcaaactggaattcagtgcccagagattagctcgagcttcttacagtcttgtttttatgatccagctgacatcaggagggcggccacattactacgtgtcctaccgaaggaatgcatttgcccaaatgaagcttccgaaatatgctttgcccaaggacatgcatgttatcagcaccgatgagaatcaggtgttcgcagcggtccaagaatggaaccagaatgacacgtacaacctctacatctcagacacacgtggtgtctacttcaccctggccttggagaatgtccagagcagcagaggccctgagggcaacatcatgatcgacctctatgaggtagcagggataaagggaatgttcttggctaacaagaagattgacaaccaagtgaagactttcatcacatataacaaaggcagagactggcgtttgctgcaggcgccggacacggatctaaggggggaccccgtgcactgcttgctgccctattgctcactacaccttcacctgaaggtctctgagaatccctacacatcagggatcattgccagcaaagacacagctccaagcatcatagtggcatcaggtaatataggttctgaattgtcagacactgacatcagcatgtttgtctcttcagatgcagggaacacctggagacagatctttgaagaagagcacagtgttttgtacctggatcaaggtggagtcctggttgctatgaaacacacatctctcccaattcgacatctttggttgagttttgatgaagggagatcttggagcaaatacagtttcacatctattccactttttgtggatggggttctgggtgagcctggagaagagactctcatcatgacagtgtttggacacttcagccaccgctctgaatggcagctggtcaaagtagattacaagtccatttttgatagacggtgtgccgaagaggactacagaccttggcagctgcacagccagggggaagcatgtatcatgggagcaaaaaggatatataagaagcgaaaatcagagcggaagtgtatgcaaggaaaatatgcaggagctatggaatctgaaccctgtgtctgcactgaggctgattttgattgcgactatggttatgagcgacacagcaatggccagtgcctgccggcattttggttcaatccatcctctctgtcaaaggattgcagcttgggacagagttacctcaatagtactggtccaaaggccagcagacctgagacccaggaagagcctatctttcggttcaagaccgaaggcaggaaaagaggccagtgttccaatatgaatgccatcaggcagaaggaattctctcttactttgggaactgtcaacctgctgaattcaggccttcagctgattggatga

SEQ ID NO: 120968 - DNA, 826 bp, Homo sapiens
ctcccagcgtgagcgacgaagaagacgggtgatttcagcatttccatctgaggtaccgggttcatctcaccagggagtgccagacagcgggtgcaggtcagtgggtgcgcaccccgtgcgcgagccgaagcagggcgaggcattgcctcactcaggaagcccaagggaaggaaaactaacaaacagaaaggacatccacaccaaaaacccatctgtacatcaccatcatcaaagaccaaaagtagataaaaccacaaagattgggaaaaaacagaacagaaaaactggaaactctaaaacgcagagcgcctctcctcctccaaaggaatgtagttcctcaccagcaacggaacaaagctggatggagaatgactttgatgagctgagagaagaaggcttcagacaatcaaattactctgagctacggaaggacattcaaaccaaaggcaaagaagttgaaaactttgaaaaaaatttagaagaatgtaaaactagaataaccaatacagagaagtgcttaaaggagctgatggagctgaaaaccaaggctcgagaactatgtgaagaatgcagaagcctcaggagccgatgcaatcaactggaagaaagggtatcagtgatggaagatgaaatgaatgaaatgaagcgagaagggaagtttagagaaaaaagaataaaaagaaatgagcaaagcctccaagaaatatgggactatgtgaaagaccaaatctacgtccgattggtgtacctgaaagtgacggggagaatggaaccaagttggaaaacactctgcaggatactatccaggagaacttccccaatctag

SEQ ID NO: 120969 - DNA, 942 bp, Homo sapiens
atgaccgtttgcaatcttaaggtagagaagaaagagttgacaaaagaagtagaaataagtggctggagaagtatcgagagaacatcagaagtgtatcatatcataaatgccaaaagaagagaatgttttacagaggaatttatcaacagaagaaagggaaagagaaaacttagtcctacttcaaaaaagaagaaaagaaagaaagaaagaaagaaagaaagattgaagacaggcttcatgatcagcacaaacatcatgaaagcacttagagataatgggttaagtgtaactgaatcagaaacataccgatttggcagtaatctcattcataaaatgttggagtgcttcttagtattcagcactgagctagatacagatgaaaaactaggatggaggaggagccaagatggccaaacaggaacagctctggtctacagctcccagcgtgagcgacgtagaagacgggtgatttctgcatttccatctgagggcacagacaaacaaaaagacagcagtaacttctgcagacttaaatgtccctgtctgacagctttgaagagagcagtggttctcccagcacgcagatggagatctgagaacgggcagactgcctcctcaagaacgcagttcctcaccagcaagggaacaagctggatggagaatgactttgatgagctgagagaagaagtcttcagacgatcaaattactctgagctacgggaggacattcaaaccaaaggcaaagaagttgaaaactttgaaaaaaatttagaagaatgtataactagaataaccaatacagagaagtgcttaaaggagctgatggagctgaaaaccaaggctcgagaactacgtgaagaatgtagaagcctcaggagccaatgcgatcaactggaagaaagggtatcagcaatggaagatgaaatgaatgaaatgaagtga

SEQ ID NO: 120970 - DNA, 477 bp, Homo sapiens
tcagcaataactaacttttggattagtcatcatcaagtaaaatacaaatactccaatagaaatatagatatcattttctggcaggggaggagccaagatggccgaataggaacagctccggtctccagctcccagcaagagcgacacagaagatgggtgatttctgcatttccatctgagctttgaagagagcagtggttctcccagtacgcagctggagatctgagaacgggcagactgcctcctcaagtgggtccctgactcctgacccccgaggagcctaacaggtcttttcccagttggaagggcggatagccttgggcaagtttcaaaggccttcttctcttcccactgggaaatggactcaaagatgttggtggggggcccagtgggaataagattgactctttggtttgcatggatggtgggtgaggcctgtgattgctggttttccgtgacttctctgacaacctgcat

SEQ ID NO: 120971 - DNA, 356 bp, Homo sapiens
gggcagcactcaggagaggcacttcttctgatggaagaaaactgaatgggacatttgcagtaaggggtgctggtgggtactacatgtggggccacactcgagctgccttctcagtcaacccctttggcagcttgggccaagtctctttgaagaggaagactgtgatatctgaactcaaacaggcagtgcccagagagagaagcacaggtccacgcaggcagccaaagccatcttcttggttgaaagatactcttttcggggggaggagccaagatggccgagtaggaacagctccggtctacagctcccagcgtgagcgacaaagaagacgggtgatttctgcatttgcatctgag

SEQ ID NO: 120972 - DNA, 461 bp, Homo sapiens
ttgaggaggcagtctgcccgttctcagatctccatctgcgtgctgggagaaccactgctctcttcaaagctgtcagacagggacatttaagtctgcagaagttactgctgtctttttgtttgtctgtgccctcagatggaaatgcagaaatcacccgtcttctacgtcgctcacgctgggagctgtagaccagagctgttcctgtttggccatcttggctcctcctccatcctagtttttcatctgtatctagctcagtgctgaatactaagaagcactccaacattttatgaatgagattactgccaaatcggtatgtttctgattcagttacacttaacccattatctctaagtgctttcatgatgtttgtgctgatcatgaagcctgtcttcaatctttctttctttctttctttctttcttttcttcttttttgaagtaggactaagttttctcttt

SEQ ID NO: 120973 - DNA, 255 bp, Homo sapiens
gttgattccatgtcctgctactgtgaataatgtttcagatatcatgggaatgtacatgaaagagtgctcagcatcactgatcaccagggaaatgcaaatcagaaccaccatcatgaggcaccatctcacctcgattggaaccgagatgatcagaaagacaaaaataatgaatgctggagtggtagggagtgccagacagtgggcgcaggccagtgtgtgcgcgcaccgtgcgcgagccgaagcagggcgaggcat

SEQ ID NO: 120974 - DNA, 527 bp, Homo sapiens
  misc_feature (1)...(527): n = a,t,c or g
gtggctgctggtcgacttgtgcagcgtttcttcctcagactcagagctgtccagttcggccagagttggggctctgaggagcttcttccgctgtgcaggcacctgctgtgaggtacttaacccgttttcttttgtttgtgatgtcaaacctccattcaccatagatgactccacaagattctttgtagattcaggggtagtcacatctaatctgctacgtctaatctcctctggtgatacaggccgcagctttctttctgctttaatttcttctaatattctttcatgggaggctccgtggccgtggtgggagttggtttcagttttctgggctgagactgggattttaaagggaggtctggatctgatgaagtccgagggatggatttcatgaggcactctttttttnaaccgagggggaatatcaccattcaccatcacttttcgcaaggtgtatcttttgcagcgaatgtcatccattaacatctcataaggggtgagctgatattcaatgggcaaagggttgt

SEQ ID NO: 120975 - DNA, 648 bp, Homo sapiens; identical to SEQ ID NO: 120601

SEQ ID NO: 120976 - DNA, 405 bp, Homo sapiens
atgcctcgccctgcttcggctcgagcacggtgcgcacaaccactgacctgcgcccactgtctggcactccctgatgaacccagtacctcagatggaaatgcagaaatcaccgtcttctgcgtcgctcatgctgggagctgtagaccagagctgttcctattcggccatcttggctccaaaatcgatatcaaggcaccagtagattctgtgtctgctttgaagagagcagtggtacccccagcacgcagctggagatctgagaatgggcagactgcctcctcaagtgggtccctgacccctgaccccgagcagcctaactgggaggcaccccccagcaggggcacactgacacctcacatggcagggtactccaacggacctgcagctgagggtcctgtctgttag

SEQ ID NO: 120977 - DNA, 497 bp, Homo sapiens
tttgttcttcatgaaaaatgtctgggaccttttatatggacggggaataccaacgtagagatggtcaagaaaatttgcgctccgacctaaaccaagcacgttgtatggtagttggagagctaaatgtgggaggagccaagatggccgaataggaaaagctccggtctacagctcccagcgtgagcaacgcagaagacgggtgatttctgcatttccatctgagggtgtactcccatctacttttaaaaacaaaaagttcactgtaaaacagcctcaggtaggccgttcagtaggtattccagaagaaggtattgtcatcataggagatggacagctccaagggtgtttattgcccctgaagactttctagtggaacaagatgtggaggtggaagacactgatgttggtgatcctgactcagtgcaggcctaagctaatgtgggtgtttgtgtcttagtttttaactaaaggtttaaaaagtaaaaataaaacattaa

SEQ ID NO: 120978 - DNA, 557 bp, Homo sapiens
tccttaaggaaatgcaaatcaataccacaatgagataccactcccacaccttctagaacgtcctaaaataaaaaagacagataataacaagttttggatgaggatgacagagaaattggaaacctcatactgctggtgggaatgtgaaacgatgcagccacgttggaaagtaagcttgcagtaccttctgcctctgatatgaagacctctagttattcttcataggctgttgtgggctggggggaggagacaagatggccgaataggaacagctccggtctacagctcccagcctgagcgacgcagaagacgggtgatttctgcatttccatctgaggtaccgggttcatctcacttgaaaatcgggtcactcccacccgaatactgcgcttttccgaccggcttaaaaaacggcgcaccaggagattatatcccgcacctggctctgagggtcctacgcccacggagtctccctgatttgttagacacagcagtctgagatcaaacaggctggcggtgagcgagggcgccgactggcccagggcctggctgcgcat

SEQ ID NO: 120979 - DNA, 2067 bp, Homo sapiens; identical to SEQ ID NO: 120602

SEQ ID NO: 120980 - DNA, 754 bp, Homo sapiens
tcatgcttctggagcaaaactaccacgttttggaactggaagagacctagaaatcacagaatcagctcctctcatcaaagggagaatacgctgatggccagcaagatcaagtgtccattccagcacccagtccgtacaccctgagcgggcctcagactcagagctgtccagttcggccagagttggggctctgaggagcttcttccgctgtgcaggcacctgctgtgaggtacttaacccgttttcttttgtttgtgatgtcaaacctccattcaccatagatgactccacaagattcccaaagctatatacagatccaatagaatccccaagaaaatcctggggaggagccaagatggccgaacaggaacagctccggtctacagctcccagcgtgagcgacgcagaagatgggtgctttctgcatttccatctgaggtaccgggttcatctcactagggagtgccagacagtgggcgcagaaatacaaactaccatcagagaatactacaaacacatctacgcaaatgaactagaaaatctagaagaaatggataaattcctcgacacatacaccctcccaagactaaaccaggaagaagttgactctctgaatagaccaataacaggctctgaaattgtggcaataatcaacagcttaccccccaaaaagagtccaggaccagatggattcacagccgaattctaccagaggtacaaggaggagctgatttttcaaggtggaatcaattag

SEQ ID NO: 120981 - DNA, 5074 bp, Homo sapiens
tttttttagagacaggtactcactatgttgttcaggctggtctcaaactcctggcctcaggcaatcctctcatgtagctggaattacagtcctgagccaccgcacccagctagctgtggtcccctgcaaccaggtgcctccaaaatggggctggcgttgacaataaccatttcccagcttttagaaagaggtgacggagctctgttgtagtgtctgagccacaactcaagaaggtaatgagaataaggagccaagatggccgaataggaacagctcctgtctacagctccggtctacagctcccagcgtgagcgacgcagaagacgggtgatttctgcatttccatcgtgagggaccgggttcatctcacatagggagtgccagaccagtgggcgcaggcaagtggggtgcgcgcaccgtgcgcgggccgaagcagggcgaaggcattgcctcaccctgggaagccgcaaagggggtcagggagttccctttccgagtcaaagaaaggggtgacggacggcacctgggaaaatcgggtcactcccacccgaatactgcgcttttctgacaggcttaaaaaacgggcacacaacgagattattattcccgcacctggccttcggagggtcctacgccccacggaatcgccgcttgattgcttagcacagcagtcttgagattcaaacttgcaaggcggcaacgaggctgggggaggggcgcccgccattgcccaggcttgcttaggtaaacaaagcagccggggaagctcgaactgggtgcagcccaccacagctcaaggaggcctgcctgcctctgtaggctccacctctgggggcagggcacagacaaacaaaaagacagcagtaacctctgcagacttaaatgtccctgtctgacagctttgaagagagcagtggttctcccagcacgcagctggagatctgagaacgggcagactgcctcctcaagtgggtccctgacccctgacccccgagcagcctaactgggaggcaccccccagcaggggcacactgacacctcacacggcagggtattccaacagacctgcagctgagggtcctgtctgttagaaggaaaactaacaaacagaaaggacatccacaccgaaaacgcatctgtacatcaccatcatcaaagaccaaaagtagataaaaccacaaagatggggaaaaaacagaacagaaaaactggaaactctaaaacgcagagcacctctcctcctccaaaggaacgcagttcctcaccagcaacggaccaaagctggatggagaatgattttgacgagctgagagaagaaggcttcagacgctcaaattactctgagctacgggaggacattcaaaccaaaggcaaagaagttgaaaactttgaaaaaaatttagaagaatgtataactagaataaccaatacagagaagtgcttaaaggagctgatggagctgaaaaccaaggctcgagaactacgtgaagaatgcagaagcctcaggagccaatgcgatcaactggaagaaagggtatcagcaatggaagatgaaatgaatgaaatgaagcaagaagggaagtttagagaaaaaagaataaaaagaaacgagcaaagcctccaagaaatatgggactatgtgaaaagaccaaatctacgtctgattggtgtacctgaaagtgatgcggagaatggaaccaagttggaaaacactctgcaggatattatccaggagactttccccaatctagcaaggcaggccaacgttcagattcaggaaatacagagaacgccacaaagatactcctcgagaagagcaactccaagacacataattgtcagattcaccaaagttgaaatgaaggaaaaaatgttaagggcagccagagagaaaggtcgagttaccctcaaagggaagcccatcagactaacagcggatctctcggcagaaaccctacaagccagaagagagtgggggccaatattgaacattcttaaagaaaagaattttcaacccagaatttcatatccagccaaactaagcttcataagtgaaggagaaataaaatactttacagacaagcaaatgctgaccgattttgtcaccagcaggcctgccctaaaagagctcctgaaggaagcgctaaacatggaaaggaacaaccggtaccagccactgcaaaatcatgccaaaatgtaaagaccatcgagactaggaagaaactgcatcaactaacgagcaaaatcaccagctaacatcataatgacaggatcaaattcacacataacaatattaactttaaatgtaaatggactaaattctccaattaaaagacacagactggcaagttggataaagagtcaagacccatcagtgtgctgtattcaggaaacccatctcatgtgcagagacacacataggctcaaaataaaaggatggaggaagatctaccaagcaaatggaaaacaaaaaaaggcaggggttgcaatcctagtctctgataaaacagactttaaaccaacaaagatcaaaagagacaaagaaggccattacatgatggtaaagggatcaattcaacaagaggagctaactatcctaaatatgtatgcacccaatacaggagcacccagattcataaagcaagtcctgagtgacctacaaagagacttagactcccacacattaataatgggagactttaacaccccactgtcaacattagacagatcaacgagacagaaagtcaacaaggatacccaggaattgaactcagctctgcaccaagcagacctaatagacatctacagaactctccaccccaaatcaacagaatatacatttttttcagcaccacaccacagctattccaaaattgaccacatacttggaagtgaagctctcctcagcaaatgtaaaagaacagaaattataacaaactatctctcagaccacagtgcaatcaaactagaactcaggattaagaatctcactcaaagccgctcaactacatggaaactgaacaacctgctcctgaatgactactgggtacataacgaaatgaaggcagaaataaagatgttctttgaaaccaacgagaacaaagacacaacataccagaatctctaggacgcattcaaagcagtgtgtagagggaaatttatagcactaaatgcccacaagagaaagcaggaaagatccaaaattgacaccctaacatcacaattaaaagaactagaaaagcaagagcaaacacattcaaaagctagcagaaggcaagaaataactaaaatcagagcagaactgaaggaaatagagacacaaaaaacccttcaaaaaatcaatgaatccaggagctggttttttgaaaggatcaacaaaattgatagaccgctagcaagactaataaagaaaaaaagagagaagaatcaaatagacacaataaaaaatgataaaggggatatcaccaccgatcccacagaaatacaaactaccatcagagaatactacaaacacctctacgcaaataaactagaaaatctagaagaaatggatacattccttgacacatacactctcccaagactaaaccaggaagaagttgaatctctgaatagaccaataacaggagctgaaattgtggcaataatcaatagtttatcaaccaaaaagagtccaggaccagatggattcacagccgaattctaccagaggtacaaggaggaactggtaccattctttctgaaactattccaatcaatagaaaaagagggaatcctccctaactcattttatgaggccagcatcattctgataccaaagccgggcagagacacaaccaaaaaagagaattttagaccaatatccttgatgaacattgatgcaaaaatcctcaataaaatactggcaaaccaaatccagcagcacatcaaaaagcttatccaccatgatcaagtgggcttcatccctgggatgcaaggctggttcaatatacgcaaatcaataaatgtaatccagcatataaacagagccaaagacaaaaaccacatgattgtctcaatagatgcagaaaaagcctttgacaaaattcaacaacccttcatgctaaaaactatcaataaaataggtattgatgggatgtatttcaaaataataagagctatctatgacaaaaccacagccaatatcatactgaatgggcaaaaactggaagcattccctttgaaaaccggcacaagacagggatgccctctctcaccgctcctattcaacatagtgttggaatttctggccagggcaatcaggcaggagaaggaaataaagggtattcaattaggaaaagaggaagtcaaattgtccctgtttgcagatgacatgattgttgatctagaaaaccccatcgtctcagcccaaaatctccttaagctgataagcaacttcagcaaagtctcaggatacaaaatcaatgtacaaaactcacaagcattccaatacaccaataacagacaaacagagagccaaatcatgagtgaactcccattcacaattgcttcaaagagaataaaatacctaggaatccaacttacaagggatgtgaaggacctcttcaaggagaactacaaaccactgctcaaggaaataaaagaggatacaaaaaaatggaagaacattccatgctcatgggtaggaggaatcaatatcgtgaaaatggccatactgcccaaggtaatttatagattcaatgccatccccatcaagctaccaatgccttccttcacagaattggaaaaaagtactttaaagttcatatggaaccaaaaaagagcccgcattgccaagtcaatcctaagccaaaagaacaaagctggaggcatcatgctacctgacttcaaattatactacaaggctacagtaaccaaaacagcatggtactggcaccaaaacagagatatagatcaatggaacagaacggagccctcagaaataacgccgcatatctacaactatctgatctttgacaaacctgagaaaaacaagcaatggggaaaggattccctatttaataaatggtgctga

SEQ ID NO: 120982 - DNA, 332 bp, Homo sapiens
aaaagaaacgcttcactgaagaagtcattgaatacttccagaagaaagttagcccagtgcatctgaaaatcctgctgactagcgatgaagcctggaagagattcgtgcgtgtggctgaattgcccaggaggaggccccgcagcgacatggagggagctgctttgctgaaagtctttgtcctctgcatctgggcggcccggtattttcagaatgggctccataaccaggtgcgtgatgtggagctcggtgtaaccacgcaacacggatccctcctcaaggctgagcacttggcatcgtccagtgaatctcaaccccggaagtcacagccttag

SEQ ID NO: 120983 - DNA, 853 bp, Homo sapiens
gagcatgccaccggcttgagttcacgggtccacccacgcgtccgcggacgcgtgggcttggggactggaggacctgtctggttattatacagacgcataactggaggtgggatcctcacagctcagaacagctggatcttgctcagtctctgccaggggaagattccttggaggaggccccgcaacgacaaggagggagctgctttgctgaagttctttgtcccttgcctccggaacccaaatccacttcccggaattgcccaactggtagactcgcctagaggggaagcattgtgtcctagttgaggctaacagtcagtatccagcctcaacattcagcagaggccccagatcagcgtttgagccaggccaacaatgaccaaggaggatcgggaggggtgggtgcggctcatcacaagcgtcggggcgcaccaaaaccatccaggctggacagtggctggacagttccaagaaaagaaacgcttcactgaagaagtcattgaatacttccagaagaaagctagcccagcgcatctgaaaatcctgctgactagcgatgaaacctggaagagattcgtgcgtgtggctgaattgcccagggaagaggcagatgctctctatgaagctctgaagaatcttacaccatatgtgggtattgaggacaaagacatgcagcaaaaagaacagcaggttatggagtggcttttgaaagagtttcctcaaatcagatggaagattcaggagtccatagaaaggcttcgtgtcattgcaaatgagattgaaaaggtccacagaggctgcgtcatcgccaatgtggtgtctggctccactggcatcctgtctgtcattggcg

SEQ ID NO: 120984 - DNA, 531 bp, Homo sapiens
acgcccacgcgtccgagaactcgtgggtggcagcgcaatacaagctctaaaagaatggaatacgactggaaaactgaggatcaatcattgaaaaagatgcgggtccacgcagcatcatggcagcaaatatgctacagacaaggaggagaggcctgatgtcatgtcccctgcagccgcagccaccacagattcaaaacggccccatgaatggctgcgagaaggacagctcgtccacagattctgctaacgaaaaaccagcccttatccctcgtgagaaaaagatctcgatacttgaggaaccttcaaaggcacttcgtggggtcacaggcccaaatattgagaaatcggcgaaggatttgcaacgctgcaccgtttctctaactagatatcgcgtcatgattaaggaagaagtggatagttccgtgaagaagatcacagctgcctttgctgaattacacaactgcatcattgacaaagaagcttcattaatggcagaaatgggtacagttaacgaacaagccatgcgatgcg

SEQ ID NO: 120985 - DNA, 456 bp, Homo sapiens
atctcgatacttgaggaaccttcaaaggcacttcgtgggggtcacagaaggcaacagactactgcaacagaaactatccttagatgggaaccccaaacctatacatggaacaacagagaggtcagatggcctacagtggtcagctgagcagccttgtaacccaagcaagcctaaggcaaaaacatctcctgttaagtccaatacccctgcagctcatcttgaaataaagccagatgagttggcaaagaaaagaggcccaaatattgagaaatcagtgaaggatttgcaacgctgcaccgtttctctaactagatatcgcgtcatgattaaaggagaagtggatagttccgtgaagaatatcaaagctgcctgtgctgagttccccatttgcatcattgacaaagaagtttcattaatggcagaaatgggataaagttaaaggaaggaagccatgga

SEQ ID NO: 120986 - DNA, 965 bp, Homo sapiens
taaattatattaaagaaatttttaaatgtagaaatccacaatactgaaaaaaatgagaaaagggttcagtttctacaagaaaggaagtagatggaaggggctttattgatgaatcagatgctgcagcatagaatacagagggaggagctttggtggggaggaagatgattgccctgcagaaactgggggagccctgggttcagagtcagcacatgggatggaaggcaagctcaagaagaggagtataaagcagaggaattaaatgaaggtattttaaggaacagtgcactatccccttatcatctcttccatcccccaacttgttcttttagctgcctaacatttatcctcaaggcaaaaagggaggaagagagtgggcagtgatctgcaagtacattagtcacccgttagaacaaaagtcaaaaccctttaaaggaaaagaagaagatctagagtttctcaatgcatcatccaaaatgccctgctggcttttaaccacgcaaagtggtgtttatagagagagccagcagcacaaatggtctttagacgtatcagattctaaggcactgcagtttgtgatagaatataatgatgacagcctccttccaaagagtgcaggagacaagcgtaccccagatggcccagtcagagaccccactggtgaaatcataacagcctcaggcccaaatattgagaaatcagtgaaggatttgcaacgctgcaccgtttctctaactagatatcgcgtcatgattaaggaagaagtggatagttccgtgaagaagatcaaagctgcctttgctgaattacacaactgtctatttcctttgggtcaggggtctcttcagtatcatcccttcatggtttgccaagaagatgttattggaaagcgtcctgatccagaccccaagagagggttcttggatctcacacaagaaagaattcaaggcaaatccttaaagtaa

SEQ ID NO: 120987 - DNA, 692 bp, Homo sapiens
ggcaaaatgatttatattccccctgggtatatacacagtaatgggattgccaaggtcaaatgggagttctgtttttagctctttgaggaattgccatactgcttttcacaatggttgaactaatttacactcccaccaacagtatataagcgttccctttctctgcaaccttgccagtatctgttatttttatgactttttaatcatagccattctgactggtgtgagatggtacttaaactaaacagctgctctgcacagcaaaagaaactatcaacagagtacacagacaacctacagaatgggagacaatatttgcaaactatgcatctgacagaagtctaatatccagcatctataatagcaaagccgacggccaggtggtctccagtgaaaagaaggcgaacgtgaatctgaaagacctttccaagattagggggagaaagagaggcaaacctggaacccgcttcactcagagtgacagagctgcacagaaaagagtccgatcaagagttctgagatacacgtgtagaatgtgcaggttctacaacccatcatctacattaggtatttctcctaatgctatccttcccctaacccccaaatcccgacaggccccggtgtgtgatgttctgtccctgtgtccatgtgtccttattgttcgacttccacttatgagtgagagcatgtga

SEQ ID NO: 120988 - DNA, 2298 bp, Homo sapiens
atgcccatgcattgtgaagaccctgtttctctagctgtgcagctgcaagacgaacccacagaaacgagagggagcaggaggggcatcagcacacccaaccgaccagacacgaaaagaccaggacccacggggaaaccacacccacagccaaacaccccccagccccgaagccgggacgcctaccagccacccacccccaacgaccaccccctgccaaccacaaccacaaccacccacaaagaaccaccacaaccaaaccaccacaccggggaggggagggccacaacagacggcaacccgcgcgcgaagctaagcgagcagaagaacaacacaggacaaaaaagaaaaaggataagcaaacagaaacgggcgacaccgacaaaaacgaggcccgccagcccaaacaaagaagaaggaagaacagcaggaatcaccagctttggctttggctgtggacggagaaaccgccctggagttttcactgctgtggctacctatgaggcatggatacgggagcaggtgatgggttcagagcctgggcctgcctttcccacccagccccagaagacccagtcagatccccaggagcccagggaggagaactgcaccattgccctgcctgagtgcgggaaggccccgcggccaggggcctggccctgggaggcccaggtgatggtgccaggatccagaccctgccatggggcgctggtgtctgaaagctgggtcttggcacctgccagctgctttctggacccgaacagctccgacagcccaccccgcgacctcgacgcctggcgcgtgctgctgccctcgcgcccgcgcgcggagcgggtggcgcgcctggtgcagcacgagaacgcttcgtgggacaacgcctcggacctggcgctgctgcagctgcgcacgcccgtgaacctgagcgcggcttcgcggcccgtgtgcctaccccacccggaacactacttcctgcccgggagccgctgccgcctggcccgctggggccgcggggaacccgcgcttggcccaggcgcgctgctggaggcggagctgttaggcggctggtggtgccactgcctgtacggccgccagggggcggcagtaccgctgcccggagacccgccgcacgcgctctgccctgcctaccaggaaaaggaggaggtgggcagctgctggactcatggcccatggatcagccatgtgactcggggagcctacctggaggaccagctagcctgggattggggccctgatggggaggagactgagacacagacttgtcccccacacacagagcatggtgcctgtggcctgcggctggaggctgctccagtgggggtcctgtggccctggctggcagaggtgcatgtggctggtgatcgagtctgcactgggatcctcctggccccaggctgggtcctggcagccactcactgtgtcctcaggccaggctctacaacagtgccttacattgaagtgtatctgggccgggcaggggccagctccctcccacagggccaccaggtatcccgcttggtcatcagcatccggctgccccagcacctgggactcaggccccccctggccctcctggagctgagctcccgggtggagccctccccatcagccctgcccatctgtctccacccggcgggtatccccccgggggccagctgctgggtgttgggctggaaagaaccccaggaccgagtccctgtggctgctgctgtctccatcttgacacaacgaatctgtgactgcctctatcagggcatcctgccccctggaaccctctgtgtcctgtatgcagaggggcaggagaacaggtgtgagatgacggaagggtcctggatcctcgtgggcatggctgttcaagggagccgggagctgtttgctgccattggtcctgaagaggcctggatctcccagacagtgggagaggccaacttcctgccccccagtggctccccacactggcccactggaggcagcaatctctgccccccagaactggccaagggctcgggatccccgcatgcagtctacttcctgctcctgctgactctcctgatccagagctgaggggctagggtcccagcaccacttcccccttctccaccctctacttcccgcccagtggggctggaatgtggcccagccggctggaacctcaagggccccacccaccgagattgcagcggctctggctaattgggcctcagtgcccgggctattttgaacccaggaatccttgggggtggtgggaggagcggacaataaaggtgtaaacccagaaaaaaa

SEQ ID NO: 120989 - DNA, 485 bp, Homo sapiens
  misc_feature (1)...(485): n = a,t,c or g
ccgngnaanananagacggtcattggagtcagtgctctctagaaaactaaatccgttttagaaagctacaggcaccagccgttcagaatcggctgtatgggctattatagatgctgtatcgtctcctcagaaacggcttttggattcagagtttattgatcctttaatgaataaaaaagcccgaatatctcacctgacgaacagagtaccaccaacactaaatggtcatttgaatcccaccagtgaaaaatcggctgcaggcctcccactgccccctgcggctgctgccatccccacccctccaccgctgccttcaacctatctgcccatctcacatcctcctcagattgcggattcacattcgccagccgccccagttcaagggattcagccgttcctaactgctgaccaatactggctagaaaatcgctatcccagccagcacctttcacgcgttaccgcttccagagcgcgccatcagacag

SEQ ID NO: 120990 - DNA, 841 bp, Homo sapiens
atgctgccctgcttgcgcgctttgtgttgccgccttgccgggcgggtgtttgaaacaccaccccccccagaggacaccaacaatgacactccacatacactgacgttatatgggccagccggggcaccgatcatcatgagtattaacaaccgaaccaggccggaacaatgcaacgtggcgaaaacgagagcgctgccggggtaccgaaatgcagacaacgcgatagtgatgcgcaattggcaaatatgcgcaaccgcgttaccgcggctgcgtaagcatataaacggaataagtacgccgagagcagctgcacctcctcctactgcggctttggctgctctcctctgcaccgctagcgcttccgctcctcctcctcctcctgtttccccgcaaaggcgacccccccccgtgcccccttactcccgccgctgctctagaccctacatcactcgaaaaaagaaaatagatggattgtgtttattccacctcaagaaatctgggaaaactaatccgtctcagaatgctgcaggcaccagccgttcagaatctcctgtatgttctagtagagatgctgtatcttctcctcaggaaatctggtggctgtacctgcaaaatacatcccgatcacccattttcccgatctgatcataggctaaaatccggtccggacttcaaccttttgcccatcggtcaacttttgcgaaaatccaagaatgtgttaaccaaagggcacacaaaaattcggcatcgggggaagaaaataagacaacaacagaaacggcttttggattcagagtttattgatcctttaagaataaaaaagcccgaatatctcacctga

SEQ ID NO: 120991 - DNA, 408 bp, Homo sapiens
atggccctaactctcttcaattctatgaaggttgagagaggtaagaaaactgcagaaaagttcaaaactagcagaggttggttcatgtcatttaaagaaaaagccatctccggaggtgggagtcaaggtgaaacagcaaatgctaatggagaagctgtagcgaggcatatggttgttcatcgagacctgaaaccagagaatgtcctgttggatgcacacatgaatgccaagatagccgatttcggtgggcatctgggagttgtggaagtcactaaagaaactcccaaactaggggtctctaagacaagttccatctcggaaggagaatatgaagaagtccagtactccacgaaagaaggggaaggaacattccaatccttcaccaaaagaatgggaaaagaactttaa

SEQ ID NO: 120992 - DNA, 199 bp, Homo sapiens
atctcagggcctgagagtagagtacaacacacccctcagttcacgagaagaagaagaagaagaagaagaagaagaagaagaagaagaagaagaagaagaagaagaagaagaagaagaagaagaagaagaagaagaagaaagaaagaaagaatgctctaaggcccaatgtaaacatttccccctctcagaagttctctag

SEQ ID NO: 120993 - DNA, 299 bp, Homo sapiens
ggcatgctgatgcaagaggtgggctcccaaggctttggcagctctgttcctttggctctgcagagtacagtctctttggtgctttcactggctggtgtttagtgcctgtggcttttccaggaagaagaagaagaagaagaagaagaagaagaagaagattaagaagaagaagaagaagaaaagaagaagaagaagaagaagaagaagaagaagaagaagaagaagaagaagaagaagaagaagaagaagaagaagaagaagaagaaaaaatcttcctgggtcacagagttggcatatga

SEQ ID NO: 120994 - DNA, 318 bp, Homo sapiens; identical to SEQ ID NO: 117050

SEQ ID NO: 120995 - DNA, 405 bp, Homo sapiens
ttttttttttttttttttataacttaaccgtatattttaaaataacttaaggaatgcaattgtattgtttgcaactcaaagaataaatgcttgaagggatagaagaagaaagaagaagaagaagaagaagaagaagaagaagaagaagaagaagaagaaggaagaagaggaagaggaagaggaagaagaagaagaagaagaagaagaagaaagaagaagtagtcatcatcgtcgttgttgtcatcatcttcactggccccttccaattatgatggatcttagaccacaggcaactgaccagtgtgggtggtccacaaatatgtccctatattgtttatccgagttacacatttgcaagccagtaaatgaattccaattaggtctgcagaaactgcgaactcacta

SEQ ID NO: 120996 - DNA, 1317 bp, Homo sapiens; identical to SEQ ID NO: 120423

SEQ ID NO: 120997 - DNA, 160 bp, Homo sapiens
atgattcagaggaaacgtgccagcattggtgctccctgtgcctgggtccgaaaaaaagaagaagaagaagaagaagaagaagaagaagaagaagaggaagaggaagaggaagaggaagaggaagaggaagaagaagaagaagaagaagaaggagagaaca

SEQ ID NO: 120998 - DNA, 309 bp, Homo sapiens
atgacaaaacctaagtcagaagaagaagaagaagaagaagaagaggaagaagaagaagaagaagaagaagaagaagaagaggaagaggaagaggaagaggaagaagaagaagaagaagaagaagaagaagaagaagaagaagaagaagaagaagaggaagaagaacaagaagaagaagaaggagaaggagaaggagaaggagaagaggaggaggaggaggaggaggaaggaggagaagaaagagaagaaaaattgtgccagatacttgggaggctgcagtgggagaatcacctgagctcaggaagttga

SEQ ID NO: 120999 - DNA, 936 bp, Homo sapiens
atgtggctggctagagagctagaagaatctctagccgtcagtttgcagggagaacctggactgctggctggagcaggcaggctgcagggcagcccattcagtcaccctatggagcctgggcgacagagcgagactctgtctcaaaaaaaaaaaaaaaaagaagaagaagaagaagaagaagaagaagaggaggaggaggaggaggaggaggaggaggaggaggaggaagaagaagaagaagaagaagaagaagaagaagaagaagaagaagaagaagaagaagaagaagaagaagaagaagaaggagaagaagaagaaggagaagaggaagaagatcaactagacacaatgttatgggactcatcaacaaacctcaccaacacagcgctcagcaaggagaagaccatgttcagttcaagggccaagatcgtgaagcccaatggcgagaagccggatgagtttgaatccggaatctcccaggctcttctggagctggagatgaacttggacctcaaggctcagctctgggagctgaatattacggcagccaaggaaattgaagttggtggtggtcggaaagctatcataatctttgttcccgttcctcaactgaaatctttccagaaaacccaagtccagctaaggagaattctgcctaagccaactcaaaaaagctgtacaaacaataagcaaaagcttcccaggagctgtactctcacagctgtgcatgatgccatccttgaggacttggtcttcccaagcgaaattgtgggcaagagaatccacgtgaaactggatggcagccacctcataaagattcatttggacgaagcacagcagaacaatgtggaacacaaggttgaacccttttctggtgtctataagaagctcatgggcaaggatgttaattttgaattcccagagtttcaattgtaa

SEQ ID NO: 121000 - DNA, 1368 bp, Homo sapiens
atgaggagtaccagtctgcaggatgttaacgcactgataggctatggacaatatattccacacttacggaagtggggaaactataggtcagacaaagctacaggtggcagggagggtatcgtgggctggactgatcttcagaaggctgcatctgagcagggtgtggaaggatggcagaaggaagaggggagtgaggcactcagggtagacagaagagtcaatccagtgatcccctgcgaaaagaatcctccacttgacctgaatgctctgtattggcaccttctggacaggaatcctatcgggtatttcatcaaagcatcccacagcagttttaagtgtggctccatgagattcatcaataagacaaaagcagaaaagaggtacaaagagaccaacagggaagaaagacgcgaagatgaaaacttcagcagcatgccacgtacagttggcttggatgtaccctgcacaaaagtgtccagcctgtacctcgctgacctagctgttcgccggtacaagattaaggaagtgacagcttttcctaattcactgaaacagagaaagctcagcgagaaggcacggggttgtgaatacagtttcacgatgatttccatggctgccatgaaggctctgatcagctacaaatgggtggatgccaggatgaccctcctgatttcctggtccctcctggacctggatctggatctggatctggtgtccagggaagagcaaagaccaggagaaagagttccacacgaagaagaagaagaagaagaagaacaagaagaagaagaagaagaagaagaagaggaagaggaagaggaagaggaagaagaagaagaagaagaagaagaagaagaagaagaagaagaagaagaagaagaagaagaagaagaaagcctttctgacaagcaccacccaactactagttccatggaggcctggtttcaggtggctgtcatgacagcaccccctgagagcaggcacttgccatgggtgcctttcagaaaagaagctgagaaagagcagacagtgcatgtctgcactgaagtacaactggccaagggccggacatggtctctcttctcttgcttctgtgctgtaaacggctcctctgagcagttccttgagattcgtaagccaaaggcttttgttagattgaaaaatgtctgtggaggggttcaaggacctgcagggatgcagacccgtgattctctgacaggagcatgcgtcagatgtgccagggaagatagggttatgaacgtgaaaggcagaaactgttttgcccatactgcccttccatccaaagccatgaccctctgtctaggtggcactggctacagggaacagaaaacagatgcctgcaactga

SEQ ID NO: 121001 - DNA, 610 bp, Homo sapiens
ttggaaatgacgtgtaggcctaatgaaacagaactttggcagtaacacagaatgaaaggaatgagccaatataaggcaggatcaaagggtgcagagtcgtttcagcttagcaaaataagctcactttgttgttggggaaagccaaagccgattaggattacccaatgactaagcataagtcttccaaactaattacgcagttcaccatgtgaagtataattggaagcctccaaatgcgggctgctttgctttcacaggagttctagaaagcgagaattacctagcgagctcggcactgagctgccctatcattcccgggaacagctgaaaggtgcggaaccgctccatccgggacgaagcggagaattcattaagtttaaaggcctctttttgatctccaaaatcctataagtgagaatttaagaaaccggtacttgaaggaggggcctgaaggggagaaggaggaagcccgtgtgtgtggagtttctttgatccagtgcattttaattaccaggctgggctcttccgggtggctctgccgggagaacagtgcagaacaggccgcctcgtcgccagggtctacacgggcatatctggagcatcatttacc

SEQ ID NO: 121002 - DNA, 849 bp, Homo sapiens
atgtcctccctgtggcctctgccagtgggcgtgacttgccttgcttgggtgggtgtgatgccctcttcccccataattgatagagtttccatgtggactgtggctctgctgtcaccaaaaaaagtagccatggagatggcaaggaaaccgagagaagaatgtgtgactctagggttctctgcctctcgtgtccctcaccagaatgcaaattgtggagcaggccacagtccatttggcagtcatgctggcagcattctcaaaatggtcacaagaacaaagaaaatatttgtaggcgggttatctgcgaacacagtagtggaagatgtaaagcaatatttcgagcagtttggcaagctgaaccctcccctgtcaaatgcccaaggagactcggaaaccatgcgaggcctgtacctgtcagcattctctgacctgaatgtctgtgagacagcagtaaaattaccccctgggctctgcttctggaacaggctgggaccaacccaagagccccacagcagccaggaaacagagtgtgagaaggatgaaagcagccatcaccagcaggattttggagatcaaaaagaggcctttaaacttaatgaattctccgcttcgtcccggatggagccgttccgcacctttcagctgttcccgggaatgatagggcagctcagtgccgagctcgctaggccctgggctgactatggcgatagagcggtgagcaagtgtcttccattggccaagcccaaccggaaaccaggagaccattctagggaggtcagtcttgcaaggcacaagcagggaggaaaagagcagatgatggttctggagggtcaagcagaaagtaactag

SEQ ID NO: 121003 - DNA, 647 bp, Homo sapiens
  misc_feature (1)...(647): n = a,t,c or g
cccatgtgacattgctgattgttgtaacacagtcacatcttgttatccacaacctatttgaaggaatgatctggttcattgtccccatatcttgtgtgatctgtaatgacatcatggcctatatgtttggctttttctttggtcggaccccactcatcaagctgtccccgaagaagacctgggaaggcttcattgggggcttctttgctactgtggggtttggccttctgctgtcctatgtgatgtccgggtacagatgctttgtctgccctgtggagtacaacaatgacaccaacagcttcactgtggactgtgagccctcggacctgtttcgcctgcaggagtacaacattcctggggtgatccagtcagccgattggctgggaaaacggtccggatgtacccccttccagattcacagcatcgctcctctccacctttgcctcgctcattggcccctttggaggattcttcgcaagtggattcaaacgagcctttaaaatcaaagactttgccaataccattcctggccatggaggcatcatggatcgctttgactgccagtatctgatggccacatttgtcaatgtatacatcgcctgtgtattgcggccgctgtagagtatcctaacntaagtagcatgtaa

SEQ ID NO: 121004 - DNA, 556 bp, Homo sapiens
atggtactggtgtttttcccaggtccccggttcacactcaagaacataggccaaagtcttgaaaatgcccattccaaagcatccatgggaaaggaaaagaagaatgagaaagtttttcttgacatctccccacctcgctgtgccccagaggagcaaactgatgaatgtgttcagcatgtaccacctttcttgtgggaaggagcatgggttccaggtccctgcctgcttccagaccctctgtggaagctgccgctggcactcaacttccttttccgggctgtcttatgtgatgtccgggtacagatgctttgtctgccctgtggagtacaacaatgacaccaacagcttcactgtggactgtgagccctcggacctgtttcgcctgcaggagtacaacattcctggggtgatccagtcagtcattggctggccgggggggttgtctatttccggttctccgcctcttgacgccctcgtccgcatggtccctcttacccagcagtttccgtaccaatctgcgtatcttgttttgtcccgctctttaaacaaggcataa

SEQ ID NO: 121005 - DNA, 1030 bp, Homo sapiens
cacacaacataccagaatctctgggacacatttaaagccagtgtatagagggaaatttatagcactaaatgcccacaagagaaagcaggaaagagctaaaattgacaccctaacatcacaattaaaagaactagagaagcaagagcgggcaaattcaaaagctagcagaaggcaagaaataactaagatcagagcagaactgaaggagatcgagacacaaaaaacccttcaaaaaactaatgaatccaggagctggttttttgaaaggatcaacaaaattgataggccattagcaagactaataaagaagaaaagagagaagaatcaaatacagtcaataaaaaatgataaaggggatatcactaccaatgccacagaaatacaaactaccatcagagaatactataaacacctctaggcaaataaactagaaaatctagaagaaatggataaattcctcgacacaaacaccctcccaagactaaacaaggaagaagctgaatctctgaacagaccaataacaggctctgaaattatggcaacaatcaatagcttaccaaccaaaaagagtccaggaccagatggattcacagccaaattctaccagaggtacaaggtggaactggtaccattccttctgaaactattccaatcaatagaaaaagagggaatcctccctaactcattttatgaggccagcatcatcatcctgataccaaagcctggccagagacacacaaaaaaagagaattttagaccaatatccttgatgaacattgatgcaaaaaatcctcaataaaatactggcaaagcaaatccagcagccatgaaaaaacagctcttctcaaaagaagcatttatcgagccaacagacatatcgagaaatctcatcatcactggtcatcagagaaatcgaaatcaaaccacaatgagataccatctcacactagttagaatggcaatcattaaaaatcaggaaacaacagatgctagagaggtcgcggagaaacagcaacggctttaatgcaat

SEQ ID NO: 121006 - DNA, 2149 bp, Homo sapiens
gaatgcagttcctcaccagcaacggaacaaagctggacagagaatgactatgacaagctgagagaagaaggcttcagacgatcaaattactctgagctacaggaggacattcaaaccaaaggcaaagatgttgaaaactttgaaaaaaatttagaagaatgtataactagaataactaatacacagaagtgcttaaaggagctgatggagctgaaaaccaaggctcgagaactacgtgaagaatgcagaagcctcaggagccgatgcgatcaactggaagaaagggtatcagtgatggaagatgaaatgaatgaaatgaagcaagaagggaagtttagagaaaaaagaataaaaagaaatgagcaaagcctccaagaaatatgggactatgtgaaaagaccaaatctacgtctgattggtgtacctgaaagtgatggggagaatggaaccaagttgaaaaacactctgcaggatattatccaggagaacttccccaatctagcaaggcaggccaaagttcagattcaggaaatacagagaatgccacaaagatattccttgacaagagcaactccaagacacataattgtcagattcaccaaagttgaaatgaaggaaaaaatgttaagggcagccagagagaaaggagcacccagattcataaagcaagtcctgagtgacctacaaagagacttagactcccacacattaataatgggagactttaacaccccactgtcaacattagacagatcaacgagacagaaagtcaacaaggatacccaggaattgaactcagctctgcaccaagtggacctaatagacatctacagaactctccaccccaaatcaacagaatacacatttttttcagcaccacaccacacgtattccaaaattgaccacatacttggaagtaaagctctcctcagcaaatgtaaaagaacagaaattataacaaactatctctcagaccacagtgcaatcaaactagaactcaggattaagaatctcactcaaaaccgctcaactacatggaaactgaacaacctgctcctgaatgactactgggtacataacgaaatgaagctagaaataaagatgttctttgaaaccaacgagaacaaagacacaacataccagaatctctgggacgcattcaaagcagtgtatagagggaaatttatagcactaaatgcccacaagagaaagcaggaaagatccaaaattgacaccctaacatcacaattaaaagaactagaaaagcaagagcaaacacattcaaaagctagcagaaggcaagaaataactaaaatcagagcagaactgaaggaaatagagacacaaaaaacccttcaaaaaattaatgaatccaggagctggttttttgaaaggatcaacaaaatagatagactgctagcaagactaataaagagaaaaagagagaagaatcaaatagatgcaataaaaaatgataaaggggacatcaccaccaatcccacagaaatacaaactaccatcagagaatactacaaacacctctacgcaaataaactagaaaatctagaagaaatggataaattcctcgacacatacactctcccaagactaaaccaggaagaagttgaatctctgaatagaccaataacaggatctgaaattgtggcaataatcaatagcttaccaaccaaaaagagtccaggaccagatggattcacagccgaattctaccagaggtacaagaaggaactggtaccattccttctgaaactattccaatcaatagaaaaagagggaatcctccctaactcattttatgaggccagcatcattctgataccaaagccaggcagagacacaaccaaaaaagagaattttagaccaatatccttgatgaacattgatgcaaaaaccctcaataaaatactggcagaccgaatccagcagcacatcaaaaagcttatccaccatgatcaagtgggcttcatccctgggatgcaaggctggttcaatatacacatatcaataaatgtaatccagcatataaacagagccaaagacaaaaaccacatgattatctgcatagatgcagaaagggcctttgacaaaattcaacaacccttcatgctaaaaactcttaataaattag

SEQ ID NO: 121007 - DNA, 1704 bp, Homo sapiens
cacaccaaaaacccatctgtacatcaccatcgtcaaagaccaaaagtagataaaaccacaaagatggggaaaaaacagaacagaaaaactggaaagtctaaaacgcagagcgcctttcctcctccaaaggaacgcagttcctcaccagcaatggaacaaagctggatggagaatgactttgacgagctgagagaagaaggcttcagacgatcaaattactctgagctacgggaggacattcaaaccaaaggcaaagaagttgaaaactttgaaaaaaatttagaagaatgtataactagaataaccaatacagagaagtgcttaaaggagctgatggagctgaaaaccaaggctcgagaactacgtgaagaatgcagaagcctcagaaattggataaagagtcaagacccatcactgtgctgtattcaggaaacccatctcatgtgcagagacacacataggctcaaaataaaaggaaggaggaagatctaccaagccaatggaaaacaaaaaaaggcaggggttgcaatcctagtctctgataaaacagactttaaaccaacaaagatcaaaagagacaaagaaggccattacataatggtaaagggatcaattcaacaagaagagctaactatcctaaaaatatatgcacccaatacaggatcaccaagattcatgaagcaagtcctgagtgacctacaaagagacttagactcccacacattaataatgggagactttaacaccccactgtcaacattagacagatcaacgagacagaaagtcaacaaggatacccaggaattgaactcagctctgcaccaagcggacctaatagacatctacagaactctccaccccaaatcaacagaatatacatttttttcagcaccacaccacacctattccaaaattgaccacatactgggaagtaaagctctcctcagcaaatgtaaaagaacagaaattataacaaactatctctcagaccacagtgcaatcaaactagaactcaggattaagaatctcactcaaaacggctcaactacatggaaactgaacaacctgctcctgaatgactactgggtacataacgaaatgaaggcagaaataaagatgttctttgaaaccaacgagaacaaagacacaacataccagaatctctgggacgcattcaaagcagtgtgtagagggaaatttatagcactaaatgcccacaagagaaagcaggaaagatccaaaattgacaccctaacatcacaattaaaagaactagaaaagcaagagcaaacacattcaaaagctagcagaaggcaagaaataactaaaatcagagcagaactgaaggaaatagagacacgaaaaacccttcaaaaaattaatgaatccaggagctggttttttgaaaggatcaacaaaattgatagaccactagcaagactaataaagaaaaaaagagagaagactcaaatagacacaataaaaaatgataaaggggatatcaccaccgatcccacagaaatacaaactaccatcagagaatactacaaacacctctacgcaaataaactagaaaatctagaagaaatggatacattcctcgacatatacactctcccaagactaaaccaggaagaagttgaatctctgaatagaccaataacaggagctgaaattgtggcaataatcaatagtttaccaacc

SEQ ID NO: 121008 - DNA, 1853 bp, Homo sapiens
atggggaaaaaacagaacagaaaaactggaaactctaaaatgcagagcgcctctcctcctccaaaggaacgcagttcctcaccagcaacggatcaaagctggatggagaatgactttgacgagctgagagaagaaggtttcagacgatcaaattactctgagctacgggaggacattcaaaccaaaggcaaagaagttgaaaactttgaaaaaaatttagaagaatgtataactagaataaccaatacagagaagtgcttaaaggagctgatggagctgaaaaccaaggctcgagaactacgtgaagaatgcagaagcctcaggagccgatgcgatcaactggaagaaagggtatcagcaatggaagatgaaatgaatgaaatgaagcaagaagggaagatcaaaagagacaaagaaggccattacataatggtaaagggatcaattcaacaagaagagctaactatcctaaatatatatgcacccaatacaggagcacccagattcataaagcaagttctgagtgacctacaaagagacttagactcccacacattaataatgggagactttaacacctcactgttaacattagacagatcaatgagacagaaagtcaacaaggatacccaggaattgaactcatctctgcaccaagcggacctaatagacatctacagaactctccaccccaaatcaatagaatatacatttttttcagcaccacaccacacctattccaaaattgaccacatagttggaagtaaagctctcctcagcaaatgtaaaagaacagaaattataacaaactatctctcagaccacagtgcaatcaaactagaactcaggattaagaatctcactcaaagccgctcaactacatggaaactgaacaacctgctcctgaatgactactgggtacataacgaaatgaaggcagaaataaagatgttctttgaaaccaacgagaacaaagacacaacataccagaatctctgggacgcattcaaagcagtgtgtagagggaaatttatagcactaaatgcccacaagagaaagcaggaaagatccaaaattgacaccctaacatcacaattaaaagaactagaaaagcaagagcaaacacattcaaaagctagcagaaggcaagaaataactaaaatcagagcagaactgaaggaaatagagacacaaaaaacccttcaaaaaatcaatgaatccaggagctggttttttgaaaggatcaacaaaattgatagaccgctagcaagactaataaagaaaaaaagagaggagaatcaaatagacacaataaaaaatgataaaggggatatcaccaccgatcccacagaaatacaaactaccatcagagaatactataaacacctctacgcaaataaaccagaaaatctagaagaaatggataaattcctcgacacatacactctcccaagactaaagcaggaagaagttgaatctctgaatagaccaataacaggagctgaaattgtggcaataatcaatagtttaccaaccaaaaagagtccaggaccagatggattcacagccgaattctaccagaggtacaaggaggaactggtaccattccttctgaaactattccaatcaatagaaaaagagggaatcctccctaactcattttatgaggccagcatcattctgataccaaagccgggcagagacacaaccaaaaaagagaattttagaccaatatccttgatgaacattgatgcaaaaatcctcaataaaatactggcaaaccgaatccagcagcacatcaaaaagcttatccaccatgatcaagtgggcttcatccctgggatgcaaggctg

SEQ ID NO: 121009 - DNA, 1305 bp, Homo sapiens
atggtaaagggatcaattccacaagaagagctaactatcctaaatatatatgcactcaatacaggagcacccagattcataaagcaagttcttagagacctacaaagagacttagactcccacacaataataatgggagactttaacaccccactgtcaacatcagacagatcaacgagacagaaagttaacaaggatatccaggaattgaactcagctctgcaccaagcagacataatagacatctacagaactctccaccccaaatcaacagaatacacattcttctcagcaccacatcacacttattccaaaattgaccacattgttggaagtaaagcactcctcagcaaatgtcaaagaatagaaattataacaaactgtctctcagactacagtgcaatcaaactagaactcaggattcagaaactcactcaaaactgctcaactatttggaaactgaacaacctactcctgaatgactactgggtacataaagaaatgaaggcagaaataaagatgttctttgaaaccaatgagaacaaagacacaacataccaccacctctgggacacatttaaagcagtgtgtagagggaaatttatagcactaaatgcccacaagagaaagcaggaaagatttgaaatggacaccctaacatcacaattaaaagaactcaagaagcaagagcaaacacattcaaaagctagcagaaggcaagaaataactaagatcagagcagaacgtaaggagatagagacacaaaaaacccttcaaaaaatcaacgaatccgggagctggtttgttgaaaagatcaacaaaattgatagaccactagcaagactaataaagaagaaaagagagaagaatcaaatagacgcaataaaaaatgataaaggggttatcaccaccgatcccacagaaatacaaactaccatcagagaatactataaacacctctatgcaaataaactagaaaatctagaagaaatggataaattcctggacacatacaacctccgaagactaaaccagggagaagttgaatccttgaatagaccaataacaggctctgaaattgaggcaataattaatagcctaccaacaaaaaaagtccaggaccaaatggattcacagccaaattctagcagagtattggaagttctggcccgagcaatcaggcaggagaaagaaataaagggtattcagttaggaaaagaggaattcaaattgtccctgtttgcagatgacatgcctgtatatttagaaaaccccattgtttcagcccaaaatctccttaagcta

SEQ ID NO: 121010 - DNA, 1926 bp, Homo sapiens
atgggagactttaacaccccactgtcaacattagacagatcaacgagacagaaagccaacaaggatacccaggaattgaactcagctctgcaccaagtggacctaatagacatctacagaactctccaccccaaatcaacagaatatacattcttttcagcaccacaccacacctattccacaactgaccacatacttggaagtaaagctctcctcagcaaatgtagaagaacagaaattataacaaactatctctcagaccacagtgcaatcaaactagaactcagaattaagaatctcactcaaaaccgctcaactacatggaaactgaacaacctcctcctgaatgactacggggtgcataatgaaatgaaggcagaaataaagatgttctttgaaaccaatgagaacaaagacacaacataccagaatctctgggacacattcaaagcagtgtgtagagggaaatttatagcactaaatgcccacaagagaaagcaggaaagatccaaaattgacaccctaacatcacaattaaaagaactagaaaagcaagagcaaacacattcaaaagctagcagaagacaagaaataactaaaatcagagcagaactgaaggaaatagagacacaaaaaacccttcaaaaaattaatgaatccaggagctggttttttgaaaggatcaacaaaatagatagactgctagcaagactaataaagaaaaaaagagagaagaatcaaatagatgcaataaaaaatgataaaggggatatcaccactgatcccacagaaatacaaactaccatcagagaatactacaaacacctctacgcaaataaactagaaaatctagaagaaatggataaattcctgcacacatacactctcccaagactaaaccaggaagaagttgaatctctgaatagaccaataacaggatctgaaattgtggcaataatcaatagcttaccaaccaaaaagagtccaggaccagatggattcacagccgaattcgaccagaggtacaaggaggaactggtaccattccttctgaaactattccaatcaatagaaaaagagggaatcctccctaactcattttatgaggccagcatcatcctgatacgaaagcctggcagagacacaaccaaaaaagagaattttagaccaatatccttgatgaacactgatgcaaaaatcctcaataaaatactggcaaaacgaatccagcagcacatcaaaaagcttatccaccatgatcaagtgggcttcatccctgggatgcaaggctggttcaatatacacaaatcaataaatgtaatccagcatataaacagagccaaagacaaaaaccacatgattatctccatagatgcagaaaaggcctttgacaaaattcaacaacccttcatgctaaaaactctcagtaaattaggtattgacgggacatatttcaaaataataagagctatctatgacaaacccacagccaatatcatactgaatgggcaaaaactggaagcattccctttgaaaactggcacaagacagggatgccctctctcaccactcctattcaacatagtgttggaagttctggccagggcaattaggcaggagaaggaaataaaggggaacttcagcaaagtctcaggatacaaaatcaatgtacaaaaatcacaagcattcttatacaccaacaacagacaagcagagagccaaatcatgagtgaactcccattcacaattgcttcaaagagaataaaatacctaggaatccaacttacaagggatgtgaaggacctcttcgaggagaactacaaaccactgctcaatgaaataaaagaggatacaaacaaatggaagaacattccatgctcatgggtaggaagaatcaatatcgtgaaaatggccatactgcccaag

SEQ ID NO: 121011 - DNA, 1025 bp, Homo sapiens
atggaggaggatctaccaagcaaatggaaaataaaaaaacaaacaaaaaaagcaggggttgtaatcctagtctctgataaaacagactttaaaccaacaaagatcaaaagagacaaagaaggccattacataatggtgaagggatcaattcaacaagaagagttaactgtgctaaatatatatgcacccaatacaggagcacccagattcatgaagcaagtccttagagacctacaaagagacttagacccccacacaacaataatgggagactttaacaccccactgtcaacattagacagatcagcgagacagaaagttaacaaggatatccaggaattgaattcagctctgcaccaagcagacctaataaacatctacagaattctccaccccaaatcaacagaatatacattcatctcagcaccacatcgcacttattccaaaattgaccacatagttggaaggaaagcactcctcagaaaatataaaagaacagaaattataacagactgtctctcagaccacagtgcaatcaaactagaactcaggattaagaaactcactcagaacagctcaactacatggaaactgaacaacctgctcctgaatgactactggatacataacaaaacgaaggcagaaataaagatgtgctttgaaaccagtgagaacaaagacacaacataccagaatctctgggacacatgtaaagcagtgtgtagagagaaatttatagcactaaatgcccacaagagaaagcaggaaagatctaaaattgacaccctaacatcacaattaaaagaactgagaagcaagagcagacacattcaaaagctagcagaagaaaatctagaagaaatggataaatacctggacacatacaccctcccaagactaaaccaggaagaatttgagtccctgaatagaccaataacagggtctgaaattgaggcaataattaatagcttaccaaccaaaaaaagttcaggaccagacggattcacagccaaattctaccagag

SEQ ID NO: 121012 - DNA, 1661 bp, Homo sapiens
atggagaatgactttgatgagttgagagaagaaggcttcagacgatcaaactactccgagctacaggaggaaattcaaaccaaaggcaaagaagttgaaaactttgaaaaaaatttagatgaatgtataactagaataaccaatacagagaagtgcttaaaggagctgatggagctgaaagccaaggctcgagaactacgtgaacaatgcagaagcctgaggagcctatgcgatcaactggaagaaagggtatcagtgatggaagatgaaatgaatgaaatgaaacacagactggcaaattggataaagagtcaagacccatcagtgtgctgtattcaggaagcctatctcacatgcagagacacacataggctcaaaataaaaggatggaggaagatctaccaagcaaatggaaaacaaaaaaaggcaggggttgcaatcctagtctctgataaaacagactttaaaccaacaaagatcaaaagagacaaagaaggcctttacataatggtaaagggatcaattccacgagaagagctaactatcctaaatatatatgcacccaatccagaagcacccagattcacaaagcaagtcctgagtgacctacaaagagacgtagactcccacacaataatactgggagactttaacaccccactgtcagcattagacagatcaatgagacagaaagttaacaaggatacccaggaattgaactcagctctgcaccaagcggacctaatagacatctacagaactctccacccaaaatcaacagaatatacatttttttcagcaccacaccacacctattccaaaattgaccacagagttggaagtaaagctcttctcagcaaatgtaaaagatcagaaattataacaaactgtctctcagaccacagtgcaatcaaactagaactcaggattaagaaactcactcaaaactgctcaactacatggaaactgaacaacctgctcctgaatgactactgggtacataacgaaatgaaggcagaaataaagatgttctttgaaaccaatgagaacaaagacacaacataccataatctctgggacacattcaaagcagtgtgtagagggaaatttatagcactaaatgcccacaagagaaagcaggaaagatccaaaattgacaccctaacatcacaattaaaagaactagaaaagcaagagcaaacacattcaaaagctagcagaaggcaagaaataactaaaatcagagcagaactgaaggaaatagagacacaaaaaacccttcaaaaaattaatgaatccaggagctggttttttaaaaagatcaacaaaattgatagaccgctagcaagactcataaagaagaaaagagagaagaatcaattagactcaataaaaaatgataaaggggatatcaccacctatcccacagaaatacaaactacaatcagagaatactacaaacacctctacacaaataaactagaaaatctagaaaaaatggataaattcctcgacacatacaccctcccaagactaaaccaggaagaagttgaatctctgaatagaccaataacaggatctgaaattgtggcactaatcaatagcttaccaaccaaaaagagtccaggaccagatggattcacagccgaattctaccagag

SEQ ID NO: 121013 - DNA, 1635 bp, Homo sapiens
atggaggaagatctaccaagcaaatggaaaaccaaaaaggcaggggttgcaatccgagtctctgataaaacagactttaaaccaacaaagatcaaaagagacaaagaaggccattacttaatggtaaagggatcaattcaacaagaagagctaactatcctaaatatctatgcaaccaatacaggagcacccggattcataaagcaagtcctgagtgacctacaaagagacttagactcccacacaataataatggaggactttaacaccccactgtcaacattagacatatcaatgagacagaaagtcaacaaggatacccaggaattgaactcagctctacaccaagaggacctaatagacatctacagaactctccaccccaaatcaacagaatatacatttttttcagcaccacaccacacctattccaaaattgaccacatacttggaagtaaagctctcctcagcaaatgtaaaagaacagagattataacaaactatctctcagaccacagtgcaatcaaactagaactcaggattaagaatctcactcaaagccgctcaactacatggaaactgaacaacctgctcctgaatgactactgggtacataaggaaatgaaggcagacataaagatgttctttgaaaccaatgagagcaaagacacaacataccagaatctctgggacgcattcaaagcagaagaacttgaatctctgaatagaccaataacagcctctgaaattgtggcaataatcaatagcttaccaagcaaaaagagtccaggaccagatggattcacagccaaattctaccagaggtacaaggaggaactggtaccattccttctgaaactattccaatcaatagaaaaagagggaatcctccctaactcatttgatgaggccagcatcatcctgataccaaagctgggcagagacacaaccaaaaaagagaattttagaccgatatccttgatgaacattgatgcaaaaatcctcaataaaatactggcaaaccaaatccagcagcacatcaaaaagcttatccaccatgatcaagtgggcttcatccctgggatgcaaggctggttcaatatacacaaatcaataaatgtaatccagcatataaacagaaccaaagacaaaaaccacatgattatctcaatagatgcagaaaaggcctttgacaaaattcaacaatccttcatgctaaaaactcgcaataaattaggtattgatgggacgtatctcaaaataataagagctatctatgacaaacccacagccaatatcatactgaatgggcaaaaactggaagcattccctttgaaaactggcacaagacagggatgccctctctcaccactcctattcaacatagtgttggaagtgctggccagggcgatcaggcaggagaaggaaataaagggtattcaattaggaaaagaggacgtcaaattgtccctgtttgcagatgacatgattgtatatttagaaaaccccattgtctcagccccaaatccccttaagctgataagcaacttcagcaaagtctcaggatacaaaatcaatgtgcaaaaatcacaagcattcttatacaccaataacagacagagagccaaatcataa

SEQ ID NO: 121014 - DNA, 2172 bp, Homo sapiens
atggggaaaaaacagagcagaaaaactggaaactctaaaaatgagagcacctctcctcctccaaaggaacgcagctcctcacctgcaacggaacaaagctggacggagaatgactttgacgagttgagagaagaaggcttcagacgatcaaactactccgagctaaaggaggaagttcgaacccatggcaaagaagttaaaaaccttaaaaataaattagacgaatggctaactagaataaccaatgcagagaagtccttaaaggacctgatggagctgaaaaccacggcacgagaactacgtgatgaatgcacaagcctcagtagccgattcgatcaacaggaagaaagcgactatgtgaaaagaccaaatctacctcttattggtgtacccgaaagtgacggggataacgcaaccaagttggaaaacactctgcaggatattatccaggagaactgccccaatctagcaaggcaggccaacattcaaattcaggaaatacagagaacgccacaaagatactcttcgagaagagcaactccaagacacataattgtcagattcaccaaagttgaaatgaaggaaaaaatgttaagggcagccagagagaaaggtcgggtcacccacaaagggaagcccatcaggctaacagctgctctctcagcagaaactctacaagccagaagagacaggaggccaatattcaacattcttaaagaaaagaattttcaacccagaatttcatatccagccaaactaagcttcgtaagtgaaggagaaatagaatactttacagacaagcaaatgctgagagattttctcatgaccaggcctgccctaaaagagctcctgaaggaagcactgaacatggaaacaaccggagcacccagattcataaagcaagtccttagagagctacaaagagacttagacacccacacaataataacgggagactttaacaccccactgtcaacatcagacagatcaactagacagaaagttaacaaggatatccaggaactgaactcagctctgcaccaagcggacctaatagacatctgcagaactctccaccccaaatcaatagaatatacattcttttcagcaccacaccacacctattccaaaattgaccacatagttggaagtaaagcactcctgagcaaatgcaaaagaacagaaattataacaaactgtctctcagaccacagtgcaatcaaactagaactcaggattaagaaactcactcaaaaccgctcaactacatggaaactggacaatctgctcctgaatgactactgggtacataacgaaatgaagacagaaataaagatgttctttgaaaccaatgagaacaaagacacaacataccagaatctctgggacacattcaaagcagtgtgcagagggaaatttatagcactaaatgcccacaagagaaagaagacaagatctaaaattgacaccctaacatcacaattaaaagaactagagaagcaagagcaaacacattcaaaagctagcagaaggcaagaaataactaagatcagagaagaactgaaggaaatagagacacaaaaaacccttcaaaaaatcaatgaatccaggagctggttttttgaaaagatcaacaaaattgatagaccactagcaagactagtaaagaagaaaagagagaagaatcaaatagacgtaataaaaaatgataaaggggatatcaccaccgatcccacagaaatactaactaccatcagagaataccataaacacctctacacaaataaactagaaaatctagaagaaatggataaattcctcaacacatacaccctcccaagactaaaccaggaagaagttgaatctctgaatagcccaataacaggctctgaaattgaggcaataattaatagcttatcaatgaaaaaaagtacaggaccagatggattcacagccgaattctaccagaggtacaaggaggaactggtaccattccttctgaaactattccaatcaatagaaaaagagggaatcctccctaactcattttatgaggccagcatcatcctgataccaaagcctggcagagacacaacaaaaaaagagaattttggaccaatattcctgatgaacatcaatgcaaaaatcctcaataaaatactggcaaactga

SEQ ID NO: 121015 - DNA, 1272 bp, Homo sapiens
agaagggaagtttagagaaaacagaataaaaagaaatgaacaaagcctccaagaaatatgggactatgtgaaaagaacaaatctacgtctgattggtgtacctgaaagtgattgggagaatggaaccaagttggaaaacactctgcaggatattatccaggagaacttccccaatctagcaaggtaagccaaaattcagaggataaggagtcaagacccatcaacccatctcacgtccagagacacacataggttaaaaataaagggatggaggaagatttaccaagcaaatggaaaacaaaaaaaggcagcggttacaatcctagtctctgataaaacaaactttaaaccaacaaagatcaaaagagacaacgaaggccattacataatggtaaagggatcaaatcaacaagaagagctaactatcctaaatatatatgcacctaatacaggagcacccagattcataaagcaagtccttagagatctacaaagagacttagactcccacacaataataacgggagacattaacatcccgctatcaacattagacagatcaacgaaacagaaagttaacaaggatacccaggaattaaactcagctctgcaccaagtggacctaatagacatctacagaactctccaccccaaatcaatagaatatacatttttttcagcaccacaccacacctattccaaagttgaccacatacttggaagtaaagcactcctcagcaaatgtgaaagaatagaaattataacaaactgtctctcagaccacagtgcaatcaaactagaactcaggattaagaatctcactcaaaaccactcaattacatggaagctgaacaacctgttcctgaatgactactgggtacataacgaaatgaaggcagaaataaagatgttctttgaaaccagtgagaacaaagacacaacataccagaatctctgggacgcattcaaagcagtgtgtagagggaaatttatagcactaaatgcccacaagagaaagcaggaaagatccaaaatttacaccctaacgtcacaattaaaagaactagaaaagcaagagcaaacacattcaaaagctagcagaaggcaagaaataattaaaatcagagcagaactgaaggaaatagagacacaaaaaacccttcaaaaacttaatgaatccatctcccaccagttagaatggcaatcattaaaaagtcagaaaacaacaggtgctggagaggatgtggagaaataggaacacttttacactgt

SEQ ID NO: 121016 - DNA, 1125 bp, Homo sapiens
atgcctatcctagtctatgatagaacagactttaaaccaacaaagatcaaaagaggcaaagaaggccattacgtaacggtaaagggatcaattcaacaagaagaactaactaccctaaatatatatgcacccaatacaggagcacccaggttcataaagcaagtcctgagtgacctacaaagagacttagactcccacacaataacaatgggagactttaacaccccactgtcaacattagacagatcaacgagacagaaagttaacaaggatatccaggaattgaactcagctctgcaccaagaggacctaatagacatctacagaactctccaccccaaatcaacagaatatacattcttttcagcaccacaccacaccaattccaaaattgaccacatagttggaagtaaagcactcctcagcaaatgtaaaagaacagaaattataacaaactgtctctcagaccacagtgcaatcaaactagaactcaggattaagaaactcactcataaccgctcaactacatggaaactgaacaacctgctcctgaatgactactgggtacataacgaaatgaaggcagaaataaagaggttctttgaaaccaatgagaacaaagacacagcataccagaatctctgggacacattcaaagcagtgtgtagagggaaatttatagcactaaatgcccaaaagacaaagcaggaaagactaaaccaggaagaagctgaatctgtgaatagaccaataacaggctctgaaatggaagcaataattaatagcttaccaaccaaaaaaagtgcaagaccagatggattcacagacgaattctaccagaggtacaaggaggagctggtaccattccttctgaaactgttccaatcaatagaaaaagagggaatcttccctaactcattttatgaggccagcatcatcctgataccaaagcatggcagagacacaaccaaaaaagagaattttataccaatatccttgatgaacattgatgcaaaaatcctcaataaaatactggcaaatcgaatccagcaacacatcaaaaagcttatccaccatgatcaagtgggcttcatccctgggatgcaaggctggttcaacgtatga

SEQ ID NO: 121017 - DNA, 1539 bp, Homo sapiens; identical to SEQ ID NO: 117840

SEQ ID NO: 121018 - DNA, 1209 bp, Homo sapiens
agccagcacaacccttcagaaggacaaatgccttcttgttcaatcaccctggaaaacataggtgccagagaaagagaggagcagaagcagcctccagagtgggtgagaggactcatcaaacatctaaatgtgccctttggtgatggactaaatatgctgcaggaacgcagctcctcaccagcaacagaacaaagctggatggagaatgactttgacgagttgagagaagaaggtttcagacgactggacttccttacaagagcccctgaaggaagcactaaacatggaaaggaaaaaccaggaccagccactgcaaaaacatgccaaattgtaaaggccatcgatgctaggaagaaactgcatcaactaatgagcaaaataaccagtggcaacattagatcaacgaaacagaaagttaacaaggatacccaggaattgaactcagctctgcaccaagcagacctaatagacatctacagaactctccaccccaaatcaacagaatatacattcttctcagcaccacatcacacttattctaaaattgaccacatagtcggaagtaaagcactcctcagcaaatgtaaaagaacagaaattataacgaactgtctctcagaccacagtgcaatcaaactagaactcaggattaagaaactcactcaaaactgctcaaccacatggaaactgaacaacctgttcctgagtgactactgggtacataacgaaatgaaggcagaaataaagatattctttgaaaccaatgagaacaaagacacaacataccggaatctctgggacacatgtaaagcagtgtgtaaagggaaatttatagcactaaataaccacaagagaaagcaggaaagatctaaaattgacaccctaacatcacaattaaaagaactagagaagcaagagcaaatatattcaaaagctggcagaagacttgaaataactaagatcagagcagaactgaaggagatagagacacaaaaaacccttcaaaaaaaaatcaatgaatccaggagctggtgttttgaaatgatcaacaaaattgatagaccgctagcaagactaataaagaagaaaagagagaagaatcaaatagacacaataaaaaatgataaaggggatatcaccaccgatcccacagaagtacaaactaccatcagagaatactataaaaacacctctattcaaataaactag

SEQ ID NO: 121019 - DNA, 1287 bp, Homo sapiens
atggtaacagctcctccttgtacctctggtacaattcggctgcgaatccatctggtcctggactttttttggttgccaccgctgctgatacccaggcaaaaagggtctggagtggacttccagcaaactccaacagacctgcagctgagggtcctgaccgttagcaggaaaactaacaaacagaaaggacatccacaccaaaaacccatctgtatgtcaccatcatcaaagaccaaagagaagtccttaaaggacctgatggagctaaaaatcatggcacaagaactatgtgatgaatggacaagcctcagtagccgatgcaatcaactggaagaaagggtatcagtgatggaagatgaaatgaatgaaatgaaagacaagcataggcccaaaataaaggaatggaggaagatctaccaagcaaatggacaacaaaaaaagacaagggttgcaaacctagtctcagataaaacagagtttaaaccaacaaagatcaaaagagacaaagaaggccattacataatggtaaagggatcaattcaacaagaagagctaactatcgtaaatatatatgcacccaatacaggagcacccaggttcataaagaaagtccttagtgacctacaaagagccttagactcccacacaataataatgggagactttaacaccccactatcaacattagacagatcaacgagacagaaagtcaacaaggatatccaggaattgaactcagctctgcaccaagcggacctaatagatatctacagaactctccaccctaaatcaacagaatatacattcttttcagcaccacattacacctatcccaaaattgaccacatagttggaagtaaagcactcctcagcaaatgtaaaagaacagaaattataacaaactgtctctcagaccacagtgcaatcaaactagaactcaagattaagaaactcactcaaaacctctcaactacatggaaactgaacaacctgctcctaaaggactactgggtacataaagaaatgaaggcagaaataaagatgttctttgaaaccaacaagaacaaagacacaacataccagaatttctgggacacattcaaagcagtgtgtagagggaaatttatagcactaaatgcccacaagagaaagcaggaaggatttaaaatagacaccctaacattacaattaaaagaactagagaagcaagagcaaacacattcaaaagctagcagaaggcaagaagtaactaagatcagagcagaactgaaggaaatagagacataa

SEQ ID NO: 121020 - DNA, 1056 bp, Homo sapiens; identical to SEQ ID NO: 116182

SEQ ID NO: 121021 - DNA, 963 bp, Homo sapiens
gacttccttacaagagcccctgaaggaagcactaaacatggaaaggaaaaaccaggaccagccactgcaaaaacatgccaaattgtaaaggccatcgatgctaggaagaaactgcatcaactaatgagcaaaataaccagtggcaacattagatcaacgaaacagaaagttaacaaggatacccaggaattgaactcagctctgcaccaagcagacctaatagacatctacagaactctccaccccaaatcaacagaatatacattcttctcagcaccacatcacacttattctaaaattgaccacatagtcggaagtaaagcactcctcagcaaatgtaaaagaacagaaattataacgaactgtctctcagaccacagtgcaatcaaactagaactcaggattaagaaactcactcaaaactgctcaaccacatggaaactgaacaacctgttcctgagtgactactgggtacataacgaaatgaaggcagaaataaagatattctttgaaaccaatgagaacaaagacacaacataccggaatctctgggacacatgtaaagcagtgtgtaaagggaaatttatagcactaaataaccacaagagaaagcaggaaagatctaaaattgacaccctaacatcacaattaaaagaactagagaagcaagagcaaatatattcaaaagctggcagaagacttgaaataactaagatcagagcagaactgaaggagatagagacacaaaaaacccttcaaaaaaaaatcaatgaatccaggagctggtgttttgaaatgatcaacaaaattgatagaccgctagcaagactaataaagaagaaaagagagaagaatcaaatagacacaataaaaaatgataaaggggatatcaccaccgatcccacagaagtacaaactaccatcagagaatactataaaaacacctctattcaaataaactag

SEQ ID NO: 121022 - DNA, 1163 bp, Homo sapiens
actttaaaccaacaaagatcaaaagagacaaagaaggccactacataatggtaaagggatcaattcaacaagaagagctaactatcctaaatatatatacacccaatacaggagcacccagattcataaagcaagtccttagagacctacaaagagacttagactcccatacaataatagtgggagactttaacaccccactgtcaacattagacagttcaaagagacagaaggttgacaaggatatccaggaattgaactcagctctgtaccaagcagacctaacagacatctacagaactctccaccccaaatcaacagaatatacatttttttcagcaccacaccacacctattccaaaattgaccacatagttggaagtaaagcactcctcagcaaatgtaacagaacagaaattataacaaactgtctctcagaccacagtgcaatcagactagaactcaggattaagaaactcactgaaaaccgctcaactacatggaaactgaacaacctgctcctgaaagactactgggtacataacgaaatgaaggcagaaataaagatgttctttgaaaccaatgagaacaaagacacaacataccagaatctctgggacacaggcaaagctgcgtgtagagggatatttatagcaataaatgcccacaagagaaaccagaaaagatctaaaatggacaccctaacatcacaattaaaagaattagagaagcaagagcaaagacattcaaaagctagcagaagactaaaccaggaagaagttgaatctctgaataaaccaagaacaggctctgaaattgaggcaataattaacagcttaccaaccaaaaaaagtccaggagcagatggattcacagccgaattctaccagaggtacaaggaggagctgggaccattccttctgaaactattccaatcaatagaaaaagagggaatactccctaactcattttatgaggccagcatcatcctgataccaaagcctgacagagacacaacaaaaaaagagaattttaggccaatatgcctgatgaacatccatgcaaaaatcatcaataaaatactggcaaaccaaatccagcagcacatcaaaaagcttatccaccatgatcaagtgggcttcatccctaggatgcaaggctag

SEQ ID NO: 121023 - DNA, 1364 bp, Homo sapiens
atggtaaagggatcaattcaacaagaagagctaactatcctaaatatttatgcacccaatacaggagcacccagattcataaagcaagtcctgagtgacctacaaagagacttagactcccacacattaataatgggagactttaacaccccactgtcaacattagacagatcaacgagacagaaagtcaacaaggatacccaggaattgaactcagctctgcaccaagcggacctaatagacgtctacagaactctccaccccaaatcaacagaatatacatttttttcagcaccacaccacacctattccaaaattgaccacatagttggaagtaaagctctcctcagcaaatgtaaaagaacagaaattataacaaactatctctcagaccacagtgcaatcaaactagaactcaggattaagaatctcactcaaagccgctcaactacatggaaactgaacaacctgctcctgaatgactactgggtacataacgaaatgaaggcagaaataaagatgttctttaaaaccaacaagaacaaagacaccacataccagaatctctgggacgcattcaaagcagtgtgtagagggaaatttatagcactaaatgcctacaagagaaagcaggaaagatccaaaattgacaccctaacatcacaattaaaagaactagaaaagcaagagcaaacacattcaaaagctagcagaaggcaagaaataactaaaatcagagcagaactgaaggaaatagagacacaaaaaacccttcaaaaaatcaatgaatccaagagctggttttttgaaaggatcaacaaaattgatagactgctagcaagactaataaagaaaaaaagagagaagaatcaaatagacacaataaaaaatgataaaggggatatcaccaccgatcccacagaaatacaaactaccatcagagaatactacaaacacctctacgcaaataaactagaaaatctagaagaaatggatacattcctcgacacatacactctcccaagactaaaccaggaagaagttgaatctctgaatagaccaataacaggctctgaaattgtggcaataatcaatagtttaccaactaaaaagagtccaggaccagatggattcacagccgaattctaccagagagtgggtggcctggagactgagaatcggaggctagaaatcaaaatctgggaacatctggagaagaaggggccccaggtcagagactggggacattatgttaagaccacagaggacttcagggctcagacttttgcaaattctgtggacaatgcctgcattgttctgcagattggcaaggcctatcttgctgctgatgattttagagtcaa

SEQ ID NO: 121024 - DNA, 1003 bp, Homo sapiens
atggtaaagggatcaattcaacaagaagagctaactatcctaaatatatatgcacccaatacaggagcacccagattcataaagcaagtccttagagacctacaaagagacttagatgcccacacaataataatagcagactttaacaccccactgttaatattagacagatcaatgagacagaaggttaacagggatatccaggacttgaactcagctctgcaccaagtggacctaatagacatctacagaactctccaccccaaatcaacagaatatacattcttctcagcaccacatcacacttattccaaaacttaccacatagttggaagtaaagcactcctcagcaaatgtaaaagaacagaagtcacaacaaactgtctctcagaccacagtgcaatgaaattagaactcaggattaagaaactcactcaaaaccgcacaactacatggaaactgaacaacctgctcctgaatgactactgggtaaataatgaaatgaaggcagagataaagatgttctttgaaaccaatgagaaaaaagacacaacgtaccagaatgtctgggacacatttaaagcagtgtgtagagggaaatttataggactaaatgcccataagagaaagcaggaaagatctaaaattgacaccctaacatcacagttaaaagaactagagaagcaagagcaaacaaattcaaaagctagcagaagtcaaaaaatagatgagaaaacagactcagacagcatcccacccaagatagtatttggcagcgctgaaattgaaactaaaagagactacactcttaaccagtatactaaaatgcttctaagtgattcatgccttggacaattgtccttttccaagtccattatttctgcaattttcaatcctgtcttcactatagttgtttactcttttgctaaggcagcaaagccttcagggcacaggctctggagccagataaaggagatctatatgccgggccactgcacacaag

SEQ ID NO: 121025 - DNA, 1205 bp, Homo sapiens
atgggagactttaacaccccactgtcaacattagacagatcaacgagacagaaagtcaacaaggatacccaagaattgaactcagctctgcaccaggtggacctaatagacatctacagaactctccaccccaaatcaacagaatatacatttttttcagcaccacaccacacctattccaaaattgaccacatggttggaagtaaagctctcctcagcaaatgtaaaagaacagaaattataacaaactatctctcagaccacagtgcaatcaaactagaactcaggattaagaatctcactcaaagccgctcaactacatggaaactgaacaacctgctcctgaatgactactgggtacataacgaaatgaaggcagaaataaagatgttctttgaaaccaacgagaacaaagacacaacataccagaatctctgggacacattcaaagcagtgtgtagagggaaatttatagcactaaatgcccacaagagaaagcaggaaagatccaaaattgacaccctaacatcacaattaaaagaactagaaaagcaagagcaaacacattcaaaagctagcagaaggcaagaaataactaaaatcagagcagaactgaaggaaatagagacacaaaaaacccttcaaaaaatcagtgaatccaggagctggttttttgaaaggatcaacaagattgatagaccactagcaagactaataaagaaaaaaagagagaagaatcaaatagacacaataaaaaatgataaaggggatatcaccaccgatcccacagaaatacaaactaccatcagagaatactacaaacacctctacgcaaataaactagaaaatctagaagaaatggataaattcctcaacacatacactctcccaagactaaaccaggaagatgttgaatctctgaatagaccaataacaggagctgaaattgtggcaataatcaatagtttaccaaccaaaaagagtccaggaccagatggattcacagctgaattctaccagaggtacaaggaggaactggcgcgagccgccgcttgcagcacagaacccgttgagcttcgtgcccggcagcacccccggtcccgcgcggggcggacttgcggcgggacaggtgtagcccgcagccgcagtcctgcgctcaggactgggcgggctcggctggccgtccccgccacgcaggccggtcg

SEQ ID NO: 121026 - DNA, 1917 bp, Homo sapiens
atggtaaagggatcaattcaacaagaagagctaactatcctaaatacatatgcagcccatacaggagcaccaagactcataaagcaagtcctgagtgacctacaaagagacttagactcccacacaataataatgggagactttaacaccccactgtcaacattagacagatcaacgagacagaaagttaacaaggatacccaggaattgaagtcagctctgcaccaagcggacctaacagacatctacagaactctccaccacaaatcaacagaatatacatttttttcagcaccacaccacatctattccaaaattgaccacatactgggaagtaaagctctcctcagcaaatgtaaaagaacagaaattataacaaactatctctcagaccacagtgcaatcaaactagaactctggattaagaatctcactcaaaaccactcaactacatgggaactgaacaacctgctcctgaatgactactgggtacataacgaaatgaaggcagaaataaagatgttctttgaaaccaatgagaacaaagacacaacataccataatctctgggacacattcaaagcagtgtgtagagggaaatttataccactaaatgcccacaagagaaagcaggaaagatccaaaattgacaccctaacatcacaattaaaagaactagaaaagcaagagcaaacacattcaaaagctagcagaaggcaagaaataactaaaatcagagcagaactgaaggaaatagagacacaaaaaacccttcaaaaaattaatgaatccaggagctggttttttgaaaggatcaacaaaattgatagactgctagcaagactaataaagaaaaaaagagagaagaatcaaatagatgcaataaaaaatgataaaggagatatcaccaccgatcccacagaaatacaaactaccatcagagaatactgcaaacacctctatgcaaataaactagaaaatctagaagaaatggataaattcctggacacatacactctcccaagactaaaccaggaagaagttgaatctctgaatagaccaataacaggagctgaaattgtggcaataatcaatagcttaccaaccaaaaagagtccaggaccagatggattcacagccaaattctaccagaggtacaaggaggaactggtaccattccttctgaaactattccaatcaatagaaaaagagggaatcctccctaactcattttatgaggccagcatcattctgataccaaagccaggaagagacacaacaaaaaaagagaattttagaccaatatccttgatgaacattgatgcaaaaatcctcaataaaaaactggcaaaacgaatccagcaacacatcaaaaagcttatccaccatgatcaagtgggcttcatccctggaatgcaaggctggttcaatatacgcaaatcaataaatgtaatccagcatataaacagagccaaagacaaaaaccatatgattatctcaatagatgcagaaaaagcctttgacaaaattcaacaacccttcatgctaaaaactctcaataaattagagaataaaatacctaggaatccaccttacaagggatgtgaaggacctcttcaaggagaactacaaaccactgctcaaggaaataaaagaggatacaaacaaatggaagaacattccatgctcatgggtaggaagaatcaatatcgtgaaaatggccatactgcccaagatgtgcctctaaaggaggtggactccactctgtttactgacagcagcagcttccttgaacagggagtaggaaaggctggtgcagccgttactatggagacagatgtactgtgggcccaggcactgccggcaggtacctcagcacagaaggctgaattggtcaccttcactcaggctctctga

SEQ ID NO: 121027 - DNA, 2676 bp, Homo sapiens
gactatgtgaaaagaccaaatctacctcttattggtgtacccgaaagtgacggggataacgcaaccaagttggaaaacactctgcaggatattatccaggagaactgccccaatctagcaaggcaggccaacattcaaattcaggaaatacagagaacgccacaaagatactcttcgagaagagcaactccaagacacataattgtcagattcaccaaagttgaaatgaaggaaaaaatgttaagggcagccagagagaaaggtcgggtcacccacaaagggaagcccatcaggctaacagctgctctctcagcagaaactctacaagccagaagagacaggaggccaatattcaacattcttaaagaaaagaattttcaacccagaatttcatatccagccaaactaagcttcgtaagtgaaggagaaatagaatactttacagacaagcaaatgctgagagattttctcatgaccaggcctgccctaaaagagctcctgaaggaagcactgaacatggaaacaaccggagcacccagattcataaagcaagtccttagagagctacaaagagacttagacacccacacaataataacgggagactttaacaccccactgtcaacatcagacagatcaactagacagaaagttaacaaggatatccaggaactgaactcagctctgcaccaagcggacctaatagacatctgcagaactctccaccccaaatcaatagaatatacattcttttcagcaccacaccacacctattccaaaattgaccacatagttggaagtaaagcactcctgagcaaatgcaaaagaacagaaattataacaaactgtctctcagaccacagtgcaatcaaactagaactcaggattaagaaactcactcaaaaccgctcaactacatggaaactggacaatctgctcctgaatgactactgggtacataacgaaatgaagacagaaataaagatgttctttgaaaccaatgagaacaaagacacaacataccagaatctctgggacacattcaaagcagtgtgcagagggaaatttatagcactaaatgcccacaagagaaagaagacaagatctaaaattgacaccctaacatcacaattaaaagaactagagaagcaagagcaaacacattcaaaagctagcagaaggcaagaaataactaagatcagagaagaactgaaggaaatagagacacaaaaaacccttcaaaaaatcaatgaatccaggagctggttttttgaaaagatcaacaaaattgatagaccactagcaagactagtaaagaagaaaagagagaagaatcaaatagacgtaataaaaaatgataaaggggatatcaccaccgatcccacagaaatactaactaccatcagagaataccataaacacctctacacaaataaactagaaaatctagaagaaatggataaattcctcaacacatacaccctcccaagactaaaccaggaagaagttgaatctctgaatagcccaataacaggctctgaaattgaggcaataattaatagcttatcaatgaaaaaaagtacaggaccagatggattcacagccgaattctaccagaggtacaaggaggaactggtaccattccttctgaaactattccaatcaatagaaaaagagggaatcctccctaactcattttatgaggccagcatcatcctgataccaaagcctggcagagacacaacaaaaaaagagaattttggaccaatattcctgatgaacatcaatgcaaaaatcctcaataaaatactggcaaaccgaatccagcagcacatcaaaaagcttatccactatgatcaagtgggcttcatccctgggatgcaaggcagggcaatcaggcaggagaaggaaataaagggtattcaattaggaaaagaggaagtcaaattgtccctgtttgcagatgacatgattgtgtatctagaaaaccccatcgtctcagcccaaaatctccttaagctgataagcaacttcagcaaagtctcaggatacaaaatcaatgtgcaaaaaccacaagcattcttatacaccaataacagacaaacagagagccaaatcatgagtgaactcccattcacaattgcttcaaagagaataaaaaacctaggaatccaacttacaagggatgtgaaggacctcttcaaggagaactacaaaccactgctcaatgaaataaaagaggatacaaacaaatggaagaacattccatgctcatgggtaggaagaatcaatatcatgaaaatggtcatactgcccaaggggcttgctcctgcagacaaactgggagccgttctaaaggagagggtcacatttccaacacagctaataaagtggcatgcccaggatgcaggaaagggggcacagtgtgactgcggagtggtgatctgcagccgagtggcattgctgacaagcagacatcaccctatcctaccatctgactcacagaactgtaaagaattccaagttttcaccaaattaaatgcaaacagtaaaaagagaagcgctcaacagaagcattacaaagatgaggttctggccctgcttctgccacttgccccagcccatctagcaggctgtcatgatgctcagacacagagtcagcagcagcagggctag

SEQ ID NO: 121028 - DNA, 2670 bp, Homo sapiens
aacgactattaccgtcccatgaaccttacagaaaacaacgtacgattgtcctgacattattgtactatgattggtgcccatgccaccctacccgctgaaacggactctgaactggtgagaggagtgtggcattattgtactatgattggtgcccatgccaccctacctgctgaaacagactctgaactggtgagaggagtgtggtatttgaacttaattcaaccttactttagtgggaagggagggcagaaagcaagtgaacctggtgctctgggaggtatatggtagggtgccgcactggcatctgcttctggtgagggccttaggaagcttacaatcgtggcggaaggtgaaggaggagcaggcatgtcacttggtgagagtggaaacaagatcaaaagagacaaagaaggccattacataatggtaaatggatcaattcaacaagaagagctaactatcctaaacatatatgcacccaatacaggagcacccagattcataaagcaagtccttagagacctacaaagagacttagactcccacacaataataatgagagactttaacaccccactgtcagcattagagagatctacgagagagaaagttaacaaggatatccaggaattgaactcagctctgcaccaagcagatctagtagacatctacagaactctccaccccaaatcaacagaatatacattcttctcagcaccacatcgcacttattccaatattgaccacatagttggaagtaaagcactcctcagcaattgtaaaagaacagaaattataacaaagtgtctttcagaccacagtacaatcaaactagaactcaggattaagaaactcactcaaaaccgctcaactacatggaaactgaacaacctgctcctgaatgactactgggtacataatgaaatgaaggcagaaataaagatgttctttgaaaccattgagaacaaagacacaacataccagaatctctgggacacatttaaagcagagtgtagagggaaatttatagcactaaatgcccacaagagaaagcaagaaagatctaaaattgacaccctaacatcacaattgaaagaactagagaaacaagagcaaacacattcaaaagctagcagaaggcaagaaataactaagatcagagcagagctgaaggagacagagacacaaaaaacccttcaaaaaattaatgaatccaggagctggttttttgaaaggatcaacaaaattgatagaccgctagcaagactaataaagaaaaaaagagagaagaatctaatagatgcaataaaaaatgataaaggggatatcaccaccgatcccacagaaatacaaactaccatcagagaatactacaaacacctctacgcaaataaactagaaaatctagaagaaatggataaattcctcgacacatacactctcccaagactgaaccaggaagaagttgaatctctgaatagaccaataacaggatctgaaattgtggcaataatcaatagcttaccaaccaaaaagagtccaggaccagatggattcacagccgaattctaccagaggcacacagtatcaatactcatcagctattgtcagggtggaagcctgatgagccaagtatactggaaccagcaagagaaacccccttcctccagcaacgcccctccagggctctctgttaacaaagctcagcatcgtcatgtttgctgcagaggagaaatgctaaaaagggtccaggttcattatgtcagagcaggggaatctgacagtgctagctttcactgtgtggcccaaggcccaagagcctttggcaaaccactgatcctctccaaagagaatcatctcttgactgtcactgcaatagccaaattaaaccacaaattatgtgaaattaaaagcatgggtgtttttatcaacacagagcccctgtatgacagttgtttagaacagaaacatgctctttttgcctctcctccagccaccacccactccactaccatgatcagtaaggcaaaggtgataccgatgctttctctgacgccagggagtttccaaaccgtggaaagctctttggccccctctgctggtaagttccaggggacagaaacaagctctctgaagactctcattaatctttgctgtccgaagctaccttctccatctcctgctcacctgggaggactccctggaggaagccaggaaagaccatcaaggcagtacctctatgagtctgcaagaaccactgtgttactgggcttggggtgtcccctaaagcagatacagcttagatcacaacactcaagtcctttagaatacctggagagccttcccaagaaggacagaaaaaaaagagagaagatccaaataaataaagtcagagatgaaaaaggagacattacaaccaatagtgcagaaattcaaaggatggttattggctaccatgagcaactatatgccaataaattggaaaatctagaagaaatggacaaatttctagacacatacgacctaccaagattgaaccatgaagaaatccaaaagctggacagaccaataacaagtaacaagattgaagctgtaaaaaaaagtctcccagtaaagaaaagcctggaacctgatggcttcactgctgagtttcaccaaacatttagataa

SEQ ID NO: 121029 - DNA, 1687 bp, Homo sapiens
atgttaaagggatcaattcaacaagaagagctaactgtcctaaatatatatgcacccaatacaggagcacccagatgcataaagcaagtcctgagtgacgtacaaagagacttagactccaacacattaataatgggagactttaacaccccactgtcaacattagacagatcaacgagacagaaagtcaacaaggatacccaggaattgaactcagctctgcaccaggcggacctaatagacatctacagaactctccaccccaaatcaacagaatatacatttttttcagcaccacaccacacctattccaaaattgaccacatacttggaagtaaagctctcctcagcaaatgtaaaagaacagaaattataacaaactctctctcagaccacagtgcaatcaaactagaactcaggattaagaatctcactcaaaaccgctcaactacatggaaactgaacaacctgctcctgaatgactactgggtacataacgaaatgaaggcagaaataaagatgttctttgaaaccaaggagaacaaagacacaacataccagaatctctgggacgcattcaaagcagtgtgtagagggaaatttatagcactaaatgcctacaagagaaagcaggaaagatcaaaaattgacactctaacatcacaattaaaagaactagaaaagcaagagcaaacacattcaaaagaaatacaaactaccatcagagaatactacaaacacctctacacaaataaactagaaaatctagaagaaatggataaattcctcgacacatacactctcccaagactaaaccaggaagaagttgaatctctgaatagaccaataacaggatctgaaattgtggcaataatcaatagcttaccaaccaaaaagagtccaggaccagatggattcacagctgaattctaccagaggtacaaggaggaaatgcatataaacagagccaaagacaaaaaccacatgattatctcaatagatgcagaaaaggcctttgacaaaattcaacaacccttcatgctaaaaactctcaataaattaggtattgatgggacatatttcaaaataataagagctatctatgacaaacccacagtcaatatcatactgaatgggcaaaaactggaagcattccctttgaaaactggcacaagacagggatgccctctctcaccactcctattcaacatagtgttggaagttctggccagagcaataaggcaggagaaggaaataaagggtattcaattaggaaaagaggaagtcaaattgtcccctctttgcagatgacatgattgtatatgtagaaaacccccttccgtctcagccccaaaatcttctttaaggctggttaagcaacttcagcaaaagtcttcaggttacaaaatcaatgtgcaaaaatcacaagcattcctatacaccaacaacagacaaacagagagccaaatcatgagtgaactcccattcacaattgcttcaaagagaataaaatacctaggtatccaatttacaagggatgtgaaggacctcttcaaggagaactacaaaccactgctcaatgaaataaaagaggatacaaacaaatggaagaacattccatgctcatgggtaggaagaatcaatatcgtgaaaaatggccatactgcccaaggtaatttatagattc

SEQ ID NO: 121030 - DNA, 2431 bp, Homo sapiens
atggaggagagagatgcttttgaagcatgttcctgttcagttcagctgggcttgatttcaagctacagatttggtccagatgtgctccttatgtcttcttcaccctctttggaccaacaggctaaccaggatatttcttctcatggcagaagcaaaagaagggccagcccaactgcacaagtacatttgcaggctctgcttatatcaagtctactagtattctatcgagccaagcaagtcacagggccaaaccccacgtcaatgaagcagagagactttaaaccaacaaagatcaaaagagacaaagaaggccattacataatggtaaagggatcaattcaacaagaagagctaactatcctaaatatatatgcacccaatacaggagcacccagattcataaagcaagtcctgagtgacctacaaagagacttagactcccacacattaataatgggagactttaacaccccactgtcaacattagacagatcaacaagacagaaagtcaataaggatacccaggaattgaactcagctctgcaccaagcggaccttaatagacatctacagaactctccaccccaaatcaacagaatatacatttttttcagcaccacaccacacctattccaaaattgaccacatacttggaagtaaaggtctcctcagcaaatgtaaaagaacagaaattataacaaactatctctcagaccacagtgcaatcaaactagaactcaggattaagaatctcactcaaaaccgctcaacttcatggaaactgaacaacctggtcctgaatgactactgggtacataacgaaatgaaggcagaaataaagatgttctttgaaaccaatgagaacaaagacacaacataccagaatctctgggatgcattcaaagcagtgtgtagagggaaatttatagcactaaatgcccacaagagaaagcaggaaatatccaaaattgacaccctaacatcacaattaaaagaactagaaaagcaagagcaaacacattcaaaagctagcagaagccaagaaataactaagatcagagcagaactgaaggaaatagagacacaaaaaacccttcaaaaaattaatgaatccaggagctggttttttgaaaggatcaacaaaattgatagaccactagcaagactaataaagaaaaaaagagagaagaatcaaatcgacacaataaaaaatgataaaggggatatcaccaccaatcccacagaaatacaaactaccatcagagaatactgcaaacacctctatgcaaataaactagaaaatctagaagaaatggataaattcctcgacagactaaaccaggaagaagttgaatctctgaatagaccaataacaggagctgaaattgtggcaataatcaatagcttaccaaccaaaaagagtccaggaccagatggattcacagccaaattctaccagaggtacaaggaggaactggtaccattccttctgaaactattccaatcaatagaaaaagagagaatcctccctaactcattttatgaggccagcatcatcctgttaccaaagccgggcagagacataacaaaaaaagagaattttagaccaatatccttgatgaacattgatgcaaaaatcctcaataaaatactggcaaaccgagtccagcagcacaaaaagcttatccaccatgatcaagtgggcttcatccctgggatgcagggctggttcaatatacacaaatcaataaatgtaatccagcatataaacagaactaaagacaaaaaccacatgattatctcagtagatgcagaaaaggcctgtgacaaaattcaacaacccttcatgctaaaaactctcaataaattaggtattgatgggacgtatctcaaaataataagagctatctatgacaaacccacagccagtatcatactgaatgggcaaaaactggaagcattccctttgaaaactggcacaagacagggatgccctctctcaccactcctattcaacatagtgttggaagttctggccaggacaatcgggcaagagaaagaaataaagggtattcaattaggaaaagaggaagtcaaattgtccctgtctgcagatgacatgattgtatatctagaaaaacccatcatctcagcccaaaatctctttaagctgataagcaacttcagcaaagtctcagatacaaaatcaatagccaccagcaccaagaacactccccagtgcacaaacatgccccagtgcacgaacatactgaaactggcctcatcaaatcagtgtggcagcagccaggaatccagcctcagccagtccaaagtgtacctgcctggagccccaagcacccacatgacggctccatgcgccagcagcagcagtagcagcagcgcaggggccactgccagcaacttcatctag

SEQ ID NO: 121031 - DNA, 1921 bp, Homo sapiens
atgggagagtcagtacagagtctgctgactttagctcagaaaaggagtatgatgatacaagttgcagtggcaccaaggacacccactcttcttctgaaattatacaaagagaaagcttcaaagacacagctgaaaaaagtaaatctggtggttcaggatggccagtcactggaaagcattgaggtgcatgatcatgagcctgcagatacctacaaattgctgagtctcgttaaggaacctgcagaagagatcccaagagtgatccaaaatgtctttgggcacagaagcaagaaagaaaacctgaaggattcatatgggctcagacaaagcagcaccatggtggcaaccacatggaacaatgtgtctctgatgcagcaccattccttaagaagaccaaacagacacttgacagcaagttacccacatttccacttccaagaaattccagtgaatttcttccactctggaagggacagtgaatcatttggctggaatcagcacatcaaaaaagacaaagaaggccatcacataatggtaaagggatcaattcaacaagaagagctaactatgctaaatatatatgcacccaatacaggagcacccagattcataaaccaagtccttagtgacatagaaagagacttagactcccacaaaataataatgggagactttaacaccccactgtcaacattagacagatcaacgagacagaaagttaacaaggatacccaggaattgaactcagctctgcaccaagcggacctaacagacatctacagaactctccacccaaaatcaacagaatatacattgttttcagcaccacaccacacctactccaaaattgaccacatagttggaagtaaagcactcctcagcaaatggaaaagaacagaaattataacaaactgtctctcagaccccagagcaatcaaactagaactcaggattaagaaactcactcaaaaccgctcatctatatggaaactgaacaacgtgctcctgaatgactactgggtacataatgaaatgaaggcagaaataaagatattctttgaaaccaatgagaacaaagatacatcatgccagaatctctgggacacattcaaagcagtgtgtagagggaaatttatagcactaaatgcccacaggagaaagcaggaaagatctaaaattgataccctaacatcacaattaaaagaactagaaaagcaagagcgaacacattcaaaagccagcagaaggcaagaaataactaagatcagagcagaaatgaaggaaatagagacacaaaaaaacccttcaaaaaattaatgaatccaggagctggttttttgaaaagatcaacaaaattgatagaccgctagcaagactaataaagaagaaaagagagaagaatcaaatagatgcaataaaaaataataaaggggatattaccactgatcccacagaaatagaaactaccatcagagaatactacaagcacctctacacaaataaactagaaaatctagaagaaatggataaattccttgacacatacaccctcccaagactaaaccaggaagaagttgaatctctgaatagaccaataacaggctctgaagttgtggcaataatcaatagcttaccaaccaaaaaaagtccaggaccagatggattcacagccgaattccatcagaggtacaaggagaagctgataagcgaacttttgccaatgccaaatcatacagcattaaagaagcagactcaagacctctcagactgtaaagctatgtttttatactatcagtctgtatcagttcagactgctataataaattaccacagactgagaggcttaaacaacagaaatttatttctcacagttttggagtattcaagcctgagatcagggtgtgaacatagtcgggttctg

SEQ ID NO: 121032 - DNA, 1848 bp, Homo sapiens
atgtcactgaccaagatgttaatttgcgccgccctgctggggctgttctgcatgttacttgggctgcgctggcaggtcgcggaattgatcggcatgacgctggcgctctcctctacggcgattgccatgcaggcgatgaatgaacgcaatctgatggtgacgcaaatgggtcgcagtgcctttgcggtgctgctgttccaggatatcgcggcgatcccgctggtggcgatgattccgctactggcaacgagcagtgcctcgacgacgatgggcgcatttgctctctcggcgttaaaagtggcgggtgcgctggtgctggtggtattgctggggcgctatgtcacgcgtccggcgctgcgttttgtagcccgctctggcttgcgggaagtgtttagtgccgtggcgttattcctcgtgtttggctttggtttgctgctggaagaggtcggcttgtcgatggcgatgggcgcgtttctggcgggcgtactgctggcaagctcggaataccgtcatgcgctggagagcgatatcgaaccatttaaaggtttgctgttgggagctgtttttacaccgcgtgttgtagtgaatatatattcgagtgaactcaggacggctaagaactaccaagcaaatggaaaacaaaaaaagccaggggttgcaatcctagtctcggataagacagcctttaacccacagagatcaaaagagacaaagagggccattacaataatggtaaagggatcaattcaacaagaggagctaactatcttaaatatttatgcacccaatacaggagcacccagattcataaagcaagtcctcagtgacctacaaagagatttagactcccacacattaatgatgggagactttaacaccccactgtcaacattagacaagatcaacgagacagaaagtcaacaaggatacccaggaattgaactcagctctgcaccaagcagacctaatagacatctacagaattctccaccccaaatcaacagaatatacatttttttcagcaccacaccacacctattccaaaattgaccacatagttggaagtaaagctctcctcagcaaatgtaaaagaacagaaattataacaaactatctctcagaccacagtgcaatcaaactagaactcaggattaagaatctcactcaaagccgctcaactacatggaaactgaacaacctgctcctgaatgactactgggtacataacgaaatgaaggcagaaataaagatgttctttgaaaccaacgagaacaaagacatgacataccagaatctctgggacacattcaaagcagtgtgtagagggaaatttatagcactaaatgcccacaagagaaagcaggaaagatccaaaattgacaccctaacatcacaattaaaagaactagaaaagcaagagcaaacacattcaaaagctagcagaaggcaagaaataactaaaatcagagcagaactgaaggaaatagagacacaaaaagccattcaaaaaatcaatgaatccaggagctggggtcctccaggcaactgccagcagaattaccgtaatagtgagagtggcgaaaagagtgctcccgaaggccaggcccaacacgcagggcctacggaaggaaaagttcccaccttcctatatgtgggcaaggaaaagttcccaccttcctacctcctgacaaggaaaagttcccaccttcctacatgcggagaccctatatgcggggagaagtgctggagggtacccacaaccagtgggcaagggaacaaggcagaccagtggggcggagtaggtatcggggatacagaccatgattctgcagggaccctctgccaaag

SEQ ID NO: 121033 - DNA, 2238 bp, Homo sapiens
atgagtgaacttccattcataattgctacaaaaaggattaaatacctaggaatacaacttacaagggacgtgaaggatctcttcaaggaaaactacaaaccacttctcaaggaaataagagaggacacaaacaaatggaaaaacattccatgctcatggataggaagaatcgatattgtgaaaatggccatactgcccgaagtaatttatagatttaatgctatccccatcaagctaccaatgactttcttcacagaattagaaaaaactactttaaacttcatatggaaccaaaaaagggtctgtatagccaagacaatcctcagcaaaaagaacaaagctggaggcatcatgctacctaacttcaaactatactacaaggctacagtaaccaaaacagcatgggcatcctaccccatggctgcgcagttctttgctcctcagaagtacctaaacctcaccagtatgcttacacacctccctcccaccagtcaaatatcaacaggcacccccaccataaacaggtacacagagaacaggcttcaccccttcccgcccacacgcctgcaagatcctgttctcaagctgcagtctttgcagagtcgcaacccacgaacaagttacgaaatccattccaatggccgcagccggcaatggacaaacatgaaactagaacagcctggtgacagagcaagatcccatctcaggaaaaaaaaaaaaaaaaagaaggaggatgagaaggagaaggaggaaaaggaggaggagaaggagaagaaggaggaggagaaggagaagaaggagaaggagaagaaggaggaagagaaggagaagaaggagaaggagaagaaggagggggagaaggagaagagcacaggtgccaggcagacattcctgagacagtcacggctgcaatgcggttacaatgatgagaagcctttcctggccctggagctaactacatcccatgcaactggccccgacataggtactgctgtcataatgaccttgcaggtatctggggtttctgtcgtgaccacgtggcaggagctgctgccactgctgtctgatgctcgccccacagtggaaggagatgctaaattccgttacgcattagaggcttctggcaagcagagaccatgccagggggtccagagaggtccaaccagcagcaaagctcacccaggtctcaccagccaggcagttagaaaagggggcactgatgccatcgtgtcaaacaccaagataactgaagtctgccaagctctattcactactctgcaagcaggaaccatgccctataattttctgtttctggcagaatctggcacagtgctgagcacaaggacagtgctcgaatatctctgtagtggccttcttgccaagcatcagaatcctggcaccaaggtgctgcggaggccgaagcaagtacagcaagctctgagccttggggttccatctgcgttgaactggtgccgtctacagcacgtgtgcaaggtagcggggagacctgtgtttgcccaacaaggcccgggctccaggggccctaaccagggagaagtcattggtctacatgcaatgaccctgccggcctctgggactcacactccgcaagctcaagggcctggttggcaccacggaaaaatcttgaagcgctcacttggcgtgaacaaggagccaaagaacctgcccacctgcctggcccaccactactggtatctgaattgttgccctatttgttgtttaagaaatgctgacccttttcacaagacagtgctgaaagcgaagaaagaagttcctgcccctcctaaagccaaagccaaagcaaaggctttaaaggccaagaaggcagtgttgaaaggtgttcacaaccacaaaaaaaagaagatccacacgtcccccaccttccggcggcccaagacactgcaactccggaggcagcccaaatatccttggaagagcacccccaggagaaacaagcttgaccactatgctatcatcaagtttccgctgaccactgagtcggccatgaagaagacaggagacaataacacacgtgtgttcatggtggatgttaaagccaacaagcaccagatcaaacaggctgtgaagaggctctatgatattgacatgatcaaggtcaacaccctgatttggcctgatggagagaagaaggcatatgttccactggctcctgattacgatgctttggatgttgccaacaaaattgggatcatctaa

SEQ ID NO: 121034 - DNA, 2955 bp, Homo sapiens
atggagctgaaaaccaaggctcgagaactacgtgaagaatgcagaagcctcaggagccgacgcaatcaactggaagaaagggtatcagcaatggaagatgaaatgaatgaaatgaagcgagaagggaagtttagagaaaaaagaataaaaagaaatgagcaaagcctccaagaaatatgggactatgtgaaaagaccaaatctacgtctgattggtgtacctgaaagtgatgcggagaatggaaccaagttggaaaacactctgcaggatattatccaggaggacttccccaatctagcaaggcaggccaacgttcagattcaggaaatacagagaacgccacaaagatactcctcgagaagagcaactccaagacacataattgtcagattcaccaaagttgaaatgaagcaaaaaatgttaagggcagccagagagaaagactttaaaccaacaaagatcaaaagagacaaagaaggccattacataatggtaaagggatcaattcaacaagaggagctaactatcctaaatatatatgcacccaatacaggagcacccagattcataaagcaagtcctgagtgacctacaaagagacttagactcccacacattaataatgggagactttaacaccccactgtcaacattagacagatcaacaagacagaaagtcaacaaggatacccaggaattgaactcagctctgcaccaagcagacctaatagacatctacagaactctccaccccaaatcaacagaatatacatttttttcagcaccacaccacacctattccaaaattgaccacatagttggaagtaaagctctcctcagcaaatgtaaaagaacacaaattataacaaactatctctcagaccacagtgcaatcaaactagaactcaggattaagaatctcactcaaagccgctcaactacatggaaactgaacaacctgctcctgaatgtctactgggtacataacgaaatgaaggcagaaataaagatgttctttgaaaccaatgagaacaaagacacaacataccagaatctctgggacacattcaaagcagtgtgtagagggaaatttatagcactaaatgcccacaagagaaagcaggaaagatccaaaattgacaccctaacatcacaattaaaagaactagagaagcaagagcaaacacattcaaaagctagcagaaggcaagaaataactaaaatcagagcagaactgaaggaaatagagacacaaaaaacccttcaaaaactcaatgaatccaggagctggttttttgaaaggatcaacaaaattgatagaccgctagcaagactaataaagaaaaaaagagagaagaatcaaatagacacaataaaaaatgataaaggggatatcaccaccgatcccacagaaatacaaactaccatcagagaatactacaaacacctctacgcatataaactagaaaatctagaagaaatggatacattcctcgacacatacactctcccaagactaaaccaggaagaagttgaatctctgaatagaccaataacaggatctgaaattgtggcaataatcaatagcttaccaaccaaaaagagtccaggaccagatggattcacagccaaattctaccagaggtacaaggaggagctggtaccattccttctgaaactattccaatcaatagaaaaagagggaatcctccctaactcattttatgatgccagcatcattctgataccaaagccgggcagagacacaaccaaaaaagagaattttagaccaatatccttgatgaatattgatgcaaaaatcctcaataaaatactggcaaaccgaatccagcagcacatcaaaaagcttatccaccatgatcaagtgggcttcatccctgggatgcaaggctggttcaatatacgcaaatcaataaatgtaatccagcatataaacagagccaaagacaaaaaccacatgattatctcaatagatgcagaaaaagcctttgacaaaattcaacaacccttcatgctaaaaactctcaataaattaggtattgatgggacgtatttcaaaataataagagctatctatgacaaacccacagccaatatcatactgaatgggcaaagactggaagcattccctttgaaaactggcacaagacagggatgccctctctcaccactcctattcaacatagtgttggaagttctggccagggcaatcaggcaggagaaggaaataaagggtattcaattaggaaaagaggaagtcaaattgtccctgtttgcagacgacatgattgtttatctagaaaaccccatcgtctcagcccaaaatctccttaagctgataagcaacttcagcaaagtctcaggatacaaaatcaatgtacaaaaatcacaagcattcctatacaccaacaacagacaaacagagagccaaatcatgagtgaactcccattcacaattgcttcaaagagaataaaatacctaggaatccaacttacaagggatgtgaagaacctcttcaaggagaactacaaaccactgctcaaggaaataaaagaggatacaaacaaatggaagaacattccatgctcatgggtaggaagaatcaatatcgtgaaaatggccatactgcccaaggtaatttacagattcaatgccatccccatcaagctaccaatgactttcttcacagaattggaaaaaactactttaaagttcatatggaaccaaaaaagagcccgcattgccaagtcaatcctaagccaaaagaacaaagctggaggcatcacactacctgacttcaaactatactacaaggctacagtaaccaaaacagcaagaccccatgactggtatagaactgaaagtaaatcaagctggacttatgaaggattcctctctccattcgtggatgaatttgagtggcactggaacaag

SEQ ID NO: 121035 - DNA, 2158 bp, Homo sapiens
agaagtccttaaaggacctgatggagctaaaaatcatggcacaagaactatgtgatgaatggacaagcctcagtagccgatgcaatcaactggaagaaagggtatcagtgatggaagatgaaatgaatgaaatgaaagacaagcataggcccaaaataaaggaatggaggaagatctaccaagcaaatggacaacaaaaaaagacaagggttgcaaacctagtctcagataaaacagagtttaaaccaacaaagatcaaaagagacaaagaaggccattacataatggtaaagggatcaattcaacaagaagagctaactatcgtaaatatatatgcacccaatacaggagcacccaggttcataaagaaagtccttagtgacctacaaagagccttagactcccacacaataataatgggagactttaacaccccactatcaacattagacagatcaacgagacagaaagtcaacaaggatatccaggaattgaactcagctctgcaccaagcggacctaatagatatctacagaactctccaccctaaatcaacagaatatacattcttttcagcaccacattacacctatcccaaaattgaccacatagttggaagtaaagcactcctcagcaaatgtaaaagaacagaaattataacaaactgtctctcagcaccacagtgcaatcaaactagaactcaagattaagaaactcactcaaaacctctcaactacatggaaactgaacaacctgctcctaaaggactactgggtacataaagaaatgaaggcagaaataaagatgttctttgaaaccaacaagaacaaagacacaacataccagaatttctgggacacattcaaagcagtgtgtagagggaaatttatagcactaaatgcccacaagagaaagcaggaaggatttaaaatagacaccctaacattacaattaaaagaactagagaagcaagagcaaacacattcaaaagctagcagaaggatcaacaaaattgatagaccgctagcaagactaataaagaaaaaaagagagaagaatcaaatagacacaataaaaaatgataaaggggatatcaccaccgatcccacagaaatacaaactaccatcagagaatactacaaacacctctatgcaaataaactagaaaatctagaagaaatggataaattcctggacacgtacactctcccaagactaaaccaggaagaagttgaatctctgaatagaccaataacaggagctgaaattgtggcaataatcaatagcttaccaaccaaaaagagtccaggaccagatggattcacagccaaattctaccagaggtacaaggaggaactggtaccattccttctgaaactattccaatcaatagaaaaagagggaatcctccctaactcattttatgaggccagcatcatcctcataccaaagcctggcagagacataacaaaaaaagagaattttagaccaatatccctgatgaacatcgatgcagaaatcctcaataaaatactggcaagccaaatgcagcagcacatcaaaaagcttatctaccacaatcaagttggcttcatccatgggatgcaaggctggttcaacatacacaaatcaaataaatgtaatccagcatataaacagaaccaaagacaaaaaccatacgattatctcactagatgcagaaaaggcctttgacaaaattcaacaacccttcatgctaaagctaaaaactctcaataaactaggtattgatgggatgtatctcaaaataataagagctatctatgacaaacccacagccaatatcatactgcattggcaaaagctggaagcattccctttgaaaactggcacaagacagggatgccctctctcaccactcctgttcaacatagtattggaagttctagccagggcagtcaggaaagagaaagaaataaagcgtactcaaataggaagagaggaaatcaaattatctctctttgcagatgacatgattgtatatttagaaaaccccattgtctcagcccaaaatctccttaagctgataagcaacttcaccaaagtctcaggatacaaaatcaatgtgaaaaaatcacaagcattcctatacaacaatagcagacaaacagacagctaa

SEQ ID NO: 121036 - DNA, 10450 bp, Homo sapiens
  misc_feature (1)...(10450): n = a,t,c or g
aacgaaaactaacaaacaggaaggacatccacatcaaaaacccatctgtatgtcaccatcatcaaagaccaaaggtagataaaaccacaaagatggggaaaaaacagagcagaaaaactggaaactctaaaaatcagagcacatctcctactctaaaggaaagcagctcctcaccagcaacagaacaaagctggacagagaatgactttgacgagttgagagaagaaggcttcagaagatcagactactccgagctacaggaggaagttcaaaacaatggcaaagaagttaaaaactttggaaaaaaattagatgaatggataactagaataaccaatgcaaagaagtccttaaaggacctgatggagctgaaaaccaaggcacgagaactatgtgatgaacgcacaagcctcagtagccaatgcaatcaactggaagaaagggtatcagtgatggaagatgaaatgaatgaaataaagcaagaagagaagtttagagaaaaaagaataaaaagaaacgaacaaagcctccaagaaatatgggactatatgaaaagaccaaatctacgtctgattggtgtacctgaaagtgacggggagaatggaaccaagttggaaaacactctgcaggatattatccaggagaacttccccaatctagcaaggcaggccaacattcaaattcaggaaatacagagaacgccacaaagatactccttgagaagagcaaccccaagacacataattgtcagattcaccaaagttgaaatgaaggaaaaaatgttaagggtagccagagagaagggtcgggttacccacaaagggaagcctgtcagactaacagctgatctcttggcagaaactctacaagccagaagacaagacacacataggctcaaaataaagggatggaggaagatttaccaagcaaatggaaaacgaaaaaacggcaggggttgcaatccctagtctctgataaaacagactttaacccaacaaagatcaaaagagacaaagaaggccattacataatggtaaagggatcaattcaacaagaagagctaactatcctaaatatatatgcacccaatacaggagcacccagattcataaagcaagtcctgagtgacctacaaagagacttagactcccacgcattaataatgggagactttaacaccccactgtcaacattagacagatcaacgagacagaaagtcaacaaggatacccaggaattgaactcagctctgcaccaagcggacctaatagacttctacagaactctccacccccaaatcaacagaatatacatttttttcagcaccgcaccacacctattccaaaattgaccacatagttggaagtaaagctctcctcagcaaatgtaaaagaacaggaattataacaaactatctctcagaccacagtgcaatcaaactagaactcaggattaagaatctcactcaaaacggctcaactacatggaaactgaacaacctgctcctgaatgactactgggtacataacgaaatgaaggcagaaataaagatgttctttgaaaccaacgagaacataagacacaacataccagaatctctgggacacatttaaagccagtgtatagagggaaatttatagcactaaatgcccacaagagaaagcagggaaagatccaaaatggacaccctaacagacatcacaattaaaagaattagaaaagcaagagcaaacacattcaaaagctagcagaaggcaagaaataactaagatcagagcagaactgaaggaaatagcgacccaaaaaaacacttcaaaaaattaatgaatccaggagctggttttttgaaaggatcaacaaaattgataggccattagcaagactaataaagaagaaaagagagaagaatcaaatacagtcaataaaaaatgataaaggggatatcactaccaatgccacagaaatacaaactaccatcagagaatactataaacacctctacgcaaataaactagaaaatctagaagaaatggatacattcctcgacatatacactctcccaagactaaaccaggaagaagttgaatctctgaatagaccaataacaggagctgaaattgtggcaataatcaatagtttaccaaccgtgggcttcatccctgggatgcaaggctggttcaatatacgcaaatcaacaaatgtaatccagcatataaacagagccaaagacaaaaaccacatgattatctcaatagatgcagaaaaagcctttgacaaaattcaacaacccttcatgctaaaaactctcaataaattaggtattgatgggacgtatttcaaaataataagagctatctatgacaaacccacagccaatatcatactgaatgggcaaaaactggaagcattccctttgaaaactggcacaagacagggatgccctctctcaccgctcctattcaacatagtgttggaagttctggccagggcaatcaggcaggagaaggaaataaagggtattcaattaggaaaagaggaagtcaaattgtccctgtttgcagatgacatgattgtttatctagaaaaccccatcatctcagcccaaaatctccttaagctgataagcaacttcagcaaagtctcaggatacaaaatcaatgtacaaaaatcacaagcattcttatacaccaacaacagacaaacagagagccaaatcatgagtgaactcccattcacaattgcttcaaagagaataaaatacctaggaatccaacttacaagggatgtgaaggacctcttcaaggagaactacaaaccactgctcaaggaaataaaagaggatacaaacaaatggaagaacattccacgctcatgggtaggaagaatcaatatcgtgaaaatggccatactgcccaaggtaatttacagattcaatgccatccccatcaagctaccaatgactttcttcacagaattggaaaaaactactttaaagttcatatggaaccaaaaaagagcccgcatcgccaagtcaatcctaagccaaaagaacaaagctggaggcatcacactacctgacttcaaactatactacaaggctacagtaaccaaaacagcatggtactggtaccaaaacagagatatagatcaatggaacagaacagagccctcagaaataatgccgcatatctacaactatctgatctttgacaaacctgagaaaaacaagcaatggggaaaggattccctatttaataaatggtgctgggaaaactggctagccatatgtagaaagctgaaactggatcccttccttacgccttatacaaaaatcaattcaagatggattaaagatttaaacattagacctaaaaccataaaaaccctagaagaaaacctaggcattaccattcaggacataggcgtgggcaaggacttcatgtccaaaacaccaaaagcaatggcaacaaaagccaaaattgacaaatgggatctaattaaactaaagagcttctgcacagcaaaagaaactaccatcagagtgaacaggcaacctacaacatgggagaaaattttcgcaacctactcatctgacaaagggctaatatccagaatctacaatgaactcaaacaaatttacaagaaaaaaacaaacaaccccatcaaaaaacaagaaacattgaataaaatatttggtgtaaatgtcttgaatggncctaaatgctcccaattaaaagacacagactggcaaattggataaagaggtcaagaccccatcagtgtgctgtattgaggaaaccccatctcacgtgcagagacgcacataggcacaaaataaaaggatggaggaagatctaccaagcaaatggaaaacaaaacaaaacaaaacaacaaaaaaagcaggggttgcaaatcctagtctctgataaaagagactttaaaccaacaaagatcaaaagagacaaagaaggccattacataatggtaaagggaccaattcaacaaggaagagctaactatcctaaatatatatgcaccccaatacaggagcacccagattcataaagcaagtcctcagtgacctacaaagagacttagactcccacacattaataactgggagacctttaacaccccactgtcaacattagacagatcaatgagacagaaagtcaacaaggatacccaggaattgaactcagctctgcaccaagcggacctaatagacatctacagaactctccaccccaaatcaacagaatatacatttttttcagcacccacaccacacctattccaaaattgaccacatacttggaagtaaagcactcctcagcaaatgtaaaagaacagaaattataaccaaactatctctcagacccacagtgccaatcaaactgaaactcaggattaagaacctcactcaaaaccactcaactaccatggaaactgaacaacctgctcctgaatgactactgggtatataacgaaatgaaggcagaaataaagaaagatgttctttgaaaccaaaagagaacaaaggacacaacataccagaatctctgggacgcattcaaagcagtgtgtagagggaaatttataagccctaaatgcccacaagagaaagcaggaaagtatctaaaattgacaccctaacatcacaattaaaaaaaactagagaagcaaagagcaaacaaacacattcaaaagctagcagaaggcaagaaataactaaaatcagagcagaactgaaggaaatagagacacaaaaagcccttcaacccttcaaaaaaaatcagtgaatccagggagctggtttttttgaaaagatcaacaaaatagatagatagaccgctagcaagaactaataaagaaaaaaagagagaagaatcaaatagacgcaataaaaaatgataaaggggatatcaccaccaccgatcccacagaaatacaaactaccatcagagaatactacaaacacctctacgcaaataaactagaaaatctagaagaaatggataaattcctggacacatacactctcccaagattaaacccaggaagaagttgaatctctgaatagaccaataacaggagctgaaattgtggcaataatcaatagtttaccaaccaaaaaagagtccaggaccagatggattcacagccgaattctaccagaggtacaagggaggagctggtaccattccttctgaaactattccaatcaatagaaaaagagagaatcctccctaactcattttatgaggccagcatcattctgataccaaagccgggcagagacacaacaaaaaaaagagaattttagaccaatatccttgatgaacattgatgcaaaaatcctcaataaaatactggcaaaccaaatccagcagcacatcaaaaagcttatccaccatgatcaagtgggcttcatccctgggatgcaaggctggttcaatatacgcaaatcaataaatgtaatccagcatataaacaagagccaaagacaaaaaccacatgattgtctcaatagatgcagaaaaagcctttgacaaaattcaacaacccttcatgctaaaaactatcaataaaataggtattgatgggatgtatttcaaaataataagagctatctatgacaaaaccacagccaatatcatactgaatgggcaaaaactggaagcattccctttgaaaaccggcacaagacagggatgccctctctcacctcaccactcctattcaacatagtattctgccccatagtgttctggccagggcaatcaggcaagagaaggaaataaagggtattcaattaggaaaagaggaagtcaaattgtccctgtttgcagatgacatgattgttgatctagaaaaccccatcgtctcagcccaaaatctccttaagctgataagcaacttcagcaaagtctcaggatacaaaatcaatgtacaaaaatcaccaagcattcctatacaccaacaacagacaaacagagagccaaatcatgagtgaactcccattcacacttactacaacaagaataaaatacctaggaatccaacttacaagggatgtgaaggacctcttcacggagaactacaaaccactgctcaatgaaataaaagaggatacaaacaaatggaagaacattccatgctcatgggtaggaagaatcaatatcgtgaaaatggccatactgcccaaggtaatttatagattcaatgccatccccatcaagctaccaatgactttcttcacagaattggaaaaaactactttaaagttcatatggaaccaaaaaagagctcgtatagccaagacaattctaagccaaaagaacaaagctggaggcatcacgctacctgacttcaaactatactacaaggctacagtaaccaaaacagcatggtactggtaccaaaacagatatatagaccaatggaacagaacagagaacctattcactgccaccaataagacggcacacctacaactatctgacctttgacaaacttgacaaaaacaagcaatagagaaagaattccctattcaataaatggtcctaggataactggctagccatatggagaagactgaaagtggatcccttccttacaccttatacaaaaatcaattcaagatggattaaagacttaaacgttagacctaaaaccataaaaaccctagaagaaaacctaggcattaccattcaggacataggcgtgggcaaggacttcatgtccaaaacaccaaaagcaatggcaacaaaagccaaaattgacaaatgggatctaattaaactaaagagcttctgcacagcaaaagaaactaccatcagagtgaacaggcaacctacaacatgggagacaattttcacaacctactcatctgacaaagggctaatatccagaatctacaatgaactcaaacaaatttacaagaaaaaaacaaacaaccccatcaaaaagtgggcgaaggacatgaacagacacttctcaaaagaagacatttatgcagccaaaaaacacatgaaaaaatgctcatcatcactggccatcagagaaatgcaaatcaaaaccactatgagatatcatctcacaccagttagaatggcaatcatgaaaaaagtcaggaaacaacaggtgctggagaggatgtggagaaataggaacacttttacactgttggtgggactgtaaactagttcaaccattgtggaagtcagtgtggcgattccttagggatctagaactagaaataccatttgacccagccatcccattactgggtatatacccaaatgactataaatcatgctgctataaagacacatgcacacgtatgtttattgcggcattattcacaatagcaaagacttggaaccaacccaaatgtccaacaatgatagactggattaagaaaatgtggcacatatacaccatggaatactatgcagccataaaaaatgatgagttcatgtcctttgtagggacatggatgaaattggaaaccatcattctcagtaaactatcgtcttcgctgaaacatgggcactcgtgggaagtgctttctgttccccaggctcagttattttcatatcttcagctgctgctattacattcccatctcttggaaggagccagagccagagaaatacagggttcctctgtggccaagggaaaaatgcctgccaagaatgctgaacttctggtgaagaaccagatgatttcttggattggccagattaattccaggcccaaggagcaaaagaatcctaaaacagagacagaggctgtgagaagcgaaaggcgctgtggatgttgctgccctagcgtttggaagcccgaacattcacatgacttgcttcaatctcatagagagccagcagctgagctgtgggtccaagtgtcaggacacctcgcccatatctctgtgtgcgaaaggatgtgcatgatgtggtcccaatcctcaggcccagtgctacttctctattcatgccgagagcagcaggccagggaggccagaaagcaggtgggacagagaaatcttcaggcccatgaaaagatgatgtgtagagattacagccaccaaatggcttcagaattattcactgagtgcaatagacctgtcgaaaagggtgtccacatttgtcaaaaaggaacactttccagttccaaaattagaggtgaaacctgttgtacccagctctgccgaacattccacactcctcagtggaggaaggagttggctccatctaggcgaggtctgaggatctggaaggtgctcagctcccatagctattggcacgtttatttacatgcagatctaacacctacagaggacttaagttcacagaggcatgaggtggagagtaacaaagcatctgctattcaacaagaagagctaactatcctaaatatatatgcacccaatacaggaggacccagattcataaagcaagtcctgagtgacctacaaggagacgtagactcccacacaataataatgggagactttaacaccccactgtcaacattagacagatcaacaagacagaaagttaacaaggatacccaggaattgaactcagctctgcaccaagcagacctaatagacatctacagaactctccaccccaaatcaaaagaatttacattttttttcagcaccacaccacacctattcccaaaattggaccaccatagttggaagtaaagctctcctcagcaaatgtaaaagaacagaaattataacaaactatctctcagaccacagtgcaatcaaactagaactcaggattaagaatctcactcaaagccgctcaactacatggaaactgaacaacctgctcctgaatgactactgggtacataacgaaatgaaggcagaaataaagatattctttgaaaccaacgagaacaaagacaccaacataccagaatttttgggacgcattcaaagcagtgtgtagagggaaatttatagcactaaatgcctacaagaggaaagcaggaaagatccaaaattgacaccctaacatcacaattaaaagaactagaaaagcaagagcaaacacattcaaaagctagcagaaggcaagaaataactaaaatcagagcagaactgaaggaaataaagacaaaaaaaaaaaccctccaaaaaattaatgaatccaggagctggttttttgaaaggatcaacaaaattgatagaccgctagcaagactaataaacaagaaaagagagaagcatcaaatagacgcaataaaaaatgataaaggggatatcaccaccgatcccacagaaatacaaactaccatcagagaatactacaaacacctctacgccaataaactagaaaatctaggagaaatggataaattcctcgacacatacaccctcccaagactaaaccaggaagaagttgaatctctgaatagaccaataacaggctctgaaattgtggcaataatcaatagtttaccaacaaaaaagagtccaggaccagatggattcacagccgaattctaccagagccgggcagagacacaaccaaaaaaagagaattttagaccaatatccttcatgaacattgatgcaaaaatcctcaataaaatactggcaaaccaaatccagcagcacatcaaaaagcttatccaccatgatcaagtgggcttcatccctgggatgcaaggctggttcaacatacgcaaatcaataaatgtaatccagcatacaaacagaaccaaagacaaaaaccacatgattatctcaatagatgcagaaaaggcctttgacaaaattcgacaacccttcatgctaaaaactctcaagaaattaggtattgatgggacgtatctcaaaataataagagctatctatgacagacccacagccaatatcatactgaatgggcaaaaactggaagcattccctttgaaaatgggcacaagacagggatgccctctctcaccactcctattcaacatagtgttggaagttctggccagggcaatcaggcaggagaaggaaataaagtgtattcaattaggaaaagagaaagtcaaatcgtccctgtttgcagatgacatgactgtatatctagaaaaccccatcatctcagcccaaaatctccttaaggtgataagcaacttcagcaaggtctcaggatacaaaatcaatgtacaaaaatcacaaccattcttatacaccaataacagacaaacagagagccaaatcatgagtgaactcccattcacaattgcttcaaagagaataaaatacctaggaatccaacttacaagggatgtgaaggacctcttcagggagaactacaaaccactgctcaaggaaataaaagaggatacaaacaaatggaagaacattccacgctcatgggtaggaagaatcaatatggtgaaaatggccatactgcccaaggcctga

SEQ ID NO: 121037 - DNA, 1077 bp, Homo sapiens
atggactggtaccagtctggtggcctgttaggaaccggctgcacagcaggagttgagtggcaggatgatttcttacattccactaagagagcctcagaagatttggttagagcagagattatagtagatgacacaatctgggagctagaaggttgtgcagaggtcaagcgtcattgtgtcattgatgggaaaagagaggcccagagaggggaagcaggatcagaagccacagccaaggctgatgccacagggagccgcagcctcaaacccgctggaggtagagggtggaatgaaggttatgatgaaaggaatgcaaaacatgccttcagacccctgcccagactgaagttcaagagagtgaggggaaacaaactgcggtatgaaactaacatctgcacagcagtcatcggcacagcagtaacattacttggatatccagggcagaatcgatcaagtactcatacggttatccttttttcctccacagtgaccgctggaaagggaacaccttgcaacttctcccacgaggctttcgatcctaatctaagaatccccgtaagggcttatctgaaccgggtagaatcaaatattgtgatagaaccccagggcctgggagaagcagcagccccccacctccccccaagaattctgtctggtatgcttcgtggtacatctgcagaagtctaccagagaggccttgaacaacaaaaacatcaagccattgttaagtaccttcagccaggtacctggcagataaatcattcatcatgtgaaaacgttttagctattatttctcttgctattgggggagtaactgaaggtatttgtaccgcatctacaccttttgtattgttgggagatgttttggattgtcttcctttggatcagtgtgacacaatattcacttttgtggaaaaaaatgttgctacttggaaatcaggtacagcctctctccctgctgctttcatggctggtgttgagcatctgtggcttttccaggtgaacggtgcaaactgtcagtggatctacccttctggggtctggaggacggtggccctcttctcacagctccactag

SEQ ID NO: 121038 - DNA, 315 bp, Homo sapiens
atggcatggtgtttgggaactggggagtgggaactagaaagggatgtctgtggcccaggtatttgtaccgcatctacaccttttgtattgttgggagatgttttggattgtcttcctttggatcagtgtgacacaatattcacttttgtggaaaaaaatgttgctacttggaaatcaggtacagcctctctccctgctgctttcatggctggtgttgagcatctgtggcttttccaggtgaacggtgcaaactgtcagtggatctacccttctggggtctggaggacggtggccctcttctcacagctccactag

SEQ ID NO: 121039 - DNA, 873 bp, Homo sapiens
tcagtcacgcgccttgctttggccaatgttggtggatgtgatacagccaaagccttggaaagcaccagggtcactgggcttgccctcttgcatatctgccatcaccgtgcagagttcccctggccttcgcctctgttcctgtggccagggccctagagtgaacacacctggaacaaagctgccccagccaaacagacctgtctccctgtctttttcgcaaatgaagttattgacgtcttcacattggaaatcgttccactgcccagcataaatcaacccagcacagtcttctcctggcccatggccatgaccccagttatccggctgtccagctttccaatttctcagctttgggtagaaatctttgctttcctccggaaatacagcttcatcttctcctttgtggtttttgtgctggtgctttcttaatctggtcttgcaagcaaagctaccagatggctttcgtcctgcgcaccgagtctgagtcagtgcttccttctccaccgtgtaactccaacttagagttactgccactcggcttctatcggccacgtctctcattgctttacagttcacacttgcggtcattatttcagtggagcttttcaacagctctgtgagacaggtattatttctatttcggagcagagagaacagcgcccttgagccacagggctcatacatccggagcctatcaccactccgcatcttaagctcccgggatgaccgcggactggcggcccaggaccactgctccagctgtttccccaggtaatccacctgccttgggttaccttttagcgcggcccagttagccgcaaccagccaccatttacccgctttccccaaaccaggaaaaccacagaaacgcat

SEQ ID NO: 121040 - DNA, 493 bp, Homo sapiens
ataatcgcacgggtactggcggaggagaatttatgtgattcagtccctgtgcacaatgaaaatccagcatatcacccctggggaacattttagttcccaagtctttgggtaatgacggatggtaaaaaacactagctgtcaattttttttcagtaattggttttcagtgcttttttttttttcaatctgatgagaaggtgatgcaattagaaaggagtgtcctttgcctttgagagctgaaaatttgctcatgtgatcccatcacagtccgttataatgcagatgacagtactgtctccctgtctttttcgcaaatgaagttattgacgtcttcacattggaaatcgttccactgcccagcataaatcaacccagcacagtcttctcctggcccatggccatgacccccagttatccggcttgcccagctttccaattttgtgtagtctggaagatgtcccatccagccacttccattcattttcacgctctg

SEQ ID NO: 121041 - DNA, 2023 bp, Homo sapiens
cccacgcgtccggccgcagcgcagtggcgggcacgcgcagccgagaagatgtctccgacgccgccgctcttcagtttgcccgaagcgcggacgcggtttacgaagtctaccagagaggccttgaacaacaaaaacatcaagccattgttaagtaccttcagccaggtacctggcagtgaaaatgaaaaaaaatgtacccttgaccaagctttcagaggtattctagaagaagaaattataaatcattcatcatgtgaaaacgttttagctatttatttctcttgctatgggggaagtaactgaaggtatttgtaccgcatctacacattttgtattgttgggagatgttttggattgtcttcctttggatcagtgtgacacaatattcacttttgtggaaaaaaatgttgctacttggaaatcaaatacattctattctgctgggaaaaattacttactacgtatgtgcaatgatctcctaagaagattgtctaaatcccagaatacagtcttctgtggacggattcagctctttttggccaggcttttccctctgtctgagaaatcaggtcttaacttgcagagtcagtttaatctggaaaatgtcactgttttcaatacaaatgagcaggaaagcaccctgggtcagaagcacactgaagatagagaagaaggaatggatgtagaagaaggcgaaatgggagatgaggaagctccaacaacgtgctctattccaattgattacaacctgtatcgaaaattctggtcacttcaggattacttcaggaaccctgtgcaatgctatgagaagatttcatggaaaacttttctcaagtattctgaagaagttttagctgtttttaagagttataaattagatgatactcaggcctcaagaaaaaagatggaagaattgaaaacaggaggagaacatgtatattttgcaaaatttttaacaagtgaaaagctgatggatttacaactgagtgacagtaactttcgtcgacacatcctgttgcagtatctcattttattccaatatctcaaggggcaggtcaaattcaaaagttcaaactatgttttaactgatgagcaatcactttggattgaagatactacaaaatcagtttatcaactactatctgaaaacccccccgatggagaaagattttcaaagatggtagagcatatattaaacactgaagaaaactggaactcgtggaaaaatgaaggttgcccaagttttgtgaaagaaagaacatcagataccaaacctacgagaataattcggaagagaacagcacccgaggacttcctagggaaaggacccaccaaaaaaattctgacgggaaatgaggagttaacaaggctttggaatctttgccctgataatatggaagcctgtaaatcagagacaagggaacacatgcccactttggaggaattctttgaagaagccattgaacaggcagaccctgaaaatatggcggaaaatgaatataaggctatgaacaattcaaattatggttggagagccctgaaactattagcacggagaagccctcacttcttccagccaaccaaccagcagtttaaaagtttacaagaatatcttgaaaatatggtaataaagctagccaaggaattaccgcctccttctgaagaaataaaaacaggtgaggatgaagatgaggaagataatgatgctctactgaaggaaaatgaaagtcctgatgttcggcgagacaaacctgtaacaggagaacaaatagaggtatttgccaacaagctgggtgaacaatggaagattctggctccctacttggaaatgaaagactcagaaattaggcagattgagtgtgacagtgaagacatgaagatgagagctaagcagctcctggttgcctggcaagatcaagagggagttcatgcaacacctgagaatctgattaatgcactgaataagtctggattaagtgaccttgcagaaagtctaactaatgacaatgagacaaatagttag

SEQ ID NO: 121042 - DNA, 1521 bp, Homo sapiens
atggacccttcactagcgggtgcaaataaggacccagagcccagggttgctgaagacaaggaggagtcaacaggagctgtgggcagagtagctaagtatcctcgaacaaatagtttggcatctctggccctacatgtcctcatttatgcaatgagaattctaccgcacaggcaaggtccaccgggccccaggggtccaagaggtgacagaggatcccagggaccccctggcccaactggcaacaagggacagaaaggagagaagggggagcctggaccacctggccctgcgggtgagagaggcccaattggaccagctggtccccccggagagcgtggcggcaaaggatctaaaggctcccagggccccaaaggctcccgtggttcccctgggaagcccggccctcagggctccagtggggacccaggccccccgggcccaccaggcaaagagggactccccggccctcagggccctcctggcttccagggacttcagggcaccgttggggagcctggggtgcctggacctcggggactgccaggcttgcctggggtaccaggcatgccaggccccaagggcccccccggccctcctggcccatcaggagcggtggtgcccctggccctgcagaatgagccaaccccagcaccggaggacaatggctgcccgcctcactggaagaacttcacagacaaatgctactatttttcagttgagaaagaaatttttgaggatgcaaagcttttctgtgaagacaagtcttcacatcttgttttcataaacactagagaggaacagcaatggataaaaaaacagatggtagggagagagagccactggatcggcctcacagactcagagcgtgaaaatgaatggaagtggctggatgggacatctccagactacaaaaattggaaagctggacagccggataactggggtcatggccatgggccaggagaagactgtgctgggttgatttatgctgggcagtggaacgatttccaatgtgaagacgtcaataacttcatttgcgaaaaagacagggagacagtcttcacgcacatctattgttcctgcttgagaaatgaggaaactgaggctcaggttgaagacttgcccatggctcacgtatctgtcacagtcactttccaaaaagcaaatctgatcaggttccccactcaggtccccaaatctgaatccatcctacctctcaccctcggcttaaaatcttccaaacaatcctggttgggctcaggacatacctgcaggggccgtaaggcacttggtacctggttcccaactccaagtctagccttctttccaggtaggccccggtgtctacggttcccatctttgcgtccaggttcctcccacaacatgtgggaatcatgggggctacaactcaaggggacagggccacctccactacagaaagagcccaaatgttcaggacagagctcctcagagcccaaggtatgtgccaaaaggctcttcctggatgaattatctgattga

SEQ ID NO: 121043 - DNA, 1329 bp, Homo sapiens
gtagcctgcttcaggatatcagagttatttagatgagctgacattcactctatgcttagaaagatggagttgaaatttaccatgtggtaaagaggaggaagagtatgcacaaaacaacattgtgaacaaaaccatggaaggatgaacatggcatggtgtttgggaactggggagtgggaactagaaagggatgtctgtggcccaggtatttgtaccgcatctacaccttttgtattgttgggagatgttttggattgtcttcctttggatcagtgtgacacaatattcacttttgtggaaaaaaatgttgctacttggaaatcacacactgaagatagagaagaaggaatggatgtagaagaaggcgaaatgggagatgaggaagctccaacaacgtggattcccaaaaaggccttcacacctaaatatatgccagttttgggcctgatgttactttcaacttttgatatagatttgatcaccagagatgtgacagtcttcctgagaatctccccaaacgcactagaagctcttctgttcctctgtccacgggacctcatttgtaaagaaaagctctgcattactgtgcaaataacattcaatttctgttttgctaaaagaaattggaaagctggacagccggataactggggtcatggccatgggccaggagaagactgtgctgggttgatttatgctgggcagtggaacgatttccaatgtgaagacgtcaataacttcatttgcgaaaaagacagggagacaggcaggtgggacccacagtcctctgggcctaaactgctgaagcctgcaacacaaggcgggcacggcattccaacacctcttcaggctcaacagcctttagaggctacactgagtcctctttttcatgctcttcctggttttcaagtgtccaattaaaatttgtcttcagaagaaacttgaaaataagtatctgatgccgtcatcaggatagactagtattagctttcgcagctgaagttattgctctcccagccctaataataacttaccaagtgcttattatttatcaggcactggtccaagtccttcaatcagattgtctcacctgatcctcccaacagccctaggaagcaggtcttactacactccccatttcacagggactggggcttggggaggtgatgcggtttcctgggtcactccattactgagtagtgagacaggattcagacgcaagctttgaaaatgttctaattttctttagaaggaagggcccttcttaatagcacactgaataaaatcaaatgaataatcacacattacaagatgcctcctatacgtctt

SEQ ID NO: 121044 - DNA, 398 bp, Homo sapiens
ggagcctgggctcaggtgtgtcctgtgggaagtgattgctccctggctagcagaaacagaggaaagcggattgttggccccaggacccagctctgagaagctgggcttgtttccctgaactctgccttggaggaaagcaatggaaggggaaggggtaagaaacttcaaggaacttcgagccaaatttcaaaatcttgatgctccacctcttccaggacctattaaattcccagcaggtgtttctccaaagggtgacattggaggcacacagtcaactcaaattttgggccaatgggaaacccctctcatccaaccacaagcagcgcacaccatactgttccacttattgagtcccagccctcttccacctcaaaaaaataaagttggctcagaagagt

SEQ ID NO: 121045 - DNA, 486 bp, Homo sapiens
cctcctgagaggagcccggcaagcagcccctgccagcccatctatgagtgtgagcttgccagtcaggccccagaaaaacagccagatgtcaggcatcaccaccttcccaaaacaaagccattgccctccatcgactccctgggtcctcctcccccaaagccttcaagacctcccatcgtgaacctccaggcctttcagaggcagccagctgctgttcccaagactcagggggaagtgactgtggaagagggctccctgtctccagagaggcttttcaatgcagaatttgaagaaccacataattacgaggcaacaatttcatatctgagacactctggcaactccattaacctgtgcactgcaaaagaaattgctgatcttttggaggtaaaaaagttagcaactcagaaacaccagtgggcacaacaacagcttcagctgaagcctgctctttctagccaaacgaccaggaaaagggcaacctag

SEQ ID NO: 121046 - DNA, 298 bp, Homo sapiens
tcttttgtcttggacaactgtcctccagatctgtcactatctgaggcgtcccacgacaggcagtcactagatacttctcccagccactaagttgtgactggagaactttgctgtcttcacatgcttttctaattatgcctgaaagcccaaatcctttgttagggagagacatcctagcaaaagcaggggccattgtacacgcatggcccaaggttccattccttggaatccatgaggccaagaaccccaggtcagagaacaaagggcttgcagccattttgtgagcagctgccaccat

SEQ ID NO: 121047 - DNA, 1317 bp, Homo sapiens
tcaacaagatggtgaattgactagtgggtagatccacaggacgggtgtggtcgccatgatcgcgtagtcgatagtggctccaagtagcgaagcgagcaggactgggcggcggccaaagcggtcggacagtgctccgagaacgggtgcgcatagaaattgcatcaacgcatatagcgctagcagcacgccatagtgactggcgatgctgtcggaatggacgatatcccgcaagaggcccggcagtaccggcataaccaagcctatgcctacagcatccagggtgacggtgccgaggatgacgatgagcgcattgttagatttcatacacggtgcctgactggggttcttggcctcaaggattccaaggaatggaaccttgggccatgcggtgagtgttatagctctattagaagcatgcttgaattctcgccgggccttagctgcctccccatggggcagggcttgggacctgcagcccgccatgcccaagtcaccccccatggtgggctcttgcatggcccgagcctccccaccaggcactgccccctgctccatgggttcccagtcccatcgacccccccaagggtgctttagatgtgtcccagagatctcgtgcattgtgtctttgttttcattggtttcaaagaacatctttatttctgccttcatttcgttatttacccagtagtcattcaggagcaggttgttctgtttccatgtagttgtgtgatttcgagtgagtttattaatcctgagttctaatttgattgcactgtggtctgcgcttgttgtcaggctttgtttgccgtaatgtttaccggaatagtcagtgtagaataaacggatttttccgtcagatgtaaaggttgcagaaccggaccattcttgcgtctgatctttcaggatcggatcgttggcgtcgaacttatcgctgtctttaaagacacggcccgcgtttttccagctgtcgattgagttgtcgccgaccttttgataaaacatgtagattgatgtgtcatcagcgtctttcgggcttcccgcaagagcaaacacaacgtgatagccgttgtattcagctactgttccgtcaacgttttgcagcggccagctgtcccacacatcaagtccatgtgcataggtggagaaagccaatggttttcctaattcttgaatcagacctgaaatatacagtcctgtctctcccagaagagtgtcacacaggtgcccatgagcagtcatctcattgccttctgctctcattggcctctgttgatgtccattgctcccaaaggccctgaggttgctgctttccatcat

SEQ ID NO: 121048 - DNA, 975 bp, Homo sapiens
cccatatgggccaccagatgttacggggggtggagggggtctttgttcttagagctcccaagatgcgacgggccgctctcaagatgggggtgggctgctcccaagatggctgcaagccttttgttctctgaccaggggttcttggcctcatggattccaaggaatggaaccttgggccatgcgatgagtggtatagctctattagaagctgtgggtcatggaagagaactgtggaacccagcgactagtgctgcttctgttatctcaaatacatcatcagatgccaatcaatttccaaagttaccattaggagaaatcagtccagataaagaaaaatcttactggtcaagtaatccaactaaaaacaatcccaaagagacaacacgcgtggctgtttttgcgagaattttggatgttaatgacaatgccccacactttgctgtgttctatgacacttttgtatgtgaaaatgccagaccagggcagagggatgcctgtggaaggcttggtgattgggactcagagaaacaggaagggagaaaaggtttcacctccacgaattcagtcattctacataaaaaaagaacaaaaaggagtgtgttgggaggggacaagttttggcaaaaaaaatctccagaaagtccacaaggggacttccaggacagtaggagcctcaggtccacagtgaagtttcacaagtccacaaggaagttgcaaggggaagtggaaaagagcagtgttgccagaaattatggatttgatcctctttaatgcctgtgaagatacacaaaaacatgaaatttcttttcaatatttttgggctgaaccacttgggtggtggctgaaatgagaccatacatacagcacaatgcatgtctgttatattgcaaagtgtattacctaggtctcatacatccccctagtcatcagcattaatgcatgttgggaccccgacccacacaagcagaagtaatg

SEQ ID NO: 121049 - DNA, 348 bp, Homo sapiens
aaaaaaaaagaggaagaagaagatagaagaagaagaagaagaagaggaagaggaagaagaagaagaaagcagaggaagagggagatgaagaacaagaagaagaagaagaaagaagaagaagaagaagaagaagaagaagaagaagaagaagaagaagaagaagaagacgacgacgacgacaatggccttttgcaaacattaccaggattacatgagatgcgagtgaatctcacaagatctgatggtattataagtgtctggcatttccccttctggcacttctccttcctgatgccttatgaagaaggtgccttgcttcgtcttcaccttccaccttacaccatgatt

SEQ ID NO: 121050 - DNA, 195 bp, Homo sapiens; identical to SEQ ID NO: 118472

SEQ ID NO: 121051 - DNA, 510 bp, Homo sapiens; identical to SEQ ID NO: 119439

SEQ ID NO: 121052 - DNA, 318 bp, Homo sapiens; identical to SEQ ID NO: 117050

SEQ ID NO: 121053 - DNA, 159 bp, Homo sapiens; identical to SEQ ID NO: 117049

SEQ ID NO: 121054 - DNA, 777 bp, Homo sapiens
atgattgctaacctgaagaaaaaagctatgaaagagcttctgaagctcccatgcccatggatttctcagtgccttgagaagggagtatgtcatctgcatcttgccagaggaaatagtgagagagatattgacaccaaaagacttcacaatgaaggggatcggattgtgccagcccaaaatatgccactttggcataaggattattttgagctaaaggcaattaagaagcagcaagaagagaaaaggaattctttttttggggttactctgacagtctacttatgccgctatatcgataaactcatgattttctttctgaatcaagacttttggctgccaggtaaactcacagcccaatctgtctcagcaacttccacccccagcagttatttgccatcaggcctgggagacaagagtgaaactccatctgaagaagaagaagaagaggaagaagaagaagaaggagaaggagaaggggaaggggaaggggaaggggaagaagaagaaagaagaagaagaagaagaggaagaagaagaagaaagaagaagaagaagaagaaagaagaagaagaaagaagaagaagaagaagaaagaagaagaagaagaaagaagaagaagaagaagaagaagaagaagaagaagaagaagaagaagaagaagaagaagaagaagaagaaagaaagaaagaaagaaagaaagaaagaaagaaagaaagaagacagattcactcatcctttatgccttttgtgagaaaatgtaagaacctaggatggtga

SEQ ID NO: 121055 - DNA, 282 bp, Homo sapiens; identical to SEQ ID NO: 117047

SEQ ID NO: 121056 - DNA, 1233 bp, Homo sapiens; identical to SEQ ID NO: 118061

SEQ ID NO: 121057 - DNA, 181 bp, Homo sapiens; identical to SEQ ID NO: 120612

SEQ ID NO: 121058 - DNA, 460 bp, Homo sapiens
aaagcatatccagaaaaaagaagaagaagaagaagaagaagaagcagaagaagaagaagaagaagaagaagaagaagaagaagaagaagaagaagaagaagaagaagaagaagaagaagaggaagaggaagaagaagaagaagaagaagaagaagaagaagaagaagaagaagaagaagaagaagaagaagaaaagtgctcactgaagcacactgaagctccctgtgtaaaaggaatagaaactattttctggaacaaattctcactgtgtgacatcacaaagagttatttatctggggtccaaaaacttgaggaacgtgcacacaaagtgaagttagcactgaagtttaagaaggaaattaaaatggctctccacggtggaaacccaatttggttgtccagtgtcaccctggtgtttggggtcctcatgtactgggagatggaagaatgtgatgattga

SEQ ID NO: 121059 - DNA, 435 bp, Homo sapiens; identical to SEQ ID NO: 117052

SEQ ID NO: 121060 - DNA, 393 bp, Homo sapiens
agttttatggcatgcgcaattgcaattgaagtacaactgacttctgcagaaccggcttccataggatttcctgtccaaaaatcaccatgtggtcatctgcagctaaatggttacaaatcatcaagtaaacaaggcttccccaccccggcgctttttttttaaggagtgaaatccaccaaactctatcatttgcaaattatctctggacttcttttatttctttttttttcactgggtaagaaggaaaacgagcaaacaaaaaatcctccctccgaatttgtttaaaggcgtaatttccctgtgaggtgttttacaggcttctccttcgttagcttttcttgcctggtaattactgaaagaagtctgcttttccagggcgagctattcctttaa

SEQ ID NO: 121061 - DNA, 3130 bp, Homo sapiens
gaattcccaatacttgttgcaataattgcccacgatagctgctcaaacaagagagttggaattcatctgtaaaaatcactacatgtaacgtaggagacaagaaaaatattaatgacagaagatctgcgaacatgatgcacgtgaataattttccctttagaaggcattcctggatatgttttgatgtggacaatggcacatctgcgggacggagtcccttggatcccatgaccagcccaggatccgggctaattctccaagcaaattttgtccacagtcaacgacgggagtccttcctgtatcgatccgacagcgattatgacctctctccaaagtctatgtcccggaactcctccattgccagtgatatacacggagatgacttgattgtgactccatttgctcaggtcttggccagtctgcgaactgtacgaaacaactttgctgcattaactaatttgcaagatcgagcacctagcaaaagatcacccatgtgcaaccaaccatccatcaacaaagccaccataacagaggaggcctaccagaaactggccagcgagaccctggaggagctggactggtgtctggaccagctagagaccctacagaccaggcactccgtcagtgagatggcctccaacaagtttaaaaggatgcttaatcgggagctcacccatctctctgaaatgagtcggtctggaaatcaagtgtcagagtttatatcaaacacattcttagataagcaacatgaagtggaaattccttctccaactcagaaggaaaaggagaaaaagaaaagaccaatgtctcagatcagtggagtcaagaaattgatgcacagctctagtctgactaattcaagtatcccaaggtttggagttaaaactgaacaagaagatgtccttgccaaggaactagaagatgtgaacaaatggggtcttcatgttttcagaatagcagagttgtctggtaaccggcccttgactgttatcatgcacaccatttttcaggaacgggatttattaaaaacatttaaaattccagtagatactttaattacatatcttatgactctcgaagaccattaccatgctgatgtggcctatcacaacaatatccatgctgcagatgttgtccagtctactcatgtgctattatctacacctgctttggaggctgtgtttacagatttggagattcttgcagcaatttttgccagtgcaatacatgatgtagatcatcctggtgtgtccaatcaatttctgatcaatacaaactctgaacttgccttgatgtacaatgattcctcagtcttagagaaccatcatttggctgtgggctttaaattgcttcaggaagaaaactgtgacattttccagaatttgaccaaaaaacaaagacaatctttaaggaaaatggtcattgacatcgtacttgcaacagatatgtcaaaacacatgaatctactggctgatttgaagactatggttgaaactaagaaagtgacaagctctggagttcttcttcttgataattattccgataggattcaggttcttcagaatatggtgcactgtgcagatctgagcaacccaacaaagcctctccagctgtaccgccagtggacggaccggataatggaggagttcttccgccaaggagaccgagagagggaacgtggcatggagataagccccatgtgtgacaagcacaatgcttccgtggaaaaatcacaggtgggcttcatagactatattgttcatcccctctgggagacatgggcagacctcgtccaccctgacgcccaggatattttggacactttggaggacaatcgtgaatggtaccagagcacaatccctcagagcccctctcctgcacctgatgacccagaggagggccggcagggtcaaactgagaaattccagtttgaactaactttagaggaagatggtgagtcagacacggaaaaggacagtggcagtcaagtggaagaagacactagctgcagtgactccaagactctttgtactcaagactcagagtctactgaaattccccttgatgaacaggttgaagaggaggcagtaggggaagaagaggaaagccagcctgaagcctgtgtcatagatgatcgttctcctgacacgtaacagtgcaaaaactttcatgccttttttttttttaagtagaaaaattgtttccaaagtgcatgtcacatgccacaaccacggtcacacctcactgtcatctgccaggacgtttgttgaacaaaactgaccttgactactcagtccagcgctcaggaatatcgtaaccagttttttcacctccatgttcatccgagcaaggtggacatcttcacgaacagcgtttttaacaagatttcagcttggtagagctgacaaagcagataaaatctactccaaattattttcaagagagtgtgactcatcaggcagcccaaaagtttattggacttggggtttctattcctttttatttgtttgcaatattttcagaagaaaggcattgcacagagtgaacttaatggacgaagcaacaaatatgtcaagaacaggacatagcacgaatctgttaccagtaggaggaggatgagccacagaaattgcataattttctaatttcaagtcttcctgatacatgactgaatagtgtggttcagtgagctgcactgacctctacattttgtatgatatgtaaaacagattttttgtagagcttacttttattattaaatgtattgaggtattatatttaaaaaaaactatgttcagaacttcatctgccactggttatttttttctaaggagtaacttgcaagttttcagtacaaatctgtgctacactggataaaaatctaatttatgaattttacttgcaccttatagttcatagcaattaactgatttgtagtgattcattgtttgttttatataccaatgacttccatattttaaaagagaaaaacaactttatgttgcaggaaaccctttttgtaagtctttattatttactttgcattttgtttcactctttccagataagcagagttgctcttcaccagtgtttttcttcatgtgcaaagtgactatttgttctataatac

SEQ ID NO: 121062 - DNA, 642 bp, Homo sapiens
atgaagaaatgcaaaacatcagtgatagggattgcaacgttttatctcagcattcctcatatctacacaccccctaatcaaacaagcagttttatggcatgcgcaattgcaattgaagtacaactgacttctgcagaaccggcttccataggatttcctgtccaaaaatcaccatgtggtcatctgcagctaaatggttacaaatcatcaagtaaacaaggcttccccaccccgctgctcaaacaagagagttggaattcatctgtaaaaatcactacatgtaacgtaggagacaagaaaaatattaatgacagaagatctgcgaacatgatgcacgtgaataattttccctttagaaggcattcctggatatgcctggacagagtccagagtgagaccctgcctcaagaaaaaaaagaagaagaagaagaaagaagaagaagaagaagaaagaagaaagaagaagaagaaagaagaagaagaagaaagaagaagaagaaagaagaagaagaagaagaagaagaagaggaagaggaagaggaagaagaagaagaagaagaagaagaagaagaagaagaagaagaagaagaagaagaagaagaagaagaagaagaagaaagaaagaaagaattagttcactga

SEQ ID NO: 121063 - DNA, 654 bp, Homo sapiens; identical to SEQ ID NO: 119453

SEQ ID NO: 121064 - DNA, 684 bp, Homo sapiens
atgattcagaggaaacgtgccagcattggtgctccctgtgcctgggtccgaaaaaaagaagaagaagaagaagaagaagaagaagaagaagaagaagaagaagaagaagaggaagaggaagaggaagaggaagaggaagaggaagaagaagaagaagaagaagaagaaggagagaacaacttggctatggggaaatcctttaacgtgattactgtgcatgtccgttccgaggaatgggatttaatgacctttgatgccaacccatatgacagcgtgaaaaaaatcaaagaacatgtccggtctaagaccaaggttcctgtgcaggaccaggttctttcgctgggctccaagatcttaaagccacggagaagcctctcatcttatggcattgacaaagagaagaccatccaccttaccctgaaagtggtgaagcccagtgatgaggagctgcccttgtttcttgtggagccaggtgatgagggaaagaggcacctcctccaggtgcgaaggtccagctcagtggcacaagtgaaagcaatgatcgagactaagacgggtataatccctgagacccagattgtgacttgcaatggaaagagactggaagatgggaagatgatggcagattacggcatcagaaagggcaacttactcttcctggcatcttattttattggagggtga

SEQ ID NO: 121065 - DNA, 481 bp, Homo sapiens
atactcggtttcaaggtgtttatctgcctttgttgtgggaacagagtttttgtggaaaagtccgattgctctgggttatacgaggggccacttctctgctttggttgccatggaaaatgatggctatggcaaccgaggtgctggtgctaatctcaataccgatgatgatgtcaccatcacatttttgcctctggttgacagtgaaaggaagctactccatgtgcacttcctttctgctcaggagctaggtaatgaggaacagcaagaaaaactgctcagggagtggctggactgctgtgtgacggaggggggagttctggttgccatgcagaagagttctcggcggcgaaatcaccccctggtcactcagatggtagaaaaatggcttgaccgctaccgacagatccggccgtgtacatccctgttctgatggagaggaagatgaggatgatgaagatgaatggaaaaaaagattcaaaca

SEQ ID NO: 121066 - DNA, 802 bp, Homo sapiens
aagttgcagtagtggtaatagccaaaggagatcacctcctgctacgaagcgggactctgaagtgaaaatggattttcagaggattgaattggctggtgctgtgggaagcaaggaggaacttgaagtagactttaaaaaactaaagcaaattaaaaacaggatgaaaaagactgattggctcttcctcaatgcttgtgtggaaagcaccatggttcatttgaacttagagaaggagcctggagcaagcttggagcagacgcacatttttgtactggcacatattcttagacgaccaattatagtttatggagtaaaatattacaagagtttccggggagaaactttaggatatactcggtttcaaggtgtttatctgcctttgttgtgggaacagagtttttgttggaaaagtccgattgctctgggttatacgaggggccacttctctgctttggttgccatggaaaatgatggctatggcaaccgaggtgctggtgctaatctcaataccgatgatgatgtcaccatcacatttttgcctctggttgacagtgaaaggaagctactccatgtgcacttcctttctgctcaggagagctgggatgctgctgggtggtacgagggcccctgggagaacgccgagtccctgcggcctctggggaggagaagctccctgacgtatggcacagcagaggggacttggtttgagccaaaccaccgaccacaggacgctgccctgcccgtggccgccgagccctacctgtaccgggaggccgtttataactcagtggctgcaagatag

SEQ ID NO: 121067 - DNA, 933 bp, Homo sapiens; identical to SEQ ID NO: 120280

SEQ ID NO: 121068 - DNA, 873 bp, Homo sapiens
gatcacaactcctcgccagcaagggaacaaaactggatggagaatgagtttgacgaattgacagaagtaggcttcagaaggtgggtaataacaaactcctccgagctaaaggagcatgttctaacccaatgcaaggaagctaagaaccttgataaaaggttagacaaattgctacctagaataaccagtgtagagaagaacataaatgacctgatggagctgaaaaacacagcacaagaacttcatgaagcatacacaagtatcaatacccaaatcgatcaagcagaagaaaagatatcagagattgaagatcaactcaatgaaataaaaccaaatctacgtctgattggtgtacctgaaagtgatggggagaatggaaccaagttggaaaacactctgcaggatattatccaggagaacttctccaacctagcaaagcaggccaacattcaaattcaggaaatacagagaacaccacaaagatactcctcgagaagaacaaccccaagacacataattatcagattcaccaaggttggaatgaaggaaaaaatgttaagggcagccagagagaaaagtcgggttacccacaaaggaaagcccatcagactaacagtggatctctcggcagaaaccagaaaagagtgggggccaatattcagcatttgtaaagaaaagaattttcaacccagaatttcatatccagccaaactaagcttcataagcgaaggagaaataaaatcctttacaaacaagcaaatgctgagagattttgtcaccaccaggcctgccctacaagagctcctgaaggaagcactaaatatggaaaagaacaaccggtaccagccactgcaaaaacataccaaattgtaa

SEQ ID NO: 121069 - DNA, 585 bp, Homo sapiens
catcaaagaccaaaggtagataaatccacgaagatgaggaaaaaccagcgcaaaaagtctgaacattccaaaaaccagaacgcctcttccccaaaggatcacaactcctcactagcaagggaacaaaactggatagagattgagtttgatgaattgacagaagtaggcttcagaaggtgggtaataacaaactcctctgagctgaaggagcatgttctaacccaatgcaaggaagctaagaatcttgaaaaaaggttagacgaattgctaactagaataaccaatttagagaagaacataaatgacctgatggagctgaaaaaggatattacccaggagaacttccccaacctagcaagacaggccaacattcaaattcaggaaatacagagaacaccacaaagatactcctcgagaagcgcaaccccaagacacatcatcatcagattcaccaaggttgaaatgaaggaaaaaatgttaaggccagccagagagaaagatcgggttacccacaaagggaagcccatcagactaacagtggatctctctgcagaaaccctacaagccagaagagagtgggggcca

SEQ ID NO: 121070 - DNA, 1035 bp, Homo sapiens
atggaatactatgcagccataaaaaatgatgagttcatgtcctttgtagggacatggatgaaattggaaatcatcattctcagtaaactatcacaagaacaaaaaaccaaacaccgcatattctcactcatagagcacctgggggaaggggcagctgtgggtgcagcttcagcagacttcctgctggctctgaagagaaccttccttcctgctagctctgaagaaaacagcagatctcagagcagagtacttgggttctggagacacctcacagcaggggtcaacagacatctgatacgggagagctctggctggcatcttgtgggtgcccctctgggaagaagcttccagaggaaggaacaggcagcagtctttgctgttctgcagactctgctggtgatacccaggcaaacagggtctggaatggacctccagcaaagtccagcagacctgcagcagaggggactgagtgttagaaggaaaactaacaaacagaaaggaatagcatcaacatcaacaaaaaggacgtccacacagaaaccccatccaaagggcaccatcatcaaaaaccaaagggacagaagaaggcttcagaagttgggtaataacaaaccctctgagctacaggagcatgttctaacccaatgcaaggaagctaagaaccttgaaaaagggttagaggaattgctaactagaataaccagtttagagaagaacacaaatgacctgatagagctgaaaaacacagcacaggaacttcatgaagcatacacgagtatcaatagcccaattgatcaagcagaagaaaggatatcagagattgaagatcaacttaataaaataaagtgtgaagacaagtttggagaaaaagaaatgaaaaggaaagaacaaagcctccaagaaatatgggactatgtgaaaagaccaaacctacgtttgattggagtacttgaaaatgacagggataatggaaccaagtggaaaaacactcttcaggatattatgcagaaaaacttccccaacctagcaagatag

SEQ ID NO: 121071 - DNA, 772 bp, Homo sapiens
gagagagcacctggcggaagggatggctgtgggcacagcttcagcagacttaaacatttctgcctgctggctccgaagagagcaacagatctcccagcacagtgctcgagctttgctaagggacagactgcctcctcaagagaactccagctggcatccggcaggtgcccctctgggacgaaacttccagaggaaggagcaggcagcaatctttgctgttctgcagcctccactggtgatacccaggaaaacagggtctggagtggacctcgagcaaactccagcagacctgcagaagaggggcctgactgttacaaggaaaactaacaaacagaaagcaatagcatcaacatcaacggaaaggacgcccacgcagaaacccccattcaaaagtcaccaacatcaaagaccaaacgtagataaatccgcgaagatgaggaaaaaccagagcaaaaaggctgaaaattccaaaaaccagaatacctcttctcctccaaaggatcacaactcctcgccagcaagggaacaaaactggacagagaatgagtttgatgaactgacagaagtaggcttcagaaggtgggtaataacaaactcctccaagttaaaggagcatgttctaacccaatgcaaggaaactaagaaacttgataaaaggttagaggaactgctaactataataaccagtttagagaagaacataaatgacctgatggagctgaaaaacacagcaggagaacttcgtgatgcatacacaagtatcaatagctga

SEQ ID NO: 121072 - DNA, 2913 bp, Homo sapiens
atggaggaagatctaccaagcaaatggaaaacaaaaaaggcaggggttgcaatcctagtctctgataaaacagactttaaaccaacaaagatcaaaagagacaaagaaggccattacataatggtaaagggatcaattcaccaagaagagctaactatcctgaatatatatgcacccaatacaggagcacccagattcattaagcaagtcctgagtgacctacaaagagacttagactcccacaccataataatgggagactttaacaccccactgtcaacattagacagatcaatgagacagaaagttaacaaggatacccaagaattcaactcagctctgcaccaagcggacctaatagacatctacagaactctccaccccaaatcaacagaatatacatttttttcagcaccataccacacctattccaaaattgaccacatagttcaaagtaaagctctcctcagcaaatgtaaaagatcagaaattataacaaactgtctctcagaccacagtgcaatcaaactagacctcaggattaagaaactcactcaaaaccactcaactacgtggaaactgaacaacctgctcctgaataactactgggtacataacgaaatgaaggcagaaataaagatgttctttgaaaccaacgagaacaaagacacaacataccagaatctctgggacacattcaaagcagtgtgtagagggatatttatagcactaaatgcccacaagagaaagcaggagacatccaaaattgacaccctaacatcacaattaaaagaactagaaaagcaagagcaaacacattcaaaagctagcagaaggcaagaaataactaaaatcagagcagaactgaaggaaatagagacacaaaaaacccttcaaaacattaatgaatccaggagctggttttttgaaaggatcaacaaaattgacagaccgctagcaagactaataaagaagaaaagagaaaagaagcaaatagacacaataaaaaatgataaaggggatatcaccactgatcccacagaaatacaaactaccatcagagaatactacaaacacctctacacaaataaactaaaaaatctagaagaaatggataaattcctcgacacatacaccctcccaagactaaaccaggaagaagttgaatctctgaatacaccaataacaggctctgaaattgtggcaataatcaatagcttaccaacaaaaaagagtccaggaccagatggattcacagccgaattctaccagaggtacaaggaggaactgatgcagaaaaggccctttgacaaaattcaacaacccttcatgctaaaaactctcaataaattaggtattgatgggacatatctcaaaataataagagctatctatgacaaacccacagccaatatcatactgaatgggcaaaaactggaagcattccctttgaagactggcacaagacagggatgccctctctcaccactcctattcaacatagtgatggaagttctggccagggcaattaggcacgacaaggaaataaagggtattcaattaggaaaagaggaagtcaaattgtccctgtttgcagatgacatgattgtatatctagaaaaccccattgtctcagcccaaaatctcaagctgataagcaacttcagcaaagtctcaggatacaaaatcaatgtacaaaaatcacaagcattcttatacaccaataacagacaaacagagagccaaatcatgagtgaactgccattcacaattgcttcaaaaagaataaaatacctaggaatccaacttacaagggacgggaaggacctcttcaaggagaactacaaaccactgctcaatgaaataaaagaggatacaaacaaatggaagaacattccatgctcatgggtaggaagaatcaatatcatgaaaatggccatactgcccaaggtaatttacagattcaatgccatccccatcaagctaccaatgactttcttcacagaattggaaaaaactactttcaagttcatatggaaccaaaaaagagcccacattgccaagtcaatcctaagccaaaagaacaaagctggaggcatcacactacctgacttcaaactatactacaaggctacagtaaccaaaacagcatggtactggtaccaaaacagagatatagatcaatggaacagaacagagccctcagaaataacgccacgtctgaagagagcagcagatctcccagcacagtacttgagctctgctgagggacagactgcttcctcaagggggtccctgacccccctggctcctgatgaggagacacctctcagcaggggtcaacagacacctcatacaggagagctccagctggcattaggtgggtgcccctctgggacaaatcttccagaggaaggaacaggcaacaatctttgctgttctgcagcctccgccggtgatacccggcaacaggatctggagtggtcctccagcgaactccagcagacctgcagtagaggaaacccatctgaaggtcaccaacatcaaagatcaaaggtagataaatccatgaagatgaggaaaaaccagtgcaaaaaggctgaaaattccaaaaaccagaacacttcttctcctccaaaggatcaaaactccttgccagcaagggaacaaaactggacagagaattggtttgatgaattttcagaagtaggcttcagaaggtgggtaataacaaactcctctgagctaaaggagcatgttctaagccaatgcaaggaagctaagaaccttgaaaaaagattagaggaattgctaactggaataatcagtgtagagaagaacataaatgtcctgatggagctgaaaagcacagcacaagaacttcgtgaagcatgcacaagtatcaacagctga

SEQ ID NO: 121073 - DNA, 577 bp, Homo sapiens
catctttggtgaatctaatacaacatccacgagcctcactttgaaaaactctgccatttggtgccccactggaacaaagcttccagaaggaagaacaggcagcaatctttgctgttctgcagcctctgctggtgatacccaggcaaacagggtctggagtggaccttcagcaaactttagcagacctgcagaagaaggtcaccaacatcagagaccaaaggtagataaatccacgaagatgaggaaaaaccagtgcaaaaaggctgaaaattccaaaaaccagacagcctcttctcctctaaaggatcacaactcctcgccagcaagggaacaaagctggacggagaatgagttcaatgaattgacagaagtaggcttcagaaggtgggtaataacaaactcctacgtgctaaaggagcatgttctaaaccaatgcaaggaagctaagaaccttgaaaaaaggttagatgaattgctaactagaataaccagtttagagaagaacataaatgacctaatggagctgaaaaacacagcacgagaactttgtgaagcatacacaagtatcagtagctga

SEQ ID NO: 121074 - DNA, 695 bp, Homo sapiens
gtctgaagagagcagcagatctcccagcacagtacttgagctctgctgagggacagactgcttcctcaagggggtccctgacccccctggctcctgatgaggagacacctctcagcaggggtcaacagacacctcatacaggagagctccagctggcattaggtgggtgcccctctgggacaaatcttccagaggaaggaacaggcaacaatctttgctgttctgcagcctccgccggtgatacccggcaacaggatctggagtggtcctccagcgaactccagcagacctgcagtagaggaaacccatctgaaggtcaccaacatcaaagatcaaaggtagataaatccatgaagatgaggaaaaaccagtgcaaaaaggctgaaaattccaaaaaccagaacacttcttctcctccaaaggatcaaaactccttgccagcaagggaacaaaactggacagagaattggtttgatgaattttcagaagtaggcttcagaaggtgggtaataacaaactcctctgagctaaaggagcatgttctaagccaatgcaaggaagctaagaaccttgaaaaaagattagaggaattgctaactggaataatcagtgtagagaagaacataaatgtcctgatggagctgaaaagcacagcacaagaacttcgtgaagcatgcacaagtatcaacagctga

SEQ ID NO: 121075 - DNA, 1215 bp, Homo sapiens
atgaaagaaccaatgaaatcttccaaagaatctgcagcaaatgaattagttaaatacttgtttgctataagttctaatgaacaggaaaaaacattttcagcagctgtaaggtatcatttctttgctgattccccaattggacagtgcaatcatctgcatattagtgaattgaaacttagaattctatctgaaagaaattctactaggttcctgaggacattgtgcaccattggcttcacagaaactgggccccgtaagtgggctgccaagttgtgcccgtacaaagctggtaaagcctccccagaggcagttgctgcagcagtggtcagagaaaaaatcagttccttgcagtggactgatgaagggctgaaaggaagtggtagaggtgctttaccttcatcccaagtaaaacgagaaacactttttaaaagccaccttaagtctgcgttttctggagtttgggtggacctaaggccaacggacaacaccatggcaccaatacccctgggaaaatcatattgtagaagcagatcctcaagtgagctaatagtggagcaagctgaaaagcgttccttcagagttcaagaaagtaaaggaaataacggaaaaatgatgcaaaactatgagatcttaatcaatattggtcaaattaaatcaaagtttatcttcacccctgaacatgtacacattggtgaaatgtggttaaaatcaacatcaagagaaaaagaaattatagattctaatgagaagaaggaggaagaggagaccctatccaaaggtcaccaacatcgaagaccaaaggtagataaatccatgaagatgggaagaaaccaatgcaaaaagactgaaaattccaaaaaccagaacacctcttctcctccaaaggatcacaactcctcgccagcaagggaacaaaactggatagagaatgaatttgacgagttgacagaagtaggcttcagaaggtggataataaactcctcagagctaaaggagcatgttctaatccaatgcaaggaagctaagaaccttgaaaaaaggttagatgaattgctaactagaataaccagtttagagaagaacataaatgacctgatggagctgaaaaacatagcacgagaacttcatgatgcatacacaagtatcaatagccaaattgatcaagcagaagaaaggatatcagaggttgcagatcagctctgtgaaataaagtga

SEQ ID NO: 121076 - DNA, 1143 bp, Homo sapiens
atggccaaaggtcagggggagtcttggctgctagatcaggaggctcttgctgaaattgaaaaacaacagcagaagtacaaatctttagaggctcgtgctgtgagtcctgtgctagatgctggttggaccttgccctcagggagcttgcagtcagcagaggagtcggcagaaagagagctaaacatagatcatggtgcagcaaggccctctctgctccatgaccaggcagatcatcaggcattcggagcacccattttcctcgatcagcagtctgagtcacccaaaccctcctacgcagaggtcttgcgcatctctgaaaaaaaggcagcagcccgtcagggacttgcagataaaatccccaccttcctgggacagagcacctgggggaaggtcgctctgaagagagcagcggatcttccagtacagcgttccaactctgatacgggacagactgcctcctcaagtgggtccctgacccccgtgtatcctgactgggagacacctcccagtaggggccgaccatgcatctatcacctcacacaggagagctctggctggcacctggcaggtgccccttttggacaaagcttccagaggaaggaacaggcagcaatctttgctgttatgcagcctctgctggtgatacccaggcaaacagggtctggagtggacctccaacaaactccagtagacctgaaacagagggaaaggaataatatcaacatcaacaaaaaggatgtcctctcagagacgtcctccgaagatcaccgacttcaaagatcaaaggtagataaatccacgaagatggggagaaaccagtgcaaaaaggctgaaaactccaaaaaccagaatgcctattctcctacaaaggatcacaacttcttgccagcaagggaacaaaactggacggagagtgagtttgatgaattgacagaagtaggcttcagaaggtgggtaataacaaactcctccgagctaaaggagcatgttctaacccaatgcaaggaagctaagaaccttgaaaaaaggttagatgaattgctaattagaataaccagttcagagaagaacataaatgacctgatggaggtgaaaaacacagcacaagaacttcgagaagcatacacaggtatcaatagctga

SEQ ID NO: 121077 - DNA, 573 bp, Homo sapiens
atggatggagatctccacaagggagtggctgtgttctggccaccagatgctgctggaggccacacctgctgcaggagcatggtctgcaggagcctgctaggaggagcacagtggaaatttcatagttttaggtgtaggatccgttttgaattaattttacatatgatacaagaaaggaatagcatcaacatcagccaaaaggacgtccacacagaaactccatctgaaactcaccatcatcaaagaccaaaggtagataaatccatgaagatgaggagaaaccagtgcaaaaaggctgaaaattccaaaaaccagaaagcctcttctcctccaaaggaacacaactcctggagagcaagggaacaaaactggacagagaatgagtttgacaaattgacggaagtaggcttcagaaggtgggtaataacaaactcctctgagctaaaggagcatattctaacccaatgcaaggaagctaagaaccttgaaaaaacattagaggaattgctaactagaataaccagtttagagaagaacataaatgacctgatgaagctgaaaaacacagcatga

SEQ ID NO: 121078 - DNA, 489 bp, Homo sapiens
atgagaaatccagggctacggccatgcctgtggcagttaagtattgatgatgaaattggtgaggcattaaggaagtgtgagttggtaaacagggtctggagtggaccccagcaaactccagcagacctgcagcagaggggcctgactgttagaaggaaaactaaccaaacagaaaggaatagcatcaacatcaacaaaaaggacatccccacaaaaactccatctgaaggtcaccaacatcaaagaccaaaggatcacaactccttgccggcaagggaagaaaactggacagagaatgagtttgatgaattggcagaagtaggcttcagaaggtgggtaatgacaaactcctctgagctaaaggagcatattctaattcaatgtagggaagctaaaaaccttgaaaaaaggttagaggaattgctaactaaaataaccagtttagagaagaatataaatgacctgatgaagctgaaaaatacagcatga

SEQ ID NO: 121079 - DNA, 1479 bp, Homo sapiens
atggaggtaaatagagaaaaacagctaaacgagttggaagtgattggctccgaggagcaaaacctggaggaagagggcctgatgattggtggtgtagctgttcgattagtaccagatgatatagtcattccaggaggagtaaatgcaaccaatggcacagaggccagagatgccttgagagtgaaagtcgccatgtctgtgaccttactttcaggaatcattcagtatctactgagtgctcttggctggtcttactacacggtggatggggtcagccagaaaaaccccagagctctgggagtaactgcagaccaactgcatgccatattcacaactatgagtgacgagcaagcaagcttcaggtttggatttgtggccatatatctcacagagcctctggtccgtgggtttaccaccgcagcagctgtgcatgtcttcacctccatgttaaaatatctgtttggagttaaaacaaagcggtacagtggaatcttttccgtggtgtatagtacagttgctgtgttgcagaatgttaaaaacctcaacgtgtgttccctaggcgtcgggctgatggtttttggtttgctgttgggtggcaaggagtttaatgagagatttaaagagaaattgccggcgcctattcctttagagttctttgcggatcacaactcttcaccagcaagggaacaaaagtggatggagaatgagtttgacgaatggacagaagtaagcttcagaaggtgggtaataacaaactcctccgagctaaaggaacatattctaacccaatgcaaggaagctaagaaccttgaaaaaaggttagaggaattgctaactagaataaccagtttagagaagaacataaatgacttgatggagctgaaaaacacagcacaagaatttcatgaagcatacacaagtataaatagtcaaatcaaacagaagaaagggtatcagagattgaagatcaacttaatgaaatatagtgtaaagacaagattagaggaaaaaaaaagaatgaaaaggaatgaacaaagcctccaggaaatatgggactgtgtgaaaagaccaaacctacgtttgactggtgtacctgaaagtgacggggagaatggaaccaagttggaaaacactcttcaggacattatccaggagaacttccacaacctagcaagacaggccaacagtcaaattcaggaaatacagagaacaccacaaagatactcctcaagaagagcaaccccaagacacataatcatcagattcaccaaggttgaaatgaaggaaaaaatgttaagggcagccagagagaaaggtcgggttacccacaaagggaaccccatcagactaatagcggatctatctgcagacaccctacaagccagaagacagtgggagccaatattcaacattcttaaagaaaattttcaaaccagaatttcacatccagccaaactaagcttcataagcaaaggataa

SEQ ID NO: 121080 - DNA, 1083 bp, Homo sapiens
atgcctgagcctcctatcccctccatgggctcctgtgcggcccgagcctccccaacgagtgccagccctgctccacggcgcccagtcccatcgaccacccaaaggctgaggagtgcaggtgcatggcacgggactggcaggcagctccacctgcagccccggtgctggatcaactgggtgaagccatctgggctcctgagtctggtggggcctcggagaacctttatgtctagctcagggattgtaaatacaccagttggcactctatctgtagctcaagctaatctggtggggacatggagaacctttgtgtctagctcagggattgaaaacgcaccaatcagcgccctctcagaccactgggctctaccaatcagcaggatgtggagctgtattccaattttcgctgctcttaaaattttttttaatatcattgcttcccaattgactcacaataacgcagacatagggactgctggagactgtgaccttaaacagttaaagatgtctgcatatacgacatcatgtttgatgggggtgcagggcggtttgccgctgccaccctcggcaccatctctgaactgcccgcttttccggaggagcggaaaagttggaagccgaaaagacaggcgcccggagccctggtctaggtatcaggtgatccggagccctagtcggtgcccactaagaacaccccttctcccatcgggggttcggaggagtgttaagcctgcgggtctgccagtccctaaggcggaactgaaagcgaagatcagccaagagcacagtcggaggcggcagagacggtggcggcctgacctggctctttcgcccctcggagaaccggatcacaactcctcacaagcaagggaacaaaactggatggagaatgagtttgatgaattgacagaagtgggcttcagaacgtgggtaatagcaaattcctctgagctaaagaagcatgttctaacccaatgccaggaagctaagaaccttgaagaaaggttagatgaatttctaactagaataaccagattagagaagaacataaatgacctgatggagctgaaaaacacagcatga

SEQ ID NO: 121081 - DNA, 3501 bp, Homo sapiens
atgattgtatatttagaaaaccccatcgtgtcagcccaaaatctccttaagctgataagcaacttcagcaaagtctcaggatacaaaatatacaaaatcgatgtgcaaaaatcacaagcattcctatacaccaataatagacaaacagagagccaaatcatgagtgaactcccattcacaattgcttcaaagagaataaaatacccaggaatccaacttacaaggaatgtgaaggacctcttcaaggagaactacaaaccactgctcaatgaaataaaagaggacacaaacaaatggaagaacattccatgctcatggataggaagaatcaatattgtgaaaatggccatactgcccaaggtaatttatagattcaatgccatccccatcaagctaccaatgacttccttcacagaattggaaaaaactactttaaagttcatatggaaccaaaaaggagcccgcattgccaagacaatcctaagcaaaaagaacaaagttggaggcatcacgctacctgacttcaaactatactacaaggctacggtaaccaaaacagcatggtactggtaccaaaacagagatatagatcaatggaacagaacagaggcctcagaaataacaccacccatctacaaccatctgatctttgacaaacctgacaaaaacaagaaatggggaaaggattccctatttaataaatggtgctgggaaaactggctagccatatgtagaaagctgaaactggatcccttccttacatcttatacaaaaattaattcaagatggattaaagacttaaatgttagacctaaaaccataaaaaccctagaagaaaacctaggcaataccattcaggacataggcatgggcaaggacttcatgactaaaacaccaaaagcaatggcaacaaaagccaaaattgacaaatgggatctaattaaactaaagagcttctgcacagcaaaagaaactaccatcagagtgaacaggcaacctacaaaatgggagaaaaattttgcaatctacccatctgacaaagggctaatatccagaatctacaaagaacttaaacaaatttacaagaaaaaaatcaaaaaatcccatcaaaaacactattcacaacagcaaaatcatggaatcaacctaagcccaccaacagttgactggataaagaaaacaggggacacatacaccatagaatactatgcagccataaaaaagaatgaaatcatgtccttcacagcaacatggactgagctggaggccattattctaagagaaataacagaaataggaaataaaataccacacattcacacttacaagtgtgaactaaacagtgggttctttgaagccaacgagaacaaagacacaacataccagaatctctgggacacattcaaggaagtgtgtagagggaaatttatagcactaaatgcccacaagagaaagcaggaaagatccaaaattgacaccctaacatcacaactaaaagaactagaaaagcaagagcaaacacattcaaaagctagcagaaggcaaaaaataactaaaatcagagcagaactgaaggaaatagagacacaaaaaacccttcaaaaaattaatgaatccaggagctggttttttgaaaggatcaacaaaattgatagactgctagcaagactaataaagaaaaaaagagagaagaatcaaatagacgcaataaaaaatgataaaggggatatcaccaccgatcccacagaaatacaaactaccatcagagaatactacaaacacctctatgcaaataaactagaaaatctagaagaaatggataaattcctcgacacatacaccctcccaagactaaaccaggatgaagttgaatctctgaatagaccaataacaggatctgaaattgtggcaataatcaatagcttaccaacaaaaaagagtccaggaccagatagattcacagccaaattctaccagaggtacaaagaggagctgaaccaacgacaaaaaccacatgattatcccaatagatgcagaaaggcctacaaaattcaacatcccttcatgctaaaaactctcaataaactaggtattgatggaacgtatctcaaaataataagagctatttatgacaaacccacagccaatgtcatactgaatgggcaaaagctggaagaattccctttgaaaaccggtctgagaaccattggagttatcaccaaactggaccttatggatgaaggaacggatgccagggatgttctagagaacaaactgttgcctcttcgcaggggttacgtgggggtggtaaacagaagccagaaggacatagatgggaagaaggacataaaggcagccatgctggcagagaggaagtttttcctttcccacccggcttacagacatatcgctgaccgaatgggaaccccacacctgcagaaggtccttaatcaggttcttggaaaagttttcattgtactgagcttgaggtgcctgctgatctcagtggaaatgccaagtagatggttatgtcaagccttcaatagcagagagagctttcccttactcagtcatggagttgcactgggatctagagatggaagtatgagggttgacagacacctcatacgggagagctccggctggcatcttgtgggtgcccctctgggacgaaacttccagaggaaggaacagacagcagtctttgctgttctgcagcctccgctggtgatacccaggcaaacaggatctggagtggacctccagcaaactccagcagacctgcagcagaggggcctgaccgttagaaggaaaactaacaaatcagaaaagaatagcatcaacgtcaacaaaaaggacatccacacagaaaccccatctgaagatcaccaacctcaaagaccaaaggtagataaatctatgaagatgaggagaaagcagtgcaaaaaggctgaaaattccaaaaaccagaatgtctcttctcctccaaaggatcacaactcctcgtcggaaagggaacaaaactggaaggagaatgagtttgatgaattgacagaaataggcttcacaaggtgggtaataacaaactcctctgagctaaaggaggatggtttaacccaatacaaggaagccaagaaccttgaaaaaattttagaggaattgctaactagagaaaccagtttagagaagaacataaatgacctgatggagctgaaaaacacagcacgagaacttcgtgaagcatacacaagtatcaatagccaaatcaatcaagcggaagaaaggatatcagagattgaagatcatcttaatgaaataaagcatgaagacaaaattagagaaaaaagaatgcaaaggaatgaacaaagcctccaagaaatatggggctatgtgaaaagaccaagcctgcatgtgattgtgtacctgaaagtgatgggaagaatggaaccaagttggaaaacacttttcaggatattatccaggagaacttccccaacctag

SEQ ID NO: 121082 - DNA, 717 bp, Homo sapiens
atggagacaggcattttcagaactattataatgcaaaatagaaaatggcacatatccaaaggcatacaagttgagagccatggtcattcagaggagaaaagatcccatctagtaggaggaaggcttctcagaagagccagccatgaagtgggatttaaaatgaataggggtcaacaggcacctcatacaggagagccccagctggaatctggcaggtgctcctctggaacaaatcttccagaggaaggagcaggcagcaatctttgctattctgcagcctctgctggtgatatccaggcaaacaggatctggagtggacccccagcaaactccagcagacctgcagaagaggggtctgactcaagggaacaaaacaagacagagaatgagtttgacgagttgacagaaataggctgcagaaggtgggtaataacaaactcctctgagctaaaggagcatgttgtaacccaatgcaaggaagctaagaatcttgaaaaaatgttacaggaattgctaactagaataaccagtttagagaagaacataaatgacctaatggagctgaaaaacacagcacaagaacttcgtgaagcatatacaattatcaatagccaaactgaccaggcagaagaaaggatatcagagattgaagatcaacttaatgaaataaagggtgaagacaacattagagaaaaaacagtgaaaaggaatgaataa

SEQ ID NO: 121083 - DNA, 633 bp, Homo sapiens
atggggaaaaaacagtgcaaaaaggctaaaaattccaaaaaccagaatgcctcttctcctccaaaggatcacaactcctcgccagcaggggaacaaaactggatggagaatgaattgacagaagtaggcttcagaaggtgggtcgttacagactcctccaagctaaaggagcatgttctaacccaatgcaaggaagctaagaaccttgaaaaaaggttacaggaactgctaactagaataaccagtttagagaagaacatatatgacctgatggagctgaaaaacacagcacgagaacttcgtgatgcatacataagtatcagtagccgaattgatcaagcagaaaaaaggatatcagagattgaagatcaacttaatgaaataaagcgtgaagacaagattagagaaaaaaatgaaaaggatgaacaaggcctccaagaaatatgggactatgtgaaaagaccaaacctacatttgattggtgtacctggcctgctctattcagacatgtgccgcctcctcccttctccaagaaatcagcctgccttgcaggctttggaacgtggagtcatcttggaggtcaaatgcgtcgtttgcagcacgcaggctggggcagcgcggcgtggtgtaaag

SEQ ID NO: 121084 - DNA, 930 bp, Homo sapiens
atgaaggtttatggctcgcaccctctgaagcagcggcctaagctgtatctggagccctttgagccaagactggggccagatctgccaggatgtgaggagcaacctcctagggtggcacagggcagttgtgacttgggactggcccctgaaaccaatcaatcgtcctggacctttgtgatcatactggttaatccagagcaaaccctaactctcttcaattctatgaaggctgagagaggtaaggaagctgcagatgaaaagttggaagttcgcagaggctatccagaagatctagctaagataattgatgaggcctccaccagtgatacccaggcaaacagggtctggagcaaagctccagcaaaatccagcagacctgcagaacagcagccttattttagaaggaaaactagcaaacagaaaggaatagtagcaacatcaacaataaaggacatccactcacagaccccatccaaaggtcaccaacatcaaagaccaaaggtagataaatccacgaagatggggcgaaaccagtgcaataaggctgaaaactccaaaaaccagaacgcctcttctccttcgaaggatcacaactcctcgccagcaaaggaacaagactggatggagaatgagtttgatgaattgacagaagtaggcttcagaaggtgggtaataacaaactcttctgagctagaggagcatgttctaacccaatgcaaggaagctaagaaccttgaaaaaaggttagacgaactgctaactataataaccagtttagagaagaacacaaatgacctgatggagctgaaaaacatagcagaagaactttatgaagcatacacaagtttcaatagtcgaattgatcaagcagaagaaaggatatccaaaaaaggaaggatatcagagattgaagagcaacttatgcaataa

SEQ ID NO: 121085 - DNA, 1365 bp, Homo sapiens
atggcagccgggagacacctcccagtaggggccgacagacacctcatacaggagagcactggctggcatctggcaggtgcccctctgggatggagcttccagaggaaggaacagacagcaatctttgctgttctgcagcctctgctggtgatacccaggcaaacagggtatggagtggacctccagcaaatgccagcagacctgcagcagaggttcctgactgttagaaggaaaactaacaaacagaaaggaatagtatcaacatcaacaaaaaggacgtcatccgaaggtcaccaacatcaaagacgaaaggtagataaattcacagagatggggagaaaccagcacaaaaaggctgaaaattccaaaaaccagaatgcctcttctccctccaaaggatcacaactccttgccagcaagggaacaaaactggacggagaatgagtttgatgaattgacagaaatagacttcagaaggtgggtaataacaaactcctcccaaactaaagggagcatgttctaaccctaatgcaaggaagctaagaaccttgaaaaaaggttagatgaattgctaactagaataaccagtttagagaagaatataaatgacccgatggagctgaaaaacacagcacgagaacttcgtgaagcaaacaaaagtatcaatagctgaatcgatcaaggcaggaaggaaagggtattcagagattgaagatcaacttaatgaaataaagcgagaagacaagattagagaaaaaagaatgcaaaggaacaaacaaaccctccaagaaatatgggactatgtgaaaagaccaaacctacatttgattggtgtacctgaaagtgacagggagaatggaaccaagttggaaaacactcttcaggatattatccatggagaacttccccaatctagcaaggcaggccaatattcaaattcaggaaatacagagaacgccacagagatactcctcgagaagagcaactccaagacacataattgtcagattcaccaaggttgaaatgaaggaaaaaatgttaagggcagccagaaagaaaggtcaggttacccacaaagggaagtccattaggctatcagcagatttctctgcagagaccctacaagccagaagagagtggggaccaatattcaacattcttaaagaaaagaattttcaacccaaaatttcatatccagccaaactaagcttcataagtgaagaagaaataacatcctttacagacaagcaaacgctaagggattttgtcaccactaggcctgccttacaagagctcctgaaggaagcagtgaatatggaaaggaaaaaccagtaccagccactgcaaaaacataccaaaatgtaa

SEQ ID NO: 121086 - DNA, 850 bp, Homo sapiens
atggctgtggtcatccctgctgccttgggaacagctgctctggtgccctggtccatcctgagggggaaggcaccaaggtactggctcctcccattacttctggacccagataaagtgccaatcattagtgcaagggatctgacttctccagatgctgccctggccagtctgacagctcagtctggagggttagaggagttacacctcaagttagttcatgaagtagctgtgatggctaatactgaatgtcaacttgattggattgaaggatgcaaagtattaatcctggcttgcagattgtgggaccttgtgatcatgacacatccagccttttaccagagtgtgcagtggggaaagggaaatgatcagacatttcagggacgactggacactggctgtgagctgatgttgattccaggggacccgaattgtggtcctccagttaaagtaggggtttatggaggtatcatttatcactgtgatcttaccaaagaggagctggagccaagagttttccgagaggtgaccgtaaaaggaattgatgcttctgattaccagacagtccagctccccaagggtactgagtcttccagaaactgaatcactggttgattgatgatgacgaaaaatgtctctgttcctttgcaatgagaggtcaccaatagggcaccagggtgtttatcaaggcccctcccacctgggagggctgggaccacacaggccacagattagggaatcagaacattgtttgtgaagggaaggatgaggaataaaggaggcgctgggatgtttccccacaatgttttctgtggaaactagggcattattatagcttggtgaattacccttt

SEQ ID NO: 121087 - DNA, 962 bp, Homo sapiens
  misc_feature (1)...(962): n = a,t,c or g
atgattgccaacagctccttttaacccttttcacctctgaaaaaaacgaacgtatccgaaaagaagccaaaaataattcctcacatcagccaatagaccggaagaagacactagagacctccttgaagaggtctttccctctacctggcctaactgggacccaaattcctcaatgtttcaatccagctacactacttcctgactcagagtgcactattcctgctcatgactgtcaagaactgttagaaactatcgaaactggccgatctgatcttcaagatgtgcccctggaaaaggcagatgccgccgtgttcacagacagtagccgcttcctcaagcaggaagtaggaaaagccagtgcagctgttaccatgaagacagacgtgttatggaacaacttcgaaatgtgttccacatcacctcccaaaggtccccagtggggtcaaatcctagttgcctggagtgaacgctttcatactgtcctgcaaatatgcggcaccttgctacactccgggttgtttgtcccacaacagaactgggcagaattattaatgtggactttgttcaacaacggactaaagagggagaagcccatgaactctgatcaggatgtggacacccccaaactggaccgtcaggccggggagagcctcaaggccaagtacctcatgccgccctttgtcacaatgacctccccgtcccacttcaccgccatcccggctaagcaccactctgcccatttcacccgatgcccatcaaagccccagcacccatcattcctggaataagaagcagagctcggtcagctctagggaggctgaggcggctcnnnnnnnnnnnnnnnnnnnnnnnnnnnnnnnnnnnnnnnnnnnnnnnnnnnnnnnnnnnnnnnnnnnnnnnnnnnnnnnnnnnnnnnnnnnnnnnnnnnnnnnnnnnnnnnnnnnnnnnnnnaccaaccaccg

SEQ ID NO: 121088 - DNA, 379 bp, Homo sapiens
gaactttgttgcaggtattggttgactgcagtgttcccaagtggtcgtgctgtgccctaaaggctgctagaacctcaggggccgttgagggcaggttcgagtcccgcaggcaagaaggtggaactctagagaggagggggatgccttggcctgggccccctctgagggaggactgtcgcccctgctgctgggagcatcattagctgcagctcctcatggagagatgcccagcgtaagggtacatcctgtcagaccctcttcccgtgactgttcttccagggtgtgaagggcagaaaggtggggccatctggacccatcatgggacaattctaatggcctctccattgctccctgttgggttggcgagatggcctcaagt

SEQ ID NO: 121089 - DNA, 1859 bp, Homo sapiens
gaattccatactgagctggcaataacagcgctgatccactggaatggggaagggcctcgagctgttctgtcaacacggagttgtttgtcaggcgtcatgggtatcattttgtgcatctgcccttgttcagtgtttccttgtaattttgcggaaaaaagtctgcttagtgttgaaccagacattctgcagcctttgaaagagaatggaaatggagagattgtgatgtgttcattggtgacttttgacacggatgctaacctgtaagatgtgcagatatatcatgtgcaaactgttaagatgctgtcaacattttgaatgacttcttgcaaatagtaaggaaattaaacacgcacagagctgggcaaatgctagaggatggtgttgccttttgcatcttggtgggaaagagatatttaagggggtgaggggagctcagcaacagcgacttaagggcctgctaggagcggggagaagttggttgctggggtgtgcggcctctgtagcccagtcctccgagtatcgtgacaggtggctgggtgcctcagtgctcaggtatgggctcctgttcctgccgcatgggctcctctgctgctgctgctgctgctgctgctgctgctgctgctggcccgccagttcccatggactctccctcacctgtgcttccttctgctccccgacttcatggttggaacgtgctgtcttcccatccctctgggcacgtggctcctcttttacatgcatgcctggcgaatagtatatccccagtaaatgcttgcagaatgaatgtctttcctgaatgttctgctctgctccccagcccccagaaataaaacagaaatgctgtactccttccctgtctcaggcccaggagcattattattattttttttaaatctcttgtggcacttttctactttctcctccacagtacagctgcttgttgagaggcagtatatgtcatgtctaagaagagtcctcaagtgaagtctggtgcagcttctttctagctgtgtgctttcaggaaagccttttgaatttggagcctctgtttcctctagctttactccaaaggaaacaagtgtaagtgcttggcacctgcagcctgagcgtagttcatgccgcccgtattcctggccagcctccgttctctgggacccggcaggaatgtgtttgtcgcctctggccctgtgcaccctggcttcccatcatacctggagcccctgggacaaatgcctgtggagtggatgagtgagtgcatgcgggtccactcagctccccggcaggcttcagaatcttccctgtattctggaagtaagtggcgtcgctgcccagtttaggagagtgccatgtgggactctgttccatcagctgggttggtgcagtgggactgaactttcttctttggttgccctctgcaaacagccatgcagatgttattgatgggcagttgcaggtagaagcatttttggccctacagggtagatctgccagcatggcaggctgatcagccacgggtgccacgtggctctggaggggcttggcgcctacgttagtcagctcgggctgccacgacaaaataccacagactgggaggcccaaacgtattttctcacagttctggaggttgagagtccatgatcaaggcactggcaggtttggcttcttcccattctgtgcctcacctggtcttttccgtgtgtgtggtcttcagtgtttttccgttctcaggaggacaccagtcttgttggatgagggtcccacccttaagctgccatattaccatgattgcctccttaaagaccttatctccagcgacagtcaccatggggtgtgagcctctgcagaggaatttggaattc

SEQ ID NO: 121090 - DNA, 1140 bp, Homo sapiens
atgcctctcacctattcccagatactcgctggagttggagcacacatgtctgcagatgtaaaacgacctgctcccccaggagcggaagacccgatggagcaggtttcacagtgccctcgctgctgcctcccgtttcatctgcacgtctctttcaatgcgggcgtgcgaacttccagagttccaccttcttgcctgcgggactcgaacctgccctcaacggcccctgaggttctagcagcctttagggcacagcacgaccacttgggaacactgcagtcaaccaatacctgcaacaaagttcttaaaaccagctgcagtgagctctcgtaccttgccggcacccgggacctccacaatgcgggcgttccttctggtgtcaacgtggactggtgtttccgtggcacatgcagaagaggctcacaccccaaggtgactgtcgctggagataaggtctttaaggaagccatcatggtaatatggcagcttaagggtgggaccctcatccaacaagactggtgtcctcctgagaacggaaaaacactgaagaccacacacacggaaaagaccagggccaaaaatgcttctacctgcaactgcccatcaataacatctgcatggctgtttgcagagggcaaccaaagaagaaagttcagtcccactgcaccaacccagctgatggaacagagtcccacatggcactctcctaaactgggcagcgacgccacttacttccagaatacagggaagattctgaagcctgccggggagctgagtggacccgcatgcactcactcatccactccacaggcatttgtcccagggtctccaggcatgcatgtaaaagaggagccacgtgcccagagggatgggaagacagcacgttccaaccatgaagtcggggagcagaaggaagcacaggtgagggagagtccatgggaactggcgggccagcagcagcagcagcagcagcagcagcagcagcagcagaggagcccatgcggcaggaacaggagcccatacctgagcactgaggcacccagccacctgtcacgatactcggaggactgggctacagaggccgcacaccccagcaaccaacttctccccgctcctagcaggcccttaagtcgctgttgctga

SEQ ID NO: 121091 - DNA, 666 bp, Homo sapiens
atggaatactatgcagccataaaaaaggatgagttcgtgttctttgcagggacatggacaaagctggaaaccatcattctcagcaaactaactcaggaacagaaaaccaaacaccacatgttctcactctgggttcgtggtctcgctggcctcaggagtgaagctgcagaccttcgtgatgttacagctcttaaggcggtgcgaacccaaagagtaagcagcagcaaggtttactgcaaagagcggaagaacaaagcctccacaggatctcggccaggcctgctctgtgacttccgccacgctcccacgggtggcggcgaggagcctgagccggcgatggtgctacaggaggcgctggagccggccatgtgcctggatcgctacccgcatgtgcagcttgaggcctcggagctgctgctggaagatggcggctcagccctggccactgagctcaacaccgccaagcttgccctggcctatgcaggcatggagatgaatgacttggtggtgagctgcggcctgggcctcgcgccagggtccgtgcccacctggctgctggaccccatgcggctcgaggaggagcacaccgcccccggtgtcaccttggcactcctgcccatgctgaatcaggtggcccggctgctggctgcagggagggcggcctga

SEQ ID NO: 121092 - DNA, 197 bp, Homo sapiens
atgtggcacatatacaccgtggaatactatgcaaccataaaaaaggatgagttcatgtcctttgcaggcacatggatgaagctggaaaccatcattctcagcaaactaacacaggaacagaaaaccaaacaccgcattttctcactctcccatgctcccccaagcctagccatagaaactagaatcctcttcccaag

SEQ ID NO: 121093 - DNA, 291 bp, Homo sapiens
atggaatactatgcagccataaaaaatgatgagttcatgtcctttgtagggacatggatgaagctggaaaccatcattctcagcaaactgtcgcaaggacaaaaaaccaaacaccacatattctcactcatagaagctcaagcccaggtgtcgccgccacccccttaccctgcaccccaggagctcacccagcccctcctgcagcagccccgcgcccctgaggcccctgcccagcagccccaggcagcctcctcactgccacagtcagactttcagcttctcccggcccag

SEQ ID NO: 121094 - DNA, 342 bp, Homo sapiens
agacttggaaccaacccgaatgtccaacaatgatagactggattaagaaaatgtggcacatatacaccatggaatactatgcagccataaaaaatgatgagttcatgtcctttgtagggacatggatgaaattctccctctgtcacttggtttccaccacagaagccctaccagtcactctgaatctcttctcccatctagggctcccacaattgccccctcaccagtgggtgcagactcacagttggacatctgccccggaatgtttcaagaagcctccaatgcatcctgcccaaacaatgaattcgttgtcctgcccctacttggccctttatgccttcg

SEQ ID NO: 121095 - DNA, 439 bp, Homo sapiens
atggaatactatgcagccataaaaaaggatgagttcatgtgttttgcagggacatggatgaagctggaaaccatcattctcagcaaactaacacaagaacagaaaaccaaacactgcatgttctcactcaaaaggtcggccggcctgccccttaccagccgcaggaccagccgggagaaggctggaggcgggtcccactgcctgagggcctgggtgcagcctcactgccccacaagcagaaccaacgcctgcgagctccttaacaatgcgcggtgtgggccacctgcgagctccttaacaatgcgcggccccatgccggacctactgtgttccgacagaatccgcggcatagaatcagccctgcgcctccagagcccaatcctaatgcccccacctggaaggggcttctgttgtcctgggaccagcttcagaatggcag

SEQ ID NO: 121096 - DNA, 253 bp, Homo sapiens
tgtggcacatatacaccatggaatactatgcagccatgaaaaaggatgagttcatgtcctttgcagggacacggatgaagctggaaaccatcattctcagcaaactaattcaagatcagaaaaccaaacaccaagacttgccggcttcaggtgagattcagcacattacaagctgtggtggctacagggcaaaactacttctgtttgagaaaagcagaggaaaagtaaaagggtctttgtcttgcaccttagg

SEQ ID NO: 121097 - DNA, 210 bp, Homo sapiens
atgtggcacatatacaccacggaatactatgcagccataaaaaaggatgagttcatgtcctttgtagggacatggatgaagctggaaaccatcgttctcagcaaactattgcaaggacaaaatccaaacaccgcatgttctcactctcaggaattggaattaaatgagaagattaatgaagagattacccatattcaagaagaaaaacag

SEQ ID NO: 121098 - DNA, 165 bp, Homo sapiens
atgaaatactatgcagccataaaaaaggataagttcatgtccttttcagggaaatggatgaagctggaaacaatcattctcagcaaactaacgttttattctttctttctcttttcccttggtccaatgcacgtggcccaattcacaggtgttgaccctgggaag

SEQ ID NO: 121099 - DNA, 346 bp, Homo sapiens
atggaatactatgcagccataaaaaaggatgagttcatgtcctttgtggggacacggatgaaactggaaaccatcattctcagcaaactatcgcaaggacaaaaaaccaaacaccgcatgttctcactcatagggagcggctctccctccgccgcggtctacacagctgtgcttacagcctgcaccgctggctgggtgcccgccacgcacagaagggcagtaggaacacaaaagggtgtggtggccagggtcccagaacaagtgaaaggggacctgcgagcggggagttttctgaaaactgcacaagccttcttgggcagcgtggtgtcttttcaccaggacgcag

SEQ ID NO: 121100 - DNA, 389 bp, Homo sapiens
atggaatactatgcagccataaaaaaggatgagttcatgtcctttgcagggacatggatgaagctggaaatcatcattctcagcaaactaacacaggaagagaaaaccaaacactgcacattctcaagtggattttgccgatttcggaaccaccatcaaacaggattttcgcctgctggggcaaaccagcgtggaccgcttgctgcaactctctcagggccaggcggtgaagggcaatcagctgttgcccgtctcactggtgaaaagaaaaaccaccctggcgcccaatacgcaaaccgcctctccccgcgcgttggccgattcattaatgcagctggcacgacaggtttcccgactggaaagcgggcagtgagcgcaacgcaattaat

SEQ ID NO: 121101 - DNA, 464 bp, Homo sapiens
atggaatactatgcagccataaaaaaggatgagttaatgtcctttgtagggacacggatgacgctggaaaccatcattctcagcaaactaacaagaacagaaaaccaaacactgcatattctcactgataagcgggagttgaacaatgagaacccatggaaacagggaggggaacatcacacaccagggcctgttgaagagttgggggctaggggagggatagcattaggagaaatgcctaatatagatgacgggttgatggggtatgtgacacagtggcaactcaggtctcaaggaggtaccagggctgctcgggccctggggaaacggcacagcagcagcatgactctgggggtggtggagcatactggcaagtctggcactggcactagggtttggcatgcagcacagcagcagctccagcctcatgggtggtgtagtatcacagtagctcagatcttggg

SEQ ID NO: 121102 - DNA, 1809 bp, Homo sapiens
atggacgccatgaaatataacgatttacgcgacttcttgacgctgcttgaacagcagggtgagctaaaacgtatcacgctcccggtggatccgcatctggaaatcactgaaattgctgaccgcactttgcgtgccggtgggcctgcgctgttgttcgaaaaccctaaaggctactcaatgccggtgctgtgcaacctgttcggtacgccaaagcgcgtggcgatgggcatggggcaggaagatgtttcggcgctgcgtgaagttggtaaattattggcgtttctgaaagagccggagccgccaaaaggtttccgcgacctgtttgataaactgccgcagtttaagcaagtattgaacatgccgacaaagcggctgcgtggtgcgccctgccaacaaaaaatcgtctctggcgatgacgtcgatctcaatcgcattcccattatgacctgctggccggaagatgccgcgccgctgattacctgggggctgacagtgacgcgcggcccacatagagagcggcagaatgtgggccagctggaaaaagtggggttaaggattaagaaaatgtggcacatatacaccatggaatactatgcagccataaaaaaggatgagttcatgtcctatgcagggacatggatgaagctggaaaccatcattctgagcaaactatcacaaggacagaaaaccaaacaccgcatgctctcgctcatagggacacggatgaagctggaaaccatcattctcagcaaactattgcaaggacaaaaaaaccaaacaccgtatattctcactcatagaatcagttttgaggatgtgaggaattacatgccactggcagtaattcactcagatgagagtccaattcttcctctccatgaacagcaagatgccagtgagaatggatggattaaggatacagagagggatgcggatttggagatatatattgtgtctggaattggttcctttcggtgggttcttggtctcgctgacttcaagagtgaagccgcagacccttgcggaatgaagctgcagaccttcgcagtgagtgttacagctcttaaaggtggcgcatccagagttgttcattcctcctggtgggtttgtgttctcactgacttcaggagtgaagctgcatacctgagcgttacagctcttgaaggtggcgcatccagagttgctcattcctcccggttcgtggtctcactgacttcaggagtgaagctgcagaccttcaccgtgaatgctacagctcataaaggtagtgcggacccaaagagtgagcagcatcaagatttattgcaaagagcgaaaaaacacaccttccacagcatgaaaggggaaccaaggcgtgttgttgctgctggctgggggggtgcaatcaaggctgattccaataaccttattctcttatttcagactattgaaaaatattgtccttggttccctgacaaaggttctgtggacctgttagactgggatagagttggcaccactctctgccaactcatgagagatggtgttttacttcctatttctgtttggactgactgggctcttattcgtgttgctttacttccttttcagtctggtgatactcttcaactgccacaagttaacgcggatgttgaaccactccctttacctcggtgcattggcggcatcacgggaccagaaggcggtgacccccctggacccagctttcactatcttgtgggtgtctattatttcttgacctgccgatccacctgggaacaaagaaagagccccgttgcattgcgggctgctggccagatcccgcaataa

SEQ ID NO: 121103 - DNA, 1642 bp, Homo sapiens
aaatgtcaggaaacaacagatgctggagaggatgtggagaaataagaatgcttttacactgttggtgggagtgtaaattagttcaaccattgtagaagacagtctggtcattcctcaaggatctacaaccagaaataccatttgacccaacaatcccattactggatgtatacccaaacaattataaatcattccactataaagacacatgcacacacatatgtttattgtggcactgttcacaatagcaaagaattggaaccaacccaaatgcccatcaatggtagactggaaatgaagaacatgtggcacatatacaccatggaatactatggcagccataaaaaataatcgagttcatgtcctttgtaggggacatggatgaagctggaaaccatcattctgagcaaactatcgtcagcaaactatcgcaaggacagaaaaaccaaacactgcatattctcactcataagtgggagttgaataatgagaacacatggacacagggaggggaagatcacacaatcacacactggggcctgttgtgggaatagttactccaaagcctctgcttgttctcatccttggacaattctggcaatttaattgccaaggaagaagcatgtctgccttaacacaagctttggcccaatgtgtccatcagactgtagaagattgtcgttgggattcacactataacaggtgtccccaactgcagggccacggagcagtagtggtccctggcccattaggaaccaggccacacagcaggagttcatatccaatgcactctggacactttctttccagcattctagacacgctttcttcaacccacaggaacagaatgaacaaaaggaaggaagaacatcaaatacaaactactttcagagaatactataaacacctctacttaaataaactggaaaatctagcagaaattgataaattcctggacacaaacaccctcccaagactaaaccaggaagaagtagaatccctgaataaaccacaaacaagttctgaaattgaggcaataattaatagcctaccaaccaaaaaaagtccaggaccagagagattcacagccaaattcaaccagaggtacaacgaggaactggtaccattccttctgaaactatgccgaacattagaaaaagaaggactcctccctaactcattttatgaggccagcatcatcctgataccaaaacctggcagagacacaacaaaaaaagaaaatttcaggccaatatccctgatgaacatcaatgcgaaaatcctctataaaatactagcaaaccgaatccagcagcacatcaaaaagcttatccaccatgatcaagttggcttcatccctgggatgcaaggctggttcaacatacacaacatacacaaattaataaacgtaatccatcacataaacagaaccaacgacaaaaactacatgattatctcaagagatgcagaaaaggccttcgataaaattcaacaccccttcatgctaaaaactctcaatgaactaggtactgatgtaacatatctcaaaataataagagctatctatgacaaacccacagccagtatcatactgaatggacaaaagctggaagcattgcctttgaaaatcggcacaagataa

SEQ ID NO: 121104 - DNA, 1464 bp, Homo sapiens
tgtagactcctgcatagccttccaaagttcttcatttggtgaatattatgagaaatgacaccgaggtgactggcacatggtcgaggcagctgcttaggcagcttaagcatgccctgtgaaacatccctgtgggggactccgaccagcccaggcaacgcggatcctgagaacgctcccgggtaggcatctgcccctgtgggatgcctcaccagagcagtgtgtggcaggcccccgtggaggaccaacacagtggttgaaccccgggaagggacaaggatcttggagtttggacatctaaaacttgcacatgtaccacccctagaatttctggtaaaccagcaccagcctgaagatcacgttctcatcaaacggtggaaagaagaaaaactcgagccagcctgggaaggaccctaccctgtgctgctaaccaccaagactgctgttcgtacagcaaaaaaaaaaaaaaaaaaaaaaaaagatggactcatcacacccaagtcaagaaagtgccaccccctccagagtcgtgggccatagtcccaggggaaaaccctaccaaactaaagctaagaaaaatgtaactcttttcatctattctattactcttctttctttcctcgtgctattgctgaccatctagttattaacataaccaagtcaatttcacctcaaactattgcatttaatgcttgccttgttataccctgtggggacttgccaagtcaaagacagctctctacttcagaaaagtacttctgtccctcctgactctcctcagactggacattagtaaactaggaccatttaatccagggagatttcgataaagaccccagtgccaaccaggagtcttgccccccgatgtagaactttcatgccatagttggtccaacgttctgtggaccactgcagccaaaacgccaattttctgctcctactgagaggtgaagccagctggacttcctgggttgagtggggacttggagaacttttctgtcttacaagaggattgtaaaatgcaccaatcagcactctgtagctaggactgtaaaacacaccaatcagtgctctgtaaaacgcaccaatcagcagaatcctccccgtctgtatgcagccaccatgcagcccacctaggctgtgggctctgttgatgccgccttggagtgtgcggcttgctctgggtgggccttccaggggaggagggaagttggaactggcaatcgagccgtagagagagagcaaatgggaagcagcttgtgttccccaggcctggactagcatgcccttcctggcatccatttttcctgctgggccccaagggacctggccctgtgcgtcagttctgtggctgctagaccttgggctctgtggtcgggtctttggacatgacatctgcacgggctgggggctgaggctgctggccagggcgagccagggcaggccaccaggctgcagaacccacat

SEQ ID NO: 121105 - DNA, 383 bp, Homo sapiens
tgctcacagtaagggcactgaaaggagcaagtttgtcaggtcactgcaatgagtaagccatgctttcaggtcttcctatctggtcagctgccttctggcactccagctggatttacgagccaaaattatggtttgaggtggtgtaattggctaagtctctggacaaaaattacccaaaataatctgaaactttactggccaaagcgggactcctttaaaattccaaaacttgccagtctacacacacaactggaaaaaagaaaataccaaacctcccagagacaatgggaagcccttttcagctgggactttgaaagtcctcaatggaatcaaggccgtcatcatctctcttctggaaaataactacaaagtgagtgagcaca

SEQ ID NO: 121106 - DNA, 762 bp, Homo sapiens
atgaggcagcaccaggatttgcaaagcataaagccacatgcctgccatgtgcgtgactgtccacgggccagctgccagcctgagaatgacactcctcctgactctgcgtttcccatccccactccttgtcctggattccgcatcgcccaccctcttgggctactcccttattttggagaatcctttacaagcttcctgaaaaaaactgggactcctttaaaattccaaaacttgccagtctacacacacaactggaaaaaagaaaataccaaacctcccagagacaatgggaagcctttttcagttggtactttgaaagtcctcaatggaatcaaggcagtcatcatctctcttcgggaaaataactacaaagttgtaaatgcagctctctttctcttggtccttgaaaaggcctgtttcagggcagcagatatgaggcccaagaagctgctttttaaacagcctcctgatttgcttctgacgagcagtcaaagagacattctatgtgatgtcagagacaactgtgttagatgccaagaaaaccaagagaaagggaagcctggtgtgggaataaagtgtaaacagacccctccttgcaacatggtgttccagtgcctcttaattgagggtgagaattgtggagaagatgctctaagagaagcagaaagatttgttattggtgatgaagaatttgaaagattcttggagcgccacaaagaagtgtcctgcttggtgcctgaatctaaccagaaggttgtataa

SEQ ID NO: 121107 - DNA, 1686 bp, Homo sapiens
atgccattgggactgagtcctaatggatgcagaagaattccccagaatgaagatccaactgtgcccacaatgatcttagaaagaaacaaattcaactcagctggttcaaatgggaagcctttaataaaggtgctattttcagcagtatgggtggggctaacaagaccaacaagggtaactgggtcccagagacaagcaacagactacagcattactgcctttaggactgggggcaagggaaggaaatggcatcacaggagtccagtgagagctggagccaggttaagggactgctcctgggggtatgacaccactgtcaaagcaggtgtggagggtaaacctctccttccatctgcccttcagtctcaggtacctcctgttgttcaaacccaagcagaatctagctgtcaagggagcctcaaaagtgacattcacagggtcaacctctggggtacagagaaggtctggggatgcatccgtggagaggggaaagtggagaggagggattcctggcacttctctgatacccggagttactgggaacttatggaaagagaacagagagtcatgtctcccccaggaagctgccagtggagacacaggcaggaaaatcaggcccagagtctgccagcaacgtgttctgtgacctcgctggcagactatgatctggaattcagatctcctgatcttcagttcacatggggcagtccacgttctctgcaccctacaagggcaagggcagagcatttctggtcagtttctccatggtgcctcccacccctttgtaaagtggatggacatgatggaattcagttgtctcaccctgatagcctgggtgttgatattcactttacccgcactcagacacaggcgaccttgaagcagttctcggtgttcccaccccctcccaggatcctgatcaccacactcatttcaacacttcccaagtccatgtctctagcccaagtgggcctgcatttccagctgcctgttagacacaacaaaaaagagaattttagaccaatatccctgatgaacatcgatgcaaaaatcctcaataaaatactggcaaaccgaatccagcagcacatcaaaaagcttatccaccatgatcaagtgggcttcatccctgggatgcaaggctcattcaacatacgcaaatcaataaatgtaatccagtatataaacagaaccaacgaaaaaaaccatatgattatctcaatagatgcagaaaaggcctttgacaaaattcaacaatgcttcatgctaaaaacgctcaataaattaggtattgatgggatgtacctcaaaataataagagctatctatgacaaacccacagccagtatcatactgaatgggcaaaaactggaagcattccctttgaaaactggcacaagacagggatgccctctctcaccactcctattcaacatagtgttggaagttctggccagggcaatcaggcaggagaaagaaataaagggtattcagttgagaaaagaggaagtcaaattgtccctctttgcagatgacatgattgtgtatctagaaaaccccatcgtctcagcccaaaatctccttaagctgataggcaacttcagcaaagtctcaggatacaaaatcaatgtgcaaaaatcacaagcattcttatacaccaataacagacaaacagccaaatcatga

SEQ ID NO: 121108 - DNA, 975 bp, Homo sapiens
atggacatagagacagaaacaatagacagtgggaactaccggaagtggcagggaggaagaggaacaagggctgaacaactaccagttgggtattattctcactacctaggtgctggcatcaatcataccccaaacctcagtgtcacacaatatacccatgacaaaaacctgcacacttttccaagtagaaaatcaaagaagacatcaaaatgtgacatcatcattaagcagaaacggcataaatctccaaaggagaaggctctgcaacaggtccaggctgctgtgcaagctgttctgccacttgggccatatgatccagcagatccaatggtgcttgaggtgccagtagcagatagggatgctgtttggagcctttgccaggcccccatagccacccctgtcattgcccaatgggcccatgaacaaagtggccatggtggcagggatggaggttacacatgggctcagcaacatggacttccatcctccaaggctaaactggctacggccactgctgagtgcccaatttgccagcagcagagagcaacactgagccctcgatgtggcaccattcctcggggtgatcagccagctacctggtggcagaaagggaagaggtttgtcctcactggaatagacacttactgtggatatgggtctgcctattctgcacgcaatgcttctgccaagactaccatccacggactcacggaatgccttttccactgtcttggtattccacacagcattgcctctgaccgaggcactcactttatggataaagaagctccaagtgcttcagttttgggactcgcactggctctccttgctcctcagcttgcagacagcctattggaggaccctgtgattgttaaggctgacccattgatccttggtcctgtgaactgtcccctggcccaagtaaccaagaccactctggctcaggttcaccttggaaatgatgcacgcaaatag

SEQ ID NO: 121109 - DNA, 432 bp, Homo sapiens
tggggtccagaacaggaaaaggctctgcaactagtccaggctgctgtgcaagctgctctgccacttgggtcatatgacccagcagatccaatggtgcttgaggtgtcagtggcagatagggatgctgtttgcagcctttggcaggctcccataggtgaatcacaccataaagtgggtcgtgcacagcagcattccatcatcaaatggaagtggtatatatgtgatcgggctcgagcaagtcctgaaggcacaagtaagttacatgaggaagtggcccaaatgcccatggtctccactcctgccaccctgccttctctccccaagcctgcactgatggccttatggagagttccctatgatcagttgacagaggaagagaagactagggactggttcacagatggttctgcaggatatgcaggcaccacctga

SEQ ID NO: 121110 - DNA, 753 bp, Homo sapiens
atgatcaaacgttttggggactactggaaactggctcagctgatgttgattccaggggacccaaaatgtcactgtggtcctccagttaaagtaggggcttatggaggtcaggaaattaaaggagttttagctcaggtccaaattacagtgggtccagtgggtacgcggactcatcctgtggtcatttccccagtgccagaatgcataattggaatagacatacttagcagctggcagaaccctcacactggctccctgactggtagggtgagggtgattatggtggaaaaggccaaatggaagccattagagctgcctctacctagaaaaatagtaaatcaaaaacaatattgcatccctggagggattgcagagattagtgccaccatcaaggacctgaaagacacaggggtgatgattcccaccacatccccattcaactctcccatttggcctgtgcagaagacagatggatcttggagaattacagtggattatcaagtggtgactccaattgcagctgctgtaccagatgtggtttcattgcttgagcaaattaacacatctcctggtacctggcaacacattactcatttggatgtgttactctggcggatttatcaagtgacccaaaaggctgccagttttgagtggggtccagaacaggagaaggctctgcaacaggtccaggctgctgtgcaagctgctctgccacttgggccatatgacccagcagatccaatggtgcttgag

SEQ ID NO: 121111 - DNA, 430 bp, Homo sapiens
ttttccaagtagaaaatcaaagaagacatcaaaatgtgacatcatcattaagcagaaacggcataaatctccaaaggagaaggctctgcaacaggtccaggctgctgtgcaagctgttctgccacttgggccatatgatccagcagatccaatggtgcttgaggtgccagtagcagatagggatgctgtttggagcctttgccaggcccccatagccacccctgtcattgcccaatgggcccatgaacaaagtggccatggtggcagggatggaggttacacatgggctcagcaacatggacttccatcctccaaggctaaactggctacggccactgctgagtgcccaatttgccagcagcagagagcaacactgagccctcgatgtggcaccattcctcggggtgatcagccagctacctggtggcag

SEQ ID NO: 121112 - DNA, 1518 bp, Homo sapiens; identical to SEQ ID NO: 118359

SEQ ID NO: 121113 - DNA, 1523 bp, Homo sapiens
atgggagaagagcgtagatggaggcccagcagcaacgggaagcatggtgcatttgcggaactggacaaaggctggttggtgtggctggaaggaaaaggtgtaattggggcaagaagaagctggagagcacacagtgccctgataaaaatatgtgttcaacagataaaggactcccttcctggtaaaatgagtaagggactcttacaacagcaacaaaaacctaagcacctgctccatgatctgtataaggcaatgagcaccagatggggagtgcagaaagccaggctcaactgcacagctttgccaccaactggctgtgtgactttggacccatcgttcctcactgagcctcagtttccccggcagctgtcagaagacctgcttctcacgcgtgaggccctggagaaggaggtgcagctgcggcgacagctccagcaggagaaggaggagctgttgtaccgggtccttggggccaatgcctcgcctgccttccctctggcccctgtcactcccactgaggtggagaaggaaagggagctagagcttcgagacagactggatgagcagcaaagggtcctggaaggaaagaatgaagaggccctgcaagaccctagattggtagatccactgacatcttgcactgtgcactttgaaaagccacagatgctcaacgccagactatggaagcatgcagggagggaggctgtagcctgcaaagtcagagggtcagagctgcccaagacaatgggaacctaccccttgcatcagcatgacctggatgtgagacatggagtcaaaggagatcattttggagctttaagatttgattgccctgctggattttggacttgcatggggcctttagccccttcattttggccaatttctcccatttggaatggaccaccacttgatatcagcggataccctgccacttctacacagaagtccactatgtgtctgaggatcattgatactcgactgcatccagagagtcgactcaagcagcagtcaaactttgcactgaacgctagggagaaggctctgcaacaggtccaggctgctgtgcaagctgctctgccacttgggccctatgacccagcagatccaatggtacttgaggtgtcactggcagatagggatgctgtttggagcctttggcaggcccccataggtgaatcacagcaaagacctctgggattttggggcaaggccctgccatcttccgcagataacaactctcctttggagagacagctcttggcccgttactgggctttggtggaaactgaatatttgactatgggtcatcaagtcaccatgtgacctaactgcccatcatgaactgggtgctttctgacccatctagccataaagtggtttatgcatggcagcattccatcatcaaatggaagtgatcgagcttgagcaggtcttgcaggcacaagtaagttacatgaggaagtggctcaaatgcccatagtctccactcctgccaccctgccctcgtgccgaattcttgc

SEQ ID NO: 121114 - DNA, 2193 bp, Homo sapiens
atgagctacattcgaaaagaactgcttgagttttctaatttatataagcagaaatctggatacctctggccttttaccagggtaactgttcattggggaaaaggaaatgatcagacatttcgaggactattggacattggctctgagctgatgatggttccaggggacccaaaatgtcattgtggtcctccagttaaagcaggagcctatggaagtcacataattaatagcgttttagctcaggtccaacttacagtgggtccagtgggtccgcggacttgtcttgtggtcatttccccagtgtcagagggcataatcggcatagacatacttagcagctggcagaacccccatattggctccctgactggtagggtgagggctattatggtgggaaaggccaaatggaagccattagagctgcctgtacctagaaaaatagtaaatcaaaagcaatattgcatctctagaggaattgtggagattcgtgctaccaccaaggacttgaaagatgcagggttggtgattcccaccaaatacccattcaactctcccatttggcctctgcagaagacaggtgggtcttggagaatgacaatgaattatcgtgagcttaaccaagtggtgactccaattgcagctgctgtaccagatgtatatcaaccctccggctttgcggctttgtgtcatcatcttattcacagagatcttgatcacttttcacttccacaagatatgacgctggtcaactgcattgatgacattatgctgattggatccagtgagcaagaagtagcaaactcactggacttactggagagacatctgcatgacagaggatgggaaataaatctgactcaaattcaggaactttctaccttagtaaaatttctaggggtccagtggtgtggggcttgtccagatattccttctaaggtgaaggataagttactgcatttggcccctcctacagccaagaaagagacacaacacctagtgggcctatttggattttggaggcaacacattcctcatttgggtgtgtttctttggcccatttatcaagtgacccaaaaggctgctagttttgagtggggtccagaacaggagaaggccctacaacaggtccaggatgctgtgcaagctgctctgccacttgggccatatgacccagcatatgggtccacccatgttatcgcccaatgggcccataagcaaagtggccatggtggcagggatggatgtgacatacgggctcagcaacatggacttccactcaccaaggctgacctggctgcagctactgctgagtgtccaatttgccaacagcagagaccaacagtgagccctcgatatggcaccatttctcagggtgatcagccagctacctggtggcagcttgattatactgaacctcttccaccatggaaagggcagaggtttgtcctcactagaatagacacttactccagatatgggtttgcctatcctgcaggcaatgcttctgccaaaaccatcaaccgtggattcatagaatgccttatccacagccctgccaggattcacgggtacaggaatcaaagggtggaagtggaagtggcaccactcaccatcacccttagagattcactagcaaaatttttgcttcctgttcctgaaacgttatgttctcctggcctggagatcttagttccagagggaggaatactgccaccaggagaaacaacgattccattaaactataagttaagattgccatctggacactttgggctcctcctacctttaagtcaacaggctaaaaaggaagttacaatgttgattggggtgattcacccggactatcaagatgaaatcattctactactccacaacggaggtgagatagataccagtcagttgggagactcaaggacctcggacaaagagtcagaccaagacacactggggcagaggttgagtcatcaagactcctggtggctccaagcccatggctttgctgggtactgccgataccactctcacgggctggaagaaagttcctgcagctcttccaggctggtgctgcatgctggtggctctacaggactggagtctcagagccatcctatttccccaggtccactaggctttgcccttgtggcagctctctgcagtagcctggaccccataattccactgagcattgcctga

SEQ ID NO: 121115 - DNA, 430 bp, Homo sapiens
tcgatacgacttttttttttcatgttctccagatgtcctttatttatattcgtattcataagttctcatactacttctggtctttttagtagctcttttagggctgtagccacagaacggtcattctagtgattctgagcagggtggagaggagtgcagcatccctgggcgggtgggtcagtgaagacacgcccagctcacctgatattctgtgactggttgcagaacacaagtccctctcgaaattgtttaggtttgtggggagatatctgtaagacagagtgagaaagccttatggaaaaggccaagaagtgctcagcaggcctagcagaacgctcaggaatcccacccacaccatccctcatttctgggtctttcttcctggacatctcaggcctcagacctgcatccaggagctggagcacgcagt

SEQ ID NO: 121116 - DNA, 666 bp, Homo sapiens
gtccactggtctctcattactgtgacactctctaatcgaattatttcattttatgattcccaaggcattcattttaagttttgtgtagagaatataaggaaagtatttgctgactgaagccagagaaaaaaatagacctgaatttcttcagggttggcagactgctgttacgaagtgtattccacaacagaaaaacgacagtgactgtggagtctttgtgctccagtactgcaagtgccttgccttagagcagcctttccagttttcacaagaagacatgccccgagtgcgggaagaggatttacaaggagctatgtgagtgccggctcatggactgaaactcagcagggactctggggaagtctgaccaagttgggagcagatggtttgttacttggaatctccaaacacttagttgaatttttacagatatttcagatcagtgggtgttggggccactattgttacctccaaattttattttttgcccttaattccatttctcccagctaccatgtactattgtttaatgttcagtttggtttcatttttaattttatggttctgtgcgtcccccatatttaatatttattattcaaacgcatgcatatagacagagcatgcagtgaagagtattaaaaaaaaaagcttagtaaaaaaaaaaaa

SEQ ID NO: 121117 - DNA, 862 bp, Homo sapiens
atgtactgcaagtgcctcgccttagagcagcctttccagttttcacaagaagacatgccccgagtgcggaagaggatttacaaggagctatactttcagctgttttatctatctatgttagatgttgaaagggaagcaaaatccaggatcaaatctatctggctgcttttctggttaaaaaacgacgctgagcaggtcgacgctgtgaccctgagtggcgaggacatttacacggcggggaagacgtacggcctggttcccgcagccggggagcactatgcccatgcgctctttccagaaaggcagcacacgcatgtctctgccgtggccccagatcctccccgcgccgccgttttgagcgttcacactcattacccagcctcctggccaaaatcctcccgggacaccccacctggactgctgcgaacgggcctccacccgcctccccggacccgcagcgccccccgctccctcagggttctggggtgaaggggtctgaatagcaccaggggaggcggcagggcggtcctgtcctacctgcgcccgagcactgctgagacgacataccttccaccgccgcctcgtagttctgccccagccaggcgcgatatctccccacaaacctaaactatttggagagggacttgtgttctgcaaccattgccaaaatatcatgtgagctgggcgtggcttaactgacccacccgcccagggatgctgctctcctctccaccctgctaataattaatagaatgatcgttttgtggctacaacactaaaagagctactaaaaagaccagaagtagtatgagaacttatgaatacgaatataaataaaggacatctggagaacaaaaaaaaa

SEQ ID NO: 121118 - DNA, 1215 bp, Homo sapiens
atgagtgaattcccattcacaattgcttcaaagagaataaaatacctagaaatccaacttacaagggatgtgaaggacctcttcaaggagaactacaaaccactgctcaaggaaataaaagaggatacaagcaaatggaagaacattccatgctcatgggttggaagaatcaatatcatgaaaatggccatactgcccaaggcaatttatagattcaatgccatccccatcaagctaccaaagactttcttcacagaattggaaaaaactgctttaaggttcatatggaaccaaagaagagcccgcattgccaagtcaatcctaagccaaaagaacaaagctggaggcatcacgctacctgacttcaaactatattgcaaggctacagtaaccaaaacagcatgccaggaggtggcggtagtaaccaatggcaaaatcctgagacactgcctctatcagcttctcattgtcctgcggacgcttcctggatctaatctgatgcttatgaaagtgatttccttctttcgaaaacaccaggcccaaacaaaaactaacttcatcctgcagataaaaactgtcagtggccagtcacagacctctgaaatgtccttcctgactgttagctccacagcattcctacagctcccgccgcagttccgccctccggagggttccaacagcagcccagtgcgcctccccagccccaggctccctccactccagcactggatgagtacagtgtcctgggctaaagttgatctatcccagaccctcaccttcagcagcatcagtggccctcacagcagctctccctcctctgtattcctacttagtggcagctgtggcctgcagcacccagaaacagtgaggctgtcctccagctgcactgagtggttctgcctgtcgatggcctgccagcctgccgtgggccactatcagtctgctcttacaccgaccagcagcatcagcaccccctgggagtttgtagaattcctggacactaacccagatctgctgaaccagaatccacagtttagcaggactgcccaggctctcctacttcgctatctctccatcgctggcattcatacggcctcacccatctccccgagggacagctgctcccagaaccaccctgcagctgagcagcaagatgagcagaattttccctgtgagcaggagacaaggctaaagctgcatgtgtgtcaatcgtga

SEQ ID NO: 121119 - DNA, 2043 bp, Homo sapiens
atggaagaacattccatgctcatgggtaggaagaatcaatatcgtgaaaatggccgtattgcccaagaattggaaaaaactactttaaagttcatatggaaccaaaaaagagcctgcatcaccaagtcaaacctaagccaaaagaacaaagctggaggcatcacgctacctgacttcaaactatactacaaggctacagtaaccaaaacagcatggtactggtaccaaaacagagatatagatcaatggaacagaacagagccctcagaaataatgccgcatatctacaactatctgatctttgacaaacctgagaaaaacaagcaatggggaaaggattccctatttaataaacggttctgggaaaactggctagccatatttagaaagctgaaactggatcccttccttacaccttatacaaaaattaattcaagatggattaaagacttacatgttagacctaaaaccataaaaaccctagaagaaaacccaggcattaccattcaggacacaggcatgggcaaggacttcacgtctaaaacaccaaaagcaatggcaacaaaagccaaaattgataaatgggatctaattaaactaaagagcttctgcacagcaaaagaaactaccatcagagtgaacaggcaacctacaaaatgggagaaaattttcgcaacctactcatctgacaaagggctaacatccagaatctacaatgaactcaaacaaattcacaagaaaaaaacaaacaaccccatcagaaagtgggcgaaggatatgaacagacacttctcaaaagaagacatttatgcagccaaaaaacacatgaaaaaatgctcaccatcactggccatcagagaaatgcaaatcaaaaccacaatgagataccatctcacatcagttagaatggcaatcattcaaaagtcaggaaacaacagagttttaccccttgcacctctggctctggctgccctctggatggatcctgtgatgccaggcatggatggcctgctaggggactcagagagcttccagggcctttctgctactttctttgcctctgtatttcactcagctctccacattgactcagctccagggccctgcatcggccctggagactcctctgctgattcctctccaacatttcttcctccagaagccaaaaggaaaaactacctcctcctttggaggaaaaacctaaaaaagttctcagatgaccccaaaaggctcatagagggcttccccaaattggctcttacatttagattaatttggaaggacataaatgtactcctgggacaagcccttttacaagaggaaagacagaccatctgcggagcagcaatccactgtcgaaatgacttacacctggaaaatgccaactaccctggaggggctacagctgttccccagctggaccccaatcaggactacaatgccaaagcgggaatatgggccaggaaccataggctcttgtgtctaatagagacaacgacgcaacaaccgaccaacgcacacagtccacaaacacaacgacaacaacacgacacagacaaaccacaaccgaacccaccagccaaaacaaccggtgttcctgtatcttttctggcttttctatatcagtatctgtgtgggcacatatccataagctggcccgtggtaattcttaagtacgctgcgagcgtctatggtatttctctagcagaccgtaagcgacaatatgacagatactttcgatatgaacgtttacgcaccataaagcctaatttcttgccattccaaatatttaagtctgggagtgtggtaaagctaaaagctggcttcacaatcggaaaagttcacaatacagaagtaacagctttaaaggtttctgacactcgaagagcgcagcatttgcagacaggatgttggagtgcagttgtgacccacccaaacaacttggaaaatgtagtacggcatccgccagaggctctggctgcttcttacaacaaacccttcatctgctccctggtcacacttcaaggtgcatttgtgacttag

SEQ ID NO: 121120 - DNA, 453 bp, Homo sapiens
atgcaccccagtggagttgaaattgagttgagatcaaatgcagcaggtgttgctcagagaatttgttttgatgtggacaatggcacatctgcgggacggagtcccttggatcccatgaccagcccaggatccgggctaattctccaagcaaattttgtccacagtcaacgacgggagtccttcctgtatcgatccgacagcgattatgacctctctccaaagtctatgtcccggaactcctccattgccagtgatatcgctggctcaggactcagcaagtctttctctttgggagagacaaggctcgccaggactagtgaagatgactctggttcacttcctggtaaccagggaagccacttcacccagcagcaacgatcttgtggcctcatcaccatcctcaagcttgcagactgtgctaggccctccctgccaggctatgaaagaagatag

SEQ ID NO: 121121 - DNA, 3341 bp, Homo sapiens
atggggaaaaaacagaacagaaaaactggaaactctaaaaatcagagcgcctctcctcctccaaaggaacgcagctcctcaccagcaacggaacaaagctggatggagaatgactttgacgagctgagagaagaaggcttcagactatcaaattactctgagctaccggaggacattcaaaccaaaggcaaagaagttgaaaactttgaaaaaaatttagaagaatgtataactagaataaccaataagagaaactttaaaccaacaaagatcaaaagagacaaagaaggccattacataatggtaaagggatcaattcaacaagaagagctaactatcctaaatatatatgcacctacaggagcacccagattcataaagcaagtcctgagtgaccgacaaagagacttagacttccacacattaataatgggagactttaacaccccactgtcaacattagacagatctacaagacagaaagtcaacaaggatacccaggaattgaactcagctctgcaccaagcggacctaatagacatctacagaactctccactccaaatcaacagaatatagatttttttcagcaccacaccacacctattccaaaattgaccacttacttggaagtaaagctttcctcagcaaatgcaaaagaacagaaattataacaaactatctctcagaccacagtgcaatcaaactagaactcaggattaagaatctcactcaaaaccgctcaactacatggaaactgaacaacctgctcctgaatgactactgggtacataacgaaatgaaggcagaaatgaagatgttctttgaaaccaacgagaacaaagacacaacataccagaatctctgggacgcattcaaagcagtgtgtagagggaaatttatagcactaaatgcccacaagagaaagcaggaaagatccaaaattgacaccctaacatcacaattaaaagaactagaaaagcaagagcaaacacattcaaaagctagcagaagactaaaccaggaagaagttgaatctctgaatagaccaataacaggatctgaaattgtggcaataatcaatagcttaccaacaaaaagagtccaggaccagatggattcacagccaaattctaccagagtgttggaagttctggccagggcaattaggcaggagaaggaaatcaggggtattcaattaggaaaagaggaagtcaaattgtccctgtttgcagatgacatgattgtatatctagaaaaccccattgtctcagcccaaaatctccttaagctgataagcaacttcagcaaagtctcaggatacaaaatcaatgtacaaaaatcacaagcattcttatacaccaacaacagacaaacagagagccaaatcatgagtgaactcccattcacaattgcttcaaagagaataaaatacctaggaatccaacttacaagggatgtgaaggacctcttcaaggagaactacaaaccactgctcaaggaaataaaagaggatacaaacaaatggaagaacattccatgctcatgggtaggaagaatcaatatcgtgaaaatggccatactgcccaaggtaatttacagattcaatgccatccccatcaagctaccaatgactttcttcacagaattggaaaaaactactttaaagttcatatggaaccaaaaaagagcccgcatcgccaagtcaatcctaagccaaaagaacaaagctggaggcatcacgctacctgacttcaaactatactacaaggctacagtaaccaaaacagcatggtactggtaccaaaacagagaaatagatcaatggaacagaacagagccctcagaaataacgccgcatatctacaactatctgatctttgacaaacctgagaaaaacaagcaatggggaaaggattccctatttaataaatggtgctgggaaaactggctagccatatgtagaaagctgaaactggatcccttccttacaccttatacaaaaatcaattcaagatggattaaagacttaaacgttagacctaaaaccataaaaaccctagaagaaaacctaggcattaccattcaggacataggcatgggcaaggacttcatgtctaaaacaccaaaagcaatggcaacaaaatccaaaattgataaatgggatctaattaaactaaagagcttctgcacagcaaaaaaaactaacatcagagtgaacagacaacctacaaaatgggagaaaattttcgcaacctacttatctgacaaagggctaatatccagaatctacaatgaactcaaacaaatttacaagaaaaaaacaaacaaccccatcaaaaagtgggcgaaggacatgaacagacacttctcaaaagaagacatttatgcagccaaaaaacacatgaaaaaatgctcaccatcactggccatcagagaaatgcaaatcaaaaccacaatgagataccatctcacaccagttagaatggtgatcattcaaaagtcaggaaacaacaggtccctcatgtatccaaggagattacgcattcagccacgacaatgtactgacaataatgaaaaaagcacatggaacaaccacaggcagaaagattacaaactctgcaataaatataaaggtattggttttataaggtggcctgcaggctacggaccagcacagagctctggcaaatgtggaatgccaggagatgtacaaaaaaatcaagtttcttggtataaagttcaaaatgctttgagtagagttgttcaggaggtcctcagtggcactgccactcactggttgggacgtttttgttctctgtcctcctgtgtggaagatgacaaggacggctttgtgcaacttctgttgtatgcgctgcttttcaaccccttggatgagatactcatacaaggaacgaaaaacctaaaaaagttctcagatgaccccaaaaggctcatagagggcttccccaaattggctcttacatttagattaatttggaaggacataaatgtactcctgggacaagcccttttacaagaggaaagacagaccatctgcggagcagcaatccactgtcgaaatgacttacacctggaaaatgccaactaccctggaggggctacagctgttccccagctggaccccaatcaggactacaatgccaaagcgggaatatgggccaggaaccataggctcttgtgtctaatagagacaacgacgcaacaaccgaccaacgcacacagtccacaaacacaacgacaacaacacgacacagacaaaccacaaccgaacccaccagccaaaacaaccggtgttcctgtatcttttctggcttttct

SEQ ID NO: 121122 - DNA, 1785 bp, Homo sapiens
atgcccatcaatgacagactggataaagaaaatgtagcacgtatataccatggaatactatgcagccataaaaagggtgagttcatgtccttagcagggacatgggtgaaactggaaaccatcattctcagcaaactaacacaagaacagaaaaccaacaccgcatgttctgagttggacaatgagaacatatggacacaggcaggggaacatcacacactggggcctgttgtggcctgttttgttgcctgccatatggtttatcctggagaatgctggttctttgaaaagataaataaaattgatagcccactagcaagattaaccaagaaaagaagagagaaaatccatataacctcactgagaaacaaaacaggagatattaaaacggacaccactgcaatacaaaagatcattcaaggctgcaatgaacacctttatgcacataaactagaaaaactagaagatatggataaattcttggaaaaatacaaccctcctagcttaaatcaggaagaattagataccctgaacagaccaataacaagcagagagattgaaatgctagtggatagcatattagacagcaccgagagtcttgcagaatattctgttgcagaaatagaatgttgcagaaatattctattggacagtgctgttctagagtctaaaacatttacttctatgtgccttcagaatagtctaaatccatttgagcatacagaaagcggcatgcagattcctcagttcatcctggtgggcgacagcagaggtggaggacttcagagtctgtaccgagtagacctaagtcactgtggcccttttggacaggaatccacaggagggatgacaaggggactcagatgcaggttttcctctgttcctctgaccatctacattcttaacatatactgggacctccagtgctatgtccagagaaaggaaggcccagttcccttacagctgctggctagggataagatcctcacctacctaaagggatatggagaatgggaatttgagagaaaggaaaaccatttcattgctggaatgctccaaacaaaggtcactgtaagatcacagtgtcaaaggaaaaacctaaaaaagttctcagatgaccccaaaaggctcatagagggcttccccaaattggctcttacatttagattaatttggaaggacataaatgtactcctgggacaagcccttttacaagaggaaagacagaccatctgcggagcagcaatccactgtcgaaatgacttacacctggaaaatgccaactaccctggaggggctacagctgttccccagctggaccccaatcaggactacaatgccaaagcgggaatatgggccaggaaccataggctcttgtgtctaatagaggaaagccagcagtcctacctcagggttttagagatgccccacacttatttggacaagacccagcaaagaaatctaaccaagctatatcttgagtggggacaacttctgctgtatgtagatggcttactcatctgctccccctccataaagcttgcacaacaatatgcagtacaaaccttaaacttcctagcaaaatcgctggctcaggactcagcaagtctttctctttgggagagacaaggctcgccaggactagtgaagatgactctggttcacttcctggtaaccagggaaggtgacagagcatgtggcacctccttggacatcatgaaatttaaaaccaatgtgacactgactcccacagtgacctacagtggctcatcctggctgttctag

SEQ ID NO: 121123 - DNA, 1239 bp, Homo sapiens
  misc_feature (1)...(1239): n = a,t,c or g
atggtgacttggaacttcatccaggagagaaatggcagtggcatggaccagtgtgatgatggtggaggaaagatattagatcctgtgtatattttgacagtagagctaacgggatttgccaagggctggaaaatgttcagtgtcaaggaccagagtgtaaatgtattaggctttgcaggctatcctctaataacccagacagctagaaagggtgcagggaagattccaacttgggccagccttagacagtatcagaaagggcttggttcaaagtaccagttaagaagggctctcaggcctgactgtgctctaggcaatggacagggggttcgatattgcaactccctggatgaggaagagaagagggagctgaagcttttcagcagccagaggaaacgcgaaaacttgggccgcgggaatgtcaggcctttcccagtcaccatgacaggagctatttgtgaacagtgcggaggccagatcaatggtggagacatcgctgtgtttgcgtcacgcgctggccacggcgtttgctggcacccgccgtgcttcgtatgcactgtctgcaatgagctcctggtggatctgatctacttttaccaagatgggaagatatactgtggcaggcaccatgctgagtgcctgaagccgcgctgtgctgcctgcgatgagatcatctttgcagatgaatgcacagaagctgaggggcgacactggcacatgaaacacttttgctgcttcgagtgtgagacagtgctgggcggccagcgctacatcatgaaggagggaagaccctactgttgccactgcttcgagtccttgtatgcagaatattgtgacacctgtgcccaacatataggacatgctggcagcttcatcaaggaatgccgagaagactattacccggggaggctgagatctcaggagagctacagtgatatgtctagtcagagtttcagtgagacccgaggcagcatccaagtccccaaatatgaggaggaagaggaagaggaagggggcttgtccactcagcagtgtcggacccgtcatcccatcagttccctgaaatacacagaggacatgacgcccacagagcagacccctcggggctccatggaatccctggccctgtctaatgcaacangacatgctcagcagggccatatgtcggtccacaagggattgaaaatgaaaacaaactggtccttcaccactgatagcttgagaagagtagcgctctaa

SEQ ID NO: 121124 - DNA, 2391 bp, Homo sapiens
gtacaccagtactatagctgtctcccagaagagaaagtcccttatgtcaacagtcctggagagaaactgcgaatcaagcagctactacaccagctgccgccacatgacaatgaggttcgatattgcaactccctggatgaggaagagaagagggagctgaagcttttcagcagccagaggaaacgcgaaaacttgggccgcgggaatgtcaggcctttcccagtcaccatgacaggagctatttgtgaacagtgcggaggccagatcaatggtggagacatcgctgtgtttgcgtcacgcgctggccacggcgtttgctggcacccgccgtgcttcgtatgcactgtctgcaatgagctcctggtggatctgatctacttttaccaagatgggaagatatactgtggcaggcaccatgctgagtgcctgaagccgcgctgtgctgcctgcgatgagatcatctttgcagatgaatgcacagaagctgaggggcgacactggcacatgaaacacttttgctgcttcgagtgtgagacagtgctgggcggccagcgctacatcatgaaggagggaagaccctactgttgccactgcttcgagtccttgtatgcagaatattgtgacacctgtgcccaacatataggtatcgaccaaggtcaaatgacctatgacggccaacactggcatgccactgagacctgtttctgctgtgctcactgcaagaaatccctcctggggcggccattcctcccgaagcagggccagatattctgctcacgggcctgcagtgctggggaagaccccaatggttctgactcctctgattccgccttccagaacgccagggccaaggagtcccggcgcagtgccaaaattggcaagaacaagggcaagacggaggagcccatgctgaaccagcacagccagctgcaagtgagttctaaccggctgtcagccgacgtagaccccctgtcactgcagatggacatgctcagcctgtccagccagacacccagcctcaaccgggaccccatctggaggagccgggaagagccctaccattatgggaacaagatggagcagaaccagacccagagccctctgcagctcctcagccagtgcaacatcagaacttcctacagtccaggagggcaaggggctggggcccagcccgaaatgtggggcaagcacttcagcaaccccaaaaggagctcgtcactggccatgacaggacatgctggcagcttcatcaaggaatgccgagaagactattacccggggaggctgagatctcaggagagctacagtgatatgtctagtcagagtttcagtgagacccgaggcagcatccaagtccccaaatatgaggaggaagaggaagaggaagggggcttgtccactcagcagtgtcggacccgtcatcccatcagttccctgaaatacacagaggacatgacgcccacagagcagacccctcggggctccatggaatccctggccctgtctaatgcaacaggcctctctgctgatggtggtgccaagcgccaggagcacctatcccgattttccatgcctgacctcagcaaagactctggaatgaatgtgtctgagaagctgagcaacatgggcactcttaactcgtccatgcagttccggagcgcagagtcagttcgcagcctgctctctgcccagcagtaccaggagatggagggaaacctccaccagctcagcaaccccattggctacagagacctgcagtcccacggaaggatgcatcagagctttgattttgatggagggatggcgggcagcaagctgccagggcaggagggcgtgaggatccagcccatgagtgaacgcacccggagaagagctacttcacgcgacgacaaccgccgtttccgacctcacaggtccaggcgttcccgacgctctcgctccgacaacgccctccacctggccagcgaacgcgaggccatctcccggttaaaagataggccccctctgagagccagggaggactatgaccaatttatgcgccagcggagcttccaggagagcatggggcatgggtcccggagggacctgtacggccagtgccctaggactgtgtcggacctggctttgcagaatgcctttggggaccgctggggaccctacttcgccgagtatgattggtgttccacctgctcctcctcttcagagtctgacaacgagggctatttcctaggagaacccatcccccagccagcgcgcctgcgatacgtcacaagcgatgagctgctgcacaaatacagctcctacggcctccccaaatcttccacattaggtggcagaggacagttgcacagcaggaaaagacagaagagcaaaaactgtatcatttcttaa

SEQ ID NO: 121125 - DNA, 810 bp, Homo sapiens
atgacttcaaagcagtcattttttggatctttaaaggcatcaaaatcaactgaagaactggctgaaaatgcagattcttgggcctcccagaagttctggttcactaggtctgggacaggactggggaacttgcaggtacaccagtactatagctgtctcccagaagagaaagtcccttatgtcaacagtcctggagagaaactgcgaatcaagcagctactacaccagctgccgccacatgacaatgaggttcgatattgcaactccctggatgaggaagagaagagggagctgaagcttttcagcagccagaggaaacgcgaaaacttgggccgcgggaatgtcaggcctttcccagtcaccatgacaggagctatttgtgaacagtgcggaggccagatcaatggtggagacatcgctgtgtttgcgtcacgcgctggccacggcgtttgctggcacccgccgtgcttcgtatgcactgtctgcaatgagctcctggtggatctgatctacttttaccaagatgggaagatatactgtggcaggcaccatgctgagtgcctgaagccgcgctgtgctgcctgcgatgagccaacacatggtcttctggctttctgcactgaagaaagccataggcaacttcattttcttgcattaacccttttgggagagaagccccacccatccctggtttctagaatgtctggggttgcggcctgctttactgagcgtggaggtctcatagcttcctgttgggaaggcagtttctgtatccatgaagatccccaagtgacatataactggccctaa

SEQ ID NO: 121126 - DNA, 2668 bp, Homo sapiens
tcaaacgacctcactgaggcggcatatagcctctccccggatcaaaaacggatgctggatctgttcggtgaccagatcagaaaaactggagggccccctacagggaacatggacgggatctggcgagaaccatggtgctaaatatggccgaaataattccggaatgaccccctgttcacaaatagctcctgtcatggtgactgggaaaggcctgacattcccgcggcccaagttttcgcgtttcctctggctgctgaaaagcttcagctccctcttctcttcctcatccagggagttgcaatatcgaacctcattgtcatgtggcggcagctggtgtagtagctgcttgattcgcagtttctctccaggactgttgacataagggactttctcttctgggagacagctatagtactggtgtaccccctgtccattgcctagagcacagtcaggcctgagagcccttcttaactggtactttgaaccaagccctttctgatactgtctaaggctggcccaagttggaatcttccctgcaccctctagggcatggccagtagatctggaccccgagtcaaggctctgttgtttcccatctctgggttcacttgccaaccccactgcagtcggattggaggaagacagagagcaagacgttggaacaagcagcaggggtggagcctgggacacaaggatcaagagggaacttgagaaaatgagtgagaagtgcggaggccagatcaatggtggagacatcgctgtgtttgcgtcacgcgctggccacggcgtttgctggcacccgccgtgcttcgtatgcactgtctgcaatgagctcctggtggatctgatctacttttaccaagatgggaagatatactgtggcaggcaccatgctgagtgcctgaagccgcgctgtgctgcctgcgatgagatcatctttgcagatgaatgcacagaagctgaggggcgacactggcacatgaaacacttttgctgcttcgagtgtgagacagtgctgggcggccagcgctacatcatgaaggagggaagaccctactgttgccactgcttcgagtccttgtatgcagaatattgtgacacctgtgcccaacatataggtgaggcaatatttggcagtcagcttggtccttctgtgatgcggtcacctttgttttggggagtggggatagccgcagctgctctggatgctgtgctgattagagctcaccaaaggacccagggatgccatcatgagctctctgcactcttggcatttgagaaagggagtgagaagaaggaggaggaagaaggaggacaagtctccagaagttcttccttgaaagtccaggctcaggaactctcagccactgaagataaaggccacattagtccctttttctgggaagccgtgtatcattacgcatcaggagaatgcaggggtcctggtccaccctacagtcatagcttgaggctatattcccagcaggctctccccacgggaaggggccccagcagctcccagtttccattctgccagttttactgctgctataaaaagagcctgctgtgtgactgccttagcaaaagtcctgccttagaaaaagcaatgagaggtatcgaccaaggtcaaatgacctatgatggccaacactggcatgccactgagacctgtttctgctgtgctcactgcaagaaatccctcctggggcggccattcctcccgaagcagggccagatattctgctcacgggcctgcagtgctggggaagaccccaatggttctgactcctctgattccgccttccagaacgccagggccaaggagtcccggcgcagtgccaaaattggcaagaacaagggcaagacggaggagcccatgctgaaccagcacagccagctgcaagtgagttctaaccggctgtcagccgacgtagaccccctgtcactgcagatggacatgctcagcctgtccagccagacacccagcctcaaccgggaccccatctggaggagccgggaagagccctaccattatgggaacaagatggagcagaaccagacccagagccctctgcagctcctcagccagtgcaacatcagaacttcctacagtccaggagggcaaggggctggggcccagcccgaaatgtggggcaagcacttcagcaaccccaaaaggagctcgtcactggccatgacaggacatgctggcagcttcatcaaggaatgccgagaagactattacccggggaggctgagatctcaggagagctacagtgatatgtctagtcagagtttcagtgagacccgaggcagcatccaagtccccaaatatgaggaggaagaggaagaggaagggggcttgtccactcagcagtgtcggacccgtcatcccatcagttccctgaaatacacagaggacatgacgcccacagagcagacccctcggggctccatggaatccctggccctgtctaatgcaacaggcactaagacctgcagcgtgacattccaagcaaaagagacatgcagataccaggatgctcaatttgggaaagtaaaagccagagtcaaagaaagacaatcactgtggagtaaattccagggctcctgtggaatctgcctttattcccataaatacatacttaaatcaagcagttcctcttag

SEQ ID NO: 121127 - DNA, 2434 bp, Homo sapiens
atggggttctctatgttggccaggattctgatgcagaatgcttctttgagaacctctgattcagggatgtacagaacagggattcctaactgtcttggtcagtttgggctgctacaacaaaaataccatagactagggggcttaaacaacaaacatttatttctcgcagtcctggaggctgggaagtccaagatcaaggcaccagcagattcagtgtctgatggcctggtggattgtttggaccctgactgctgcctgcagtcagcctgtcagaacagcctgctctgccgggggtcccgggacccactggacatcattcagcagggccagacggattggcccgcagtgaagtccttctatgaccgtatcaagctcttggcaggcaaggatagcacccacatcattcctggagagaaccctttcaacagcagtgaacacttaagccctggccatgccagccatgtcctccacagaagcctgagccggcatgcctgggtccatggaagaaatctcttgtccattgactatgatcgaaatattcggactgaaaagatctatgatgaccaccggaagttcaccctgaggatcatttatgaccaggtgggccgccccttcctctggctgcccagcagcgggctggcagctgtcaacgtgtcatacttcttcaatgggcgcctggctgggcttcagcgtggggccatgagcgagaggacagacatcgacaagcaaggccgcatcgtgtcccgcatgttcgctgacgggaaagtgtggagctactcctaccttgacaaggatggatgtgggaaaaaaagcacgggctgcttaagaaaatcaaggctctgctaccaaaggcagaaatctgattcaggacatatagctttcatccagtatgaggctgcatcccccggagagcagcagttatatgttttcaacgctgatggcatccaccaatacactgtgagcctggtgacaggggagtacttgtacattttcacatatagtactgacaatgatgtcactgaattgattgacaataatgggaattccctgaagatccgtcgggacagcagtggcatgccccgtcacctgctcatgcctgacaaccagatcatcaccctcaccgtgggcaccaatggaggcctcaaagtcgtgtccacacagaacctggagcttggtctcatgacctatgatggcaacactgggctcctggccaccaagagcgatgaaacaggatggacgactttctatgactatgaccacgaaggccgcctgaccaacgtgacgcgccccacgggggtggtaaccagtctgcaccgggaaatggagaaatctattaccattgacattgagaactccaaccgtgatgatgacgtcactgtcatcaccaacctctcttcagtagaggcctcctacacagtggtacaagatcaagttcggaacagctaccagctctgtaataatggtaccctgagggtgatgtatgctaatgggatgggtatcagcttccacagcgagccccatgtcctagcgggcaccatcacccccaccattggacgctgcaacatctccctgcctatggagaatggcttaaactccattgagtggcgcctaagaaaggaacagattaaaggcaaagtcaccatctttggcaggaagctccgggtccatggaagaaatctcttgtccattgactatgatcgaaatattcggactgaaaagatctatgatgaccaccggaagttcaccctgaggatcatttatgaccaggtgggccgccccttcctctggctgcccagcagcgggctggcagctgtcaacgtgtcatacttcttcaatgggcgcctggctgggcttcagcgtggggccatgagcgagaggacagacatcgacaagcaaggccgcatcgtgtcccgcatgttcgctgacgggaaatggtggcagattattgctgaatccggcataaaacagatccataccgctttgcataatgaagttatccgccatgcgccgcatctggtaacgcttgaagacaggataactggcccacgcttcgccgtagctgcgggcgttgaccagaacatcaatcagggcatcgacatcacgataaccaagattcactcccttgccccgccagcggatggatggtatgcgcggcattccccaccagcgcaagccctggctgcacgtactgcaacgcatggcgacgcgtcagcggaaacgcaccagcggcaagcggtgtaacaacgtacctgtgaaacagcagcatcaaatggatgctgcatatctacccaattttgcagctggagtggacctttctgttcgtgaaatccaggcctctcatttcactgatgaaattgagaaccagcctgctctggttagccagctgctcccagaaggtggagtttatgccaaacagtctcctaagctgccatga

SEQ ID NO: 121128 - DNA, 444 bp, Homo sapiens
atggaaacaggtttggaaaaagttgcggacaatagtgaaatcagaatgttggttttgttgatgatgaccgtcgcggggcttggcgcgtttatgagttcaaccggcgttgtcgctatctttattcccgtggtgttaagcgttgccatgcgtatgcaaacgtcgccgtcacgtctgatgatgccgttaagttttgccgggctgattagcggcatgatgacgctggtggcgacgccgccgaacctggtagtcaacagtgaattgctgcgtgaaggctatcacgcctgataattggagtgcacacactaatagtttctgtgcgttctgttccacgttgatactgtatgtgtattgccatatggtctcataagtgcgtgtactaaaggtgactacacgagtttggtctggtctcgctggttctccggtgtatagctctaaatggctcat

SEQ ID NO: 121129 - DNA, 430 bp, Homo sapiens
tggatttggcgcacaggacccgaaatcactggcgctgcgtacccactgccagacctcaggctggagctgactgaacaggatccgtataacaacgttatccgcaccaccattgaagcgctggctgcgacgctgggcggtactcagtcactgcataccaacgtctttgacgaagcgcttggtttgcctaccgatttctcagcacgcattgcccgcaacacccagatcatcatccaggaagaatcagaactctgccgcaccgtcgatccactggccggatcctatggaggagctattatccaacagatcgacgtagccggtggattggcgaaacggatcgaagcaggtctgtcaaaacgaatgatcgaagaagcctcagcgcgcgaacaggcgctgatcgaccagggcaagcgtgtcatcgttggggtcacaa

SEQ ID NO: 121130 - DNA, 1983 bp, Homo sapiens
atggtaacgctgattctctacttccgtttctatcgcctcaatggtgacacgctgcgcaggatccagatccatctgctggataaatatcgcaaagtaccgcccgagcctgttcatgctgatattccggtcggtgcacgccgtttttccagaccttgttcttggttcctccgcattacaaaacgcggttatcgccgtacggtgcatgcaatggccgggcaaaaagagaagctgcttggcgcagggatgagcgattatctggcgaaaccgattgaagaagagcgattgcataatttgttgttgcgctacaagcctggcagcggtatttcctctcgcgtcgtgacgcccgaagtcaacgaaattgtggtgaacccgaatgcgaccctcgactggcaactggcactacgccaggcagcaggaaaaaccgatttagcgcgcgatatgctgcaaatgttactcgatttcctgcctgaagttcgcaacaaagttgaggaacagctggttggagaaaacccggaaggcctggttgatttgattcataaactgcatggcagttgcggctatagcggtgtgccacgtatgaagaatctctgccaactgatcgaacaacagctacgtagcggtactaaagaagaagatttggaaccggagctgctggaactgttggacgagatggataatgtcgcgcgcgaagccagcaaaattctcgggccggataagacgcatttgcgtcgcatccggcgtgatgtgcttgccaccgatcccaggcctgccagagacaggcgaaaagcgtgcctgcatgcctgcgtactaaggaccccgcctcttggcgccgccagagctattatccaacagatcgacgaagccggtggcatggcgaaagcgatcgaagcaggtctgccaaaacgaatgatcgaagaggcctcagcgcgcgaacagtcgctgatcgaccagggcaagcgtgtcatcgttggtgtcaacaagtacaaactggatcacgaagacgaaaccgatgtacttgagatcgacaacgtgatggtgcgtaacgagcaaattgcttcgctggaacgcattcgcgccacccgtgatgatgccgccgtaaccgccgcgttgaacgccctgactcacgccgcacagcataacgaaaacctgctggctgccgctgttaatgccgctcgcgttcgcgccaccctgggtgaaatttccgatgcgctggaagtcgctttcgaccgttatctggtgccaagccagtgtgttaccggcgtgattgcgcaaagctatcatcagtctgagaaatcggcctccgagttcgatgccattgttgcgcaaacggagcagttccttgccgacaatggtcgtcgcccgcgcattctgatcgctaagatgggccaggatggacacgatcgcggcgcgaaagtgatcgccagcgcctattccgatctcggtttcgacgtagatttaagcccgatgttctctacacctgaagagatcgcccgcctggccgtagaaaacgacgttcacgtagtgggcgccatcctcactggctgccggccgcagtcggtaacctcgcgcatacagccgggcagtgacgtcatcgtctgcgcggaaatggacgaacagtggggctatgtcggggctaaatcgcgccagcgctggctgttttacgcgtatgacagtctccggaagacggttgttgcgcacgtattcggtgaacgcactatggcgacgctggggcgtcttatgagcctgctgtcaccctttgacgtggtgatatggatgacggatggctggccgctgtatgaatcccgcctgaagggaaagctgcacgtaatcagcaagcgatatacgcagcgaattgagcggcataacctgaatctgaggcagcacctggcacggctgggacggaagtcgctgtcgttctcaaaatcggtggagctgcatgacaaagtcatcgggcattatctgaacataaaacactatcaataa

SEQ ID NO: 121131 - DNA, 357 bp, Homo sapiens
atggcgaaagcgatcgaagcaggtctgccacaacgaatgatcgaagaggcctcagcgcgcgaacagtcgctgatcgaccagggcaagcgtgtcatcgttggtgtcaacaagtacaaactggatcacgaagacgaaaccgatgtacttgagatcgacaacgtgatggtcggtcctgtcagccttctggccatcggggtcctcaccgtgcactgcatggtcatcctgttgaactgtgctcaacacctcagccagagggctcccgttttcttgtcccatatcagcttcccagggtgtgtgatagttctggctgcctcagagggcctggagctgcgcaaaagcactagacattatttctag

SEQ ID NO: 121132 - DNA, 1116 bp, Homo sapiens
atgaaggccgcagtgcaaccagtaccgccgttttatatcgtcgccgcagaagagcaaggtgttacacctgataaactgaccgccaccattcaccacgatattctcacagagtacctctgccgcaacacctatatttacccaccaaaaccgtcaatgcgcattatcgccgacatcatcgcctgtatcagcggttaccacatgggtgaagcgggtgccaactgcgtgcagcaggtagcatttacgctcgctgatgggattgagtacatcaaagcagcaatctctgccggactgaaaattgatgacttcgctcctcgcctgtcgttcttcttcggcatcggcatggatctgtttatgaacgtcgccatcttgcgtgcggcacgttatttatggagcgaagcggtcagtggatttggcgcacaggacccgaaatcactggcgctgcgtacccactgccagacctcaggctggagcctgactgaacaggatccgtataacaacgttatccgcaccaccattgaagcgctggctgcgacgctgggcggtactcagtcactgcataccaacgtctttgacgaagcgcttggtttgcctaccgatttctcagcacgcattgcccgcaacacccagatcatcatccaggaagaatcagaactctgccgcaccgtcgatccactggccggatcctattacattgagtcgctgaccgatcaaatcgtcaaacaagccagagctattatccaacagatcgacgaagccggtggcatggcgaaagcgatcgaagcaggtctggcaaaacgaatgatcgaagaggcctcagcgcgcgaacagtcgctgatcgaccagggcaagcgtgtcatcgttggtgtcaacaagtacaaactggatcccgaagacgaaaccgatgtacttgagatcgacaacgtgatggtgcgtaacgagcaaattggttcgctggaacgcattcgcgccacccgtgatgatgccgcctccgacacccgtgaaatagtagatttgaccaacggaaatattaaaacgttcaacggcagcatcatcatatatgcgagatttgacaccggtcgtcacctgtttagcggaggcaatacggtcaagaccgcc

SEQ ID NO: 121133 - DNA, 453 bp, Homo sapiens
atggtgatgctgctggggatcgcgataactcacgacctgcgtcatcgtgatgaaaatgacattgatgccagcgggctttcggtgtttgaagaacgcacgtcacggattatcaaaaacttaccctatatcgccatcgtgggagcattgattgccgccgttgccagcatgaagatttttgctggcagtgaagtgtcgatcttcacactggagaaagcatattccacaaccattgaagtttttgagcaaggcaaagattataatgagttacagtctagaaacatcagtgccatgacagtatcacatccccctttcgctagctcggataatagcgaagaggtccgcaccgatgcgtcttcccaacagttgcgcatcctggatggcgaatggggcctgatgcggattttctacttacgcatctgtaggcgatgtcacaccgcatatggggcactctaa

SEQ ID NO: 121134 - DNA, 255 bp, Homo sapiens
atggatgaattcaaaccagaagacgagctgaaacccgatcccagcgatcgtcgtactggtcgttctcgtcaatcttctgaacgttctgagcgtactgaacgtggcgaaccgcagatcaattttgatgatattgaacttgatgacactgacgatcgccgtccgactcgtgcgcaaaaagagcgcaatgaggaaccggaaatcgaggaagaaattgacgaatccgaagatgaaaccgtggatgaagagcgcgtatag

SEQ ID NO: 121135 - DNA, 242 bp, Homo sapiens
gaagaagcgaaagccttgctgaaagaagcggttctggaaaaaggtttctccatcgacctgtgggcgatgccggtacaacgtccgtataacccgaacgctcgccgcatggcggagatgattcaggcagactgggcgaaagtcggcgtgcaggccaaaattgtcacctacgaatggggtgagtacctcaagcgtgcgaaagatggcgagcaccagacggtaatgatgggctggactggcgataa

SEQ ID NO: 121136 - DNA, 242 bp, Homo sapiens; identical to SEQ ID NO: 121135

SEQ ID NO: 121137 - DNA, 9231 bp, Homo sapiens
atggcgtgcgtcttgcgcaactgtgttccgtgttacgtatatcgtctcgacaaccagcaagagaacatctggcctgcgggcaccactgctacagtggtggtcactggcaaacagatcgcgacgaaagccaggattcgttccttcacctggaaacgccatcgctgggcggtactgacagcggcgattgttgccgccggtccggcctttgctgcgggaggtgaaccgtattctggcgctattcgctatcgtggctttttgcgcatcatcggcacatttattggctgtattgccggactggtgatcatcattgcgatgatccgcgcaccattattgatgattctggtgtgctgtatctgggccggtttttgtacctggatatcctcgctggtacgaatagaaaactcgtatgcgtgggggctggccggttataccgcgctgatcattgtgatcaccattcagccggaaccattgcttacgccgcagtttgccgtcgaacgttgtagcgagatcgttatcggtattgtgtgtgcgattatggcggatttgctcttttctccgcgatcgatcaaacaagaagtggatcgagagctggaaagtttgctggtcgcgcaatatcaattaatgcaactctgtatcaagcatggcgatggtgaagttgtcgataaagcctcggggcgacctgaaaccaaacctgggctgccgcaggatggcgcgttttatgcccttggtgtgcatacgatggaccagattatttctctgttcggtcgcccggatcacgtcgcttatgacatccgcagcctgcgtaataaagccaatcctgacgacacctttgaagcgcaactgttttatggcgacctgaaagccatcgtcaaaaccagccatctggtgaaaatcgattatccgaaatttatcgttcacggtaagaaaggttcgtttattaaatacggtatcgaccagcaggaaaccagcctgaaggctaatattatgccgggcgaaccgggattcgcagcggatgattcggtcggtgtgctggagtatgtcaatgacgagggcgtgacggtcagagaagagatgaagccggagatgggcgattacgggcgcgtttatgatgcgttgtatcaaaccatcacccacgatttacgatatcggcacaaaaacctttatcgtcgtaaactagcttcgcagcgggtgacagaacatgtaaaccgggcaggcttaagatactcgtatcagtatgagaaagactgcatcaccatcactgacagcttggcccacaataaagtgctgcacacgcagggtgaagccggtctgaagcgggtggtgaaaaagaaacacgcggacggcagcgtcacgcagagtcagtttgacgccgtgggcaggctcagggcacagacggatgccgcaggcaggacaacagagtacagcccggatgtggtgacgggcctcatcacgcgcataaccacgccggatggcagggcatcggcgttttactataaccaccacaaccagttaacgtcagccaccgggcctgacgggttggaattgcgccgggaatatgatgaattgggccgtctgattcaggaaactgcccctgacggcgatatcacccgctaccgttatgataatccacacagtgacttaccctgcgcaacggaagatgccaccggcagccggaaaaccatgacgtggagccgttacggtcagttgctgagcttcaccgactgttccggttatgtaacccgttatgaccatgaccgcttcgggcagatgacggcggtgcaccgcgggtgggaaacaggacatttggttgaagggctgggagaagcacaggcctggcaagccccgttgtggaaggcgctggtggaatatacccatcaactcgggcaaccgcgctggcaccgcgccaatctctatcagcgctttatcgaaacgctggagtccgcgacgacctgcccgccggggttaccttcgcgcgtctttatatgcggtatttccgcgttaccgcctgtttatctccaggcgctacaggcgctgggtaaacatattgaaatccatctcctgtttaccaacccctgccgttattactggggcgatattcaagatcctgcttatctggcgaaactgctgacccgtcagcgtcgacacagttttgaagatcgcgacttgccgctatttcgtgatagcgaaaatgccggacagctctttaacagcgatggtgaacaggatgtcggcaacccgctcctggcttcatggggtaagcttgggcgcgactacatttatctcctttctgacctggagagcagccaggagctggacgcctttgtcgatgtcacgccagataacctgtctgcatcaacatgtcagtgctcgacacttcatggacactggaaaaccgcgccgttgcatggtgtgaacatgcgacagagttttcccgtagcgataacaaacgcccgcttgatccacctggatagccagtactcaccttccacgtattgccatagcccgcagcgtgaacctctgaagtcttacacgatcgcctgcgtggtagacgtcacgctgaatgctgataatttcatcgtgagggataacggccccggtgtgacaccagaggcactggcgcgaattggcgaacgcttctatcgcccacccggacaaaccgctaccggcagcgggcttgggctatcgattgtccagcgaatcgccaaattgcatggcatgaatgttgaatttgggaatgcggaacaaggtggatttgaggcgaagattttactaatagcaaaatataaaccgtccccaaaaaagccaccaaccacaaaccagacaaataccgagcgagaatacatatacccaaaaacgatcgacggtcaccgagtggtcaatgaccaggtcgaccgtatcgccgccgaggcgtttaaccgcttcgcgcattgccgccagatcaacaacggcaggtacgccggtaaagtcctgcatcagcacccttgccgggcggtaggcaatttcacggtcagcatgggcatttttcagccatcctgccagcgcgtggatatcctcttcggtaaccgagttaccatcctgccagcgcagcagcagttcggcattgcacagggcggacccgttctgccgttattaggcctaccagagtcatcttgcgcggaccgccaattttgggaagcgcttacgcagcgcgtcgatcacatcagacgtgtcatccaccgacagcgtgatctgggtcataaaggagagcttctcttcgtttttgaccgtcagtttccacacatcgtccggcgattcgaccagatacattcccccttccgggttactgtactggcccattgtcccttccacttccgggtgcccggcgtgaccgatgagaatagattcttcgccacggcgactggcgcgggcgacttccatatgcactttggtcaccagcggacaggtggcatcaaacaccgtcaaatcgcgactttttgcttcgttacgtaccgcctgagaaacaccgtgtgcggagaaaatcaggatcgcgccgtccggtacttcgctaatctgctcaataaagatagccccacgctcacgcaagctatcgaccacatagcggttatgtaccacttcgtgacggacatatatcggtgcgccgtaaatggccagcgcgttttcaacaatgctgatagcgcggtctaccccggcacaaaaaccacgcggagaacttcccaggggaaaggccggtaccacgtgagggaaccgggggggccgacgatgttgcgcgtggcggaactgcccagcgaggctggtatccctgatggcgttttcaatgtcgtcaccgggtcaggtgctgtatgcggcgcggccctgacgtcacatcctcatgttgcgaaaatcagttttaccggttcaaccgcgacgggaaaaggtattgccagaactgctgctgatcacttaacgcgtgtaacgctggaactggtcggtaaaaacccggcaattgtattaaaagatgctgatccgcaatgggttattgaaggcttgatgaccggaagcttcctgaatcaagggcaagtatgcgccgccagttcgcgaatttatattgaagcgccgttgtttgacacgctggttagtggatttgagcaggcggtaaaatcgttgcaagtgggaccggggatgtcacctgttgcacagattaaccctttggtttctcgtgcgcactgcgacaaatgtgttcattcctccgacgatgcgcaggcacagcaagcagagctgattcgcgggtcgaatggaccagccggagaggggtattatgttgcgccaacgctggtggtaaatcccgatgctaaattgcgcttaactcgtgaagaggtgtttggtccggtggtaaacctggtgcgagtagcggatggagaagaggcgttacaactggcaaacgacacggaatatggcttaactgccagtgtctggacgcaaaatctctcccaggctctggaatatagcgatcgcttacaggcagggacggtgtgggtaaacagccataccttaattgacgctaacttaccgtttggtgggatgaagcagtcaggaacgggccgtgattttggccccgactggctggacggttggtgtgaaactaagtcggtcgctgtgtacgcgcccctagcgttggcgtttcgtcaaagaagttccatggtttcagcagagtatgtacccacttcggtcggcataatcggccactcttcggcgcgggccacatgtgtggtgccggtggtcatccagacaacggcgtcggtgttgtccagcgactcacctgtgttccccaacccaattcaggctttgcttcatgccgcttacgctaacgcctcgttgtatgctctgcgatctgccgcgcataaactgttgaattacgcgcagcaggcgcgggaatacctggattttcgtgcgcacgggttaaacgtcgcttgtgaacaattgcggcaaaatatccaccagatcgaagaaagtttgcagctattgcaactcaatcaggcgcaggtgagcggcgagattaaacatgaaatcgagctggccctgacctccgccaaccactttctgcgtcaacagcaagatgcgctgaaggtgcagttagccgccttgtttcaggatgattcggagccgttaagcgagattcgtacccgctgtgagacactgttacagacggcgcagaacaccatcagtcgcgactttacgctgcgttttgccgagcttgaatccaccctttgccgggtgttaaccgatgttattcgccccattgagcaacaagtcaaaatggaattgagcgagtcagggtttcgtcctgggtttcattttcctgtttttcacggcgtagttccccacttcaacactcgccagctgttcagtgaagtcatttcgcgccaggaagcaacggacgagcagagcacgcgtttaggcgttggatgcgaaatgaagatatctcttgtagttcctgtcttcaatgaagaagaagcgataccaattttttataaaacggtacgtgaattcgaagaattgaagtcatatgaagtggaaatcgttttcataaatgacggcagcaaagacgctacggagtcaatcattaatgctctggctgtttcagatcctctagttgttccgctgtcatttacacgcaactttggtaaagaaccagcattgtttgcagggttagaccatgcaaccggggatgcgataatcccaattgatgttgacctgcaagacccgattgaggttattcctcatcttattgaaaaatggcaagcaggtgctgatatggttcttgctaaaagatctgaccgctcaactgatggacgcctgaagcgaaaaacggctgagtggttctataagctccacaataaaataagcaatcctaatggccaatcacggtttttgatgcactcgcgcagcgttttgtggcttcgcagaggaaatcgaggaacttcgccatggaccggcgtctttgtcgtaatagagaacgggggtcgagctgttgaatggctgggagaattgctcatcgtttcatgccggatgcggcgtaaacgccttatcacggcctacaagatcatgcaaattcaacatattgccactcacccagtaggcctgataagcgcagcgcaatcaggcagggatcctctagagtcactgacgcatgagctgctgctcggcgaccgcgtggttttttcagcccccgggtcgccatcaggtagtaacaacgtcgatcatgatcggccagcgatacctttgccatttacccaatcctgtcttttgaaatgttgtgtgcggatttgcatccgcctttcaacatatcaaaaaataatattgcggcaggtacagaagtaccgcgccaccgttaccgaatgtattccgatgatgatccgtacgttgatggtacagccgccttcagcgaacgatcagcaacaccgcctgcgggaagtgatgttttatctcaacttgtcggagcaggaaaaagatgcgttttgtgaacgcttcggcgttcgcttgctgacgtcttatgggatgacggaaaccattgtgggcattatcggcgatcgtcctggcgataaacgacgctggccgtcgattggtcgggtggggttttgctacgaagcggagatccgcgacgatcacaatcgcccgctcccggctggtgagatcggtgaaatctgcattaaaggcatacctgggaaaaccatcttcaaagagtactttctcaacccacaagccactgcgaaagtgctggaagccgatggctggctgcataccggcgataccggataccgcgacgaagaggactttttttatttcgtcgatcgccgctgcaatatgattaaacgtggcggcgagaatgtctcctgcgtggagctggaaaatattatcgccgcgcacccgaaaattcaggacatcgtggttgtgggtattaaagattcgattcgcgatgaagccatcaaagcatttgtggtgctgaatgaagtcaatgcactgctggatgacgcagaacttgcagcattgattgctgaacacgatctggtgctcgactgtacggataacgttgcggtacgtaatcaactgaacgcaggctgttttgccgcgaaggtaccgctggtttccggcgcggcaattcgtatggaaggtcaaatcaccgtctttacttatcaggacggtgaaccgtgctatcgctgccttagccgtttgtttggtgaaaatgcattaacctgcgtggaagcaggcgtaatggcaccgttgatcggcgtaattggttcgttgcaggcaatggaagcgatcaaaatgctggcaggttatggcaaaccggccagcgggaaaatcgtcatgtacgatgcgatgacctgtcagtttcgcgaaatgaaactgatgcgtaatccggggtgtgagcaatttatgaggatgcagaacgtccggttaaatcgacgttctgccaaacgctccctgccagtcctgctcaaacttcgccacagcggcatcaaccgccggatagctaatcatctgttgtgccacatccagtggcagacaaaggtgctgagattcccggaagtgcagatgcatgaaatcctgagtgactttgccagaatgattccagcagcactggataacgtgaagacttcattaccgacagattttccggagaacgtggtgacggcagttgaaagcaatgtgttgaggttgcatggacggttaagccgagaatacggtaatatttacacggaaacaccggtcaaagtgtctggctttaagcgcgtcatagacgagcaggactggacaatcactaaggtgacacattttctgaataatagcggcttcacgacgtcattagagcttgagcatgccgcacatgcgcgtacaagccgctatatcactgacacgacaaaagagcgttatcaccagtgtcagaacgtgaattgcagcgccacgttcatcacttatgagtcggtacagcgatacattgtgaagccgggagaagtccacgtcgcagcctggatcggaacagtgcatacagccgtctttgcggatcagccattccagtttgtcgttctgctccacttccgagaagcgcattaccgtccacgtagaacactatatggggagaagatgcgcggaattctctgtacctctggaccggatgaaacaccggcggtacatgcaacagaagcctttggccctgtcgcaacgctgatgccagcactaaaccagcgacatgctctgcaactggcttgtgcaggcggcggtagccttgcgggaacgctggtgacggctgatccgcaaattgcgcgtcagtttattgccgacgcggcacgtacgcatgggcgaattcagatcctcaatgaagagtcggcaaaagaatccaccgggcatggctccccactgccacaactggtacatggtgggcctggtcgcgcaggaggcggtgaagaattaggcggtttacgagcggtgaaacattacatgcagcgaaccgctgttcagggtagtccgacgatgcttgccgctatcagtaaacagtgggtgcgcggtgcgaaagtcgaagaagatcgtattcatccgttccgcaaatattttgaggagctacaaccaggcgacagcctgttgactccccgccgcacaatgacagaggccgatattgttaactttgcttgcctcagcggcgatcatttctatgcacatatggataagattgctgctgccgaatctattttcggtgagcgggtggtgcatgggtattttgtgctttctgcggctgcgggtctgtttgtcgatgccggtgtcggtccggtcattgctaactacgggctggacagcttgcgttttatcgaacccgtaaagccaggcgataccatccaggtgcgtctcaccttggtacgcgagctgggtttaccactcgatgacgtgaaagttcgccaggctctgacctacgcggtgaacaaagacgcgatcatcaaagcggtttatcagggcgcgggcgtatcagcgaaaaacctgatcccgccaaccatgtggggctataacgacgacgttcaggactacacctacgatcctgaaaaagcgaaagccttgctgaaagaagcgggtctggaaaaaggtttctccatcgacctgtgggcgatgccggtacaacgtccgtatacgcttcttcgggagccccaatgttgtttccccgccggggtcaccgaatttgttgccccccatcgcgtaatcttatag

SEQ ID NO: 121138 - DNA, 665 bp, Homo sapiens
agcggagtgggctggcgctggatctacccaactttctcccctcgcagatgatagcgcaacgtgcgcgtggcgaagaggaagcgcatcatcacagtagcccggaaggagcaattgaagtcgatgaaagcgaagtcgatctcgatgccatcagtgcgcaatccttgcggctggtgcgctcaattttgatgttgatcgccctgctttctgtcattgtgctgtggtcagaaatccattccgctttcggcttcctcgaaaatatttcgctgtgggatgtcacctccacggtacagggcgtaaaaagtctggagccaattaccctcggtgcggtgctgattgccattctggtgtttatcatcaccacgcagctggtgcgcaacttgcccgcgctgctggaactggcgattttgcagcacctggatttaacgccggtcgtggcactggatcaggttcctgacgaagcattcgccagcaaagcggtgggtgacggtgtggcggtgaaaccgacagataaaatcgtcgtatcaccagccgcagcgggaccccggaaagccgagcaggcccagacctgcggtccagctccgtgggccgcccacaccggctctgggtcaaagaatcgcgtggttcaaatcgggactcagcttcctacaagccagcccagtctctag

SEQ ID NO: 121139 - DNA, 719 bp, Homo sapiens
ccgctttgaccatgattacgagattcatgtccgtacccggagatcacgaaagctgtgatacgcccttatgtttaccgctttatccccttgggcaaataatgaaccacgatatcccgctaaaatattttgatattgccgatgagtacgcgaccgaatgcgcagagcctgtcgcagaggctgaacgcacaccgctggcccactacttccagttactgctcacccgtttgatgaacaatgaagagatcagcgaagaagcccaacatgaaatggctgctgaagcggggattaatcccgtacgcattgatgagatcgcagagtttttgaatcaatgggaaatgattaaacaccgacagattcacgaaggtgaacgccagttgcttttccagcaagcaaccaatcacgcgagcttcaagggcaccgtgctccccgccatgaaccagcagatgtaccgtgccgctgccacgcagcataatttagaggtgcttgcttcccgtggtttgctcatctgggggccagacagtggcagtcaggcttgtggtgatatcggtcctgggcgaatgctcgatccgttaaccattgtggatatggcggtagcgcatttttcgcccgtcaacgacctgaaacatctgaacattatgattaccgccggcccgacgcgtgaagaaagccctttactcagcccggagatgacgagggaatttttacaaagcctcatttga

SEQ ID NO: 121140 - DNA, 1038 bp, Homo sapiens
tcattggggcgtggctggcctgttggtgttgcgtgttggtgggtgttgtgtgggtcggttggtgcttttgcttggtgtcgtgtgccggtttgtggcgtcgtttggttgcggtccgtctgtggggctgttcgctggtggtttctggtgcactgggttggtggtcggtggggtcacgcggccgttgtggtgccgtcggagttccgtgccgggtggtgcccttgttttgtatgggtggcccgcttggtggtggcgctgtcggtgtgcgctagggctggtcggttgtttcaggatgggtgtgcttttggtgcttggcttgccatggtggcttctcttgcgtgctcctggattattaccggacttgtgcacttgcgatgggtgatggacacgctggagagcctcggcagcagataacctggcgcacggacgctggggcgagcagaagctggtggtcacgactggcgcatcaggagcgcccgacaggcaggcagcacgctgtgctgcatctgctaaaatcagctggtacagatccaagggttccaaacacccgcttaccccaaaggaggtcgaaaaaacaggctgggggctgaaaattcccggcatggccaacaacaattgcccgagcgcgttaaagaagcggcgcgcattctggagctggacggtctgctcaaacgtcgcccgcgcgagctttccggcggtcagcgccagcgtgtggcgatggcccgcgcgattgtgcgcgatccggcggtgttcctgtttgatgagccgctctctaacctcgatgccaagctgcgcgtgcagatgcgtcttgaactgcaacagttgcaccgtcgcgatcaggttgaagcgatgacgctcgcccagcgagtaatggtgatgaacggcggtgttgccgaacagattggcacaccagttgaagtcgatggtgatgacacgctggagatcctcggcgcagataacctggcgcacgacgctgggcgagcagaagctggtggcgactggcgcatcaggagcgcccgacgcagcagcacctgtgcgcat

SEQ ID NO: 121141 - DNA, 920 bp, Homo sapiens
tcattggggcgtggctggcctgttggtgttgcgtgttggtgggtgttgtgtgggtcggttggtgcttttgcttggtgtcgtgtgccggtttgtggcgtcgtttggttgcggtccgtctgtggggctgttcgctggtggtttctggtgcactgggttggtggtcggtggggtcacgcggccgttgtggtgccgtcggagttccgtgccgggtggtgcccttgttttgtatgggtggcccgcttggtggtggcgctgtcggtgtgcgctagggctggtcggttgtttcaggatgggtgtgcttttggtgcttggcttgccatggtggcttctcttgcgtgctcctggattattaccggacttgtgcacttgcgatgggtgatggacacgctggagagcctcggcagcagataacctggcgcacggacgctggggcgagcagaagctggtggtcacgactggcgcatcaggagcgcccgacaggcaggcagcacgctgtggctgcatctggcggaaaatcagctggtacagatccaagggttccaaacacccgcttaccccaaaggaggtcgaaaaaacaggctgggggctgaaaattcccggcatggccaacaacaattgcccgagcgcgttaaagaagcggcgcgcattctggagctggacggtctgctcaaacgtcgcccgcgcgagctttccggcggtcagcgccagcgtgtggcgatggcccgcgcgattgtgcgcgatccggcggtgttcctgtttgatgagccgctctctaacctcgatgccaagctgcgcgtgcagatgcgtcttgaactgcaacagttgcaccgtcgcgatcaggttgaagcgatgacgctcgcccagcgagtaatggtgatgaacggcggtgttgccgaacagattggcacaccagttgaagt

SEQ ID NO: 121142 - DNA, 261 bp, Homo sapiens
atgtgtatcctggaatgtaaaattaaagtaaatgaaaaagaggaaggagaaaaacaagaagaggaagaagaagaagaaggagaaagaggaggaggaggaggaggaaggtggaggagaaaacggcgagtcattttacacggtaccatgctggcagccgctgagtcagcacggtatatcgtgcatggatcccgaggcagttatgtgaaatatgggacctgcaagcattggcaaaagccctttttgggggccactctgggatga

SEQ ID NO: 121143 - DNA, 266 bp, Homo sapiens
tgggctttattaaagatatccgctggctgttccgccgtatgccgcctgcaaaccagcgcctcaacatgctgttctccgccacgctttcgtaccgggtacgtgaactggcgttcgagcagatgaacaatgccgaatatattgaagtggaaccggaacagaaaacgggcccccgtattaaagtagagcgcaaggcccttatagatggataacgccaggcttttcccactcacgccgatgtacaggacggcacagtgaatctcgtaatc

SEQ ID NO: 121144 - DNA, 431 bp, Homo sapiens
gtttctatgtatggggtttgttgtgtagggtgaggctgtcttgaaaatgtaactttccagaagcaaagaatagtagaagcgctaaatagataccatggaaggaatctgctggtggtgccagattaggaatcttgctacctctttccactggacaccatctgccccacctataaccccacgagagtcagataatccttccccagctgtccctgtcgtcctgagtctcagcccttgccctggagccagaattgccactgggagggcttgtcctggggccctcagtgatcacacagtgattgcaggtgttggtcccagtcccaagtgagccccctgcatcctggctggcacaaggacctttcttcctccttttcacagacaccaatgagtgcctcagccttgcaggaacctgcctaccaggcacttgccagaac

SEQ ID NO: 121145 - DNA, 396 bp, Homo sapiens
atgccgtgttcaacgccgcgcgggcccggtgaacccccgcttctgggggaggtcgaacccctcggcatggcagacatcgagaagaaaatcaaagagctggcagtcaaaggccgtgacggcaagctgaccgttgaagatctgaccggtggtaacttcaccatcaccaacggtggtgtgttcggttccctgatgtctacgccgatcatcaacccgccgcagagcgcaattctgggtatgcacgctatcaaagatcgtccgatggcggtgaatataaccccacgagagtcagataatccttccccagctgtccctgtcgtcctgagtctcagcccttgccctggagccagaatgccactgggagggcttgtcctggggccctcagtgatcacacagtga

SEQ ID NO: 121146 - DNA, 690 bp, Homo sapiens
atggttgcaccagtttatatccgggaccaatacagtgcactgatcaccaatatcggcaaaggcgatcacaccacctttgtgaagccgaacattccggcaacgggtgaattcaaaggtgttggcttcctcgaagcgccgcgcggtatgctctctcactggatggttattaaagacggtatcatcagcaactaccaggcggttgttccatcaacctggaactctggtccgcgtaacttcaatgatgacgtcggtccttacgagcagtcgctggtgggtacaccggttgccgatccgaataaaccgctggaagtggtgcgtaccattcactcctttgacccgtgcatggcctgggtcggcaatattttgctgaccgatgaagccatcggtgtgcggattgtcgaagcgttagagcaacgatacattctgccggattatgttgagatcctcgatggcggcacggcgggaatggagctgcttggcgacatggcaaatcgcgatcatttgattattgcggatgccattgtctcgaaaaagaacgcgccgggaacgatgatgatcctgcgggatgaagaagttccggcgttgtttaccaacaaaatctctccgcatcagcttggcctggccgacgtcttgtcggacctgcgcttcacccggcgagtttccgaaaaagctaccgtgggtgcaggctag

SEQ ID NO: 121147 - DNA, 224 bp, Homo sapiens
gaataaaccgctggaagtggtgcgtaccattcactcctttgacccgtgcatggcctgtgcggtacacgtagtggatgctgacggcaacgaagtggtttcagtgaaggttctgtaatgcgtattttagtcttaggggtcggcaatattttgctgaccgatgaagccatcggtgtgcggattgtcgaagctttagagcatcgctccattctgccggcttatgttga

SEQ ID NO: 121148 - DNA, 239 bp, Homo sapiens
gatggcggcacggcgggaatggagctgcttgtcgacatggcaaatcgcgatcatttgattattgcggatgccattgtctcgaaaaagaacgcgccgggaacgatgatgatcctgcgggatgaagaagttccggcgttgtttaccaacaaaatctctccgcatcagcttggcctggccgacgtcttgtcggccctgcgcttcaccggcgagtttccgaaaaagctgaccctggtcggcgt

SEQ ID NO: 121149 - DNA, 1065 bp, Homo sapiens
atggagggcaagcagtctagcctgggatcggcggggcagcctgagaggaacagtgtggcattgatttctggaggtaagcatgagctagcgggaggaaggaaaaaggacgagaaagggttttccctttttgaaggaaggagaacgggacgacatgaaatgctacaaggagtaaaaactccaggaggcctccccagaagccgagcagatgctggcactgtacctcctgtacaccgctacctctactttcacaaacagtatcgcctccagaaagtgcatcaaatgggttctcttgtcccgtggcttcgaggtggtagcctgtcaatgggtggaggtggctggaggtggtggagagtgggtgagaccctcactaatgcagaactgataggaccccaagatcttggcagcttaactcaagacaagcgcattctccctcttgtgaagtccaaccagggacctgggtcttacctgttctgtaaaaaagggctttggtttgggggaacccgaaatttgtggcacgcttacgatctgtttattgccaccactggttataccggtgaagcgggctatgaaattgcgctgcccaatgaaaaagcggccgatttctggcgtgcgctgatggttacaacaagtgttggaataacaaagaacccccagataacacaatcgccatttctccaagcagaatgcttgttaaagatgcttttggacaaattgaatgctttaaatgtttgtgacatggttgaagttgattttgctgaacaagtttactttcagtgttatttaagctgcatcgatagaggatccctccgggtgcccctgctagagccattgctcctgggtcctcttagtatctctagcacagcattcatcaactcgaattggagcaatgggaacgcgtcatgcagacagtgtatcatgtttaccttgggttccttggtgtctagcatggtgcctctgcagacaattgggactcaatacacaagcgcgtgtgcacggggaaagcgaaaaggcaaggtgacaggaccactgacatttcacggtccacataagaaacagaacttgtga

SEQ ID NO: 121150 - DNA, 221 bp, Homo sapiens
gcgggcggcttcccgctggcgggcgtcaccgggcgcgcggaagtaatggatgccgtcgctccaggcggtctgggcggcacctatgcgggtaacccgattgcctgcgtggctgcgctggaagtgttgaaggtgtttgagcaggaaaatctgctgcaaaaagccaacgatctggggcacaagttgaaaaacgtatttctggccatagccgaaccactcccgga

SEQ ID NO: 121151 - DNA, 1067 bp, Homo sapiens
atggataaattccttgacacagacactctcccaagactaaaccaggaagaagttgaatctatgaatagaccaataacaggatctgaaattgtggcaataatcaatagcttaccaaccaaaaagaggccaggaccagatggattcacagccaaattctaccagaggtacaaggagaaacgggtaccattccttctgaaacgattccaatcaatagaaaaagagggaatcctccctaactcattttatgaggccagcaacattttgataccaaagccaggcagagacacaacaaaaaaagagaattttagaacaatatccttgatgaacattgatgcaaaaatcctcaataaaatactggcaaaacgaatccagcagcacatcaaaaagcttatccaccatgatcaagtgggcttcatccctgggatgcaaggctgggcaattagacagaagaaggaaataaagggtattcaattaggaaaagaggaagtcaaattgtccctgtttgcagacgacatgattgtatatctagaaaaccccattgtctcagcccaaaatctccttaagctgataagcaacttcagcaaagtctcaggatacaaaatcaatgtaccaaaatcacaagcattcttatacaccaacaacagacaaacacagagccaaatcatgagtgaactcccattcacaattgcttcaaagagaataaaatacctaggaatccaacttacaagggatgtgaaggacctcttcaaggagaactacaaaccactgctcaatgaaataaaagaggatacaaacaaatggaagaacattccatgctcatgggtaggaagaatcaatatcgtgaaaatggccatactgcccaaggtaatttacagattcaatgccatccccatcaagctaccaatgactttcttcacagaattggaaaaaactactttaaagttcatatggaaccaaaaaagagcccgcattgccaagtcaatcctaaggcaaaagaacaaagctggaggcatcacactacctgacttcaaactatactacaaggctacagtaaccaaaacagcatg

SEQ ID NO: 121152 - DNA, 1548 bp, Homo sapiens
atgggagactttaacaccccactgtcaacattagacagatcaatgagacagaaagtcaacaaggatacccaggaattgaactcagctctgcaccaagcagacctaatagacatctacagaactctccaccccaaatcaacagaatatacatttttttcagcaccacaccacacctattctaaaattgaccacatacttggaagtaaagctctcctcagcaaatgtaaaagaacagagattataacaaactatctctcagaccacagtgcaatcaaactagaactcaggattaagaatctcactcaaaaccactcaactacatggaaactgaacaacctgctcctgagtgactactgggtacataacgaaatgaaggcagaaataaagatgttctttgaaaccaacgagaacaaagacacaacataccagaatctctgggacgcattcaaagcagtgtgtagagggaaatttatagcactaaatgcccacaagagaaagcaggaaagatccaaaattgacaccctaacatcacaattaaaagaactagaaaagcaagagcaaacacattcaaaagctagcagaaggcaagaaataactaaaatcagagcagaactgaaggaaatagagacacaaaaaacccttcaaaaaattaatgaatccaggagctggttttttgaaaggatcaacaaaattgatagaccgctagccagactaataaagaaaaaaagagagaagaatcaaatagacacaataaaaaatgataaaggggatatcaccaccgatcccacagaaatacaaactaccatcagagaatactacaaacacctctacgcaaataaactagaaaatctagaagaaatggataaattcctcgacacatacactctcccaagactaaaccaggaagaagttgaatctctgaatagaccaataacaggagctgaaaatgtggcaataatcaatagtttaccaaccaaaaagagtccaggaccagatggattcacagccgaattctaccagaggtacaaggaggaactgctgataagcaacttcagcaaagtctcaggatacaaaatcaatgtacgaaaatcacaagcattcttatacaccgacaacagacaaacagagagccaaatcatgagtgaactcccattcacaattgcttcaaagagaataaaatacctaggaatccaacttacaagggatgtgaaggacctcttcaaggagaactacaaaccactgctcaaggaaataaaagaggatacaaacaaatggaagaacattccatggtcatgggtaggaagaatcaatatcgtgaaaatggccatactgcccaaggtaatttacagattcaatgccatccccatcaagctaccaatgactttcttcacagaattggaaaaaactactttaaagttcatatggaaccaaaaaagagcccgcatcgccaaggcaatcctaagccaaaagaacaaagctggaggcatcacactacctgacttcaaactatactacaaggctacagtaaccaaaacagcatggtactag

SEQ ID NO: 121153 - DNA, 2823 bp, Homo sapiens; identical to SEQ ID NO: 120411

SEQ ID NO: 121154 - DNA, 1223 bp, Homo sapiens
atggagctgaaaaccaaggctcgagaactacgtgaagaatgcagaagcctcaggagccgatgcgatcaactggaagaaagggtatcagcaatggaagatgaaatgaatgaaatgaagcgagaagggaagtttagagaaaaaagaataaaaagaaatgagcaaagcctccaagaaatatgggactatgtgaaaagaccaaatctacgtctgattggtgtacctgaaagtgatgtggagaatggaaccaagttggaaaacactctgcaggatattatccaggagaacttccccaatctagcaaagcaggccaaccatataaacagagccaaagacaaaaaccacatgattatctcaatagatgcagaaaaagcctttgacaaaattcaacaacccttcatgctaaaaactctcaataaattaggtattgatgggacgtatttcaaaataataagagctatctatgacaaacccacagccaatatcatactgaatgggcaaaaactggaagcattccctttgaaaactggcacaagacagggatgccctctctcaccgctcctattcaacatagtgttggaagttctggccagggcaatcaggcaggagaaggaaataaagggtattcaattaggaaaagaggaagtcaaattgtccctgtttgcagacgacatgattgtttatctagaaaaccccattgtctcagcccaaaatctccttaagctgataagcaacttcagcaaagtctcaggatacaaaatcaatgtacaaaaatcacaagcattcttatacaccaacaacagacaaacagagagccaaatcatgggtgaactcccattcacaattgcttcaaagagaataaaatacctaggaatccaacttacaagggatgtgaaggacctcttcaaggagaactacaaaccactgctcaaggaaataaaagaggacacaaacaaatggaagaacattccatgctcatgggtaggaagaatcaatatcgtgaaaatggccatactgcccaaggtaatttacagattcaatgccatccccatcaagctaccaatgactttcttcacagaattggaaaaaactactttaaagttcatatggaaccaaaaaagagcccgcattgccaagtcaatcctaagccaaaagaacaaagctggaggcatcacactaccttacttcaaactatactacaaggctacagtaaccaaaacagcatg

SEQ ID NO: 121155 - DNA, 3090 bp, Homo sapiens
atggaacaaagctggatggagaacgactttgaccagctgagagaagaaggcttcagaggatcaaattactctgagctacgggaggacattcaaaccaaaggcaaagaagttgaaaactttgaaaaaaatttagaagaatgtataactagaataaccaatacagagaagtgcttaaaggagctgatggagctgaaaaccaaggctcgagaactacgtgaagaatgcagaagcctcaggagccgatgcgatcaactggaagaaagggtgtcagtgatggaagatgaaatgaatgaaatgaaaccaaatctacgtctgattggtgtacctgaaactaacggggagaatggaaccaagttggaaaacactctgcaggatattatccaggagaacttccccaatctagcaaggcaggccaacgttcagaatcaggaaatacagagaacaccacaaagatactcctcgagaagagcaactccacgacacataattgtcagattcaccaaagttgaaatgaaggaaaaaatgttaagggcagccagagagaaagcaccacaccacacctattccaaaattgaccacatacttggaagtaaagctctcctcagcaaatgtaaaagaacagaaattataacaaactatctctcagaccacagtgcaatcaaactagaactcaggattaagaatctcactcaaaaccgctcaactacatggaaactgaacaacctgctcctgaatgactactgcgtacataacgaaatgaaggcagaaataaagatgttctttgaaaccaacgagaacaaagacacaacataccagaatctctgggacgcattcaaagcagtgtgtagagggaaacttatagcactaaatgcccacaagagaaagcaggaaagatccaaaattgacaccctaacatcacaattaaaagaactagaaaagcaagagcaaacacattcaaaagctagcagaaggcaagaaataactaaaatcagagcagaactgaaggaaatagagacacaaaaaacccttcaaaaaattaatgaatccaggagctggttttttgaaaggatcaacaaaatatatagaccactagcaagactaataaagaaaaaaagagagaagaatcaaatagacgcaataaaaaatgataaaggggatatcaccaccgatcccacagaaatacaaattaccatcagagaatactacaaacacctctatgcaaataaactagaaaatctagaagaaatggataaattcctcaacacatacactctcccaagactaaaccaggaagaagttgaatctctgaatagaccaataacaggatctgaaattgtggcaataatcaatagcttaccaaccaaaaagagtccaggaccagatggattctcagccgaattctaccaaaggtacaaggaggaactggtaccattccttctgaaactattccaatcaatagaaaaagagggaatcctccctaactcattttatgaggccagcatcattctgataccaaagccgggcagagacacaaccaaaaaagagaattttagaccaatatccttgatgaacattgatgcaaaaatcctcaataaaatactggcaaaacgaatccagcagcacatcaaaaagcttatccaccatgatcaagtgggcttcatccctgggatgcaaggctggttcaatatatgcaaatcaataaatgtaatccagcatataaacagagccaaagacaaaaaccacatgattatctcaatagatgcagaaaaggcctttgacaaaattcaacaacccttcctgctaaaaactctcaataaattaggtattgatgggtcgtatttcaaaataataagagctatctatgacaaacccacagccaatatcatactgaatgggcaaaaactggaagcattccctttgaaaactggcacaagacagagatgccctctctcaccactcctattcaacatagtgttggaagttctggccagggcaatcaggcaggagaaggaaataaagggtattcaattaggaaaagaggaagtcaaattgtccctgtttgcagacgacatgattgtatatctagaaaaccccactgtctcagcccaaaatctccttaagctgataagcaacttcagcaaagtctcaggatacaaaatcaatgtacaaaaatcacaagaattcttatacaccaacaacatacaaacagagagtcaaatcatgagtgaactcccattcacaattgcttcaaagagaataaaatacctaggaatccaacttacaagggatgtgaagaacctcttcaaggagaactacaaaccactgctcaatgaaataaaagaggatacaaacaaatggaagaacattccatgctcatgggtaggaagaatcaatatcgtgaaaatggccatactgcccaaggtaatttacagattcaatgccatccccatcaagctaccaatgcctttcttcacagaattggaaaaagctactttaaagttcatatggaaccaaaaaagagcccgcattgccaagtcaatcctaagccaaaagaacaaagctggaggcatcacactacctgacttcaaactatactacaaggctacagtaaccaaaacagcatggcttcagcacgcagtgccggctaatgatggcaccacaagatccccatcaatagacagcattcagaaggaccccagcgagtttgcctggcgtgatcctgagttgcctgaggtcattcacatccttcagcaccagttcccatctgttcaggcaaatgcagcagcctacctgcagcacctgtggtttggtgacaacaacgtgaagatgaaggtgtgtaggttatggggaatcaagcttctggtttaccttttgggccacagagttttggaagttcagaagaatgcttgtgatgcccttcgaaatctctttttcggcaagtctacaggtgaaaataaaataacaatgaaggatgttgccacattggatctgagtttcattctcagcaaactaacacaggaacagaaaaccaaatacctcattgttctcactcataagtgggagttgaacaatgagaacacatggacatga

SEQ ID NO: 121156 - DNA, 1182 bp, Homo sapiens
atggataaattcctcgacacatacactctcccaagactaaaccaggaagaagttgaatctctgaatagaccaataacaggatctgaaattgtggcaataatcaatagcttaccaaccaaaaagagtccaggaccagatggattcacagctgaattctaccagaggtacaaggaggaactggtaccattccttctgaaactattccaatcaatagaaaaagagggaatcctccctaactcattttatgaggccagcatcattctgataccaaagccaggcagagacacaacaaagaaagagaattttagaccaatatccttgatgaacattgatgcaaaaatcctctataaaatactggcaaaacgaatccagcagcacatcaaaaagcttatccaccatgatcaagtgggcttcatccctgggatgcaaggctggttcaatatacgcaaatcaataaatgtaatccagcatataaacagagccaaagacaaaaaccacatgattatctcaatagatgcagaaaaagcctttgacaaaattcaacaacccttcatgctaaaaactctcaataaattagcccaaaatctccttaagctgataagcaacttcaacaaagtctcaggatacaaaatcaatgtacaaaaatcacaagcattcttatacaccagcaacagacaaacagagagccaaatcatgagtgaactcccattcacaattgcttcaaagagaataaaatacctaggaatccaacttacaagggatgtgaaggacctcttcaaggagaactacaaaccactgctcaaggaaataaaagaggatacaaacaaatggaagaacattccatgctcatgggtaggaagaatcaatatcgtgaaaatggccatactgcccaaggtaatttacagattcaatgccatccccatcaagctaccaatgactttcttcacagaattggaaaaaactactttaaagttcatatggaaccaaaaaagagcccacatcgccaagtcaatcctaagccaaaagaacaaagctggaggcatcacactacctgacttcaaactatactacaaggctacagtaaccaaaacagcatggtactgctaccaaaacagacatatagatcaatggaacagagccctcagaaataacgccgcatatctacaactatctgatctttga

SEQ ID NO: 121157 - DNA, 1722 bp, Homo sapiens
atggactggtacctggacacacagcagaggtttaaatttcttatgtaccaggttgttgcgtctgatttagatggcacgttactttctcccgaccatacgttatccccttacgccaaagaaactctgaagctgctcaccgcgcgcggcatcaactttgtgtttgcgaccggtcgtcaccacgttgatgtggggcaaattcgcgataatctggagattaagtcttacatgattacctccaatggtgcgcgcgttcacgatctggatggtaatctgatttttgctcataacctggatcgcgacattgccagcgatctgtttggcgtagtcaacgacaatccggacatcattactaacgtttatcgcgacgacgaatggtttatgaatcgccatcgcccggaagagatgcgcttttttaaagaagcggtgttccaatatgcgctgtatgagcctggattactggagccggaaggcgtcagcaaagtgttcttcacctgcgattcccatgaacaactgctgccgctggagcaggcgattaacgctcgttggggcgatcgcgtcaacgtcagtttctctaccttaacctgtctggaagtgatggcgggcggcgtttcaaaaggccatgcgctggaagctttagagcacagggcggacatcaaaattggcggcgattttgagttccaataccccccgagggacaacacaaacaaccaattacggcattgcgatgatttagtgactaaatttttgacccgcatgtcaccgttggctccgcgcattgggcaatactggttgcaactgcctgccacattcggcccacgggagctgcctgcgctttggcattttctcgattctcttcctggcgaatttaattatggcgtggaagtccgccatccacagtttttcgccaaaggagaagaggaacaaacgcttaatcgcggtttacatcagcgcggcgttaatcgggtgattttagacagccgcccggttcatgcagcacgtccacacagtgaagctattcgcgacgctcaacgaaaaaaacctaaagttccggtacatgctgtactgacggcgacaaatccgctgatccgttttatcggtagtgatgatatgacgcaaaaccgggaattatttcaggtctggttacaaaaattagcgcagtggcatcagaccactacgccttatctttttttacatacgccagacattgcccaggcaccggaactgagatcggagcagttccggctattccacagcaatcttctcttttctgaatttgccacctatcatagacaggtgccatcggccattttaaagggagtttgtatggtaagcgcgctgtacgccgttttaagtgcgttgttattaatgaagttctcttttgatgtcgttcgcctgcgaatgcagtaccgcgttgcctatggcgacggcggttttagcgaactgcaaagcgctattcgcattcatggtaacgcggtggaatatattcccatcgcgattgtgctgatgctgtttatggaaatgaatggcgcagaaacctggatggtgcatatttgcggcatcgttttgcttgctggtcgtctgatgcaatattacgggtttcatcaccgtctgtttcgctggcgacgtttcggcatgagcgctacctggtgtgcgctggtgctgatggtgctggcgaatctttggtatatgccctgggagttggtttctccctggttaatttag

SEQ ID NO: 121158 - DNA, 3519 bp, Homo sapiens
atggggaaaaaacagagcagaaaaactgcaaactctaaaaagcagagcacctctcctcctccaaaggaacacagttcctcaccagcaacggaacaaagctggacggagaatgactttgacgagctgagagaagaaggcttcagacgatcaaattactctgagctacgggaggacattcaaaccaaaggcaaagaagttgaaaactttgaaaaaaatttagaagaatgtataactacaataaccaatacagagaagtgcttaaaggagctgatggagctgaaagccaaggctcaagaactacgtgaagaatgcagaagcctcaggagccgatgcaatcaactggaagaaagggtatcagcgatggaagatgaaatgaatgaaatgaagcgagaagggaagtttagagaaaaaagaataaaaagaaatgagcaaagcctccaagaaatatgggactatgtgaaaagaccaaatctacgtctgactggtgtacctgaaagtgatggggagaatggaaccaagttggaaaacactctacaggatattatccaggagaacttccccaatctagcaaggcaggccaacattcagattcaggaaatacagagaatgccacaaagatactcctcgagaagagcaacaccaagacacataattgtcagattcaccaaagttgaaatgaaggaaaaaatgttaagggcagccagagagaaagacagatcaacgagacagaaagtcaacaagaatacccaggaattgaactcagctctccaccaagcggacctaatagacatctacagaactctccaccccaaatcaacagaatatacgtttttttcagcaccacaccacacctattccaaaattggccacatagttggaagtaaagctctcctcagcaaatgtaaaagaacagaaattataacaaactatctctcagaccacagtgcaatcaaactagaactcaggattaagaatctcactcaaaaccgctcaactacatggaaactgaacaacctgctcctgaatgactactgggtacataacgaaatgaaggcagaaataaagatgttctttgaaaccaacgagaacaaagacacaacataccagaatctctgggacacattcaaagcagtgtgtagagggaaatttatagcactaaatgcccacaagagaaagcaggaaagatccaaaattgacaccctaacatcacaattaaaagaactagaaaagcaaaagcaaacacattcaaaagctagcagaaggcaagaaataactaaaatcagagcagaactgaaggaaatagagacacaaaaaacccttcaaaaaattaacgaatccaggagctggttttttgaaaggatcaacaaaattgatagaccgctagcaagactaataaagaaaaaaagagagaagaatcaaatagatgcaataaaaaatgataaaagggatatcaccaccaatcccacagaaatacaaactaccatcagagaatactacaaacacgtctacgcaaataaaccagaaaatctagaagaaatggataaattcctcgacacatacactctcccaagactaaaccaggaagaagttgaatctctgaatagaccaataacaggagctgaaattgtggcaataatcaatagcttaccaacgaaaaagagtccaggaccagatggattcacagccaaattctaccagaggtacaaggaggaactggtaccattccttctgaaactattccaatcaatagaaaaagagggaatccttcctaactcattttatgaggccagcatcatcctgataccaaagccgggcagaaacacaaccaaaaaagagaattttagaccaatatccttgatgaacattgatgcaaaaatcctcaataaaatactggcaaaccgaatccagcagcacatcaaaaagcttatccaccatgatcaagtgggcttcatccctgggatgcaagggctggttcaatatacgcaaatcaataaattgttggaaattctggccaggacaattaggcaggagaaggaaataaagagtattcaattaggaaaagaggaagtcaaattgtccctgtttgcagacgacatgaccgtatatctacaaaaccccattgtctcagctcaaaatctccttaagctgataagcaacttcagcaaagtctcaggatacaaaatcaatgtacaaaaatcacaagcattcttatacaccaacaacagacaaacagagagccaaatcgtgagtgaactcccattcacaattgcttcaaagagaataaaatacctaggaatccaacttacaagggatgtgaaggacctcttcaaggagaactacaaactactgctcaaggaaataaaagaggacacaaacaaatggaagaacattccatgctcatgggtaggaagaatcaatatcgtgaaaatggccatactgcccaaggtaatttacagattcaatgccatccccatcaagctaccaatgactttcttcacagaattggaaaaaactactttaaagttcatatggaaccaaaaaagagcccgcattgccaagtcaatcctgagccaaaagaacaaagctggaggcatcacactacctgacttcaaactatactacaaggctacagtaaccaaaacagcatggtattttagcaaagcagtgctgctgccacctctcaacaccactgctatagtgtctatccacgatgaacaatggaatgctagaaggtcttctcttgctagccacaaagaagcagatgccaccatctgtgtgaccaccaaggtgtggagacgtaggaggcaaaaacggttttgtggactgggccgagggtccctgtgctgtgtgcagcctagggacttggtgccctgtgtcctagccactccagttgtggctgaaagtggccaatgtaaaactcagaccatggcttcagagagtgtactgctgtttcctgactttttaatgattgccattctaactggtgtgagatggtatctcattgtggttttgatttgcatttctctgatggccagtgatggtgttgtggcaccaaatgtagataagatactgtctgatagagaacaagaatttggaatattagcgacagaagaaggaaaaacagaaaaggcagccacgtatacaaggtgcatggatgaaattggaaatcgtcattctcagcaaactatcacaaggacaaaaaaccaaacaccgcatgttctcactcatagatgggaattaaacaatgagaacacatggacacaggaaggggaacatcacactctggggactgttgtggggtggggtgccttctacacagagtggaattgcatggaagttcacactgggcccacgctggcagtgtactggaatgaacacaaccagccaatccaaatttttgctaacaaggtaccagggaaatacaattatgttcacttcagcatcacagaaatggaaggaattcaatttctgcatggaatcccagaaattgaatcccagcatgggagaaagaaataaaac

SEQ ID NO: 121159 - DNA, 2643 bp, Homo sapiens
atgagtgaactcccattcacaattgctacaaagagaataaaatacctaggaatacaacttaaaagtgatgtgaaggacctcttcaaggagaactacaaaccactgctcaatgaaataagagaggacacatacaaatggaaaaacactccatgctcatggataggaagaatcaatatcatgaatatggccatactgcccaaagtaatttatggattcaatgctatcctcatcaagctaccattgactttcttcaccgaattagaaaaaactactttaaagttcacacagagcctaaaaagagcccatatagccaagacaatcctaagtaaaaagaacaaagctggaggcatcatgctacctgacttcaaactatactacaaggctacagtaaccaaaacagcatgcactattcacaatagcaaagacttggaaccaaccgaaatgcccagcaatgatacgctggataaagaaaatgtggcatatatacaccatggaatactatgtagccacagcaaaggacgagttcatatcctttgcagggacatggatgaagctggaaaccatcattctcggcaaactaacacaggaacagaaaaccaaacactgcatgttctcactcataagtgggagttgaacgatgagaacacatggacacagggaggggaacatcacatatcggggcctgtcagaaccaacaacaaaaaccacatgattatctcaataggtgcagaaaaggcctttgacaaaattcaacagcctttcatgctaaaaactctcaatcaactaggtattgatggaacatacctcaaaataataagagatatttttgacagacccatagccaatatcttactgaatgggcaaaaacgggaagcatcccctttgaaaactggcacaagacagggatgccctctcccaccactcctattcaacatagtgttggaaattctggccagggcaatcaggcaggagaaagaaataaagggtattcaattaggaaaagaggaagtcaaattgtccctgtttgcagatgacatgattatatatttagaaaaccccattgtctcagcccaaaatctccttaagctgataagcaacttcagcaaagtctcaggatacaaaatcaatgtgcaaaaatcacaagcattcttatacaccaataacagacaaacagagagccaaatcctgagtgaactcccattcacaattgcttcaaagagaataaaatacttaggaattcaacttacaagggatgtgaaggacctcttcaaggagaactacaaaccactgctcaacgagataaaagaggacacaaacaaatggaagaacattccatgcttatcgataggaaaaatcaatatcatgaaaatggccatactgcccaaagtaatttatagattcaatgccatccccatcaagctaccaatgactttcttcacagaattggaaaaaactactttaaagttcatatggaaccaaaaaagagcccgcattgccaagacaatcctaagccaaaagaacaaagatggaggcatcacactacctgacttcaaactatactacaaggctacagtaaccaaaacagcatggtaccagtaccaaaacagagatatagaccaatggaacagaacagagccctcagaaataataccacacgtctacaaccatctgatctttgacaaacctgacaaaaacaagaaatggggaaaggattccctatttaataaatggtgctgggaaaactggctagccatatgtggaaagctgaaactggatccgttccttacaccttatacaaaaattaattcaagatggattaaagacttaaatgttagacctaaaaccataaaaaccctagaagaaaacctaggcaataccattcaggacataggcatgggcaaggacttcatgtctaaaataccaaaagcaatggcaacaaaagccaaaattgacaaatggaatctaattgaactaaagagcttctgcacagcaaaagaaactaccatcagtgtgaacaggcaacctacagaatgggagaaaatttttgcaatctgcttatctgacaaagggctaatatccagaatctacaaagaactcaaacaaagacacaagaaaaaaacaaacaaccccatcaaaaagtgggcgaaggatatgaacagacacttctcaaaagaagacatttatgcagccaacagacacatgaaaaaatgctcatcatcactggccatcagagaaatgccaatcaaaaccacaatgagataccatctcacaccagttagaatggcgatcattaaaaagtcaggaaacaacagatgctggagaggatgtggagaaataggaacgctttcacactgttggtgggactgtaacctagttcaaccattgtggaaggcagtgtggcgattccttaaggatctagaactagaaataccatttgacccagccatctcattactgggttatacccaaaggattataaatcatgctgctataaagacacatgcacacaaagcactttcacatgcagacaacatcttccgctataattgcttcattgaccatctcttagaacttgccaatcaatcttccaaactgccacctctgtccctcaacagacaatgtgagaatatagatattttctga

SEQ ID NO: 121160 - DNA, 2575 bp, Homo sapiens
atgtcaagtgaatgggagtggttgaggtgctcagaagttaaaggtcagagagacgtgaggccagggtgtttggggtgggactttcgtgtgtatattgttgaggacacccaggatgaggacagaacttggagtgtcaaggaagcctgtgagctggtccttagagttcaggaaatgatcatcacaagggtggtagatgctgcaccacaccacacctattccaaaattgaccacatagttggaagtaaagctctcctcagcaaatgtaaaagaacagaaattataacaaactgtctctcagaccacagtgcaatcaaactagaactcaggattaagaatctcactcaaagccgctcaactacatggaaactgaacaacctgctcctgaatgactactgggtacataacgaaatgaaggcagaaataaagatgttctttgaaaccaacgagaacaaagacaccacataccagaatctctgggacgcattcaaagcagtgtgtagagggaaatttatagcactaaatgcctacaagagaaagcaggaaagatccaaaattgacaccctaacatcacaattaaaagaactagaaaagcaagagcaaacacattcaaaagctagcagaaggcaagaaataactaaaatcagagcagaactgaaggaaatagagacacaaaaaacccttcaaaaaatcaatgaatccaggagctggttttttgaaaggatcaacaaaattgatagaccgctagcaagactaataaagaaaaaaagagagaagaatcaaatagacgcaataaaaaatgataaaggggatatcaccaccgatcccacagaaatacaaactaccatcagagaatactacaaacaactctacgcaaataaactagaaaatctagaagaaatggatacattcctcgacacatacactctcccaagactaaaccaggaagaagttgaatctctgaatagaccaataacaggctctgaaattgtggcaataatcaatagtttaccaaccaaaaagagtccaggaccagatggattcacagccgaattctaccagaggtacaaggaggaactggtaccattccttctgaaactattccaatcaatagaaaaagagggaatcctccctaactcattttatgaggccagcatcattctgataccaaagccaggcagagacacaaccaaaaaagagaattttagaccaatatccttgatgaacattgatgcaaaaatcctcaataaaatactggcaaaccgaatccaacagcacatcaaaaagcttatccaccatgatcaagtgggcttcatccctgggatgcaaggctggttcaatatacgcaaatcaataaatgtaatccagcatataaacagagccaaagacaaaaaccacatgattatctcaatagatgcagaaaaggcctttgacaaaattcaacaacccttcatgctaaaaactctcaataaattaggtattgatgggacgtatgtcaaaataataagagctatctatgacaaacccacagccaatatcatactgaatgggcaaaaactggaagcattccctttgaaaactggcacaagacagggatgccctctctcaccgctcctattcaacatagtgttggaagttctggccagggcaatcaggcaggagaaggaaataaagggtattcaattaggaaaagaggaagtcaaattgtccctgtttgcagacgacatgattgtttatctagaaaaccccatcgtctcagcccaaaatctccttaagctgataagcaacttcagcaaagtctcaggatacaaaaaaaaaatcaatgtacaaaaatcacaagcattcttatacaccaataacagacaaacagagagccaaatcatgagtaaactcccattcacaattgcttcaaagagaataaaatacctaggaatccaacttacaagggacgtgaaggacctcttcaaggagaactacaaaccactgctcaaggaaataaaagaggatacaaacaaatggaagaacattccatgctcatgggtaggaagaatcaatatcgtgaaaatggccatactgcccaaggtaatttatagattcaatgccatccccatcaagctaccagtgactttcttcacagaattggaaaaaactactttaaagttcatatggaaccaaaaaagagcccgcatagccaagtcaatcctaagccaaaagaacaaagctggaggcatcacactacctgacttcaaactatactacaaggctacagtaaccaaaacagcatgttcccagtcagctcccatggaattaggcttcaggccaatccctgtggactcagggactaggaccatccctgaaccaggcctgaccccatggacccaggcttcaggatggacaccaaagacatgtgcttcaggcttcttcctacagatccagttgacaagtccactctggtggactccagtactaggcttgcaccacaaacccaggattcaggtctacacagaaggcccaagccccaggccagcgcctttagactcagatgccagctctacccacctgctgactcaggcatcag

SEQ ID NO: 121161 - DNA, 1088 bp, Homo sapiens
atgagcaagctcccattcataattgctacaaagagaatagaatacctaggaatacaacttacaagggatgtgaaggacctcttcaaggagaactacaaaccactgctcaacgaaataaaagaggacacaaacaaatggaaaaacattccatgctcatggataggaagaatcaatatcatgaaaatggccatactgcccaaagaaatttatagattcaatgctatccccatcaagctgccactgactttcttcacagaattagaaaaaactacttcaaagttcataaggaaccaaaaaagagcccatatagccaagacaatcctaagcaaaaagaacaaagctggaggcatcacactacctgagttcaaactatactacaaggctacagtaaccaaaacaggatgtgtagggggatctgaccaaaagcgggtgagaaccaccgcccgcaatgccggggaactgggcttaaatctggtgattgccgaagacgcctgtagtgccgccagcgccgagcagcacaataacagtatcaaccatatctacccgcgcatcgcccgtgtgcgtagcgtggaagagatcctcaacgctttccggcgaccatttcgcatcaggcagcattacggccattgcgatgatttagtgactgaatttttgacccgcatgtcaccgttggctccgcgcattgggcaatactggctgcaactgcctgccacattcggcccacgggagctgcctgcgctttggccattttctcgattctcttcctggcgaatttacttatggcgtggaagtccgccatccaccagtttttcgccaaaggagaagaggaacaaacgcttaatcgcggtttacatcagcgcggcgttaatcgggtgattttagacagccgcccggttcatgcagcacgtccacacagtgaagctattcgggacgctcaacgaaacaaacctaaagttccggtacatgctgaactgacggcgacaaatccgctgatccgttttatcggtagtgatgatatgacgcaaaactgcctgtccaaaacaatccttaccctaaaagaacaaacctggagacatcatgctacctga

SEQ ID NO: 121162 - DNA, 3421 bp, Homo sapiens
  misc_feature (1)...(3421): n = a,t,c or g
atggggaaaaaacagaacagaaaaactggaaactctaaaacgcagagcgcctctcctcctccaaaggaacgcagttcctcaccagcaacagaacaaagctggatggagaatgattttgacgagctgagagaagaaggcttcagacgatcaaattactctgagctacgggaggacattcaaaccaaaggcaaagaagttgaaaactttgaaaaaaatttagaagaatgtataactagaataaccaatacagagaagtgcttaaaggagctgatggagctgaaaaccaaggctcgaaaactacgtgaagaatgcagaagcctcaggagccgatgcgatcaactggaagaaagggtatcagcaatggaagatgaaatgaatgaaatgaagcgagaagggaagtttagagaaaaaagaataaaaagaaatgagcaaagcctccaagaaatatgggactatgtgaaaagaccaaatctacgtctgattggtgtacctgaaagtgatgtggagaatggaaccaagttggaaaacactctgcaggatattatccaggagaacttccccaatctagcaaggcaggccaacgttcagattcaggaaatacagagaacaccacaaagatactcctcgagaagagcaactccaagacacataattgtcagattcaccaaagttgaaatgaaggaaaaaatgttaagggcagccagagagaaagacagatcaacgagacagaaagtcaacaaggatacccaggaattgaactcagctctgcaccaagcagacctaatagacatctacagaactctccaccccaaatcaacagaatatacatttttttcagcaccacaccacacctattccaaaattgaccacatagttggaagtaaagctctcctcagcaaatgtaaaagaacagaaattataacaaactatctctcagaccacagtgcaatcaaactagaactcaggattaagaatctcactcaaagccgctcaactacatggaaactgaacaacctgctcctgaatgactactgggtacataacgaaatgaaggcagaaataaagatgttctttgaaaccaatgagaacaaagacacaacataccagaatctctgggacgcactcaaagcagtgtgtagagggaaatttatagcactaaatgcccacaagggaaagcaggaaagatctgaaattgacaccctaacatcacaattaaaagaactagaaaagcaagagcaaacacattcaaaagctagcagaaggcaagaaataactaaaatcagagcagaactgaaggaaatagagacacaaaaaacccttcaaaaaatcaatgaatccaggagctggttttttgaaaggatcaacaaaattgatagaccgctagcaagactaataaagaaaaaaagagagaagaatcaaatagacacaataaaaaatgataaaggggatatcaccaccgatcccacagaaatacaaactaccatcagagaatactacaaacacctctacgcaaataaactagaaaatctagaagaaatggatacattccttgacacatacactctcccaagactaaaccaggaagaagttgaatctctgaatcgaccaataacaggctctgaaantgtggcaataatcaatagtttaccaaccaaaaagagtccaggaccagatggattcacagccgaattctaccagaggtacaaggaggaactggtaccattccttctgaaactattccaatcaatagaaaaagagggaatcctccctaactcattttatgaggccagcatcatactgataccaaagccgggcagagacacaaccaaaaaagagaattttagaccaatatccttgatgaacattgatgcaaaaatcctcaataaaatactggcaaaccgaatccagcagcacatcaaaaagcttatccaccatgatcaagtgggcttcatccctgggatgcaaggctggttcaatatacgcaaatcaataaatgtaatccagcatataaacagagccaaagacaaaaaccacatgattatctcaatagatgcagaaaaagcctttgacaaaattcaacaacccttcatgctaaaaactctcaataaattaggtattgatgggacgtatttcaaaataataagagctatctatgacaaacccacagccaatatcatactgaatgggcaaaaactggaagcattccctttgaaaaccggcacaagacagggatgccctctctcaccgctcctattcaacatagtgttggaagttctggccagggcaatcaggcaggagaaggaaataaaggctattcaattaggaaaagaggaagtcaaattgtccctgtttgcagacgacatgattgtttatctagaaaaccccatcgtctcagcccaaaatctccttaagctgataagcaacttcagcaaagtctcaggatacaaaatcagtgtgcaaaatttacaagcattcctgtacaccattaacagacaaacagatagccaaatcgtgagtgaactcccattcacaatggctaaaaagagaataaaatacctaggaatccaacatacaagggatgtgaaggacctcttcaaggagaactacaaaccactgctcaaggaaataaaagaggacacaaacaaatggaagaatattccatgctcatggataggaagaatcagtatcatgaaaatggccatactgcccaaagtaatttatagattcaatgccatccccatcaagctaccaatgactttcttcacagaattggaaaaaaactactttaaagttcatatggaaccaaaaaagagcccgcattgccaagtcaatcctaagacaaaagaacaaagctggaggcatcacactacctgacttcaaactatactacaaggctacggtatccaaaacagcatgtgggtaccagaagcagggagcagacacctcggagcctgcaggggcagtgaggggaaaccttccgaacttcccaagcccccaagagtgcagagatgccaggtccacagccatggcttggctggctgcagctgtgcctaagaagggaaagactcacattctcttgcctaatagtacaaggctagcctcagacattctgggagctggactggagaagcgatgttggggattcaccattcaatatgaactttgtgttcagtacagtctctctccttctttgtgtctggtgtctcagtgtcagactgctgttgtccaagcccccaagcaccgtggacatgttcagtggtgtctgatcccatcggcacagagcttggcttctcaggaggctcctcagagtcgcgtaaatagggtttccgatgcccggcctcaccagcttacagacgtgtctgaatctccttttcactcaggccacacttatattcactcttccctcctgaacattcgttag

SEQ ID NO: 121163 - DNA, 4107 bp, Homo sapiens
atggagctgaaaaccaaggctcgagaactacgtgaagaatgcagaagcctcaggagccgacgcaatcaactggaagaaagggtatcagcaatggaagatgaaatgaatgaaatgaagcgagaagggaagtttagagaaaaaagaataaaaagaaatgagcaaagcctccaagaaatatgggactatgtgaaaagaccaaatctacgtctgattggtgtacctgaaagtgatgcggagaatggaaccaagttggaaaacactctgcaggatattatccaggaggacttccccaatctagcaaggcaggccaacgttcagattcaggaaatacagagaacgccacaaagatactcctcgagaagagcaactccaagacacataattgtcagattcaccaaagttgaaatgaagcaaaaaatgttaagggcagccagagagaaagactttaaaccaacaaagatcaaaagagacaaagaaggccattacataatggtaaagggatcaattcaacaagaggagctaactatcctaaatatatatgcacccaatacaggagcacccagattcataaagcaagtcctgagtgacctacaaagagacttagactcccacacattaataatgggagactttaacaccccactgtcaacattagacagatcaacaagacagaaagtcaacaaggatacccaggaattgaactcagctctgcaccaagcagacctaatagacatctacagaactctccaccccaaatcaacagaatatacatttttttcagcaccacaccacacctattccaaaattgaccacatagttggaagtaaagctctcctcagcaaatgtaaaagaacacaaattataacaaactatctctcagaccacagtgcaatcaaactagaactcaggattaagaatctcactcaaagccgctcaactacatggaaactgaacaacctgctcctgaatgtctactgggtacataacgaaatgaaggcagaaataaagatgttctttgaaaccaatgagaacaaagacacaacataccagaatctctgggacacattcaaagcagtgtgtagagggaaatttatagcactaaatgcccacaagagaaagcaggaaagatccaaaattgacaccctaacatcacaattaaaagaactagagaagcaagagcaaacacattcaaaagctagcagaaggcaagaaataactaaaatcagagcagaactgaaggaaatagagacacaaaaaacccttcaaaaactcaatgaatccaggagctggttttttgaaaggatcaacaaaattgatagaccgctagcaagactaataaagaaaaaaagagagaagaatcaaatagacacaataaaaaatgataaaggggatatcaccaccgatcccacagaaatacaaactaccatcagagaatactacaaacacctctacgcatataaactagaaaatctagaagaaatggatacattcctcgacacatacactctcccaagactaaaccaggaagaagttgaatctctgaatagaccaataacaggatctgaaattgtggcaataatcaatagcttaccaaccaaaaagagtccaggaccagatggattcacagccaaattctaccagaggtacaaggaggagctggtaccattccttctgaaactattccaatcaatagaaaaagagggaatcctccctaactcattttatgatgccagcatcattctgataccaaagccgggcagagacacaaccaaaaaagagaattttagaccaatatccttgatgaatattgatgcaaaaatcctcaataaaatactggcaaaccgaatccagcagcacatcaaaaagcttatccaccatgatcaagtgggcttcatccctgggatgcaaggctggttcaatatacgcaaatcaataaatgtaatccagcatataaacagagccaaagacaaaaaccacatgattatctcaatagatgcagaaaaagcctttgacaaaattcaacaacccttcatgctaaaaactctcaataaattaggtattgatgggacgtatttcaaaataataagagctatctatgacaaacccacagccaatatcatactgaatgggcaaagactggaagcattccctttgaaaactggcacaagacagggatgccctctctcaccactcctattcaacatagtgttggaagttctggccagggcaatcaggcaggagaaggaaataaagggtattcaattaggaaaagaggaagtcaaattgtccctgtttgcagacgacatgattgtttatctagaaaaccccatcgtctcagcccaaaatctccttaagctgataagcaacttcagcaaagtctcaggatacaaaatcaatgtacaaaaatcacaagcattcctatacaccaacaacagacaaacagagagccaaatcatgagtgaactcccagttcacaattgcttcaaagagaataaaatacctaggaatccaacttacaagggatgtgaaggacctcttcaaggagaactacaaaccactgctcaaggaaataaaagaggatacaaacaaatggaagaacattccatggctcatgggtaggaagaatcaatatcgtgaaaatggccatacttgcccaaggtaatttacagattcaatgccatccccatcaagctaccaatgactttcttcacagaattggaaaaaactactttaaagttcatatggaaccaaaaaagagcccgcatcgccaagtcaatcctaagcaaaaaggaacaaagctggaggtatcacactacctgacttcaaactatactacaaggctacagtaaccaaaacagcattgtacttgtaccaaaacagagatgtagatcaatggaacagaacagagccctcagaaataatgctgcatatctacaactatctgatctttgacaaacctgacaaaaacaagcaatggggaaaggattccctatgtaataaatggtgctgggaaaactggctagccatatgtagaaacctgaaactggatcccttccttacaccttatacaaaaatcaattcaagatggattaaagacttacatgttagacctaaaaccataaaaaccctagaagaaaacctaggcaatcccattcaggacataggcatgggcaaggacttcatgtctaaaacaccaaaagcaatggcaacaaaagccaaaattgacaaatgggatctaattaaactaaagagcttctgcacagcaaaagaaactaccatcagagtgaacaggcaacctacagaatgggagaaaattttcgcaacctactcatctgacaaagggctaatatccagaatctacaatgaactcaaacaaatttacaagaaaaaaacaaacaaccccatcaacaagtgggtgaaggatatgaacagacacttctcaaaagaagacatttatgcagccaaaaaacacatgaaaaaatgctcatcatcactggccatcagagaaatgcaaatcaaaaccacaatgagataccatctcacaccagttagaatggcaatcattaaaaagtcaggaaacaacaggtgctggagaggatgtggagaaatagattttcagcaaactaacacaggaacagaaaaccaaacgctgcatattctcactcataagtgggagttgaacaatgagaccacacggacacagggaggggaacatcatacactggggcttgtcgaagggtggggggctaggggagggatagcattgggagatatacctaatgcaagatgacgggttagtgcctggttggaatggatcaaatattccatccacacgttaaaaaaaagcaattgttatgcttgtgcacatggcaagccagaggcccagattgtcccctttccactaaggtggtcctccagtcaaccaggtgtgggctgcatggtaacccttttccaggattctacagcctggagtaataagtcatgccaagctctctctgctgtatcccggaagctgactggtccacgcacagccgaagcatgagaaaactcattgcggggactcattttccttaaaattcagacttgtacagtaaggacttattaact

SEQ ID NO: 121164 - DNA, 307 bp, Homo sapiens
tacaaaaggctatgtcattcgattgtaccatgaggccacaacagacacttatagagccacctactacgctggtgatgcttgcagaaacgggtacagtgtttcaccagaatgatgtgaagattccagatgctaaacatgtatttaccacgaaatcgtcgacaccatgctggaagagaacgtgcacgatattctctgctcggcgctggtggatgactgtattgagcgagcgaaaagtatcaagcaaggcggcgcgaaatatgactgggtttctggcctgcaggtcggacgaaatcgtcgacccgggaaa

SEQ ID NO: 121165 - DNA, 943 bp, Homo sapiens
gcggccgccgcgctccgaggtccccgggcctctgtctcccgggcgtcctccagcagcgggccttcggggccggtagccggctggagtacggggccttcgggagccgcgcgccttctccggcgtccgggtcgagcgcagatccctgtttattgggaaggatatgttcgattcttaaatacgccatctgacaaatcagaagatggaaggctaatttatactggcaatatggcccgagcagtgtttggtaagtaattggaggtgtgaaatgtttctcttattctacgagtctgattggccttacatttctgccatacatttttacacaaaataatgctatttctgaaagtgtgcctctgcctattcaaatcatattctatggcatcatgggaagctttacggtgatcaccccagtgctgcttcactttattacaaaaggctatgtcattcgattgtaccatgaggccacaacagacacttataaagccattacctacaatgctatgcttgcagaaacgagtacagtgtttcaccagaatgatgtgaagattccagatgctaaacatgtatttaccacattttaatgctaaaacaaaatcactgttagttaatccagtgctctttccaaaccgtgaagactatatccatctaatgggttatgacaaagaagaatttattttgtatatgggaaggaaaccagtgaagagaaacggccattaaaggtggacaaatggaggcctatttgtttagtgttcgtgctttaaatgtgatttacgttttaatgtataataataaaattgccttttgcattccgttagtgactgattgttaaaaataatttgaaattatcaaagcttttaatttccagagaatgatgtttgtttataataaaacaagctatgtttggaaaccaaaatgtagtatctaccattcgtgttttagaaag

SEQ ID NO: 121166 - DNA, 1398 bp, Homo sapiens
ttacttttcacatatattagttgaccgatccttaaactgaggcactataacggcattgcccagaaggggccgtttatgttgccagacagcgctactgattaagcggattttggtccagcgcgtgtgtatttgcaccgataagcccatctcttttgccagatccggacgcgcacctgtggcgtagaactgaatctcatcacgaacagcgccgcctaaaagtttataaaccggaagcccgaccactttgccgaacagatcccacagagccagatcgacacaagaaatcgtattcatcaccaggccaccagagccggagtaatacagggtggcactgagcatttgatcgtggatcagtttgatatcactgacacatttaccctcaatgaaacggttaagatgtttttcgacaataaaacagcccatttcaccggctgtcgaaacggcgaatccggtctggccgttttctgcttcgacttcaacaaccaacgtgccaagaacgttaatgccaaatgactggcgtgactgctcgtaatcgcggtatttactcatcggggtggcaatatgatcgtctatccagtgattcgccccctggtcgtgataatcaccgccgccagcgcctttttctgctgtcgcaccgccagtaaaccaggcgcgaactttggcatcgagcatcagcgttttggcaatttctagcatctgcttgtggctgatagataaattcgccactttctcatctagatcaactttcaagcccacgcgtaataacatcatggcggcgcggacacgcatttctcgccagtcgataatattgacgccacagatttttttcgtcagatgacgaccaatatataaattttccagtacggttaattcatcaataacgctgagttcctggtgaaatacatgcattacacagtgcggacaggcaacatgaaaacgcatgaaatgcccggactcgctggcagcacgctcaatctggcaggtcccctttgtttttggcgttgagccgcgaatagatttgggccagacagacccctcaatacgtttatcacccaggaacgtcggggatccctctttctcaatatcttcatcgaatgccgccagttcatcgtaaccggcgacatcgaccgatttctcacgatagtttttcgccgctttaccacccagacaccagaacccgcgaccgttggagaagcgtttcatactgagcgtattgtcccggtgcttttttccataccagggggccagcgccagaagtgacggaatatcgcgaatcgtcggctcaacatgcgaaattcccttatctggctgcctactgatggtgacgccgaaaacagcatgacgatggcataacgagggatgctggacgcggtacgcgacgacgcaagccaccagcat

SEQ ID NO: 121167 - DNA, 1062 bp, Homo sapiens
tcaaggtccgactctagagtatcccctcgggtcaaactgcggacgcatcgttgaacaatccgggctggtcatcaggaattctttgaatggcgtattggtgaaggtgatcaccgcatggtgagagtaaacagacgaaccgtgcggcaccaccagttgccccctggatttggcgattgcggcaatttccaccagcgtggttaaaccaccgcaccagccaacatccggctgcataatgtcgataccggtttctgaaagcgtacgaaaagattgcagtgtgccgtggtgctcaccgctggtgaccatcattccgactggcgcgttgcgtttcagttcgcgataactttcatactgctgtggcggcaggcactcttcgatccatttcaggttatagggcgcgcaagcgtgggccagtttggtcgcatagttcacgtcctgactcatccagcagtcgagcattaaccagaaatcctcaccgcatttttcacgcatatccgcgaccatagcggcatctttgcggatccccgcatcgccatcatgtggcccccagtgcgtcggcattttgccaccgataaagcccatctcttttgccagatccggacgcgcacgttggttgttgaagtcgaagcagaaaacggccagaccggattcgccgtttcgacagccggtgaaatgggctgttttattgtcgaaaaacatcttaaccgtttcattgagggtaaatgtgtcagtgatatcaaactgatccacgatcaaatgctcagtgccaccctgtattactccggctctggtggcctggtgatgaatacgatttcttgtgtcgatctggctctgtgggatctgttcggcaaagtggtcgggcttccggtttataaagccacaggtgcgcgtccggatctggcaaaagagatgggctttatcggtggcaaaatgccgacgcactgggggccacatgatggcgatgcggggatccgcaaagatgccgctatggtcgcggatatgcgtgaaaaatgcggtgaggatttggtagactaattttatacgaatgatttttcggacaggcat

SEQ ID NO: 121168 - DNA, 657 bp, Homo sapiens
atggacatagagaatgaaaaattagatagtgaatacttggaaagaacctgtgaagatgttgttttacacagcaaaagtaattttgcagatgtgattaaggttaaaacactgaaacagggaattatccctgattatcaagaactcttcttttctacctctctaaagcttcacactgaccaagataaaggagatggaaatttaaaatacatactaacaggagatggggctggcagtctatttgttatagatgaaaatacaggagacattcatgctgcaaagaaactagacagagaagaaaaatctctgtacattcttcgtgccaaggctatagacagaaaaactgggcggcaggtggaaccggaatcggaatttatcattaaaatacatgatatcaatgacaatgagccaaaatttacaaaagacttatacactgccagtgttcctgaaatgtctggagtcgaactgatgttgaacatcgccatcatgtggcccccagtgcgtcggcattttgccaccgataaagcccatctcttttgccagatccggacgcgcacctgtggcctggtgatgaatacgatttcttgtgtcgatctggctctgtgggatctgttcggcaaagttagaaataaccttagtgggacaaaatataatgaataa

SEQ ID NO: 121169 - DNA, 3705 bp, Homo sapiens
ggaattcccggccgggcgcacccgcggggccctgggctcgctggcttgcgcgcagctgagcggggtgtaggttggaagggccagggcccctggggcgcaagtgggggccggcgccatggaacccccgaccgtcccctcggaaaggagcctgtctctgtcactgcccgggccccgggagggccaggccaccctgaagcctcccccgcagcacctgtggcggcagcctcggacccccatccgtatccagcagcgcggctactccgacagcgcggagcgcgccgagcgggagcggcagccgcaccggcccatagagcgcgccgatgccatggacaccagcgaccggcccggcctgcgcacgacccgcatgtcctggccctcgtccttccatggcactggcaccggcagcggcggcgcgggcggaggcagcagcaggcgcttcgaggcagagaatgggccgacaccatctcctggccgcagccccctggactcgcaggcgagcccaggactcgtgctgcacgccggggcggccaccagccagcgccgggagtccttcctgtaccgctcagacagcgactatgacatgtcacccaagaccatgtcccggaactcatcggtcaccagcgaggcgcacgctgaagacctcatcgtaacaccatttgctcaggtgctggccagcctccggagcgtccgtagcaacttctcactcctgaccaatgtgcccgttcccagtaacaagcggtccccgctgggcggccccacccctgtctgcaaggccacgctgtcagaagaaacgtgtcagcagttggcccgggagactctggaggagctggactggtgtctggagcagctggagaccatgcagacctatcgctctgtcagcgagatggcctcgcacaagttcaaaaggatgttgaaccgtgagctcacacacctgtcagaaatgagcaggtccggaaaccaggtctcagagtacatttccacaacattcctggacaaacagaatgaagtggagatcccatcacccacgatgaaggaacgagaaaaacagcaagcgccgcgaccaagaccctcccagccgcccccgccccctgtaccacacttacagcccatgtcccaaatcacagggttgaaaaagttgatgcatagtaacagcctgaacaactctaacattccccgatttggggtgaagaccgatcaagaagagctcctggcccaagaactggagaacctgaacaagtggggcctgaacatcttttgcgtgtcggattacgctggaggccgctcactcacctgcatcatgtacatgatattccaggagcgggacctgctgaagaaattccgcatcccggtggacacgatggtgacatacatgctgacgctggaggatcactaccacgctgacgtggcctaccataacagcctgcacgcagctgacgtgctgcagtccacccacgtactgctggccacgcctgcactagatgcagtgttcacggacctggagattctcgccgccctcttcgcggctgccatccacgatgtggatcaccctggggtctccaaccagttcctcatcaacaccaattcggagctggcgctcatgtacaacgatgagtcggtgctcgagaatcaccacctggccgtgggcttcaagctgctgcaggaggacaactgcgacatcttccagaacctcagcaagcgccagcggcagagcctacgcaagatggtcatcgacatggtgctggccacggacatgtccaagcacatgaccctcctggctgacctgaagaccatggtggagaccaagaaagtgaccagctcaggggtcctcctgctagataactactccgaccgcatccaggtcctccggaacatggtgcactgtgccgacctcagcaaccccaccaagccgctggagctgtaccgccagtggacagaccgcatcatggccgagttcttccagcagggtgaccgagagcgcgagcgtggcatggaaatcagccccatgtgtgacaagcacactgcctccgtggagaagtctcaggtgggttttattgactacattgtgcacccattgtgggagacctgggcggaccttgtccacccagatgcccaggagatcttggacactttggaggacaaccgggactggtactacagcgccatccggcagagcccatctccgccacccgaggaggagtcaagggggccaggccacccacccctgcctgacaagttccagtttgagctgacgctggaggaggaagaggaggaagaaatatcaatggcccagataccgtgcacagcccaagaggcattgactgcgcagggattgtcaggagtcgaggaagctctggatgcaaccatagcctgggaggcatccccggcccaggagtcgttggaagttatggcacaggaagcatccctggaggccgagctggaggcagtgtatttgacacagcaggcacagtccacaggcagtgcacctgtggctccggatgagttctcgtcccgggaggaattcgtggttgctgtaagccacagcagcccctctgccctggctcttcaaagcccccttctccctgcttggaggaccctgtctgtttcagagcatgccccgggcctcccgggcctcccctccacggcggccgaggtggaggcccaacgagagcaccaggctgccaagagggcttgcagtgcctgcgcagggacatttggggaggacacatccgcactcccagctcctggtggcggggggtcaggtggagaccctacctgatccccagacctctgtccctgttcccctccactcctcccctcactcccctgctcccccgaccacctcctcctctgcctcaaagactcttgtcctcttgtccctcctgagaaaaaagaaaacgaaaagtggggtttttttctgttttctttttttcccctttccccctgcccccacccacggggcctttttttggaggtgggggctggggaatgaggggctgaggtcccggaaggattttatttttttgaattttaattgtaacatttttagaaaaagaacaaaaaaagaaaaaaaaaagaaagaaacacagcaactgtagatgctcctgttcctggttcccgctttccacttccaaatccctcccctcaccttcccccactgccccccaagttccaggctcagtcttccagccgcctggggagtctctacctgggcccaagcaggtgtggggcctccttctgggcttttcttctgaatttagaggatttctagaacgtggtcaggaatagccattctaggcggggctggggccagggtggggggcagtcactgtgggaggtcccagctccagcccccctctggtttgctgcctcctctcccctctaaaaaagtcttccgcttgattttgcacaatcccggcgatactcctggcgatactgactagaagtcagggagctgggggagctgttcactttaggatacggggggatggaagggagcgttcacaccgccagcctcgggcctgggatttgaggagggccctagacctcctccactctccatcccctttcccttccactttgggttcactttgaattttctccgttttttggggcagtggctctgatccactcacccccccgccccgtaagttatagccactgtggaaagtagtatgaaagttcctcaagaaactaaaaatggaattc

SEQ ID NO: 121170 - DNA, 1016 bp, Homo sapiens
ctttggtttccgggacaaatttccacataaacagtgctgccagaacgcccatacaaccgtaaatccagtaggagaaaccgttgtggaaatgggccaccagccaggagtttttgtccatcatcgggaaggtccaggagacgaagtagttcgccagccactgggccgccaccgcgattgccagcgctttaccacgaatagcattcgggaagatttccgacagcagtacccagcataccggaccccaggacatggcaaaggcggcaacatagaacagcatcgacagtagcgccacaatacccggtgcctgagtgtaaaacgcggtaccgaggctaaacataccgattgccattccgagtgcgccgataatttgcagtggcttacgaccaaatttatccaccgtcataattgccagaacggtgaaagtgaggttgataactccgacaataatggacagtccactcccttttgcctgttctataaaagtcgccgtctgtcgcagccagtaatcttccccggttaaccacgggaaatttttcgggaacgcgggatcagcccaacgccgcattagccaggcaagataataaaccaaacgcatggcgcgtaaaggttcaatcagtccgatttcagcggtgtcgaactcgctaaattcttcataagcttcaataatagtttccagttgcatccgctgctcggctttatcgccattgagcaacatccacaaatcctgaacggctggaccattacgtgcatcatccagatcaacaaacattggaccatcgcgccagaaaatattcccggcgtggcagtctccatgtagccgcagaacggtgaaatcttcccgccagtgtgctggtaacggcggcaatcagctcatctgtcgctttcaggaatgccgctttcaacccggaaggtatcagtgtagcgtcctcaaacagcttgcgtggctcaatgagatattcgttcaaaccgatggtcgggcgatggataaaaagctgtttgcgccccgtctggtgcat

SEQ ID NO: 121171 - DNA, 2853 bp, Homo sapiens
  misc_feature (1)...(2853): n = a,t,c or g
ctagcgtaatctccgcatacctttatcgtactctgggaggcacagcttattatgcagaatgatcagatgcttaccatccgggttgcgccctagcgattgctgcatttcgtctaccagcaacatatcatctaccggcttgccacgattacgtggctccgcaccaatctgctcacgataagcaatgttgtccgccatcgtgttgctgtagaaccacatttcgctctgcatagcgtagagggcggggctgaatccaaacagcttcagaacctttttaatgntctgttcttttaatgtgcgctgcggattatcttccgcgcccccctgacgtacaaacatgcaacgcagtacgagtttggttgcggtatcacaggagtaaccacggaacgccgccagatttttctcctgggccagtttcggcgtggtattacgctcatagccgaaaatacccatatggtcccaacgcgtggtttcaccgatgataaacacgacataagtgtcctcaacgttttgcggtgcctgataagtgaatttcttcgccggattaagcaatgaattattatcggaagattcatcgacccgcgcccaggcatacagccccaacgcagaaagcccgtttgatggcagataagagttcgctacgacaccgccataactcggcaaataaacgccggtccgcctctccactttcttctgctggatatccagcaaacgaatccgtgcccaaaacctaatacccgccagtacgacgaacggccagctgcgaatacgccaacgccgcattagccaggcaagataataaaccaaacgcatggcgcgtaaaggttcaatcagtccgatttcagcggtgtcgaactcgctaaattcttcataagcttcaataatagtttccagttgcatccgctgctcggctttatcgccattgagcaacatccacaaatcctgaacggctggaccatggggtgcatcatccagaaaaacaaacattggtttatcgcgccagagaatattcccggcgtggcagtctccatgtagccgcagaacggtgaaatcttctcgccagtgtgctgtaacggcggcaatcagctcatctgtcgctttcaggaatgccgctttcaacccggaaggtatcagtgtagcgtcctcaaacagcttgcgtggctcaatgagatattcgttcaaaccgatggtcgggcgatggataaaaagctgtttgcgccccgtctggtgcatacgccctaaataacgcccaaccgcttccatctgatcgatattatcagcttcgaactggcgaccaccgacgcttggacaaacagcgaaataaaatccctgatgattccataaagtctgacccgtaaaggccacaggtgctgcgaccggaacttcatcatttaccagctggcaacgcaaattcgatgtcttcgaggatttgatcggcttgtcaacgtttccaggcgataaaattttgacgacaaaacgtcgacgatcttcggcctgaaattgattggccacggttttccaaagttggttaacgggggtaagaaccggaattccccccggatttcccatgtgcaaaacagagcggtcccatgatgggtttcccgggtggtaatttccttgaagaccgttgcggggaccgcagaaaagggttcggatttttcgtgtaggtttctcttttttctcttcttccaccaaaagccttgttagagtaatgtcgaactcatactttccttgaggcccttggatatgcatctggtaatttttagtttctgatataccatgagatactgacaactcgcaaccttcttttttggtgggggcctccccggtgggtctgccccctgggaccccccgggtgaggcttgtttgtgggtccttgttcgcctccctggtagaacagtctgggtcatccagtttgttcagttgagaagtttctttgcccccccctttgcgcacaatggtagagcctcgagtggtcgtgtctcggtccattacggaatagcgcaaaccgccgaatgggcagcagagatttgtggtgttggcgcacggaaaatccgcgagctggcggctattttccaccaaaataccatcatgcattttgccaatggtggtaccccacgcggcgttctgcggtgctctcttccatgcaaggcagcttgccgggtggctgccgatgcggtggatatacatcctgttgcccgcattgttgaagcactggaaaaccctggtggcgcatatcaacacaacggtatgaaccgacatttcccggatattcgttttatctggtgggcgggcggtgccaactttactcatcatcaggataccaatcgcctgatacgtgcctggcaaaatgattcctattttagaaaagggcgtataaaagccaaaatgggtccaaaacttttctaaagcttgtttccggatttcaaccagtgcctccagcaccactttccagtcatcaaccacgccaacatctgcctgtggaaataccgcagcgctggcgtcatgattaatcgccaccacaaacttgctattgcgtacgcccgccattaacgctgctgcgccagaagcgccaacaacaatacacacctcaggtgccagcagatgtccggaaataccaatcactttttcagcatcaacgcacacgttcatccatcggggccgactgtatgccacttcggctcccagctttcctgcagcatagcgattcctggtatctgctctccgccgggggctaaaggtccatttggcatcctgggaccggtgaccgttttctaaatcaaattctcgttgggcggcctggtcccaccaaggtgcggggtggggcttgggtaagggtgtgggtttcttccccat

SEQ ID NO: 121172 - DNA, 726 bp, Homo sapiens
atggaacccccgaccgtcccctcggaaaggagcctgtctctgtcactgcccgggccccgggagggccaggccaccctgaagcctcccccgcagcacctgtggcggcagcctcggacccccatccgtatccagcagcgcggctactccgacagcgcggagcgcgccgagcgggagcggcagccgcaccggcccatagagcgcgccgatgccatggacaccagcgaccggcccggcctgcgcacgacccgcatgtcctggccctcgtccttccatggcactggcaccggcagcggcggcgcgggcggaggcagcagcaggcgggaagcttccgctgaaacccaactggggcccattatgggggccatgcctgcaggttcagcgggatgcggcattgccgaaatgatcatctcccagacccagcgcgaaggattaagcgaggaagcggcgcggcagaaagtctttatggtcgatcgctttggcttgctgactgacaagatctgctcggatcttagcatgcctgcaggtccttggaaacctaatggtccagccgttcaggatttgtggatgttgctcaatggcgataaagccgagcagcggatgcaactggaaactattattgaagcttatgaagaatttagcgagttcgacaccgctgaaatcggactgattgaacctttacgcgccatgcagtcatatggactgggcagccccatatggtccttctaa

SEQ ID NO: 121173 - DNA, 138 bp, Homo sapiens
gatacagctacgcgtcagacactgctcggcaatagcctggtcgttgtagcaccgaaagccagcgtgcagaaagatttcaccatcgacagcaaaaccaactggacttcactgctgaatggcggtcgcctggcggttggc

SEQ ID NO: 121174 - DNA, 381 bp, Homo sapiens
tccttagcagtctgcggtgccgcacggcggaagaagcgtttttcccagccgataatcaacatcagcgcagcaaacaacagcaaatatgtcaccagcaggccacccatcggaccaaaggttttcagcaggttgattttgtcccagtcggtggccaacggcggaaccaaattcttcccagtattacgccagaatcgtgaagccgttcacattgcccagaccgacccaccagtagtgcacctggccttctaccgcgcggtacatccagccggtttcgcagccgccagccagcacgatgccaaaaccaaacagtaaaccaccaattaccgcgtttggtcccgcccacatgattttgggttcaacgcctaactgtacgtaactgaa

SEQ ID NO: 121175 - DNA, 1524 bp, Homo sapiens
atgattgtatatctagaaaaccccatcgtctcagcccaaaatctcctcaaactgataggcagcttcagcaaagtctcaggatacaaaatcaatgtacaaaaatcacaggcattcttatacaccaataacagacaaacagagagccaaatcatgagtgaactcccattcacaattgcttcaaagagaataaaatacctaggaatccaacttacaagggatgtgaaggacctcttcaaggagaactacaaaccactgctcaacgaaataaaagaggatacaaagaaatggaagaacattccatgctcatgggtaggaagaatcaatatcgtgaaaatggccatactgcccaaggtaatttatagattcaatgccgtccccatcaagctaccaatgactttcttcacagaattgaaaaaaactactttaaagttcatatggaaccaaaaaagagcccgcatcgccaagtcaatcctaagccaaaagaacaaagctggaggcatcacgctacctgacttcaaactatactacaaggctacagtcaccaaaacagcatgggactggtaccaaaacagagatatagatcaatgcaacagaacagagccctcagaaataacacctcatatctacaactatctgatctgtgacaaacctgagaaaaacaagcaatggggaaaggtttccctatttaataaatggtgctgggaaaactggctagccatatgtagaaagctgaaactggatcccttccttacaccttatacaaaaattaattcaagatggattaaagacttaaatgttagacctaaagccataaaaaccctagaagaaaacctgggcaataccattcaggacataggcatggacaaggacttcatgtctaaaacaccaaaagcaatggcaacaaaagccaaaattgacaaatgggatctaattaaactaaagagcttctgcacagcaaaagaaactaccatcagagtgaacaggcaacctacacaatgggagaaaatttttgcaacctactcatctgacaaagggctaatatccagaatctacaatgcactcagacaaatttacaagaaaaaaacaaacaaccccatcaaaaaggacatggatgaaaccggaaaccaccattctcagcatactatcgcaaggacaaaaaaccaaacaccgcatgttctcactcatggatgggaactgaacaatgagaacacatggacacaggaaggggaacatcacactctggggactgttgtgtggaatcaaaagagccctagtccatcactaatgcagaaacacaagcacaatgctgagggtggaatactcacagagaaacgaccagatagaggttggaaaacaaaagcagccaatgtgactagcatcccttcaaaaactgagagggcatgggggataagacgcaggtggatttcagataatcaaagtcaccctgcatctcctattaagcagcttgaactttatcctgaaggctatgggacccccattaaagctgttaacacaggacagtga

SEQ ID NO: 121176 - DNA, 1521 bp, Homo sapiens
atgtggtacatgcatatgtatgtatggaatactgttcggccattaaaaaggaatgaagtggatccgttccaagatggccgaacaggaacagctctggtctgcagctcccagcatgatcgatgcagaagatgggtgatttctgcgtttccaactgaggatcgcagttcctcgccagcaatggaacaaagctggatggagaatgactttgatgagttgacagaagtaggcttcagaagactaaaccaggcagaagctgaatctctgaatagaccaataacaggctctgaaattgaggcaataataaagcctaccaaccaaaaagagtccaggaccagacggattcacagccaaattctaggagctgtgttggaagttctggccagggcaatcaggcaagagaaagaaataaagggtattcaattaggaaaagaggaagtcaaattgtccctgtttgcagatgacatgattgtatatctagaaaaccccatcgtctcagcccaaaatctccttaaactgataagcaacttcagcaaagtctcaggatacaaaatcaatgtgcaaaaatcacaagcattcctatacaccaataacagacaaacagagagccaaatcatgagtgaactcccattcacaattgcttcaaagagaataaaatacctaggaatccaacttacaagggatgcaaaggacgtcttcaaggagaactacaaaccactgctcaatgaaataaaagaggacacaaacaaatggaagaacattccatgctcatggataggaagaatcaatatcgtgaaaatggccatactgcccaggaattggaaaaaactacttcaaagttcatatggaaccaaaaaagcccgcatcaccaagacaatcctaagcaaaaagaacaaagctggaggcatcacgctacctaacttcaaactatactacaaggctacagtaaccaaaacagcatggtactggtaccaacacagagatatagaccaatggaacagaacagaggcctcagaagtaacaccacacatctacaaccatctgatctttgacaaacctgacaaaaacaagaaatggggaaaggattccctgtttaataaatggtgctgggaaaactggctagccatatgtagaaagctgaaactggatctcttccttacaccttatacaaaaattaatccaaggtggattaaagacttaaatcttagacctagaaccataaaaaccctagaagaaaacctaggcagtatctttagggacataggcatgagcaagggcttcatgactaaaacaccaaaagcaaaggcaacaaaagccaaaacagacaaatgggatctaattaaactaaagagcttctgcacggcaaaagaaactaccatcagagtgaacaggcaacctacagaatgggagaaaatttttgcaatctatccatctgacaaagggctaatatccagaatctataaagaactcaaacgaatttacaagaaaaaaacaaccccatcaaaaagtgggcaaagggtatga

SEQ ID NO: 121177 - DNA, 1497 bp, Homo sapiens
atggggaaaaaacagagcaggaaaactggaaactctaaaaagcagagcgcctctcctcctccaaaggaatgcagctcctcaccagcaatggaacaaagctggacagagaatcactttgatgagttgagagaaggcttcagacaacccaactactctgagctaaaggaggaaattcaaaccaatggcaaagaagttaaaaactttgaaaaaaaaatagacaaatggataactagaatgaccaatgcagagaagtccttaaaggagctgatggagctgaaagccaaggctcgagaactacgtgaagaatgcagaagcctcaggagccgatgtgatcaactggaagaaagggtatcagtgatggaagatgaaatgaataaaatgaagttcaacaaaattggcataccactagcaagactaataaagaagaaaagagagaagaatcaaatagacacaataaaaaatgacaaaggggatatcaccaccaatcgcacagaaatacaaactaccatcagagaatactataaacacctctatgcaaataaagtagaaaatctagaagaaatggataaattcctcgacacataccccctcccaagactaaaccaggaagaaattgaatctctgaatagaccaataacaggctctgaaattgtggcaataatcaatagcttaacaaccaaaaagagtccaggaccacatggattcacagccaaattctacaagagaaccaaagacaaaaaccacgtgagtatctcaatagatgcagaaaagacctttgacaaaattcaaaaacccttcatgctaaaaactctcaataaattaggtattgatgggacgtatctcaaaataataacagctatctatgacaaacccacagccaatatcacactgaatgggcaaaaactggaagcattccctttgaaaactggcacaaaacagggatgccctctctcaccactcctattcaacatagtgttggaagttctggcgagggcaattaggcaggagaaggaaataaagggtattcaattaggaaaagaggaagtcaaattgtccctgtttgcagacgacatgattgtatatctagaaaaccccattgtctcagcccaaaatctccttaagctgataagcaacttcagcaaagtctcaggatacaaaaccaatgtacaaaaatcacaagcattcttatacaccaataagagacaatcagagagccaaatcatgagtgaactcccattcacaattgcttcaaagagaataaaatacctaggaatccaacttacaagggacatgaaggacctcttcaaggagaactacaaaccactgctcaatgaaataaaagaggatacaagcaaatggaagaacattccatgctcatggttaggaagaatcaatatggtgaaaatggccatacagcccaaggtaatttatagattcaatgccatccccatcaagctaccaatgactttcttcacagaattggaaaaactactttaa

SEQ ID NO: 121178 - DNA, 1698 bp, Homo sapiens
atgatgggagactttaacaccccactgtcaacattagacagatcaatgagacagaaagttaacaaggatatccaggaattgaactcagctctgcaccacatggacctaatagacatctacagaactctccacccaaaatcaacagaatacacattcttctcagctccacaacgcacctattccaaaattgaccacatagttggaagtaaagcactcctcagcaaatgtaaaagaacagaaattataacaaactgtctctcagaccacagtgcaatcaaactagaactcaggattaagaaactcactcaaaaccactcaattacatggaaactgaacaactggctcctgaatgactactgggtacataacgaaatgaaggcagaaataaagatgttctttgaaaccaacgagatcaaagacacaacataccagaatctctgggacacattcaaagcaacactaaaccaggaagaagttgaatctctgaatagaccaataacaggctctgaaattcaggcaatgattaacagcttaggaaccaagaaactccaggaccagacggattcacagccaagttctaccagagatgacatgattgtatatctagaaaaccccatcgtctcagcccaaaatctccttaagctgataagcaacttcagcaaagtctcaggatacaaaatcaatgttcaaaaatcacaagcattcttatacaccaataacagacaaacagagagccaaatcatgagtaaactcccattcacaattgcatcaaagataataaaatacctaggagtccaacttacaagggatgtgaaggaccccttcaaggagaactacaaaccactgctcaacgaaataaaagaggacacaaacaaatggaagaacatcccatgctcatggataggaagaatcaatatcatgaaaatggccatactgcccaaggtaatttatagattcaatgccatccccatcaagctaccaatgactttcttcacagaattggaaaaaagtactctaaagttcatatggaaccaaaaaagagcctgcattgccaggtcaatcctaagccaaaggaacaaagctggaggcatcacactacctgacttcaaactatactacaaggctacagtaaccaaaacagcatggtactggtaccaaaacagagatatagaccaatggaacataacagagccctcagaaacaatgccacatatctaccactatctgatctttgagaaacctgacaaaaacaagaaatggggaaaggattccctatttaacaaatggtgctgggaaaactggctagccacatgtagaaagctgaaactggatcccttccttacaccttatacaaaaattaattcaagatggattaaagacttaaatgttagacctaaaaccataaacaccctagaagaaaacctaggcaataccattcaggacataggcatgggcaaggacttcatgtctaaaacaccaaaagcaatggcaacaaaagccaaaattgacaaatgggatctcattaaactaaagagcttctgcacagcaaaagaaactaccaccagagtgaacaggcaacctacagaatgggagaaaatttttgcaatctactcatctgacaaagggctaatatccagaatctacaaagaactcaaacaaatttacaagaaaaaaacaaccccatcaacaagtgggtga

SEQ ID NO: 121179 - DNA, 1725 bp, Homo sapiens
atggagctgaaaaccaaggctcgagaactacgtgaagaatgcagaagcctcaggagccgatgcgatcaactggaagaaagaccaaatctacgtctgattggtgtacctgaaagtgatggggagaatggaaccaagttggaaaacactctgcaggatattatccaggagaacttccccaatctagcaaagcaggtcaacgttcagattcaggaaatacagagaacgccacaaagatactccttgagaagagcaactccaagacacataattgtgagattcaccaaagttgaaatgaaggaaaaaatgttaagggcagccagagagaaaggtcgggttaccctcaaagggaagcccatcagactaacagcggatctctcggcagaaaccctacaagccagaagagagtgggggccaatattcaacattcttaaagaaaagaattttcaacccagaatttcatatccagccaaactaagcttcataagtgaaggagaaataaaatcctttacagacaagcaaatgctgagagattttgtcaccaccaggcctgccttacaagagctcctgaaggaagcactaaacatggaaaggaacaaccggagctggttttttgaaaagatcaacaaaattgatagaccactagcaagagtaataaagaagaaaagagagaagaatcaaatagacgcaataaaaaatgataaagaggatatcaccaccaatcccacagaaatacaaactatcatcagagaatactacaaacacctctacccaaataaactagaaaatctagaagaaatggatacattcctcgacacatacaccttcccaagactaaaccaggaagaagttgaatctctgaatacatcaataacaggctctgaaattgtggcaataatcagtatagcataccaaccaaaaaaagtccaggaccagatggatccacagccgaattctaccagagtgttggaagttctggccagggcaattaggcaggagaaggaaataaagggtattcaattaggaaaagaggaagtcaaattgtccctctttgcagatgacatgattgtatatctagaaaaccccattgtctcagcccaaaatctccttaagctgataagcaacttcagcaaagtctcaggatacaaaatcaatgtacaaaaatcacaagcattcttatacaccaacaacagacaaacagagagccaaatcatgagtgaactcccattcacaattgcttcaaagagaataaaatgcctaggaatccaacttacaagggatgtgaaggacctcttcaaggagaactacaaaccactgctcaaggaaataaaagaggatacaaacaaatggaagaacattccatgctcatgggtaggaagaatcaatatcgtgaaaatggccatactgcccaaggtaatttacagattcaatgccatccccatcaagctaccaatgactttcttcacagatttggaaaaaactactttaaatttcatatggaaccaaaaaagagcccgcatcaccaagtcaatcctaagccaaaagaacaaagccggaggcatcacactacctgacttcaaactatactacacggctacagtaaccaaaacagcatggtactggtaccaaaacagcatggtactggtaccaaaacagagatatagatcaatggaacagaacagagccctcagaaataacgccgcatgtctacaactatctgatctttga

SEQ ID NO: 121180 - DNA, 2481 bp, Homo sapiens; identical to SEQ ID NO: 118549

SEQ ID NO: 121181 - DNA, 1746 bp, Homo sapiens
atggagacacaaaaaacccttcaaaaaatcaatgaatcaaggagctggttttttgaaaagatcaacaaaattgatagaccgctagcaagactaataaagaaaaaaagagagaagaatcaaatagacacaataaaaaatgataaaggagatatcaccaccgatcccacagaaatacaaactaccatcagagaatactataaacacctctacgcaaataaactagaaaatctagaagaaatggataaattcctcgacacatacaccctcccaagactaaaccaggaagaagctgaatctcttaataaaccaataacaggccctgaaattgaggcaataattaatagcttaccaaccaaaaaaattccaggaccagatggattcacagccgaattctaccagaggtacaaggaggagctgcagcacatcaaaaagcttatccaccatgatcaagtgggcttcatccctgggatgcaaggctggttcaacatacacaaattaataaacgtaatccagtatataaacagaaccaaagacaaaaaccacatgattatctcaatagatgcagaaaaggcctctgacaaaattcaacagcccttcatgctaaaaactctcaataaattaggtattgatgggacatatctcaaaataataagagctatttatgacaaacccacagccaatatcatcctcaatgggcaaaaactggaagcattccctttgaaaactggcacaagacagggatgccttctctcaccactcctattcaatatagtgttggaagttctggccagggcaataagacaggagaaagaaaaaaagtgtattcgattaggaaaagaggaagtcaaattgtccctgtttgcagatgacatgattgtatatctagaaaaccccatcgtctcagcccaaaatctccttaagctgataagcaacttcagcaaagtctcaggatacaaaatcaatgtgcaaaaatcacaagcattcttatacaccaataacagacaaatagagagccaaatcatgagtgaactcccattcacaattgcttcaaagagaatacaatacctagggatccaacttacaagggatgtgaaggacctcttcaaggagaactacaaaccactgctcaacgaaataaaagaggatacaaacaaatggaagaacattccatgctcatggataggaagaatcaatatcatgaaaatggccatgctgcccaaggtaatttatagattcgatgccatccccatcaagctaccaatgactttcttcacagaattggaaaaaactactttaaagttcatatggaaccaaaaaagagcacgcatcgccaagtcaatcctaagccaaaagaacaaagctggaggcatcacactacctgacttcaaactatactacaaggctatagtaaccaaaacagcatggtactggtaccaaaagagagatgtagaccaatggaacagaatagagccctcagaaacaataccacacatctgcaaccatctgatctttgacaaacctgacaaaaacaagcaatggggaaaggattccctatttaataaatggtgctgggaaatctggctagccataggtagaaagcggaaactggatcccttccttacaccttacacaaaaattaattcaagatggattaaagacttcaacattagacctaaaaccataaaaaccctagaagaaagcctaggcaattcaagacataagcatgggcaagaaattcacgtctaa

SEQ ID NO: 121182 - DNA, 1911 bp, Homo sapiens
atggctaacaagaataaccaatgcagggaagtccttaaaggacctgatgagctgaaaaccatggcacgagaaccacatgacaaatgcacaagcttcagtagccaatttgatcaactggaagaaagggtatcagcgatggaagatcaaatgaatgaaatgaagcgagaagagaagtttagagaaaaaagaataaaaagaaatgaacaaaggctccaagaaatatgggactatgtgaaaagaccaaatctatgtctgattggtgtacctgaaagtgatggggagaatggaaccaagttggaaaacactctgcaggatattatccaggagaacttccccaacctagcaaggcaggccaacattcaaattcaggaaatacagagaatgccacaaagatactccttgagaagaacaactccaagacacataattgtcagattcaccaaagttgaaatgaaggaaaaaatgttaagggcagccagagagaaaggtcgggttacccacaaagggaagcccatcagactaacagctgatctctcggcagaaactctacaagccagaagagaatcaacaagacagaaagttaacaaagatatccaggaattgaactcagctcagcatcaagcagacctaacagacaactacagaactctccaccccaaatcaacagaatatacactcttctcagcaccacatcacacttattccaaaattgaccacatagttggaagtaaagcactcctcagcaaatgtaaaagaacagaaattataacaaactgtctctcagaccacagtgcaatcaaactagaactgaggattaagaaactcactcaaaacctctcaactacatggaaactgaacaacctgctcctgaatgactactgggtacataacgaaatgaaggcagaaataaagatgctctttgaaaccaatgagaacaaagacacaacataccagaatctctgggacacatttaaagcagtgtgtagagggaaatatatagcactaaatgcacacaagagaaagcaggaaagatctaaaattgacaccctaacgtcacaattaaaagaactagaaaagcaagagcaatcgcattcaaaagctagcagaaggcaagaaataactaagatcagagcagaactgaaggagatagagacacaaaaaactcttcaaaaaatcaatgaatccagggactggttttttgaaaagatcaacaaaattgatagacagctagcaagactaataaagaagaagagagagaagaatcaaatagacacaataaaaaatgtgttggaatttctggccaaggcaattaggcaggacaaggaaataaagggtattcaattaggaaaagaggaagtcaaattgttcctgtttgcagaagacatgattgtatatctagaaaaccccatcgtctcagcccaaaatctccttaagctgataagcaacttcagcaaagtctcaggatacaaaatcaatgtgcagaaatcacaagcattcttatacaccaataacagacaaacagagagccaaatcatgagtgaactcccattcacaattgcttcaaagagaataaaatacctaggaatccaacttacaagggatatgaaggacctcttcaaggagaactataaaccactgctcaacaaaataaaagaggatacaaagaaatggaagaacattccatgctcatgggtaggaagaatcaatatcatgaaaatggccatactgcccaaggtaatttatagattcaatgccatccccatcaagctaccaatgactttcttcacagaattggaaaaaactactttaaagttcacatggaaccaaaaaagagcccgcattgccatgtcaatcctaacccaaaagaacaaaattggaggcatcatgctacctgacttcaaactatactaa

SEQ ID NO: 121183 - DNA, 1497 bp, Homo sapiens
atgttctttgaaaccgacgagaacaaagatacaacatatcagaatccctgggacacatttaaagcagtgtgtagagggaaatttatagcactaaatgcccacaagagaaagcaggaaagatctaaaatcgacaacctaacatcacaattaaaagaactacagaatccagagcaaacacattcaaaagctagcagaagacaagaaataactaagatcagagcagaactgaaggagatagagacacaaaaaacccttcaaaaaatcaatgaatccaggagctggtattttgaaaagatcaacaaaattgatagaccactagcaagactaataaagaagaaaagagagaagaatcaaatagatgcaataaaaaatgataaaggggatatcaccactgatcccacagaaatacaaactaccatcacaggatactataaacacatctatgcaaataaactagaaaatctagaagaaatggataaattcctcaacacatacaccctcccaagactaaaccaggaagaacttgaatctctgaatagaccaataacaggctctgaaattgagacaataattaatagcttaccaaccaaaaaaagtccaggatcagatggattcacagccgaattctaccagaggcctggcagagacacaacaaaaaaagagaattttaggccaatattcctgatgaacattgatgtgaaaatcctcaataaaatactagcaaaccaaatccagcagcacatcaaaaagcttatgcaccaagatcaagtgggcttcatccctgggatgcaaggctggtccaacatacacaaatcaataaatgtaattcggcatataaacagaactgaagataaaaaccacatgattatctcactagatgcagaaaaggccttcgacaaaattcaacagcccttcatgctaaaaactctcaataaattaggtattgatgggacatatctcaaaataataagagctatctatgacaaacccacagccaatatcatactgaatgggcaaaaactggaagcattccctttgaaaaccagcacaagacagggatgccctctctcaccactcctattctacatagtgttggaagttctcgccaaggcaatcaggcaggagaaagaaataaaggatattcaattaggaaaagaggaagtcaaattgtccctgtttgcagatgacatgattgtatatctagaaaaccccattgtctcagcccaaaatctccttaaactcataagcaaattcagcaaagtctcaggatacaaaatcaatgtgcaaaaatcacaagcattcttatacaccaataacagacaaacagagagccaaatcatgagtgaactcccattcacaattgcttcaaagagaataaaatacccaggaatccaacttacaagggatgtgaaggacctcttcaaggagaactacaaaccactgctcaacaaaataaaagagaacacaaacaaatggaagaacattccatgctcatga

SEQ ID NO: 121184 - DNA, 1564 bp, Homo sapiens
aataaccaatgcagagaagtccttaaaggacctgatggagctgaaaaccatggcacaagaactacgtgacgaatgcacaagcctcagtagccgattcgatcaactggaagaaaaggtatcagtgatggaagatgaaattaatgaaatgaagcaagaagagaaggttagagaaaaaagaataaaaagaaatgaacaaagcctccaagaaatatgggactatgtgaaaagaccaaatctacatctgattggtgtacctgaaagtgacagggagaatggaaccaagttggaaaacactctgcaggatattatccaagagaacttccccaatctagcaaggcaggccaacattcaaattcaggaaatacagagaatgccacaaagatactcctcgagaagagcaactccaagacacataattgtcagattcaccaaagttgaaatgaaggaaaaaatgttaagggcagctagagagaaagaaatacaaactaccatcagagaatactataaacacctctacacaaataaactagaaaatctggaagaaatggataaattcctggacacatacagtctcccaagactaaaccaggaagaagttgaatctctgaagagaccaataacaggctctgaaattggggcaataattaatagcttaccaaccaaaaaaagtccaggaccagatggattcacagccgaattctaccagaggtacaagaaggagctggtaccattccttctgaaactattccaatcaacagaaaaagagagaatcctccctaactcattttatgaggccagcatcatcctgataccaaagcctggcagagacacaacaaaaaaagagaattttagaccaatatccctgatgaacatcaatgcaaaaatcctcaataaaatactggcaaaccaaatccagcagcacatcgaaaagcttatccaccatgatcaagtgggcttcatccctgggatgcaaggctggttcaacatacgcaaatcaataaacgtaatccagcatataaacagaaccaacgagaaaaaccacatgattatctcaatagatgcagaaaaggcctttgacaaaattcaacagcccttcatgctaaaaactctcaataaattaggtattgatgggacgtatctcaaaatagtaagagctatttatgacaaactcacagccaatatcatactgaatgggcaaaaattggaagcattccctttgaaaactggcacaagacagggatgccctctctcaccactcctattcaacatagtgttggaagttctggccagggcaatcaggcaagagaaagaaataaagggtattcaattaggaaaagagcaagtcaaattgtccctgtttgcagatgacatgattgtatatctagaaaaccccatcgtctcagcccaaaatctccttaagctgataagcaacttcagcaaagtctcaggatacaaaatcaatgtgcaaaaatcacaagcattcttatacaccaataacagacaaacagagagccaaatcatgagtgaactcccattcacaattgcttcaaagagaataaaatag

SEQ ID NO: 121185 - DNA, 1569 bp, Homo sapiens; identical to SEQ ID NO: 118362

SEQ ID NO: 121186 - DNA, 1596 bp, Homo sapiens
atgaacattgatgcaaaaatcctcaataaaatactggcaaaacgaatccagcagcacatcaaaaagcttatccaccatgatcaagtgggcttcatctctgggatgcaaggctggttcaatatacgcaaatcaataaatgtaatccagcatataaacagaaccagagacaaaaaccacatgattgtctcaatagatgcagaaaaagcctttgacaaaattcaacaacccttcatgctaaaaactctcaataaattaggtattgatgggacgtatttcaaaataataagagctatctatgacaaacccacagccaatatcatactgaatgggcaaaaactggaagcattccctttgaaaactggcacaagacagggatgccctctctcaccactcctattcaacatagtgttggaagttctggccagggcaattaggcaggagaaggaaataaagggtattcaattaggaaaagaggaagtcaaattgaccatgtttgcagacaacatgattgtatatctagaaaaccccattgtctcagcccaaaatctccttaagctgataagcaacttcagcaaagtctcaggatacaaaatcaatgtacaaaaatcacaagcattcttatacaccaataacagacaaacagagagccaaatcatgagtgaactcccattcacaattgcttcaaagagaatcaaatacctaggaatccaacttacaagggatgtgaaggacctcttcaaggagaactacaaaccactgctcaaggaagtaaaagaggatacaaacaaatggaagaacattccatgctcatgggtaggaagaaacaatatcgtgaaaatggccacactgcccaagttcatatggaacctaaaaagagcccgcatcgccaagtcaatcataagccaaaagaacaaagctggaggcatcatgctacctgacttcaaactatacgacaaggctacagtaaccaaaacagcatggtactggtaccaaaacagagatatagatcaatgtaacagaacagagccctcagaaataatgccgcgtatctacaactatctgatctttgacaaacctgagaaaaacaagcaatggggaaaggattccctatttaataaatggtggtgggaaaactggctagccatatgtagaaagctgaaactggatcccttccttacaccttatacaaaaatcaattcaagatggattaaagacttaaacgttagacctaaaaccataaaaaccctagaagaaaacctaggcattaccattcaggacataggcatgggcaaggacttcatgtctaaaacaccaaaagcaatggcagcaaaagccaaaattgacaaatgggatctaattaaactaaagagcttctgcacagcaaaagaaactaccatcagagtgaacaggcaacctacaaaatgggagaaaattttcgcaacctactcatctgacaaagggctaatatccagaatctacaatgaactcaaacaaatttacaagaaaaaaacaaacaaccccatcaaaaagtgggcgaaggacatgaacagacacttctcaaaagaagacatttatgcagcccaaaaacacatgtaa

SEQ ID NO: 121187 - DNA, 1520 bp, Homo sapiens
atggataaattcctcgacacatacactctcccaagactaaaccaggaagaagtagaatctctgaatagaccaataacaggatctgaaattgtggcaataatcaatagcttaccaaccaaaaagagtccaggaccagatggattcacagccgaattctaccagagggcaataaggcaggagaaggaaataaagggtattcaattaggaaaagaggaagtcaaattgtccctgtttgcagatgacatgattgtatatctagaaaaccccatcgtctcagcccaaaatctccttaagctgataagcaacttcagcaaaatctcaggatacaaaatcaatgtacaaaaatcacaagcattcttatacaccaacaacagacaaacagagagccaaatcatgagtgaactcccattcacaattgcttcaaagagaataaaatacctaggaatccaatttacaagggacgtgaaggacctcttcaaggagaactacaaaccactgctcaaggaaataaaagaggatacaaacaaatggaaggacattccatgctcatgggtaagaagaatcaatatcgtgaaaatggccatactgcccaaggtaatttacagattcaatgccatccccatcaagctaccaatgactttcttcacagaattggaaaaaactactttaaagttcatatggaaccaaaaaagagcccgcatcaccaaatcaatcctaagccaaaagaacaaagctggaggcatcacactacctgacttcaaactatattgcaaggctacagtaaccaaaacagcatggtactggtaccgaaacagagatataggtcaacggaacagaacagagccctcagaaataacgccggatatctacaactatctgatctttgacaaacctgagaaaaacaagcaatggggaaaggattccctatttaataaatggtgctgggaaaattggctagccatatgtagaaagctgaaactggatcccttccttacaccttatacaaaaatcaattcaagatggattaaagacttaaaccttagacctaaaaccataaaaaccctagaagaaaacctaggcattaccattcaggacataggcatgggcaaggacttcatgtctaaaacaccaaaagcaatggcaacaaaagccaaaattgacaaattggatctaattaacctaaagagcttctgcacagcaaaagaaactatcatcagagtaaacaggcaacctacaaaatgggagaaaattttcacaacctactcatctgacaaagggctaatatccagaatctacaatgaactcaaacaaatttacaagaaaaaaacaaacaaccccatcaaaaagtgggcgaaggacatgaacagacacttctcaaaagaagacatttatgcagccaaaaaacacatgaaaaaatgctcatcatcactggccatcagagaaatgcaaatcaaaaccacaatgagataccatctcacaccagttagaatgacgatcattaaaaagtcaggaaacaacag

SEQ ID NO: 121188 - DNA, 2796 bp, Homo sapiens; identical to SEQ ID NO: 120827

SEQ ID NO: 121189 - DNA, 1689 bp, Homo sapiens
atggataaattcctggacacatacaccctcccaagactaaaccaggaagaagttgaatctctgaatagaccaataacaggctctgaaattgtggcaataatcaatagcttaccaaccaaaaagagtccaggaccagatggattcacagccgaattctaccagagccaatatcatactgaatgggcaaaaactggaagcattccctttgaaaaactggcacaagacagttttcaaaggaaaactttgaaacctctatcaccactcctattcaacatagtgttggaagttctggccagggcaattaggcaggagaaggaaataaagggtattcaattaggaaaagaggaaatcaaattgtccctgtttgcagatgacatgattgtatatctagaaaaccccattgtctcagcccaaaacctccttaagctgataagcaacttcagcaaagtctcaggatacaaaatcaatgtacaaaaatcacaagcattcttatacaccaataacagacaaacagagagccaaatcatgagtgaactcccattcacaattgcttcaaagagaataaaatacctaggaatccaacttacaagggatgtgaaggacctcttcaagcagaactacaaaccacggctcaaggaaataaaagaggatacaaacaaatggaagaacattccatgctcatgggtagaaagaatctatatcgtgaaaatggccatactgcccaaggtaatttatagattcagtgccatccccatcaagctaccaatgactttcttcacagaattggaaaaaactactttaaagttcatatggaaccaaaaaagagcccgcatcgccaagtcaatcctaagccaaaagaacaaagctggaggcatcacgctacctgacttcaaactatactataaggatacagtaaccaaaacagcatggtactggtaccaaaacagagatatagatcaatggaacagaacagagccctcagaaataatgccgcatatctacaactatctgatctttgacaaacctgagaaaaacaagcaatggggaaaggattccctatttaataaatggtgctgggaaaactggctagccttatgtagaaagctgaaactgaatcccttccttacaccttacacaaaaattaattcaagatggattaaagacttaaacgttagaccccaaaccataaaaaccctagaagaaaacctaggcattaccattcaggacataggcatgggcaaggacttcaggtctaaaacaccaaaagcaatggcaacaaaagccaaaagtgacaaatgggatctaattaaactaaagagcttctgcacagcaaaagaaactaccatcagaatgaacaggcaacctacaaaatgggagaaaattttcgcaacctactcatctgacaaagggctaatatccagaatctacaatgaactcaaacaaatttacaagaaaaaaacaaacaaccccatcaaaaagtgggcaaaggatattaacagacacttctcaaaagaagacatttatgcagccaaaagacacatgaaaaaatgctcatcatcactggccatcagacaaatgcaaatcaaaaccacaatgagataccatctcacaccagttagaatggcaatcattaaaaagtcaggaaacaacagggacatggatgaaattggaaatcatccttctcagtaa

SEQ ID NO: 121190 - DNA, 3027 bp, Homo sapiens
atgggactggcatgtgattggtatgatgatgatgatgatgataacaatgataataaagaaaacattaacacttactatgtgtcagtacttgcaccacctctcaaaaaattatttaatcttcgtaaccgtcctatgagattgaaactgttactattcccattttcaggtgagaaaaagttagattgctacgatgtttttggaaattttacaatgggttctttgttaagtaacaagtcacagatcttgagaaaacacaatcaccctcccctcaactttttagaatttaatagccaaaagcactctgacatgagggaagcactccatcattatgatgggaagtgtcaggtgcacaagataaatgcaaatttcatggcaccactgcctcattcagccaagttttatgagactgagaaaacttggaaccttatgctgtggggccatttggttggcagggagaagaacagactttatccagcactgtctgttggcagctctggtgctagatttatacaaaagatacacattgcaggagaagttgcctacaaagtcagaacatctggcttcacactagcgcttcttcttggtcacttagtggccttgagcaggggcctgggtataattgtggccaaagtcttgccaaatccaggtaatgaggaatcacaggttctggtgcttaacagggagaaaaaagcagctgcagcctgtgccaccagcactccattgacatcagtaaagaaactccacacctgccggaggcaagaggtgtgcattttgggcctgaagcaaaaccgtacctactggaaactcactggagcctacacagaactgttggttgcaacagtggctgccacaggatatagaaatagaaaagcaagagcaaacacatcaaaagcaagcagaaggcaagaaataacaaaaatcggagcagaactggaggaaatagagacacaaaaaacccttcaaaaaatcaatgaatccaggagctggttttttgaaaagatcaacaaaagtgatagaccactagcaagactaataaagaagaaaagagagaagaatcaaatagacgccataaaaaatgataaaggggatatcaccaccgatcccacagaaatacaaactaccatcagagaatactgtaaacacctctatgcaaataaactagaaaatctagaagaaatgaataaattcctcgacacatacaccctcccaagactaaaccaggaagaagttgaatctctgaatagaccaataacaggctctgaaattgaggcaataatcaatagcttaccaaccaaaaaaagtccaggaccagatggattcacagccgaattctaccagaggtacaaagaggagctgcatataaacagaaccaaagacaaaaaccacatgattatctcaatagatgcagaaaaggcctttgacaaaattcaacaacgcttcatgctaaaaactctcaataaattagtgttggaagttctggccagggcaatcaggcaggagaaggaaataaagggtgttcaattaggaaaagaggaagtcaaattgtccctgtttgcagatgacatgattgtatatctagaaaaccccatcgtctcagcccaaaatctcctcaatctgataagcaacttcagcaaagtctcaggatacaaaatcaatgtacaaaaatcacaagcattcttatacaccaataacagacaaacagagagccaaatcatgagtgaactcccattcacaattgcttcaaagagaataaaatacctaggaatccaacttacaagggatgtgaaggacctcttcaaggagaactacaaaccactgctcaatgaaagaaaagaggatacaaacaaatggaagaacattccatgctcatgggtagaaagaatcaatatcgtgaaaatggccatactgcccaaggtcatttatagattcaatgccatccccatcaagctaccaatgactttcttcacagaattggaaaaaactactttaaagttcatatggaaccaaaaaagagcccgcatcgccaagtcaatcctaagccaaaagaacaaagctggaggcatcacgctacctgacttcaaactatactacaaggctacagtaaccaaaacagcatggtactcgtaccaaaacagagatatagaccaatggaacagaacagagccctcagaaatactgccacgtatctacaactatctgatctttgacaaacctgagaaaaacaagcaatggggaaaggattccctatttaataaatggtgctgggaaaactggctagccatatgtagaaagctgaaactggatcccttccttaaaccttatacaaaaattaagtcaggatggattaaagacttaaatgttagacctaaaaccataaaaaccctagaagaaaacctaggcattaccattcaggacataggcatgggcaaggacttcatgtctaaaacaccaaaagcaatggcaacaaaagcaaaaattgacaaatgggatctaattaaactaaagagcttctgcacagcaaaagaaactaccatcagagtgaaccggcaacctacagaaagggagaaaatttttgcaacctactcatctgacaaagggctaatatccagaatctacaaagaactcaaacaaatttacaagaaaagaacaaacaacctcatcaaaaagtgggtgaaggatatgaacagacacttctcaaaagaagacgtttatgcagccaaaaaacacatgaaaaaatgctcatcatcactggccatcagagaaatgcaaatcaaaaccacaatgagataccatctcacaccagttagaatggcaatcattaaaaagtcaggaaacaacagaataaccattgttctgctccccggttcactaatagtgcggtcatttcacgtaactttaaatgcgattcttcttcatccgggtctcaccctctttagtccgtctgctggccgcagagatatcccaagagtagcattctcctacttggctttttcagctcaaccttctcacaacaccccagttaattaa

SEQ ID NO: 121191 - DNA, 2277 bp, Homo sapiens; identical to SEQ ID NO: 119544

SEQ ID NO: 121192 - DNA, 2350 bp, Homo sapiens
tgcaatcaaactagaactcaggattaagaatctcactcaaaaccgctcaactacatggaaactgaacaacctgctcctgaatgactactgggtacatagcgaaatgaaggcagaaataaagatgttctttgaaaccaacgagaacaaagacacaacataccagaatctctgggacacattcgaagcaaaaagcaagagcaaacaacattcaaaagctagcagaaggcaagaaataactaaaatcagagcagaactgaaggaaatagagatacaaaaaacccttcaaaaaattaatgaatccaggagctggttttttgaaaggatcaacaaaattgatagaccactagcaagactaataaagaaaaaaagagagaagaatctaatagacgcaataaaaactgataaaggggatatcaccaccaatcccacagaaatacaaactaccatcagagaatactacaaacacctctacgcaaataaactagaaaatcgagaagaaatggataaattcctcgacacatacactctcccaagactaaacgaggaagaagtcgaatctctgaatacaccaataacaggctcagaaattgtagcaataatcaatagcttaccaaccaaaaagagtccaggaccagatggattcacagccgaattgtaccagaggtacaaggaggaactggtaccattccttctgaaactattccaatcaatagaaaaagagggaatcctccctaactcattttatgaggccagcatcattctgataccaaagccaggcagagacacaaccaaaaaagagaattttagaccaatatcgttgatgaacattgatgcaaaaatcctcaataaaatactggcaaaaggaatccagcagcacatcaaaaagcttatccaccatgatcaagtgggcttcatccctgggatgcaaggccggttcaatatacgcaaatcaataaatgtaatccagcatataaacagaaccaaagacaaaaaccacatgattatctcaatagatgcagaaaaagcctttgacaaaattcaacaaccctttatgctaaaaactctcaataaattaggtattgatgggacgtatttcaaaataataagagctatctatgacaaacccacagccagtatcatactgaatgggcaaaaactagaagcattccgtttgaaaactggcacaagacagggatgccctctctcaccactcctattcaacatagtgtttgaaattctggcccgggcaattaggcaggagaaggaaataaagggtattcaattaggaaaagaggaagtcaaattgtccctgtttgcaggcgacatgattgtatatctagaaaaccccattgtctcagcccaaaatctccttaagctgataagcaacttcagcaaagtctcaggatacaaaatcaatgtgcaaaaatcacaagcattcttatacaccaataacagacaaacagagagccaaatcatgagtgaactcccattcacaattgcttcaaagagaataaaatacctaggaatccaacttacaagggatgtgaaggacctcttcaaggagaactacaaaccactgctcaaggaaataaaagaggatacaaacaaatggaagaacattccatgctcatgggtaggaagaatcaatatcgtgaaaatggccatactgcccaaggtaatttatagattcaatgccatccccatcaagctaccaatgactttcttcacagaattggaaaaaactactttaaagttcatatggaaccaaaaaagagcccgcatcgccaagtcaatcctaagccaaaagaacaaagctggaggcatcacactacctgacttcaaactatactacaaggctacagtaaccaaaacagcatggtactggtaccaaaacagagatatagatcaatggaacagaacagagccctcagaaataacaccgcatatctacaactatctgatctttgacaaacctgagaaaatgagtataatagatacagggggatggtatgaggcaccagtcagttccttcttcaaggagggactatgccgcacaggtactgagaatcaggttaacagacagcctccagctgccagtcccttcaaggtttacgtcagctgcacggggtcacttcaccctaggccacactacttcttggagcatccatatccaagcttcctttctttctcttcaacaagtgctgccactgcagctgatgacattccaggagcttttaatgaattaaagccacatttgcccaaagaagccagcaaagttactgactggtttgagaatagttatgtgtatggtaggataagaagatactcactcaacgatgttgctgtttga

SEQ ID NO: 121193 - DNA, 2205 bp, Homo sapiens
atgccagccataagcaaactgcttctggtgagccttatggaaagctatggagaaaaaggcattcgccagtccaatagctatgtaccaagtttggaacgtgggcacacttgtgttggcagtggcaccagtggccaaggatcaggctcccattacagcagtggcacaagtgtgcaaggcacagctgctcacagaccagccacagagctagggtcaggagcatgggtatgcatgggtgggccatgcccaggaaaagaggaagtcaaattgtccctgtttgcagatgacatgattgtatatctagaaaaccccattgtctcagcccaaaatctccttaagctgataagcaacttcagcaaagtctcaggatacaaaatcaatgtacaaaaatcacaagcattcttatacaccaataacagacaaacagagagccaaatcatgagtgaactcccattcacaattgcttcaaagagaataaaatacctaggaatccaacttacaagggatgtgaaggacctcttcaaggagaactacaaaccactgctcaaggaaataaaagaggatacaaacaaatggaagaacattccatgctcatgggtaggaagaatcaatatcgtgaaaatggccacactgcccaaggcaatttacagattcaatgccatccccatcaagctaccaatgcctttcttcacagaattggaaaaaactactttaaagttcatatggaaccaaaaaagagcccacatcgccaagtcaatcctaagccaaaagaacaaagctggaggcatcacactacctgacttcaaactatactacaaggctacagtaaccaaaacagcatggtactggtaccaaaacagagatatagatcaatggaacagaacagagccctcagaaataaagccgcatatctacaactatctgatatttgacaaacctgagaaaaacgagcaatggggaaaggattccctatttaataaatggtgctgggaaaactggctagccatatgtagaaagctgaaactggatcccttccttacaccttatacaaaaatcaagtcaagatggattaaagacttaaacgttagacccaaaaccataaaaaccctagaagaaaacctaggcattaccattcaggacataggcatgggcaagggcttcatgtccaaaacaccaaaagcaatggcaacaaaagacaaaattcacaaatgggatctaattaaactaaagagcttctgcacagcaaaagaaactaccatcagagtgaacaggcaacgtacaacatgggagaaaattttcgcaacctacttatctgacaaagggctaatatccagcatctacaatgaactcaaacaaatttacaagaaaaaaacaaacgaccccatcaaaaagtgggcgaaggacatgaacagacacttctcaaaagaagacatttatgcagccaaaaaacacatgagaaaatgctcatcatcactggccatcagagaaatgcaaatcaaaaccacaatgagataccatctcacaccagttagaatggcaatcattaaaaagtcaggaaacaacagccagacagtgaagccacagaacaaagctcattttgccaaaatggaccgccaatgtgtccacggcttgtctccccgtttagaacacagcccccgggggcgctcttccccacggtgcgcagaatgctgcctctactcttgcctgcatgctcagacttcaaacggggctgtgaaaataaatctaatgacagagagccaggaattagggaagagaaggaagctgatcagtaaagaggaagagcacacaccgaagctcctagtgctggtgatgaatccagaccccacgcagaaaccgctgagtgtgcaatgtgcctctgtttcctgctgcataagaagggatgatgatagtactgacttcatggatttgttgggagaatttaaggagatgaaacctgcgaggcacctaggacagcacctgacacttaggtttactccagtaatatgggcgcaccttacaactatggccttcgccattccaggggcctgcatcaggagccacactccagcacccacccccacagtacagacagcattgtctattcgagtgatagctgctcataacgacatctccacctcgctatttgtccaggaaggtgctttcagggaggcaaaagatctctcccatggccacgttaacacagtttag

SEQ ID NO: 121194 - DNA, 2826 bp, Homo sapiens
atgaaggcagaaataaagatgttctttgaaaccaacgagaacaaagacacaacataccagaatctctgggacacattcaaagcagtgtgcagagggaaatttatagcactaaatgcccacaagagaaagcaggaaagatccaaaattgacaccctaacatcacaattaaaagaactagaaaagcaagagcaaacacattcaaaagctagcagaaggcaagaaataactaaaatcagagcagaactgaaggaaatagagacacaaaaaacccttcaaaaaattaatgaatccaggagctggttttttgaaaggatcaacaaaattggtagaccgctagcaagactaataaagaaaaaaacagagaagaatcaaatagacgcaataaaaaatgataaaggggatatcaccaccgatcccacagaaatacaaactaccatcagagaatactacaaacacctctatgcaaataaactagaaaatctagaagaaatagataaattcctggacacatacactctcccaagactaaaccaggaagaagttgaatctctgaatagaccaataacaggagctgaaattgtggcaataatcaatagcttaccaaccaaaaagagtccaggaccagatggattcacagccgaattctaccagaggtacaaggaggaactgcatataaacagagccaaagacaaaaaccacatgattatctcaatagatgcagaaaaggcctttgacaaaattcaacaacccttcatgctaaaaactctcaataaatcaggtattgatgggacatatttcaaaataataagagctatctatgacaaacccacagccaatatcatactgaatgggcaaaacctggaagcattccctttgaaaactggcacaagacagggatgccctctctcaccactcctattcaacatagtgttggaatttctggccaaggcaattaggcaggagaaggaaataaatggtattcaattaggaaaagaggaagtcaaattgtccctgtttgcagatgacatgattgtatatctagaaaaccccatcgtctcagcccaaaatctccttaagctgataagcaacttcagcaaagtctcaggatacaaaatcaatgtacaaaaatcacaagcactcttatacaccaacaacagacaaacagagagccaaatcatgagtgaactcccattcacaattgcttcaaagagaataaaatacctaggaatccaacttacaagggatgtgaaggacctcttcaaggagtactacaaaccactgctcaaggaaataaaagaggatacaaacaaatggaagaacattccatgctcatgggtaggaagaatcaatatcgtaaaaatggccatactgcccaaggtaatttacagattcaatgccatccccatcaaggtaccaatgactttcttcacagaattggaaaaaactactttaaagttcatatggaaccaaaaaagagcccgcatcgccaagtcaatcctaagccaaaagaacaaagctggaggcatcacactacctgacttcaaactatactacaaggctgcagtaaccaaaacagcatggtactggtaccaaaacagagatatagatcaatggaacagaacagagccctcagaaataacgccacatatctacaactatctgatctttgacaaacctgacaaaaacaagaaatggggaaacaattccctatttaataaatggtgctgggaaaactggctagccatatgtagaaagctgaaactagatcccttccttacaccttatactaaaattaattcaagatggattaaagacttacatgttagacctaaaaccataaaaaccctagaagaaaacctaagcaataccattcaggacataggcatgggcaaggacttcatgtctaaaacaccaaaagcaatggcaacaaaagccaaaattgaccaatgggatctaattaaactaaagagcttctgcacagcaaaggaaactaccatcagagtgaacaggcaacctacagaatgggagaaaatttttgcaacccactcatctgacaaagggctactgtccagaatctacaatgaactcaaacaaatttacaagaaaaaaacagacaaccccatcaacaagtgggcgaaggacatgaacagacacttctcaaaagaagacatttatgcagccaaaagacacatgaaaaaatgctcatcatcactggccatcagagaaatgcaaatcaaaaccacaatgagataccatctcacaccagttagaatggcaatcattaaaaagtcaggaaacaacaggtggaatatatcagaggacccaggtttggctctgtcctgtatcaaggaggcctccatcactgtgccaagcttgcgatgtgctgtgtccattatccagggcatattgagcaactgggtacaaaagatcacaggctcagggtctatgagagcctctgttttcagagaagcctgggcgaagctgaccatttcccttggtgccttcaggacccctgaccctgcttcatccatcctgccatccaaacaagaaaatctctttcaaggctggatgcacagcctcaatgaatcatccatggatccacctcaagtgttgatatgcaccagtgctcatgtccttactcctggagggatttgtagacctctgacctcatccttgtctggaagaaaactcccttcctatcccctttctgtgtcctcaaaggcccttccctccctaccagatgcaggtctgatccttatagattacatcaactcagatcccttctccttaggcttccagttgggtttggccaatgggagatactag

SEQ ID NO: 121195 - DNA, 3834 bp, Homo sapiens
atgacaggatcaaattcacacataacaatattaactttaaatataaatggactaaattctgcaattaaaagacacagacgggcaagttggataaagagtcaagacccatcagtgtgctgtattcaggaaacccatctcacgtgcagagacacacataggctcaaaataaaaggatggaggaagatctaccaagcaaatggaaaacaaaaaaaggcaggggttgcaatcctagtctctgataaaacagactttaaaccaacaaagatcaaaagagacaaagaaggccattacataatggtaaagggatcaattcaacaagaggagctaactatcctaaatatttatgcacccaatacaggagcacccagattcataaagcaagtcctgagtgacctacaaagagacttagactcccacacattaataatgggagactttaacaccccactgtcaacattagacagatcaacgagacagaaagtcaacaaggatacccaggaattgaactcagctctgcaccaagcggacctaatagacatctacagaactctccaccccaaatcaacagaatatacattttttttagcaccacaccacacctattccaaaattgaccacatagttggaagtaaagctctcctcagcaaatgtaaaagaacagaaattataacaaactatctctcagaccacagtgcaatcaaactagaactcaggattaagaatctcactcaaagccgctcaactacatggaaactgaacaacctgctcctgaatgactactgggtacataatgaaatgaaggcagaaataaagatgttctttgaaaccaacgagaacaaagacaccacataccagaatctctgggacgcattcaaagcagtgtgtagagggaaatttatagcactaaatgcctacaagagaaagcaggaaagatccaaaattgacaccctaacatcacaattaaaagaactagaaaagcaagagcaaacacattcaaaagctagcagaaggcaagaaataactaaaatcagagcagaactgaaggaaatagagacacaaaaaacccttcaaaaaatcaatgaatccaggagctggtttttttgaaaggatcaacaaaattgatagaccgctagcaagactaacaaagagaaaaagagagaagaatcaaatacacgcaataaaaaatgataaaggggatatcaccaccgatcccacagaaatacaaactaccatcagagaatactacaaacacctctatgcaaataaactagaaaatctagaagaaatggataaattcctcgacacatacactctcccaagactaaaccaggaagaaattgaatctctgaatagaccaataacaggagctgaaattgtggcaataatcaatagcttaccaaccaaaaagagtccaggaccagatggattcacagctgaattctaccagaggtacaaggaggaactggtaccattccttctgaaactattccaatcaatagaaaaagagggaatcctccctaactcattttatgaggccagcatcaacctgataccaaagccgggcagagacacaaccaaaaaagagaattttagaccaatatccttgatgaacattgatgcaaaaatcctcagtaaaatactggcaaaccgaatccagcagcacatcaaaaagcttatccaccatgatcaagtgggcttcatccctgggatgcaaggctggttcaatatatgcaaatcaataaatgtaatccagcatataaacagaaccaaagacaaaaaccacatgattatctcaatagatgcagaaaaggcctttgacaacattcaacaacccttcatgctaaaaactctcaataaattaagtattgatgggacgtatctcaaaataataagagctatctatgacaagcccacagccaatatcatactaaatgggcaaaaactggaagcattccctttgaaaactggcacaagacagggatgccctctctcaccactgctattcaacatagtgttggaagttctgaccagggcaattaggcaggagaaggaaataaagggtattcaattaggaaaggaggaagtcaaattgtccctgtttgcagacgacatgattgtatatctagaaaacccgattgtctcagcccaaaatctccttaagttgataagcaacttcagcaaagtctcaggatacaaaatcaatgtacaaaaatcacaagcattcttatacaccaataacagacaaacagagagccaaatcatgagtgaactcccattcacaattgcttcaaagagaataaaatacctaggaatccaacttacaagggacgtgaaggacttcttcaaggagaactacaaaccactgctcaatgaaataaaagaggatacaaacaaatggaagaacattccatgctcatgggtaggaagaatcaatatcatgaaaatggccatactgcccaaggtaatttatagattcaatgccatccccatcaagctaccaatgactttcttcacagagttggaaaaaaactactttaaagttcatacggaaccaaaaaagagcctgcattgccaagtcaatcctaagccaaaagaacaaagctggaggcatcgtggctacctgacttcaaactatactacaaggctacagtaaccaaagcagcatggtactggtaccaaaacagagataatagatcaatggaacagaacagagccctcagaaataacgccgcatatctacaactatctgatatttgataaaccagagaaaaacaagcaatggggaataggattccctatttaataaatggtgctgggaaaactggctagccatatgtagaaagctgaaactggagcccttccttacaccttatacaaaaattaattcaagatggattaaagacttaaatgttagacctaaaaccataaaaaccctagaagaaaacctaggcattaccattcaggacataggcataggcaaggacttcatgtctaaaacaccaaaagctatggcaacaaaagacaaaattgacaaatgggatctaattaaactaaagagcttctgcacagcaaaagaaactaccatcagagtgaacaggcaacctacagaatgggagaaaatttttgcaacctactcatctgacaaagggctaatagccagaatctataatgaactcaaacacatttacaagaaaaaaaacaaacaaccccatcaaaaagtgggcgaaggacatgaacagacatttctcaaaagaagacatttatgcagccaaaagacacatgaaaaaatgctcaccatcactggccatcagagaaatgcaaatcaaaaccaaaatgagataccatctcacaccagttagaatggtgatcattaaaaagtcaggaaacaacaggtgctggagaggatgtggagaaataggaacacttttacactgttggtgggactgtaaactagttcaaccattgtggaagtcagtgtggcgattcctcagggatctagaactagaaataccatttgacccagccatcccattactgggtatatacccaaaggactataaatcatgctgctataaagacacatgcacacgtatgtttattgcggcactattcacaatagcaaagacttggaaccaacccaaatgtccaacaatgatagactggattaagaaaatgtggcacatatacaccatggaatactatgcagccataaaaaatgatgagttcatgtcctttgtagggacatggatgaaattggaaaccatcattctcagtaaactatcgcaagaacaaaaaaccaaacaccgcatattctcactcataggtgggaattga

SEQ ID NO: 121196 - DNA, 330 bp, Homo sapiens
atgctgaagtttggtattagcgccttaacggatgtcgagctcgtggcgctatttctgcgtaccggaacgcgcggtaaagatgtattaacactggcaaaagagatgctggagaatttcggctctctttatggcttgttaacctctgaatatgaacaatttagtggcgttcatggaattggcgtggcgaaatttgcccagttaaaggggattgctgaactggcgcggcgttactacaacgtgcggatgcgtgaagaaagccctgtactcagcccggagatgacgagggaatttttacaaagccagctcaaaatgctgggactacaggtgtga

SEQ ID NO: 121197 - DNA, 446 bp, Homo sapiens
atgataccatttgccgacagcggcggctggatatatggcccacggctgaacgacgacatcggcagatcaaagaacggtgctaacggacgcagaatcgactccagcgggacgaggctcgccaaacggcactggaaactagaaagctcccaagaggcgaatctggaagtcatagaatcagaggacataattcaatctgcgggcaaaggtcgtcaggcgggaagtttcctagtgcaacgtgatttcctgttcttgctcatctatgagtttatttgcaacttcaggctggtcaacaagggtgaagcaatcggtgttatcgcggcacagtccatcggtgaaccgggtacacagctgaccatgcgtacgttccacatcggtggtgcggcatctcgtgcgggtgctgaatccagcatccaaccagaaataagatggaaaccaaaaaccaaagg

SEQ ID NO: 121198 - DNA, 1485 bp, Homo sapiens
ttcctctataaattcaggttcagtttgcgggtagaaataacggtactgataatgaatctgtgcgcgggcttcttccgggctgttaaattcccctacgccataccaaccgaacagcgcagcttctgcgacggtcgtttcggcgtcgtcgagaacttttaccggaatatcaagcatattggctttaatctgattccacaatgtgttgcgacttcctccaccgactaacaataattcagaggccttaaagtgcccgattttttccagcatctgtagattgcgctgtaattgcgcagttaacccttccagcgccgcgcgatagaaatgcccccgcgtggtattaagcgtcactccttgccagccagcgttctgacacgacaataaatcacactgcatttttacgccatccgcgccaggcgcgatcagacgagcttcttcaatcaacatttgccagggtgtttcagccgtccagaacagttttctcacccattccagcacgccggatgccagccattgcatacctgcagagcatgcaaggttgacccaatcaccgcgaacttccgtgaaggtctgaacgtactccagtacttcatctccacccacggtgctcgtaaaggtctggcggataccgcactgaaaactgcgaactccggttacctgactcgtcgtctggttgacgtggcgcaggacctggtggttaccgaagacgattgtggtacccatgaaggtatcatgatgactccggttatcgagggtggtgacgttaaagagccgctgcgcgatcgcgtactgggtcgtgtttttgctgaagacgttctgaagccgggtactgctgatatcctcgttccgcgcaacacgctgctgcacgaacagtggtgtgacctgctggaagagaactctgtcgacgcggttaaagtacgttctgttgtatcttgtgacaccgactttggtgtatgtgcgcactgctacggtcgtgacctggcgcgtggccacatcatcaacaagggtgaagcaatcggtgttatcgcggcacagtccatcggtgaaccgggtacacagctgaccatgcgtacgttccacatcggtggtgcggcatctcgtgcggctgctgaatccagcatccaagtgaaaaacaaaggtagcatcaagctcagcaacgtgaagtcggttgtgaactccagcggtaaactggttatcacttcccgtaatactgaactgaaactgatcgacgaattcggtcgtactaaagaaagctacaaagtaccttacggtgcggtactggcgaaaggcgatggcgaacaggttgctggcggcgaaaccgttgcaaactgggacccgcacaccatgccggttatcaccgaagtaagcggttttgtacgctttactgacatgatcgacggccagaccattacgcgtcagaccgacgaactgaccggtctgtcttcgctggtggttctggattccgcagaacgtaccgcaggtggtaaa

SEQ ID NO: 121199 - DNA, 381 bp, Homo sapiens
atgggggggagggataaatctgtgaaggtcgaagaataccgtcgagatagtggcaaccgcgataccgcaccgcgaccgctggggcttcaggatcggctgggctggccaaaacgtctctggtgcctgatgaattatccgggcacgcgttacactaaacagatgatggcgacggtctgttacccggcactggaagaagtggcgcaggagttgcggttgcgcggctcgtacgtggagctaaaaagcctgacagccggagagggacagcagctgggttatctggatcaggtactggcggctattcatgatcgtgacgtcaacatgggtgtaaccggccatgggctgggtgcaagccactgggccttcgatacagtggtacagtga

SEQ ID NO: 121200 - DNA, 363 bp, Homo sapiens
tcacaggtattttattcgcgataagctcatggagcggcgtaaccgtcgcacaggaaggacagagaaagcgcggatctgggaagtgacggacagaacggtcaggacctggattggggaggcggttgccgccgctgctgctgacagtgtgacgttatctgttccggtcacaccacatacgttccgccattcacaaggaataagtacatggttttgctgaaagtcatagggcctacataacttgtacttatatcttttccctgtaactcgcctgggtttagcactgaaagctctgactgcaccgaaatccctttgtcctgtgtaaattatgatgactggccaccttatcttataaatttctcccat

SEQ ID NO: 121201 - DNA, 486 bp, Homo sapiens
atgtgtgaagaatacaatgtgtatactctgatcagaagtacagaagccatctcatgggcacatgtctggtttggtggtctggtaggaaatgttccagtaaagatacttgtcagcctggattatggaacaaagacaacacagaacaaagccagtttcgtggcgtttggtgaagcggaatactggttctcactgatcaaagtcacgacagttattgtctttatcatcgttggcgtgctgatgattatcggtatcttcaaaggcgcgcagcctgcgggctggagcaactggacaatcggcgaagcgccgtttgctggtggttttgcggcgatgatcggcgtagctatgattgtcggcttctctttccagggaaccgagctgatcgggcagcagtgcatgccgcagttgactcttagaggatccccggctgtcttctattatctatgtcatcagctaggcacctttagcagtttcaagtttcttttgtaa

SEQ ID NO: 121202 - DNA, 1263 bp, Homo sapiens
atggtcgcagtggtacaggcgaatttttcgcgccggtgtgtataccgggtccatctggctttgcatctgcgccaccgccaggccggacgatgccagccagcggcgggtttcctcactcacccggtcagccaggatttcactttccagccggtcgagcatctgcaccagcaccggcgggaacaccacactgccaccgtcttcgccaccggactgctgaagggtatccgccaggctgcggcgctgcgttttcgccagctcaccggtggcggtttcaaccctgatgagtggcgtgaagctccccggctgataaatcgcctggatgcgggttctgtcgttctgtatcggggacaggcgggcgccgtcccagcccgacatccagcccgtgaggtcccgttcacgccgtcatacccgttttgccaccctgcggaccaacgggtcgtaaagatagcgactttcgaccagcggctctgcatattgggtccgcgtgtagtgcaccaaacggtgctgactgtcgtaatggtacccgtgggtgcgctcatcatccgtgcggataaccccttccgggatgagggtataaacggggttaggtcatataggccgagattgcccttttttcccgacgaattcgagctcggtacccgtcagacggtgcattatccgcagacgaatgaactgctctggcagcatgagaccagacatgcgtacaacgcacagggactggcgaaccgctgtataccggacagcctgcccgccgtggaatggctgacctacggcagcggctggctggcaggcatgaaactcgccgacacaccggtggtggagtacacccgcgaccgcctgtaccgggaaacgctgcgcagcttcggccgctatgaactcaccaccgcttatacccctgccgggcagatacagagccagcacctgaacagtctgctgtctgaccgcgagtacacctggaacgacaacggcgaactcatccgcatcagccgcccgcgccagacccggagttacaggtacagtaccaccggcaggctgaccggcgttcacaccaccgcagggaatatggatatccggatcccgaataccacagacccggcaggtaaccgtctgctcgacccggagctgcacccggacagcgccctcagcatagggccggataaccatatcggccgtgacgcgcactatctttaccggtatgaccgtcacggcaggctgacaaagaaaaccgacctcatcccggaaggggttatcccgcacggatga

SEQ ID NO: 121203 - DNA, 894 bp, Homo sapiens
cgacatccagcccgtgaggtcccgttcacgccgtcatacccgttttgccaccctgcggaccaacgggtcgtaaagatagcgactttcgaccagcggctctgcatattgggtccgcgtgtagtgcaccaaacggtgctgactgtcgtaatggtacccgtgggtgcgctcatcatccgtgcggataaccccttccgggatgagggtataaacggggttaggtcatataggccgagattgcccttttttcccgacgaattcgagctcggtacccgtcagacggtgcattatccgcagacgaatgaactgctctggcagcatgagaccagacatgcgtacaacgcacagggactggcgaaccgctgtataccggacagcctgcccgccgtggaatggctgacctacggcagcggctggctggcaggcatgaaactcgccgacacaccggtggtggagtacacccgcgaccgcctgtaccgggaaacgctgcgcagcttcggccgctatgaactcaccaccgcttatacccctgccgggcagatacagagccagcacctgaacagtctgctgtctgaccgcgagtacacctggaacgacaacggcgaactcatccgcatcagccgcccgcgccagacccggagttacaggtacagtaccaccggcaggctgaccggcgttcacaccaccgcagggaatatggatatccggatcccgaataccacagacccggcaggtaaccgtctgctcgacccggagctgcacccggacagcgccctcagcatagggccggataaccatatcggccgtgacgcgcactatctttaccggtatgaccgtcacggcaggctgacaaagaaaaccgacctcatcccggaaggggttatcccgcacggatga

SEQ ID NO: 121204 - DNA, 529 bp, Homo sapiens
  misc_feature (1)...(529): n = a,t,c or g
gtagagacagggtctccttgtgtcgcccaggctggtccaaaagggggaaataagaactcctggactcaagcgatcctcccgccttgacctccaaaagtgctgagattacaggcatgagccatcgagcctggcctccgaagccccttctgtatgggtattactccctccatggaggcagagccntcatgactcagtcacttcccaaaaggtcctgcctcttaatatcaccacaattaggattaagtttctgcatgaattttggagggaacacacatttaaaccacagcaccctccttcagcatcttctccattcaacagcacatacttttttaaaaacacgaatcaactgatgtcatgcttctgctcaaaaaactaaaatggcttcgtagcttcctggctgtctgtcacattcggaatataaaccagaacgttcatgactgcttacagcgtcctgcatgagcagactcctagctgtcttcaacatcatttctcctgccactctgcccccgcttcactccacgccggccct

SEQ ID NO: 121205 - DNA, 1917 bp, Homo sapiens
atgacgaggcgggtcgcagggtggcagggacctacagggccccaaggccagcccgggggacagaggactcccttgccaggtccttgttcattcatcccccccctttgtatgttacagagccagcacctgaacagcctgctgtctgaccgcgattacacctggaacgacaacggcgaactcatccgcatcagcagcccgcgccagacccggagttacagctacagcaccaccggcaggctgaccggcgttcacaccaccgcagcgaatctggatatccgcatcccgtatgccacagacccggcaggtaaccgcctgcccgacccggagctgcacccggacagcaccctcagcatgtggccggataaccgtatcgcccgtgacgcgcactatctttaccggtatgaccgtcacggcaggctgacagagaaaaccgacctcatcccggaaggggttatccgcacggatgatgagcggactcaccgggtggcaaaacgggtgtggcggcgtgaacgggacctgacgggctggatgtcgctgtcacggaaaccgcaagtgacctggtacggctgggacggcgaccggctgaccacaatacagaacgacagaacccgcatccagacgatttatcagccggggagcttcacgccactcatcagagttgaaaccgccaccgtgactggcgaaaacggggatcccatacggcacatcagatctcacactggacacaaaccatatgagtgtcaagattatggagaaaagccgtatagatgtaaggaatgtgggaaggccttcagttatttccagtcatttaaaaaacatgaaagaaatcacagtgaagagaaaccctataaatgtaaacaatgtgggaaacccttcagttatcgtcaatctgttcttagacatgaaaggactcacactggagaaaagccctatgaatgtaaaaaatgtggaaaaaccttcagtactcttacaggtttccaaatacatgaaagaactcacactagagagaaaccctatgaatgtaaggaatgtggaaaagcctttatttaccttgcaagctttcaaagacacatgataatgcacagtggagatggaccttataaatgcgaggagtgtggaaaagcattcagttgtcctagttcatttcaagtacctgaacgaattcacactagagaaaaaccatatgaatgtaaacaatgtgtacatgaaagaactcacactggagagaaaccctgtgaatgtaacgaatgtgggaaagccttcagtgtttccggttcccttcgagtacatgaaagaattcacactggagagaaaccctatacatgtaaacagtgtgggaaagcgttttgtcatcttggaagctttcaaagacacatgataatgcacagtggagatggacctcataaatgtaagatatgtgggaaaggctttgattttcctggttcagcacgaattcatgaaggaactcacactctagagaaaccctatgaatgtaagcaatgtgggaaattgttatctcatcgctcaagctttcgaagacacatgatggcacacactggagatggccctcataaatgcacagtatgtgggaaagcctttgattctcctagtgtatttcaaagacatgaaaggactcacactggagagaaaccctatgaatgcaagcaatgtgggaaagccttccgtacttccagttcccttcgaaaacatgaaacaacacacactggagagcaaccctataaatgtaaatgtggaaaagcttttagtgatttattttcctttcaaagtcatgaaacaacacacagtgaagaggagccttatgaatgtgcctatgcctattggtcaatggaattagaagacatgattagtacagatgacgcctatgtcagagcatttcccttttgttgttgggactga

SEQ ID NO: 121206 - DNA, 2200 bp, Homo sapiens
atgaaactgactactcatcgggaaaacatggcgctgacgaatggtttctgccatcacatagcggcgcagcaaaatctctacaccaatacattgctggctgcgcgcattaagcaaaggctgacagaacaattcgaactcatgttgcgccaggcccagattgatttcgcgggaaaagctcattcgctcactgaagcgcaggccaacaccacccaggtttcagcggagcgcgaccgtctgtttaaaaattatcaacgttacttgaaaggcagccaggcggcggtgaatccgttctcggaacgtgacatcgacgatgcgcggcaaaatttcctcgcgcaggatgcgctggcgcagatccagagccagctggatagcctggttaacggcgagcaatcgcagattgtgagcctgaaagcacagctcgcggaagcaaaatataaccttgagcagacgatagtgcgtgcgccgagcaatggttatgtgacccaggtactgattcgtccgggtacctatgccgcgtcgctgccgctacgtccggtgatggtgtttatacccgatcagaaacgacaaatcgtggcgcagttccgtcagaactccttgctgcgactggctcctggcgacgatgcggaagtggtgtttaatgctctgccaggtaaggtattcagcggtaagctggcagccattagtccagccgttcccggcggagcttatcagtcgaccggcaccttacagacgttaaacacagcgccgggttcagatggcgttatcgcgaccattgaactggatgagcacactgatttgagcgctttaccagacggtatttacgcccagaacccaaaaaatctgaaaattgttgaactgaaagccccgcaactgccgcgttctctggacgacgcgcaaatcgctctggcagttatcaataccacctatgccagccagattggcctgactccggcgaaagacggtatctttgttgaagataaagagtccccgtacgtaaacctgatcgtgacgcgtgaagataacaaagacgccgagaacgtgaagaaattcgtccaggcttatcagtctgacgaaatcccctgtcgaacccgttcaaagcactgcaccccagccgaaagcggagcctgcaaaaccgaaagcgccgcgcgccacgccggtccgaatttataccaatgcagaagaattagatcggcaaaccgttccgcgatctcggtgaagggctggcgaaccccctgtataccggacagcctgcccgccgtggaatggctgacctacggcagcggttacctggcaggcatgaaactcggcgacacaccgctggtggagtacacccgcgaccgcctgcaccgggaaacgctgcgcagcttcggccgttatgaactcaccaccgcttatacccctgccgggcagttacagagccagcacctgaacagcctgctgtctgaccgcgattacacctggaacgacaacggcgaactcatccgcatcagcagcccgcgccagacccggagttacagctacagcaccaccggcaggctgaccggcgttcacaccaccgcagcgaatctggatatccgcatcccgtatgccacagacccggcaggtaaccgcctgcccgacccggagctgcacccggacagcaccctcagcatgtggccggataaccgtatcgcccgtgacgacaactatctttaccggtatgaccgtcacggcaggctgacagagaaaaccgacctcatcccggaaggggttatccgcacggatgatgagcggactcaccggtaccattacgacagtcagcaccggctggtgcactacacgcggacacaatatgaagagccgctggtcgaaagtcgctatctttacgacccgctggggccgcagggtggcaaaacgggtgtggcgacgtgaacgggacctgacgggctggatgtcgctgtcacggaaaccgcaagtgacctggtacggctgggacggcgaccgcctgaccacgatacagaacgacagaacccgcatccagacgatttatcagccggggagcttcacgccactcatcagggttgaaaccgccaccggtgagctggcgaaaacgcagcgccgcagcctggcggatacccttcagcagtccagacggcgaagacggtggcagtgtggtgttcccgccggtgctggtgcagatgctcgaccggctggaaagtga

SEQ ID NO: 121207 - DNA, 1575 bp, Homo sapiens
atggtttataccaacggtagcccagtgaataccggctttactgagaacgccgatctgtttggctggtttggtattggtcgtccgctgggcgaaccgacgccagtctggatcatggggattgtcttcctcgcggcctggtacatgctgcatcacacgcgtctggggcgttacatctacgcgctgggcggcaacgaagcggcaacgcgtctttctggtatcaacgtcaataaaatcaaaatcatcgtctattctctgtgtggtctgctggcatcgctggccgggatcattgaaatggcgcgtctctcctccgcacaacccacggcggggactggctatgagctggaaaaatggcttcgtagcttcctggctgtctgtcacattcggaatataaaccagaacgttcatgactgcttacagcatctcgccgttcagtatcgcgatatcccgctgctgtctcgtacccacggtcagccagccacgccgtcaaccatcggtaaagagatggcaaacgtcgcctaccgtatggagcgccagtaccgccagcttaaccaggtggagatcctcggcaaaatcaacggcgcgttgactggcatcagtttcagcgaagagttcgtcacctcgctgggtattcagtggaacccgtacaccacccagatcgaaccgcacgactacattgccgaactgtttgattgcgtagcgcgcttcaacactattctgatcgactttgaccgtgacgtctggggttatatcgcccttaaccacttcaaacagaaaaccattgctggtgagattgggttcttccaccatgccgcataaagttaacccgatcgacttcgaaaactccgaagggaatctgggcctttccaacgcggtattgcagcatctggcaagcaaactgccggtttccgtggttcatcagaaccgctgtataccggacagcctgcccgccgtggaatggctgacctacggcagcggctggctgtcaggcatgaaactcggcgacacaccgctggtggagtacacccgcgaccgcctgcaccgggaaacgctgcgcagcttcggccgttatgaactcaccaccgcttatacccctgccgggcagttacagagccagcacctgaacagcctgctgtctgaccgcgattacacctggaacgacaacggcgaactcatccgcatcagcagcccgcgccagacccggagttacagctacagcaccaccggcaggctgaccggcgttcacaccaccgcagcgaatctggatatccgcatcccgtataccacagacccggcaggctccaaaaaggcgggtaaacgcctgggtcgtggtatcggttctggcctcggtaaaaccggtggtcgtggtcacaaaggtcagaagtctcgttctggcggtggcgtacgtcgcggtttcgagggtggtcagatgcctctgtaccgtcgtctgccgaaattcggcttcacttctcgtaaagcagcgattacagccgaaattcgtctgtctgacctggctagagtagaaggcggtgtagtagacctgaacccgctgaaagcggctaacattatcggtatcca

SEQ ID NO: 121208 - DNA, 239 bp, Homo sapiens
atggaattcggtgagatgttgaaagcaccgaataaagtgctgcatcccttgataaccgccactcaggaaggtaactacaacgggacggaaggtatctccgccctgccgttcaacgggattattctcgcacactcgaacgagtccgaatgggtcactttccgtaataacaaaaacaacgaagccttcctcgatcgtgtttacatcgtgaaggtgccgtattgcttgcgcatttccgaaga

SEQ ID NO: 121209 - DNA, 735 bp, Homo sapiens
tttaatgatgacagcccggaagcgaggaaaataacccgccgctggagaataggtgaagcagcggatttagttggggtttcttctcaggctatcagagatgccgagaaagcagggcgatctaccgccacccggatattggaaattcgaggacgggttgagcaacgtgttggttatacaattgaacaaattaatcatatgcgtgatgtgtttggtacgcgattgcgacgtgctgaagacgtatttccaccggtgatcggggttgctgcccataaggagttaaataatgattacacatcgaaaaaagtaatgaagccgctgatcacttcaaacacggtaactgatgaaatcgagcgcgcgaatgttctcaaaatgaacggcaaatggtacttgttcactgattcacgcggttcaaaaatgacgatcgatggtattaactcaaacgatatttacatgcttggttatgtatcaaactctttaaccggcccttacaagccgctgaacaaaacagggcttgtgctgcaaatggctcttgatccaaacgatgtgacattcacttactctcacttcgcagtgccgcagaccaaaggcaacaatgtggttatcacaagctacatgacaaacagaggcttcttcgaggataaaaaggcaacatttgcgccaagcttcttaatgaacatcaaaggcaataaaacatccgttgtcaaaaacagcatcctggagcaaggacagctgaca

SEQ ID NO: 121210 - DNA, 4371 bp, Homo sapiens
atgaaactcatggaaacacttaaccagtgcataaacgctggtcatgaaatgacgaaggctatcgccattgcacagtttaatgatgacagcccggaagcgaggaaaataacccggcgctggagaataggtgaagcagcggatttagttggggtttcttctcaggctatcagagatgccgagaaagcagggcgactaccgcacccggatatggaaattcgaggacgggttgagcaacgtgttggttatacaattgaacaaattaatcatatgcgtgatgtgtttggtacgcgattgcgacgtgctgaagacgtatttccaccggtgatcggggttgctgcccataaaggtggcgtttacaaaacctcagtttctgttcatcttgctcaggatctggctctgaaggggctacgtgttttgctcgtggaaggtaacgacccccagggaacagcctcaatgtatcacggatgggtaccagatcttcatattcatgcagaagacactctcctgcctttctatcttggggaaaaggacgatgtcacttatgcaataaagcccacttgctggccggggcttgacattattccttcctgtctggctctgcaccgtattgaaactgagttaatgggcaaatttgatgaaggtaaactgcccaccgatccacacctgatgctccgactggccattgaaactgttgctcatgactatgatgtcatagttattgacagcgcgcctaacctgggtatcggcacgattaatgtcgtatgtgctgctgatgtgctgattgttcccacgcctgctgagttgtttgactacacctccgcactgcagtttttcgatatgcttcgtgatctgctcaagaacgttgatcttaaagggttcgagcctgatgatttagccatattgttccatgtgactgcagttcatatgttttcactggaaggtattgaaaaccttccctttgaattacagagaaactttcagctcatgagggacctagaccaaagaacagagggtgttaaacgggctaccaggaaaaatgaaaattttggatgttccccggcgtcgagcttctcccatcttagagaacgtagggatccgggttttagtcacgacccaggagatcagcgtcaagaagcgcaaaatttagcgaaagccgttcagacagcattgcagcacagcattcgagaaataggtctgcgtttgatgcgatcgaaaaatgatgggatgagtcagaaggatatcgcagccaaagaagggctgtctcaggcgaaggtcacgcgtgctctccaggcagcgagtgctccggaagaattagtcgcccttttccctgtgcagtcggaattaaccttttcggactacaaaacgctttgtgctgttggcgacgaaatggggaacaagaatttagagtttgatcagcttattcaaaacatatccccggaaataaacgacatcttatccattgaagaaatggccgaagatgaagttaaaaataaaatcctgcgcttgataacaaaggaagcctcactactcacggataaaggttctaaagataagtccgtagttactgaattatggaaatttgaggacaaggatcgctttgcaaggaagcgcgtgaaaggccgtgcattttcttatgagtttaatcgactctcaaaagagaagagtaaattgagtaacttacgcgaataccagaatcgtattgcaggtatcgcaaaacgctctaaagctgtgcttggctgggcaagcactgcgcagttcggtactgataaccaattcattaaagatgatgccgcgcgtgccgcatctatccttgaagctgcacgtaaagacccggtttttgcgggtatctctgataatgccaccgctcaaatcgctacagcgtgggcaagtgcactggctgactacgccgcagcacataaatctatgccgcgtccggaaattctggcctcctgccaccagacgctggaaaactgcctgatagagtccacccgcaatagcatggatgccactaataaagcgatgctggaatctgtcgcagcagagatgatgagcgtttctgacggtgttatgcgtctgcctttattcctcgcgatgatcctgcctgttcagttgggggcagctaccgctgatgcgtgtaccttcattccggttacgcgtgaccagtccgacatctatgaagtctttaacgtggcaggttcatcttttggttcttatgctgctggtgatgttctggacatgcaatccgtcggtgtgtacagccagttacgtcgccgctatgtgctggtggcaagctccgatggcaccagcaaaaccgcaaccttcaagatggaagacttcgaaggccagaatgtaccaatccgaaaaggtcgcactaacatctacgttaaccgtattaagtctgttgttgataacggttccggcagcctacttcactcgtttactaatgctgctggtgagcaaatcactgttacctgctctctgaactacaacattggtcagattgccctgtcgttctccaaagcgccggataaaggcactgagatcgcaattgagacggaaatcaatattgaagccgctcctgagctgatcccgctgatcaaccacgaaatgaagaaatacaccctgttcccaagtcagttcgttatcgcggctgagcacacgttccgcaccctgaaggaatacctgtctcatgaacaggatatgctgcgtcttcgcatcatgatctggcgcactcttgcgaccgacacctttgacatcgctctgccggttaaccagtcctttgatgtatgggcaaccatcattcgtggcaaattccagactgtatatcgcgacattattgagcgcgttaaatcttctggtgcgatggggatgtttgctggtgctgatgcagcatctttctttcaacagttgccgaagatttcttccagccagccgaagactatatccagactccatctgctcttcttgcctaattttcttaagctgaccgatactttcctggaaacgattgaggaaaatggtgtggtcctgggtattcatgacactgcccacaagggctcactggcctggctggcatttctactagcgtgtttcttgggggaagggtcctcctttgctaaaacagcgcgttatgaaactgtaggcaaagggttactattactgctcgtgactgccggagaagtcagaattgtaagtgagcacaccttctctgcagcagctacaagctcccacctgatgtgtcttttcaacctttgtcaagtatctcaaggcaagaatgtcctgaagcccttcccccaaatagaagctttggtccgagcccccaacccgcaggagcatcaagaggaggccaaggagacagacaccgcagactctctctgcaaacttgacctgggcatcgcacggactcgcgttcgcatccgaagaccccacacgtcccccgcactgtccccacagcatcccacgcccgcggtgcacgctcacctgccggtagacgagccacacgcctcggcggtccagacttccgtgtcgacctccgtgggcgagcctacgcgctgggtgcccggcgcgccctcaggagtggctgggaccgcgggctggcgccgggcagggcggttgaaggccgtggcgacggaactgttgcccatgaatggctcgctgtggagcacgcaggctcgtatctctcccgcgttcctgctgaaggtaaaccagacattaatggactatcgaaccggaagagtacaacctgctattccgcagagtctccctgaagctctccgtttggctgccgacctggcagagcaaaagcaacggctggagcaaaaaatgcttatggatgcacctaaagtcgaattcgctgaacgcgttgctaccgccagcggggttctaatcggcaactatgccaaagtgctcggcctgggccaaaactatctcttcacctggttgcgtgataacggaattctgatcgcaaccggtgaacgcaggaacgtccccaaacaggattccatatctcacgccgggcatatcctgtcgcaatgtgcaaatctcgcggcaacaaccagtgaatacttcattcacaagcctcaccgcctgatcgcggcagaaactggttatagccaatcaaccgtcgttcgtgcattccgtgaagctgtaaacaaaggaattctgtctgtagagattgttatcggcgatcaccgtgaacgtcgcgctaacctgtaccggtttacaccatcctttttggccttcgcacaacaagccaaaaatgcgctgatagaaagcaaattaaagatctcttcagcggcaaccaagagcaaagtgaccgcctgggaagccagagctagagggcactactatcacaaaggggactcaagataa

SEQ ID NO: 121211 - DNA, 1455 bp, Homo sapiens
atgacactcatggaaacacttaaccagtgcataaacgctggtcatgaaatgacgaaggctatcgccattgcacagtttaatgatgacagcccggaagcgaggaaaataacccggcgctggagaataggtgaagcagcggatttagttggggtttcttctcaggctatcagagatgccgagaaagcagggcgactaccgcacccggatatggaaattcgaggacgggttgagcaacgtgttggttatacaattgaacaaattaatcatatgcgtgatgtgtttggtacgcgattgcgacgtgctgaagacgtatttccaccggatctggctctgaaggggctacgtgttttgctcgtggaaggtaacgacccccagggaacagcctcaatgtatcacggatgggtaccagatcttcatattcatgcagaagacactctcctgcctttctatcttggggaaaaggacgatgtcacttatgcaataaagcccacttgctggccggggcttgacattattccttcctgtctggctctgcaccgtattgaaactgagttaatgggcaaatttgatgaaggtaaactgcccaccgatccacacctgatgctccgactggccattgaaactgttgctcatgactatgatgtcatagttattgacagcgcgcctaacctgggtatcggcacgattaatgtcgtatgtgctgctgatgtgctgattgttcccacgcctgctgagttgtttgactacacctccgcactgcagtttttcgatatgcttcgtgatctgctcaagaacgttgatcttaaagggcaattatacatccggcgacaaccatacgctgagagacctcactacgttgaagacaaaggccataaataccttgtattcgaagccaacacgggaacagaaaacggataccaaggcgaagaatctttatttaacaaagcgtactacggcggcggcacgaacttcttccgtaaagaaagccagaagcttcagcagagcgctaaaaaacgcgatgctgagttagcgaacggcgccctcggtatcatagagttaaataatgattacacattgaaaaaagtaatgaagccgctgatcacttcaaacacggtaactgatgaaatcgagcgcgcgaatgttttcaaaatgaacggcaaatggtacttgttcactgattcacgcggttcaaaaatgacgatcgatggtattaactcaaacgatatttacatgcttggttatgtatcaaactctttaaccggcccttacaagccgctgaacaaaacagggcttgtgctgcaaatggtcttgatcccaaacgatgtgacattcacttactctccacttcgcagtgcctcaagccaaagggaacaatgtgggtatccaccaagctacattgacaaaccagaggcttcttcgagattaaaaaggcaacatttgcgccaagcttcttaa

SEQ ID NO: 121212 - DNA, 519 bp, Homo sapiens
atgaaactcatgggaacacttaaccagtgcataaacgctggtcatgaaatgacgaaggctatcgccattgcacagtttaatgatgacagccctgtttcgaggaaaataacccggcgctggagaataagtgaagcaacggatttagttggggtttcttctcaggctatcagagatgccgagaaagcagggcgactaccgcacccggatatggaaaattcaggacgggttgagcaacgtgttggttttacaattgaacaaattaatcatatgcgtgatgtgtttggtacgccattgcgacgtgctgaagacgtatttccaccggtgatcggggttgctgcccataaaagtcggcgacaactcaatcgacagctggaaaaacgcgggccgtgtccttttgacaggggtgggttcgacgccaacgatccgatcctgaaagatcacacgcaagaatggtccggttctgcaacctttacatctgacggtaaaatccgtttattctacactgactattccggttaa

SEQ ID NO: 121213 - DNA, 743 bp, Homo sapiens
atgacgaaggctatcgccattgcacagtttaatgatgacagcccggaagcgaggaaaataacccggcgctggagaataggtgaagcagcggatttagttggggtttcttctcaggctatcagagatgccgagaaagcagggcgactaccgcacccggatatggaaattcgaggacgggttgagcaacgtgttggttatacaattgaacaaattaatcatatgcgtgatgtgtttggtacgcgattgcgacgtgctgaagacgtatttccaccggtgatcggggttgctgcccataaaggtggcgtttacaaaacctcagtttctgttcatcttgctcaggatctggctctgaaggggctacgtgttttgctcgtggaaggtaacgacccccagggaacagcctcaatgtatcacggatgggtaccagatcttcatattcatgcagaagacactctcctgcctttctatcttggggaaaagaacgatgtcacttatgcaataaagcccacttgctggccggggcttgacattattccttcctgtctggctctgcaccgtattgaaactgagttaatgggcaaatttgatgaagaggctacccaaatgagaaggaaccagaaaacaaaccctggtaatatgacagaacaaggctcatcaacaccccacaacaatcacactagttcaccagcaatggatccaaaccaagaagaaatccctgatttacctgaaaaagaatccaggag

SEQ ID NO: 121214 - DNA, 1746 bp, Homo sapiens
atgacagcccggaaagcgaggaaaataacccggcgctggagaataggtgaagcagcggatttagttggggtttcttctcaggctatcagagatgccgagaaagcagggcgactaccgcacccggatatggaaattcgaggacgggttgagcaacgtgttggttatacaattgaacaaattaatcatatgcgtgatgtgtttggtacgcgattgcgacgtgctgaagacgtatttccaccggtgatcggggttgctgcccataaaggtaacgacccccagggaacagcctcaatgtatcacggatgggtaccagatcttcatattcatgcagaagacactctcctgcctttctatcttggggaaaaggacgatgtcacttatgcaataaagcccacttgctggccggggcttgacattattccttcctgtctggctctgcaccgtattgaaactgagttaatgggcaaatttgatgaagcgcagcctaacctgggtatcggcacgattaatgtcgtatgtgctgctgatgtgctgattgttcccacgcctgctgagttgtttgactacacctccgcactgcagtttttcgatatgcttcgtgatctgctcaagaacgttgatcttaaagggttcgagcctgatgtacgtattttgcttaccaaatacagcaatagtaatggctctcagtccccgtggatggaggagcaaattcgggatgcctggggaagcatggttctaaaaaatgttgtacgtgaaacggatgaagttggtaaaggtcagatccggatgagaactgtttttgaacaggccattgatcaacgctcttcaactgatacttcgttatcgacaccagctgccccgatggtggattcgttaattgcgcgcgtaggagtaatggctcgcggtaatgccattactttgcctgtatgtggtcgggatgtgaagtttactcttgaagtgctccggggtgatagtgttgagaagacctctcgggtatggtcaggtaatgaacgtgaccaggagctgcttactgaggacgcactggatgatctcatcccttcttttctactgactggtcaacagacaccggcgttcggtcgaagagtatctggtgtcatagaaattgccgatgggagtcgccgtcgtaaagctgctgcacttaccgaaagtgattatcgtgttctggttggcgagctggatgatgagcagatggctgcattatccagattgggtaacgattatcgcccaacaagtgcttatgaacgtggtcagcgttatgcaagccgattgcagaatgaatttgctgggaaatatttcttgcgctggctgatgcggaaaatatttcacattattacccgctgtatcaacaccgccaaattgcctaaatcagttgttgctcttttttctcaccccggtgaactatctgcccggtcaggtgatgcacttcaaaaagcctttacagataaagaggaattacttaagcagcaggcatctaaccttcatgagcagaaaaaagctggggtgatatttgaagctgaagaagttatcactcttttaacttctgtgcttaaaacgtcatctgcatcaagaactagtttaagctcacgacatcagtttgctcctggagcgacagtattgtataagggcgataaaatggtgcttaacctggacaggtctcgtgttccaactgagtgtatagagaaaattgaggccattcttaaggaacttgaaaagccagcaccctga

SEQ ID NO: 121215 - DNA, 438 bp, Homo sapiens
atgaaactcatggaaacacttaaccagtgcataaacgctggtcatgaaatgacgaaggctatcgccattgcacagtttaatgatgacagcccggaagcgaggaaaataacccggcgctggagaataggtgaagcagcggatgtagttggggtttcttcaaaggctatcagagatgccgagaaagcaggagaaatacaaactaccatcagagaatactacaaacacctctatgcaaataaactagaaaatctagaagaaatggataaattcctcaacacatacactctcccaagactaaaccaggaagaagttgaatctctgaatagaccaataacaggatctgaaattgtagcaataatcaatagcttaccaaccaaaaagagtccaggaccagatggattcacagccgaattctaccagaggtacaaggaggaactg

SEQ ID NO: 121216 - DNA, 3216 bp, Homo sapiens
atgaaactcatggaaacacttaaccagtgcataaacgctggtcatgaaatgacgaaggctatcgccattgcacagtttaatgatgacagcccggaagcgaggaaaataacccggcgctggagaataggtgaagcagcggatttagttggggtttcttctcaggccatcagagatgccgagaaagcagggcgactaccgcacccggatatggaaattcgaggacgggttgagcaacgtgttggttatacaattgaacaaattaatcatatgcgtgatgtgtttggtacgcgactgcgacgtgctgaagacgtatttccaccgggatttggggattttgccgatttcggaaccaccatcaaacaggattttcgcctgctggggcaaaccagcgtggaccgcttgctgcaactctctcagggccaggcggtgaagggcaatcagctgttgcccgtctcactggtgaaaagaaaaaccaccctggcgcccaatacgcaaaccgcctctccccgcgcgttggccgattcattaatgcagctggcacgacaggtttcccgactggaaagcgggcacccacttgctggccggggcttgacattattccttcctgttctggctttgccccgtattgaaactgagttaatgggcaaatttgatgaaggtaaactgcccaccgatccacacctgatgctccgactggccattgaaactgttgctcatgactatgatgtcatagttattgacagcgcgcctaacctgggtatcggcacgattaatgtcaaaatcattaaagaatcagctctgcccccaacccctacctttatcaacatcctcatgaatgccaaaacaattgaaaatggtcaattcccatatttgctaaatgcactggctttgcagaactttcaccggtataccggcatacagcatgtgcatcgcataggaatggcggaacgtatgtggtgtgaccggaacagagaacgtcacaccgtcagcagcagcggcggcaaccgcctccccaatccaggtcctgaccgttctatccgcgctttctctgtccttcctgtgcgacggttacgccgctccatgagcttatcgcgaataaatacctctcacgcaagatcacttcgcagaataaataaatcatggtgtccctatatgataccgggaagccctgggccaacttttggcgaaaatgagacgttgatcggcacgggtccaaatatacggtttgggaaccaggaaccatgctgtttgtgtaacggggttcttgtaggaaagtttgaaaatcgggtattggctttgcagaactttcagcggtataccggcatacagcatgtgcatcgcataggaatggcggaacgtatgtggtgtgaccggaacagagaacgtcacaccgtcagcagcagcggcggcaaccgcctccccaatccagctcacgctgtaggtatctcagttcggtgtaggtcgttcgctccaagctgggctgtgtgcacgaacccccggttcagcccgaccgctgcgccttatccggtaactatcgtcttgagtccaacccggtgtgcccattctaaaaaacttgtcccccttccacatggatctgtcatggcggaaccaccggttatcaatcacaagaaacgtaaaaatagcccgcgaatcgtccagtcaaacgacttcactgagcgggcatatagtctctcccgggatcaaaaacgtatgctgtatctgttcgttgaccagatcagaaaatctgatggcaccctacaggaacatgacggtatctgcgagatccatgttgctaaatatgctgaaatattcggattgacctctgcggaagccagtaaggatatacggcaggcattgaagagtttcgcggggaaggaagtggttttttatcgccctgaagaggatgccggcgatgaaaaaggctatgaatcttttccttggtttatcaaacgtgcgcacagtccatccagagggctttacagtgtacatatcaacccatatctcattcccttcttcctcgggttacagaaccggtttacgcagtttaggcttagtgaaacaaaagaaatcaccaatccgtatgccatgcgtttatacgaatccctgtgtcagtatcctgtgactaaaagggccccagatatgcctcaggcttcttctccagagggtgcaaaccataagcctaggcagccttcatgtggtgttaagcctcccgtaaagaaaaataagcacaagttttatccggcctttattcacattcttgcccgcctgatgaatgctcatccggaattccgtatggcaatgaaagacggtgagctggtgatatgggatagtgttcacccttgttacaccgttttccatgagcaaactgaaacgttttcatcgctctggagtgaataccacgacgatttccggcagtttctacacatatattcgcaagatgtggcgtgttacggtgaaaacctggcctatttccctaaagggtttattgagaatatgtttttcgtctcagccaatccctgggtgagtttcaccagttttgatttaaacgtggccaatatggacaacttcttcgcccccgttttcaccatgggcaaatattatacgcaaggcgacaaggtgctgatgccgctggcgattcaggttcatcatgccgtttgtgatggcttccatgtcggcagaatgcttaatgaatttcaacagtactgcgatgaaaaacagggcggggcccaaccgataagttcggccgccaacgatccgatcctgaaagatcagacgccaagaatggtcccggttctgcaccctttacatcttgacggaaaattccgtttattctacactgactattccggtaaacattacggcaaacaaagcctgacaacagcgcagaacgttcagcagtttatcgatgaaggcaattatacatccggcgacaaccatacgctgagagaccctcactacgttgaagacaaaggccataaataccttgtattcgaagccaacacgggaacagaaaacggataccaaggcgaagaatctttatttaacaaagcgtactacggcggcggcacgcccttcttccgtaaagaaagccagaagcttcagcagagcgctaaaaaacgcgatgctgagttagcgaacggcgccctcggtatcatagagttaaataatgattacacattgaaaaaagtaatgaagccgctgatcacttcaaacacg

SEQ ID NO: 121217 - DNA, 516 bp, Homo sapiens
  misc_feature (1)...(516): n = a,t,c or g
atgaaactcatggaaacacttaaccagagcataaacgctggtcatgaaatgacgaaagctatcgccattgcacagtttaatgatgacagcccggaagcgaggaaaataacccggcgctggagaataagtgaagcancggatttagttggggtttcttctcaagctatcagagatgccgagaaagcaaggcgactaccgcacccggatatggaaattcgaggacgggttgagcaacgtgttggttatacaattgaacaaattaatcatatgcgtgatgtgtttggtacgcgattgcgacgtgctgaagacgtatttccaccggtgatcggggttgctgcccataaagaacggagtaacctcggtgtgcggttgtatgcctgctgtggattgctgctgtgtcctgcttatccacaacattttgcgcacggttatgtggacaaaatacctggttacccaagccgtgccggcacgttaaccgggctgcatccgatgcaagtgtgtcgctgtcgacggtga

SEQ ID NO: 121218 - DNA, 3069 bp, Homo sapiens
atgagaggacacagggagaaggcagctgcctgcaagccaaggacaagggcctcagaaggaactacccctgccagtaccttcatcctggactttcagcctcctaactgcaattatacatccggcgacaaccatacgctgagagaccctcactacgttgaagacaaaggccataaataccttgtattcgaagccaacacgggaacagaaaacggataccaaggcgaagaatctttatttaacaaagcgtactacggcggcggcacgaacttcttccgtaaagaaagccagaagcttcagcagagcgctaaaaaacgcgatgctgagttagcgaacggcgccctcggtatcatagagttaaataatgattacacattgaaaaaagtaatgaagccgctgatcacttcaaacacggtaactgatgaaatcgagcgcgcgaatgttttcaaaatgaacggcaaatggtacttgttcactgattcacgcggttcaaaaatgacgatcgatggtattaactcaaacgatatttacatgcttggttatgtatcaaactctttaaccggcccttacaagccgctgaacaaaacagggcttgtgctgcaaatgggtcttgatccaaacgatgtgacattcacttactctcacttcgcagtgccgcaagccaaagggatcttatgtgaagaagataattatacggccggcgacaaccatatgatgagagcccctcactgcgaagaagacagagcccataaattcgttgtattcgacgccaacgcgggaacagaaagcggacaccaaggagaatcttctttatttaacagagcgtgcggcggcggcggcacgttcttcttcagtaaagaaagccagaagcttcagcagagcgctaaaaaacgcgattgcataaacgctggtcatgaaatgacgaaggctatcgccattgcacagtttaatgatgacagcccggaagcgaggaaaataacccggcgctggagaataggtgaagcagcggatttagttggggtttcttctcaggctatcagagatgccgagaaagcagggcgactaccgcacccggatatggaaattcgaggacgggttgagcaacgtgttggttatacaattgaacaaattaatcatatgcgtgatgtgtttggtacgcgattgaaacgtgctgaagacgtatttccaccggtgatcggggttgctgcccataaaggtggcgtttacaaaacctcagtttctgttcatcttgctcaggatctggctctgaaggggtccctgctccttcctaagaatgactttctcttcaaactaggccttgagggtcatttacctttgggaaaaatccactccccacctacaggggctgatgttgccagaggatccagtggccttcccaagtctgagctatttcttccagagagaaatacccaggagcttcagcaagacagtgaagaggggcctctggcccttcaagtcctgcaaagcaatctcatggattttgccgatttcggaaccaccatcaaacaggattttcgcctgctggggcaaaccagcgtggaccgcttgctgcaactctctcagggccaggcggtgaagggcaatcagctgttgcccgtctcactggtgaaaagaaaaaccaccctggcgcccaatacgcaaaccgcctctccccgcgcgttggccgattcattaatgcagctggcacgacaggtttcccgactggaaagcgggcagaacaatgacggtatctgcgagatccatgttgctaaatatgttgaaatattcggattgacctctgcggaagccagtaaggatatacggcaggcattgaagagtttcgcggggaagttagtggttttttatcgccctgaagaggatgccggcgatgaaaaaggctatgaatcttttccttggtttatcaaacgtgcgcacagtccatccagagggctttacagtgtacatatcaacccatatctcattcccttctttatcgggttacagaaccggtttacgcagtttcggcttagtgaaacaaaagaaatcaccaatccgtatgccatgcgtttatacgaatccctgtgtcagtatcgtaagccggatggctcaggcatcgtctctctgaaaatcgactggatcatagagcgttaccagctgcctcaaagttaccagcgtatgcctgacttccgccgccgcttcctgcaggtctgtgttaatgagatcaacagcagaactccaatgcgcctctcatacattgagaaaaagaaaggccgccagacgactcatatctcccggaagtttactctgaagtggtccgggggtgatagtgttgagaagacttctcgggtatggtcaggtaatgaacgtgcccaggagctgcttactgaggacgcactgaatgatctcatcccttcttttctactgactggtcaacagacaccggcgttcggtcgaagagtatctggtgtcatagaaattgccgatgggagtcgccgtcgtaaagctgctgcacttaccgaaagtgattatcgtgttctggttggcgagctggatgatgagcagatggctgcattatccagattgggtaacgattatcgcccaacaagtgcttatgaacgtggtcagcgttatgcaagccgattgcagaatgaatttgctggacatatttctgcgctggctgatgcggaaaatatttcacgtaagattattacccgctgtatcaacaccgccaaattgcctaaatcagttgttgctcttttttctcaccccggtgaactatctgcccggtcaggtgatgcacttcaaaaagcctttacagataaagaggaattacttaagcagcaggcatctaaccttcatgagcagaaaaaagctggggtgatatttcaagctgaagaagttatcactcttttaacttctgtgcttaaaacgtcatctgcatcaagaactagtttaagctcacgacatcagtttgctcctggagcgacagtattgtataagggcgataaaatggtgcttaacctggacagttctcgtgtccaactgagttatagagaaaatgaggccaaataa

SEQ ID NO: 121219 - DNA, 753 bp, Homo sapiens
gctatcagagatgccgagaaagcagggcgactaccgcacccggatatggaaattcgaggacgggttgagcaacgtgttggttatacaattgaacaaattaatcatatgcgtgatgtgtttggtacgcgattgcgacgtgctgaagacgtatttccaccggtgatcggggttgctgcccataaaggtggcgtttacaaaacctcagtttctgttcatcttgctcaggatctggctctgaaggggctacgtgttttgctcgtggaaggtaacgacccccagggaacagcctcaatgtatcacggatgggtaccagatcttcatattcatgcagaagacactctcctgcctttctatcttggggaaaaggacgatgtcacttatgcaataaagcccacttgctggccggggcttgacattattccttcctgtctggctctgcaccgtattgaaactgagttaatgggcaaatttgatgaaggtaaactgcccaccgatccacacctgatgctccgactggccattgaaactgttgctcatgactatgatgtcatagttattgacagcgcgcctaacctgggtatcggcacgattaatgtctttttcgatatgcttcgtgatctgctcaagaacgttgatcttaaagggatcgagcctgatgtacgagaagtagttcatcagttgactgtcagctgtccttgctccaggatgctgtttttgacaacggatgttttattgccttgtgatgttcattaa

SEQ ID NO: 121220 - DNA, 726 bp, Homo sapiens
atgaaactcatggaaacacttaaccagtgcataaacgctggtcatgaaatgacgaaggctatcgccattgcacagtttaatgatgacagcccggaagcgaggaaaataacccggcgctggagaataggtgaagcagcggatttagttggggtttcttctcaggctatcagagatgccgagaaagcagggcgactaccgcacccggatatggaaattcgaggacgggttgagcaacgtgttggttatacaattgaacaaattaatcatatgcgtgatgtgtttggtacgcgattgcgacgtgctgaagacgtatttccaccggtgatcggggttgctgcccataaaggtggcgtttacaaaacctcagtttctgttcatcttgctcaggatctggctctgaaggggctacgtgttttgctcgtggaaggtaacgacccccagggaacagcctcaatgtatcacggatgggtaccagatcttcatattcatgcagaagacactctcctgcctttctatcttggggaaaaagacgatgtcacttatgcaataaagcccacttgctgggccgggctagacattattccttcctgtctggctcttttagctcggtaccccgaggataaaaaggcaacatttgcgccaagcttcttaatgaacatcaaaggcaataaaacatccgttgtcaaaaacagcatcctggagcaaggacagctgacagtcaactaa

SEQ ID NO: 121221 - DNA, 1176 bp, Homo sapiens
atgaaactcatggaaacacttaaccagtgcataaacgctggtcatgaaatgacgaaggctatcgccattgcacagtttaatgatgacagcccggaagcgaggaaaataacccggcgctggagaataggtgaagcagcggatttagttggggtttcttctcaggctatcagagatgccgagaaagcagggcgactaccgcacccggatatggaaattcgaggacgggttgagcaacgtgttggttatacaattgaacaaattaatcatatgcgtgatgtgtttggtacgcgattgcgacgtgctgaagacgtatttccaccggtgatcggggttgctgcccataaaggtggcgtttacaaaacctcagtttctgttcatcttgctcaggatctggctctgaaggggctacgtgttttgctcgtggaaggtaacgacccccagggaacagcctcaatgtatcacggatggaaccgctttacgcagtttcggcttagtgaaacaaaagaaatcaccaatccgtatgccatgcgtttatacgaatccctgtgtcagtatcgtaagccggatggctcaggcatcgtctctctgaaaatcgactggatcatagagcgttaccagctgcctcaggaggaccagcgtatgcctgacttccgccgccgcttcctgcaggacgatgtcacttatgcaataaagcccacttgctggccggggcttgacattattgggggctgtctggctctgcaccgtattgaaactgagttaatgggcaaattggatgaaggtaaactgcccaccgatccacacctgatgctccgactggccattgaaactgttgctcatgactatgatgtcatagttattgacagcgcgcctaacctgggtatcggcacgattaatgtcgtatgtgctgctgatgtgctgattgttcccacgcctgctgagttgtttgactacacctccgcactgcagtttttcgatatgcttcgtgatctgctcaagaacgttgatcttaaagggttcgagcctgatgtacgtattttgcttaccaaatacagcaatagtaatggctctcagtccccgtggatggaggagcaaattctggatgcctggggaagcatggttctaaaaaatgttgtacctgaaacggatgaagttggtaaggtcaaatccggatga

SEQ ID NO: 121222 - DNA, 1002 bp, Homo sapiens
atgcaaaaggtgggtgaactagagttgcatacccgcggttcgactctagaggatccccagtttaatgatgacagcccggaagcgaggaaaataacccggcgctggagaataggtgaagcagcggatttagttggggtttcttctcaggctatcagagatgccgagaaagcagggcgactaccgcacccggatatggaaattcgaggacgggttgagcaacgtgttggttatacaattgaacaaattaatcatatgcgtgatgtgtttggtacgcgattgcgacgtgctgaagacgtatttccaccggtgatcggggttgctgcccataaaggtggcgtttacaaaacctcagtttctgttcatcttgctcaggatctggctctgaaggggctacgtgttttgctcgtggaaggtaacgacccccagggaacagcctcaatgtatcacggatgggtaccagatcttcatattcatgcagaagacactctcctgcctttctatcttggggaaaaggacgatgtcacttatgcaataaagcccacttgctggccggggcttgacattattccttcctgtctggctctgcaccgtattgaaactgagttaatgggcaaatttgatgaaggtaaactgcccaccgatccacacctgatgctccgactggccattgaaactgttgctcatgactatgatgtcatagttattgacagcgcgcctaacctgggtatcggcacgattaatgtcaaccggtttacgcagtttcggcttagtgaaacaaaagaaatcaccaatccgtatgccatgcgtttatacgaatccctgtgtcagtatcgtaagccggatggctcaggcatcgtctctctgaaaatcgactgggatcatagagcgttaccaggctggcctcaaagtttacccagcgtattgccctggacttccgcccgccggttccttgcaggtttgggttttttgggaatcaacggccgaacttcaatgcccttttaa

SEQ ID NO: 121223 - DNA, 735 bp, Homo sapiens
atgaaactcatggaaacacttaaccagtgcataaacgctggtcatgaaatgacgaaggctatcgccattgcacagtttaatgatgacagcccggaagcgaggaaaataacccggcgctggagaataggtgaagcagcggatttagttggggtttcttctcaggctatcagagatgccgagaaagcagggcgactaccgcacccggatatggaaattcgaggacgggttgagcaacgtgttggttatacaattgaacaaattaatcatatgcgtgatgtgtttgttgccggcgatgaaaaaggctatgaatcttttccttggtttatcaaaacgtgcgcacagtccatccagagggctttacagtgtacatatcaacccatatctcattccttctttatcgggttacagaaccggtttacgcagtttcggcttagtgaaacaaaagaaatcaccaatccgtatgccatgcgtttatacgaatccctgtgtcagtatcgtaagccggatggctcaggcatcgtctctctgaaaatcgactggatcatagagcgttaccagctgcctcaaagttaccagcgtatgcctgacttccgccgccgcttcctgcaggtctgtgttaatgagatcaacagcagaactccaatgcgcctctcatacattgagaaaaagaaaggccgccagacgactcatatcgtattttccttccgcgatatcacttccatgacgacaggatag

SEQ ID NO: 121224 - DNA, 1041 bp, Homo sapiens
atgaaactcatggaaacacttaaccagtgcataaacgctggtcatgaaatgacgaaggctatcgccattgcacagtttaatgatgacagcccggaagcgaggaaaataacccggcgctggagaataggtgaagcagcggatttagttggggtttcttctcaggctatcagagatgccgagaaagcagggcgactaccgcacccggatatggaaattcgaggacgggttgagcaacgtgttggttatacaattgaacaaattaatcatatgcgtgatgtgtttggtacgcgattgcgacgtgctgaagacgtatttccaccggtgatcggggttgctgcccataaaggtggcgtttacaaaacctcagtttctgttcatcttgctcaggatctggctctgaaggggctacgtgttttgctcgtggaaggtaacgacccccagggaacagcctcaatgtatcacggatgggtaccagatcttcatattcatgcagaagacactctcctgcctttctatcttggggaaaaggacgatgtcacttatgcaataaagcccacttgctggccggggcttgacattattccttcctgtctggctctgcaccgtattgaaactgagttaatgggcaaatttgatgaaggtaaactgcccaccgatccacacctgatgctccgactggccattgaaactgttgctcatgactatgatgtcatagttattgacagcgcgcctaacctgggtatcggcacgattaatgtcgtatgtgctgctgatgtgctgattgttcccacgcctgctgagttgtttgactacacctccgcactgcagtttttcgatatgcttcgtgatctgctcaagaacgttgatcttaaagggttcgagcctgatgatcgcagctcctcgccatcaatggaacaaagctggacagagaatgactttgacaagctgacaaaagtaggcttcagaaggtcagtaataacaaacttctctgagctaaaggaggatgttcgaacccatcgcaaggaagctaaaaaaccttga

SEQ ID NO: 121225 - DNA, 1101 bp, Homo sapiens
atgaaactcatggaaacacttaaccagtgcataaacgctggtcatgaaatgacgaaggctatcgccattgcacagtttaatgatgacagcccggaagcgaggaaaataacccggcgctggagaataggtgaagcagcggatttagttggggtttcttctcaggctatcagagatgccgagaaagcagggcgactaccgcacccggatatggaaattcgaggacgggttgagcaacgtgttggttatacaattgaacaaattaatcatatgcgtgatgtgtttggtacgcgattgcgacgtgctgaagacgtatttccaccggtgatcggggttgctgcccataaaggtggcgtttacaaaacctcagtttctgttcatcttgctcaggatctggctctgaaggggctacgtgttttgctcgtggaaggtaacgacccccagggaacagcctcaatgtatcacggatgggtaccagatcttcatattcatgcagaagacactctcctgcctttctatcttggggaaaaggacgatgtcacttatgcaataaagcccacttgctggccggggcttgacattattccttcctgtctggctctgcaccgtattgaaactgagttaatgggcaaatttgatgaaggtaaactgcccaccgatccacacctgatgctccgactggccattgaaactgttgctcatgactatgatgtcatagttattgacagcgcgcctaacctgggtatcggcacgattaatgtcgtatgtgctgctgatgtgctgattgttcccacgcctgctgagttgtttgactacacctccgcactgcagtttttcgatatgcttcgtgatctgctcaagaacgttgatcttaaagggttcgagcctgattcaggaccctcagctgcaggtctgttggagtttactggaggtccactccagaccctgtttgcctgggtatcagcagcagtggctgcagaacagtggatattggtgaactgcaaatgctgctacctgatcgttcctccggaaattttgtctcagaggagtacccggccgtgtgaggtgtcagtacgcccctactggggggtgcctcccagttag

SEQ ID NO: 121226 - DNA, 1014 bp, Homo sapiens
atgaaactcatggaaacacttaaccagtgcataaacgctggtcatgaaatgacgaaggctatcgccattgcacagtttaatgatgacagcccggaagcgaggaaaataacccggcgctggagaataggtgaagcagcggatttagttggggtttcttctcaggctatcagagatgccgagaaagcagggcgactaccgcacccggatatggaaattcgaggacgggttgagcaacgtgttggttatacaattgaacaaattaatcatatgcgtgatgtgtttggtacgcgattgcgacgtgctgaagacgtatttccaccggtgatcggggttgctgcccataaaggtggcgtttacaaaacctcagtttctgttcatcttgctcaggatctggctctgaaggggctacgtgttttgctcgtggaaggtaacgacccccagggaacagaaacaatgtatcacggatgggtaccagatcttcatattcatgcagaagacactctcctgcctttctatcttggggaaaaggacgatgtcacttatgcaataaagcccacttgctggccggggcttgacattattccttcctgtctggctctgcaccgtattgaaactgagttaatgggcaaatttgatgaaggtagtctgcccaccgatccacacctgatgtactactatcaggcaccgtgtatgaaatctaacaatgcgctcatcgtcatcctcggcaccgtcaccctggatgctgtaggcataggcttggttatgccggtactgccgggcctcttgcgggatatcgtccattccgacagcatcgccagtcactatggcgtgctgctagcgctatatgcgttgatgcaatttctatgcgcacccgttctcggagcactgtccgaccgctttggccgccgcccagtcctgctcgcttcgctacttggagccactatcgactacgcgatcatggcgaccacacccgtcctgtggatctacccactagtcaattcaccatcttgttga

SEQ ID NO: 121227 - DNA, 1212 bp, Homo sapiens; identical to SEQ ID NO: 119034

SEQ ID NO: 121228 - DNA, 1077 bp, Homo sapiens
  misc_feature (1)...(1077): n = a,t,c or g
atgaaactcatggaaacacttaaccagtgcataaacgctggtcatgaaatgacgaaggctatcgccattgcacagtttaatgatgacagcccggaagcgaggaaaataacccggcgctggagaataggtgaagcagcggatttagttggggtttcttctcaggctatcagagatgccgagaaagcagggcgactaccgcacccggatatggaaattcgaggacgggttgagcaacgtgttggttatacaattgaacaaattaatcatatgcgtgatgtgtttggtacgcgattgcgacgtgctgaagacgtatttccaccggtgatcggggttgctgcccataaaggtggcgtttacaaaacctcagtttctgttcatcttgctcaggatctggctctgaaggggctacgtgttttgctcgtggaaggtaacgacccccagggaacagcctcaatgtatcacggatgggtaccagatcttcatattcatgcagaagacactctcctgcctttctatcttggggaaaaggacgatgtcacttatgcaataaagcccacttgctggccggggcttgacattattccttcctgtctggctctgcaccgtattgaaactgagttaatgggcaaatttgatgaaggtaaactgcccaccgatccacacctgatgctccgactggccattgaaactgttgctcatgactatgatgtcatagttattgacagcgcgcctagactangtcaggcaccgtgtatgaaatctaacaatgcgctcatcgtcatcctcggcaccgtcaccctggatgctgtaggcataggcttggttatgccggtactgccgggcctcttgcgggatatcgtccattccgacagcatcgccagtcactatggcgtgctgctagcgctatatgcgttgatgcaatttctatgcgcacccgttctcggagcactgtccgaccgctttggccgccgcccagtcctgctcgcttcgctacttggagccactatcgactacgcgatcatggcgaccacacccgtcctgtggatctacccactagtcaattcaccatcttgttga

SEQ ID NO: 121229 - DNA, 657 bp, Homo sapiens
atgaaactcatggaaacacttaaccagtgcataaacgctggtcatgaaatgacgaaggctatcgccattgcacagtttaatgatgacagcccggaagcgaggaaaataacccggcgctggagaataggtgaagcagcggatttagttggggtttcttctcaggctatcagagatgccgagaaagcagaaagactaccgcacccggatatggaaattcgaggacgggttgagcaacgtgttggttatacaattgaacaaattaatcatatgcgtgatgtgtttggtacgcgattgcgacgtgctgaagacgtattgccaccggtgatcggggttgctgccaataaaggtgatgcactcaaaaaagcctttacagataaagaggaattacttaagcagcaggcatctaaccttcatgagcagaaaaaagctggggtgatatttgaagctgaagaagttatcactcttttaacttctgtgcttaaaacgtcatctgcatcaagaactagtttaagctcacgacatcagtttgctcctggagcgacagtattgtataagggcgataaaatggtgcttaacctggacaggtctcgtgttccaactgagtgtatagagaaaattgaggccattcttaaggaacttgaaaagccagcaccctga

SEQ ID NO: 121230 - DNA, 546 bp, Homo sapiens
atgaaactcatggaaacacttaaccagtgcataaacgctggtcatgaaatgacgaaggctatcgccattgcacagtttaatgatgacagcccggaagcgaggaaaataacccggcgctggagaataggtgaagcagcggatttagttggggtttcttctcaggctatcagagatgccgagaaagcagggcgactaccgcacccggatatggaaattcgaggacgggttgagcaacgtgttggttatacaattgaacaaattaatcatatgcgtgatgtgtttggtacgcgattgcgacgtgctgaagacgtatttccaccggtgatcggggttgctgcccataaagtcgggaaacctgtcgtgccagctgcattaatgaatcggccaacgcgcggggagaggcggtttgcgtattgggcgccagggtggtttttcttttcaccagtgagacgggcaacagctgattgcccttcaccgcctggccctgagagagttgcagcaagcggtccacgctggtttgccccagcaggcgaaaatcctgtttga

SEQ ID NO: 121231 - DNA, 753 bp, Homo sapiens
atgagtattgccaagaaagaaagctgtaatcaggtgctgcaggctatcagagatgccgagaaagcagggcgactaccgcacccggatatggaaattcgaggacgggttgagcaacgtgttggttatacaattgaacaaattaatcatatgcgtgatgtgtttggtacgcgattgcgacgtgctgaagacgtatttccaccggtgatcggggttgctgcccataaaggtggcgtttacaaaacctcagtttctgttcagcttgctcaggatctggctctgaaggggctacgtgttttgctcgtggaaggtaacgacccccagggaacagcctcaatgtatcacggatgggtaccagatcttcatattcatgcagaagacactctcctgcctttctatcttggggaaaaggacgatgtcacttatgcaataaagcccacttgctggccggggcttgacattattccttcctgtctggctctgcaccgtattgaaactgagttaatgggcaaatttgatgaaagtaaactgcccatcgatccacacctgatgctccgactggccattgaaactgttgctcatgactatgatgtcatagttattgacagcgcgcctaacctgggtatcggcacgattaatgtccgatgtgctgctgaaaatttgatggccccctacaggaacatgacgggatttgcggagatccatgttgccaaatatgctgaaatattcggattgacctctgcggaagccacttag

SEQ ID NO: 121232 - DNA, 612 bp, Homo sapiens
  misc_feature (1)...(612): n = a,t,c or g
atgaaactcatggaaacacttaaccagtgcataaacgctggtcatgaaatgacgaaggctatcgccattgcacagtttaatgatgacagcccggaagcgatttttataacccggcgctggagaataggtgaggcagcggatttagttggggtttcttctcaggctatcagagatgccgagaaagcagggcgactaccgcacccggatatggaaattcgaggacgggttgagcaacgtgttggttatacaattgaacaaattaatcatatgcgtgatgtgtttggtacgcgattgcgacgtgctgaagacgtatttccaccggtgatcggggttgctgcccataaagntagccgggcctctgcgggatatcgtttttccgacagcatcgccagtgactctggcgtgctgctagcgctatatgcgttgatgcaatttctatgcgcacccgttctcggagcactgtccgaccgctttggccgccgcccagtcctgctcgcttcgctacttggagccactatcgactatcgcgatcatggcgaccacacccgtcctgtggatctacccactagtcaattcaccatcttgttgagaaataaaagaaaatgccaatga

SEQ ID NO: 121233 - DNA, 519 bp, Homo sapiens
atgaaactcatggaaacacttaaccagtgcataaacgctggtcatgaaatgacgaaggctatcgccattgcacagtttaatgatgacagcccggaagcgaggaaaataacccggcgctggagaataggtgaagcagcggatttagttggggtttcttctcaggctatcagagatgccgagaaagcagggcgactaccgcacccggatatggaaattcgaggacgggttgagcaacgtgttggttatacaattgaacaaattaatcatatgcgtgatgtgtttggtacgcgattgcgacgtgctgaagacgtatttccaccggtgatcggggttgctgcccataaagtgccgcaagccaaaggcaacaatgtggttatcacaagctacatgacaaacagaggcttcttcgaggataaaaaggcaacatttgcgccaagcttcttaatgaacatcagaggcaataaaacatccgttgtcaaaaacagcatcctggagcaaggacagctgacagtcaactaa

SEQ ID NO: 121234 - DNA, 1992 bp, Homo sapiens
atgaaactcatggaaacacttaaccagtgcataaacgctggtcatgaaatgacgaaggctatcgccattgcacagtttaatgatgacagcccggaagcgaggaaaataacccggcgctggagaataggtgaagcagcggatttagttggggtttcttctcaggctatcagagatgccgagaaagcagggcgactaccgcacccggatatggaaattcgaggacgggttgagcaacgtgttggttatacaattgaacaaattaatcatatgcgtgatgtgtttggtacgcgattgcgacgtgctgaagacgtatttccaccggtgatcggggttgctgcccataaaggtggcgtttacaaaacctcagtttctgttcatcttgctcaggatctggctctgaaggggctacgtgttttgctcgtggaagggttcgagcctgatgtacgtattttgcttaccaaatacagcaatagtaatggctctcagtccccgtggatggaggagcaaattcgggatgcctggggaagcatggttctaaaaaatgttgtacgtgaaacggatgaagttggtaaagctgccccgatggtggattcgttaattgcgcgcgtaggagtaatggctcgcggtaatgccattactttgcctgtatgtggtcgggatgtgaagtttactcttgaagtgctccggggtgatagtgttgagaagacctctcgggtatggtcaggtaatgaacgtgaccaggagctgcttactgaggacgcactggatgatctcatcccttcttttctactgactggtcaacagacaccggcgttcggtcgaagagtatctggtgtcatagaaattgcgggggtcctgaaacagtcaccaggtgacccttctgcaaattggagcagcttcataagcagaggagagaagaagcttgacgacacccaggacggatgccctgctgagcctgggcatcagtgctggctctgcccacttcctgcccagactcctgtgctgtttggagaaaactgggcaggagaaagctgtgcaccatcccagaatagcgggcttttctctatgtctgaaaaaattcacagacaagcctttcgttctgatgcagatttcagcttagcatgtaaaatgcaacaagatgttcgtctattagatatgtcagcacacccagtgttaaagacatcaaggagctcacttacagaacagtaccctggaaattgtgtccagatagtgaattacttgcgtcaaaacatccacaaaaatgagaacctgaccggcttcagggattttgccgatttcggaaccaccatcaaacaggattttcgcctgctggggcaaaccagcgtggaccgcttgctgcaactctctcagggccaggcggtgaagggcaatcagctgttgcccgtctcactgatccctaaacagcagcaaaacgaaaaataccaagtgcctcaattcgatcaatcaacgattaaaaatattgagtctgcaaaaggacttgatgtgtgggacagctggccgctgcaaaacgctgacggaacagtagctgaatacaacggctatcacgttgtgtttgctcttgcgggaagcccgaaagacgctgatgacacatcaatctacatgttttatcaaaaggtcggcgacaactcaatcgacagctggaaaaacgcgggccgtgtctttaaagacagcgataagttcgacgccaacgatccgatcctgaaagatcagacgcaagaatggtccggttctgcaacctttacatctgacggaaaaatccgtttattctacactgactattccggtaaacattacggcaaacaaagcctgacaacagcgcaggtaaatgtgtcaaaatctgatgacacactcaaaatcaacggagtggaagatcacaaaacgatttttgacggagacggaaaaacatatcagaacgttcagcagtatatcgatgaaggcaattatacagccgcgtttgatctctcaaaatga

SEQ ID NO: 121235 - DNA, 1191 bp, Homo sapiens
atgcgacagtttaatgatgacagcccggaagcgaggaaaataacccggcgctggagaataggtgaagcagcggatttagttggggtttcttctcaggctatcagagatgccgagaaagcagggcgactaccgcacccggatatggaaattcgaggacgggttgagcaacgtgttggttatacaattgaacaaattaatcatatgcgtgatgtgtttggtacgcgattgcgacgtgctgaagacgtatttccaccggtgatcggggttgctgcccataaaggtggcgtttacaaaacctcagtttctgttcatcttgctcaggatctggctctgaaggggctacgtgttttgctcgtggaaggtaacgacccccagggaacagcctcaatgtatcacggatgggtaccagatcttcatattcatgcagaagacactctcctgcctttctatcttggggaaaaggacgatgtcacttatgcaataaagcccacttgctggccggggcttgacattattccttcctgtctggctctgcaccgtattgaaactgagttaatgggcaaatttgatgaaggtaaactgcccaccgatccacacctgatgctccgactggccattgaaactgttgctcatgactatgatgtcatagttattgacagcgcgcctaacctgggtatcggcacgattaatgtcacaaatacaggatttgaaattgtggcaataatccatagctttccaaccaaaaatagtacaggaccagatggattcacagccgattttaccagaggacaaggaggaactggtcccactccttctgaaactatccaatcaatagaaaaacagggaatcctccctaactcattttatgaggccagcatcatcctgataccaaagccgggtagaggcacaaccaaaaaagagaattttagaccaatatccttgatgaacattgatgcaaaaatcctcaataaaatactgggaaaccgaatccaacagcacatcaaaaagcttatccaccatgatcaagtgggcttcatccctgggatgcaaggctggttcaatatacgcaaatcaataaatgtaatccagcatataaacagaaccaaagacaaaaaccacatgattatctcagtagatgcagaaaaggcctttgacaaaattcaacaacttcatgctaaaaactctcaataa

SEQ ID NO: 121236 - DNA, 669 bp, Homo sapiens
atgaaactcatggaaacacttaaccagtgcataaacgctggtcatgaaatgacgaaggctatcgccattgcacagtttaatgatgacagcccggaagcgaggaaaataacccggcgctggagaataggtgaagcagcggatttagttggggtttcttctcaggctatcagagatgccgagaaagcagggcgactaccgcacccggatatggaaattcgaggacgggttgagcaacgtgttggttatacaattgaacaaattaatcatatgcgtgatgtgtttggtacgcgattgcgacgtgctgaagacgtatttccaccggtgatcggggttgctgcccataaaggtggcgtttacaaaacctcagtttctgttcatcttgctcaggatctggctctgaaggggctacgtgttttgctcgtggaaggtaacgacccccagggaacagcctcaatgtatcacggatggaaccgctttacgcagtttcggcttagtgaaacaaaagaaatcaccaatccgtatgccatgcgtttatacgaatccctgtgtcagtatcgtaagccggatggctcaggcatcgtctctctgaaaatcgactggatcatagagcgttaccagctgcctcaggaggaccagcgtatgcctgacttccgccgccgcttcctgcag

SEQ ID NO: 121237 - DNA, 574 bp, Homo sapiens
atgaaactcatggaaacacttaaccagtgcataaacgctggtcatgaaatgacgaaggctatcgccattgcacagtttaatgatgacagcccggaagcgaggaaaataacccggcgctggagaataggtgaagcagcggatttagttggggtttcttctcaggctatcagagatgccgagaaagcagggcgactaccgcacccggatatggaaattcgaggacgggttgagcaacgtgttggttatacaattgaacaaattaatcatatgcgtgatgtgtttggtacgcgattgcgacgtgctgaagacgtatttccaccggtgatcggggttgctgcccataaaggtggcgtttacaaaacctcagtttctgttcatcttgctcaggatctggctctgaaggggctacgtgttttgctcgtggaagggttcgagcctgatgtacgtattttgcttaccaaatacagcaatagtaatggctctcagtccccgtggatggaggagcaaattcgggatgcctggggaagcatggttctaaaaaatgttgtacgtgaaacggatgaagttggtaaag

SEQ ID NO: 121238 - DNA, 934 bp, Homo sapiens
atgaggaaggctatcgccattgcacagtttaatgatgacagcccgaaagcgagaaaaataacccggcgctggagaataggtgaagcagcggatttagttggggtttcttctcaggctatcagagatgccgagaaagcagggcgactaccgcacccggatatggaaattcgaggacgggttgagcaacgtgttggttatacaattgaacaaattaatcatatgcgtgatgtgtttggtacgcgattgcgacgtgctgaagacgtatttccaccggtgatcggggttgctgcccataaaggtggcgtttacaaaacctcagtttctgttcatcttgctcaggatctggctctgaaggggctacgtgttttgctcgtggaagtcacacgagtgccctcaggatgttcggacatgatccagtttgaaggggtcctatggtttactaagcttaatctttgggctatcagagatgccgagaaagcagggcgactcccgcacccggatatggaaattcgaggacgggttgagcaacgtgttggttatacaattgaacaaattaatcatatgcgtgatgtgtttggtacgcgattgcgacgtgctgaagacgtatttccaccggtgatcggggttgctgcccataaaggtggcgtttacaaaacctcagtttctgttcatcttgctcaggatctggctctgaaggggctacgtgttttgctcgtggaaggtaacgacccccagggaacagcctcaatgtatcacggatgggtaccagatcttcatattcatgcagaagacactctcaagcctttctatcttggggaaaaggacgatgtcacttatgcaataaagcccacttgctggccggggcttgacattattccttcctgtctggctctgcaccgtattgaaactgagttaatgggcaaatttgatgaag

SEQ ID NO: 121239 - DNA, 1284 bp, Homo sapiens
atgaaactcatggaaacacttaacaagtgcataaacgctgttcatgaaatgacgaaggctatcgccattgcacagtttaatgatgacagcccggaagcgaggaaaataacccggcgctggagaataggtgaagcagcggatttagttggggtttcttctcaggctatcagagatgccgagaaagcagggcgactaccgcacccggatatggaaattcgaggacgggttgagcaacgtgttggttatacaattgaacaaattaatcatatgcgtgatgtgtttggtacgcgattgcgacgtgctgaagacgtatttccaccggtgatcggggttgctgcccataaaggtggcgtttacaaaacctcagtttctgttcatcttgctcaggatctggctctgaaggggctacgtcccccgctcgtggaagtggactcttgttccaaactggaacaacactcaaccctatctcgggctattcttttgatttataagggattttgccgatttcggaaccaccatcaaacaggattttcgcctgctggggcaaaccagcgtggaccgcttgctgcaactctctcagggccaggcggtgaagggcaatcagctgttgcccgtctcactggtgaaaagaaaaaccaccctggcgcccaatacgcaaaccgcctctccccgcgcgttggccgattcattaatgcagctggcacgacaggtttcccgactggaaagcgggcaatcctaaaacagcagcaaaacgaaaaataccaagtgcctcaattcgatcaatcaacgattaaaaatattgagtctgcaaaaggacttgatgtgtgggacagctggccgctgcaaaacgctgacggaacagtagctgaatacaacggctatcacgttgtgtttgctcttgcgggaagcccgaaagacgctgatgacacatcaatctacatgttttatcaaaaggtcggcgacaactcaatcgacagctggaaaaacgcgggccgtgtctttaaagacagcgataagttcgacgccaacgatccgatcctgaaagatcagacgcaagaatggtccggttctgcaacctttacatctgacggaaaaatccgtttattctacactgactattccggtacacattacggcaaacaaagcctgacaacagcgcaggtaaatgtgtcaaaatctgatgacacactcaaaatcaacggagtggaagatcacaaaacgatttttgacggagacggaaaaacatatcagaacgttcagcagtttatcgatgaaggcaattag

SEQ ID NO: 121240 - DNA, 804 bp, Homo sapiens
  misc_feature (1)...(804): n = a,t,c or g
atgaaactcatggaaacacttaaccagtgcataaacgctggtcatgaaatgacgaaggctatcgccattgcacagtttaatgatgacagcccggaagcgaggaaaataacccggcgctggagaataggtgaagcagcggatttagttggggtttcttctcaggctatcagagatgccgagaaagcagggcgactaccgcacccggatatggaaattcgaggacgggttgagcaacgtgttggttatacaattgaacaaattaatcatatgcgtgatgtgtttggtacgcgaatgcgacgtgctgaagacgtattccagggggttcnccagggttcccgtgctgctctcgctgctggcgctcgggctggtgctgcgatgacgctgctccccatcctggttctggcggcgggcacctatgccttccggctcgcgggcccgctgctgagccagcgcatgcaggtgtccgcgcgggtccagggcctgctgtccctctccgcgattgcgctgctcaccgcgctggtggccacggccacgctgacgtcgaacgggggcttctcgggctgggcacgtccggcgggggtgctcgctggcgccgtgctggcgtggcggaggctgcccttcgtcgtcgtggtggtgggggcggcgggtgttacagctttgttacgaatggcgggtgcctccaggcctgtgatgaaaatgggtgccaggaaggtctctgacatgccctggagacattttccccattgtcttggtgatgaacattcagctcctcgttacttatgcaaattttggcagctggcttga

SEQ ID NO: 121241 - DNA, 817 bp, Homo sapiens
aagaagataattatacggccggcgacaaccatatgatgagagcccctcactgcgaagaagacagagcccataaattcgttgtattcgacgccaacgcgggaacagaaagcggacaccaaggagaatcttctttatttaacagagcgtgcggcggcggcggcacgttcttcttcagtaaagaaagccagaagcttcagcagagcgctaaaaaacgcgattgcataaacgctggtcatgaaatgacgaaggctatcgccattgcacagtttaatgatgacagcccggaagcgaggaaaataacccggcgctggagaataggtgaagcagcggatttagttggggtttcttctcaggctatcagagatgccgagaaagcagggcgactaccgcacccggatatggaaattcgaggacgggttgagcaacgtgttggttatacaattgaacaaattaatcatatgcgtgatgtgtttggtacgcgattgaaacgtgctgaagacgtatttccaccggtgatcggggttgctgcccataaaggtggcgtttacaaaacctcagtttctgttcatcttgctcaggatctggctctgaaggggtccctgctccttcctaagaatgactttctcttcaaactaggccttgagggtcatttacctttgggaaaaatccactccccacctacaggggctgatgttgccagaggatccagtggccttcccaagtctgagctatttcttccagagagaaatacccaggagcttcagcaagacagtgaagaggggcctctggcccttcaagtcctgcaaagcaatctcat

SEQ ID NO: 121242 - DNA, 587 bp, Homo sapiens
atgaaactcatggaaacacttaaccagtgcataaacgctgttcatgaaatgactaatgctatcgccattgcacagtttaatgatgacagcccggaagcgaggaaaataacccggcgctggagaataggtgaagcagcggatttagttggggtttcttctcaggctatcagagatgccgagaaagcagggcgactaccgcacccggatatggaaattcgaggacgggttgagcaacgtgttggttatacaattgaacaaattaatcatatgcgtgatgtgtttggtacgcgattgcgacgtgctgaagacgtatttccaccggtgatcggggttgctgcccataaaagtggcgtttacaaaacctcagtttctgttcatcttgctcaagatctggctctgaaagggctacgtgttttgctcgtggaagggtttattgagaatatgtttttcgtctcagccaatccctgggtgagtttcaccagttttgatttaaacgtggccaatatggacaacttcttcgcccccgttttcaccatgggcaaatattatacgcaaggcgacaaggtgctgatgccgctggcgattca

SEQ ID NO: 121243 - DNA, 638 bp, Homo sapiens
atgaaactcatggaaacacttaaccagtgcataaacgctggtcatgaaatgacgaaggctatcgccattgcacagtttaatgatgacagcccggaagcgaggaaaataacccggcgctggagaataggtgaagcagcggatttagttggggtttcttctcaggctatcagagatgccgagaaagcagggcgactaccgcacccggatatggaaattcgaggacgggttgagcaacgtgttggttatacaattgaacaaattaatcatatgcgtgatgtgtttggtacgcgattgcgacgtgctgaagacgtatttccaccggtgatcggggttgctgcccataaaggtggcgtttacaaaacctcagtttctgttcatcttgctcaggatctggctctgaaggggctacgtgttttgctcgtggaaggcagaggttggaacagtttggaggactcagaagaagacagaaaaatgtgggaaagtttggaactccctagagacttgttgattggctttgacaaaaatggtgataatgatatggacaatgaaagaatacagactgaggaggtctcagatggagataaggaacttgttgggtactggagcaaaggtgactcttgttatgccatccttgttgc

SEQ ID NO: 121244 - DNA, 885 bp, Homo sapiens
atgaaactcatggaaacacttaaccagtgcataaacgctggtcatgaaatgacgaaggctatcgccattgcacagtttaatgatgacagcccggaagcgaggaaaataacccggcgctggagaataggtgaagcagcggatttagttggggtttcttctcaggctatcagagatgccgagaaagcagggcgactaccgcacccggatatggaaattcgaggacgggttgagcaacgtgttggttatacaattgaacaaattaatcatatgcgtgatgtgtttggtacgcgattgcgacgtgctgaagacgtatttccaccggtgatcggggttgctgcccataaaggtggcgtttacaaaacctcagtttctgttcatcttgctcaggatctggctctgaaggggctacgtgttttgctcgtggaagctagttcatcaggtaacgaaaacgatttgaatatgccttcaggaacaatagaaatcttctgtgacaatctaaaaacttgtcacacttcacatggatctgtcatggcggaaacagcggttatcaatcacaagaaacgtaaaaatagcccgcgaatcgtccagtcaaacgacctcactgaggcggcatatagtctctcccgggatcaaaaacgtatgctgtatctgttcgttgaccagatcagaagatctgatggcaccctacaggaacatgacggtatctgcgagatccatgttgctaaatatgctgaaatattcggattgacctctgcggaagcaggtcctgctgcccctctctctatcttacctctcctctggcatttcccctttgggcaggtcatccgggaactctacctccttcaaatccctaaggactgtgctcccaatccgttcatgcattag

SEQ ID NO: 121245 - DNA, 1080 bp, Homo sapiens
atgaaactcatggaaacacttaaccagtgcataaacgctggtcatgaaatgacgaaggctatcgccattgcacagtttaatgatgacagcccggaagcgaggaaaataacccggcgctggagaataggtgaagcagcggatttagttggggtttcttctcaagctatcagagatgccgagaaagcagggcgactaccgcacccggatatggaaaattcgagggaccggtttgagcaacgtgggttcgagcctgatgtacgtattttgcttacgaaatacagcaatagtaatggctctcagtccccgtggatggaggagcaaattcgggatgcctggggaagcatggttctaaaaaatgttgtacgtgaaacggatgaagttggtaaagaccccaggcccctgccgtatctgggccatgacgagccctacacatttgacatcaacctctctgttaacctgaaaagtatggttgtaggggggaccgacatgggccaggagcctctgaagcaaatgggtgcctgggggcccttgtccctgaaggctatgtttggattcttcatccggggctatgggtttttcacaccatttggcaggactctttttccacttggatttggttcaaccccacctttcacctttccgcttttgacaaagaccattggggtatttattctcgataagctcatggagcggcgtaaccgtcgcacaggaaggacagagaaagcgcggatctgggaagtgacggacagaacggtcaggacctggattggggaggcgggtgccgccgctgctgctgacggtgtgacgttctctgtttcggtcacaccacatacgttccgccattcctatgcgatgcacatgctgtatgccggtataccgctgaaagatcttcaaagcctgatgggacataaatccatcagttcaacggaaggctacaccaaagatttttcgctggatgtgggtggcccggcaccgggtgcaattttgcgatgcccggagtctgatgcggttggcgatgttgaaacaattattctgagaataaaaaaccttggccttttttttgtaaaatgtgggaactga

SEQ ID NO: 121246 - DNA, 418 bp, Homo sapiens
atgaaactcatggaaacacttaaccagtgcataaacgctggtcatgaaatgacgaaggctatcgccattgcacagtttaatgatgacagcccggaagcgaggaaaataacccggcgctggagaataggtgaagcagcggatttagttggggtttcttctcaggctatcagagatgccgaagaaagcaggcgactaccgcacccggatatggaaattcgaggacgggttgagcaacgtgttgggtatacaattgaacaaattaatcatatgcgtgatgtgtttgcagggatatttttcgcctaccggaatctgggcttgttacggcccaaccctctttacgtgaaagtgcctatggattatcgggcgtttataccagagttccaaatcgcatggaatggatccaccagtctcttgccca

SEQ ID NO: 121247 - DNA, 843 bp, Homo sapiens
atgaaactcatggaaacacttaaccagtgcataaacgctggtcatgaaatgacgaaggctatcgccattgcacagtttaatgatgacagcccggaagcgaggaaaataacccggcgctggagaataggtgaagcagcggatttagttggggtttcttctcaggctatcagagatgccgagaaagcagggcgactaccgcacccggatatggatattcgaggacgggttgagcaacgtgttggttatacaattgaacaaattaatcatatgcgtgatgtgtttggtacgcgattgcgacgtgctgaagacgtatttccaccggtgatcggggttgctgcccataaaggtggcgtttacaaaacctcagtttctgttcatcttgctcaggatctggctctgaaggggctacgtgttttgctcgtggaaggtaaactggccaccgatccacacctgatgctccgactggccattgaaactgttgttcatgactatgatgtcatagttattgacagcgcgcctaacctgggtatcggcacgattaatgtcgtatgtgctgctgatgtgctgattgttcccacgcctgctgagttgtttgactacacctccgcactgcagtttttcgatatgcttcgtgatcttctcaagaacgttgatcttaaagggttcgagcctgatctatggaataacctaagtactactcctcccagaggaattcctgctctgctccaagttctcactatcagcactcctgatcctgcttcttactctaaggttctgggtttcagtttgatggaaacggaacgtgaacaccaaaagagaagtgatgtctgggagcctctatag

SEQ ID NO: 121248 - DNA, 888 bp, Homo sapiens
atgaaactcatggaaacacttaaccagtgcataaacgctggtcatgaaatgacgaaggctatcgccattgcacagtttaatgatgacagcccggaagcgaggaaaataacccggcgctggagaataggtgaagcagcggatttagttggggtttcttctcaggctatcagagatgccgagaaagcagggcgactaccgcacccggatatggaaattcgaggacgggttgagcaacgtgttggttatacaattgaacaaattaatcatatgcgtaattgtgtttggttctgggttaaggagaccaacagcagaactcaaatgcgcttctcaaacatgaagaaaaagaaagcccgcccaaccgcttcatatcgtattttccttccgcgaaatccctcccaggccacaaggatatttagagggttatctgtcacagatttgagggtggttcgtcacattggttctgacctactgagggcagggatcccggatttgctgccaaaaatagattctccctttccggcaaatgtggtgggagcggctgaagcaaatgacttaatagcacaaagcaggaattctgtagagatggcagccgaggcacggcctgccaaccgaaaggcctgggagcccactggcctgcagggaaagccccacatccgcaaagagctcatgccagccctgtctggagggggcagcagtttgcctgcctctgtggctgagctgactgggtgtctttcttggttcccatccattttgacctcaggcatgatcaatgggctcatgagtggagccatcatgaaggcagaaacagaggctatgcatgagcccagcagcaagaacttcctctcaccagggctgattaaactactgctgctgctaaacatcagattt

SEQ ID NO: 121249 - DNA, 1142 bp, Homo sapiens
atgaaactcatggaaacacttaaccagtgcataaacgctggtcatgaaatgacgaaggctctctccattgcacagtttaatgatgacagcccggaagcgaggaaaataacccggcgctggagaataggtgaagcagcggatttagttggggtttcttctcaggctatcagagatgccgagaaagcagggcgactaccgcacccggatatggaaattcgaggacgggttgagcaacgtgttggttatacaattgaacaaattaatcatatgcgtgatgtgtttggtacgcgattgcgacgtgctgaagacgtatttccaccggtgatcggggttgctgcccataaaggtggcgtttacaaaacctcagtttctgttcatcttgctcaggatctggctctgaaggggctacgtgttttgctcgtggaagggggacccccccggggctcaggcgagaaacgccacctaccaagggggaggggcaccacccttacagggaccacccggcacggcaagggaaagccaaaaaaccgcgaaaaccaaccccaaggaaacgagaccagcggcccccaaacaagaacgaaaaacccgagacacccccccccccaccgagaagaggacgaaaaaagaaacacaaacaaacgccaggcaggagccgcagagcacaagaagcagccgaaaaacacaggaagaggagccccggagagcgggcgagcagccgcagcgacagagaagcaaagacacacagcgacgagcacacaaagccacacaaacaaaaaacacaaaaaagcaaaaggacagaacagagaacaaccgagaacaccaaccgaccaaacgcgccccaaaaccgaaacaaacaagacggaagccacgaccacggagcgaaaagagagcagagaaggaaaaacaagagacggaaaagaaaaagccaacaaggaccagcgaatgagagaggaacggcgggacggaaaggaaaagaaagacgagaaaacagagccgagcaaaacggcggcaaagcgagaagcggcagcaaggcagagcgggaagaaccacgggaacaaaacgaaaaagcgaaacaaagaaagagacgagaacaaggagagagaacgcgagcccgagcaaacacaaccgcccagcggctggac

SEQ ID NO: 121250 - DNA, 1083 bp, Homo sapiens
atgaaactcatggaaacacttaaccagtgcataaacgctggtcatgaaatgacgaaggctatcgccattgcacagtttaatgatgacagcccggaagcgaggaaaataacccggcgctggagaataggtgaagcagcggatttagttggggtttcttctcaggctatcagagatgccgagaaagcagggcgactaccgcacccggatatggaaattcgaggacgggttgagcaacgtgttggttatacaattgaacaaattaatcatatgcgtgatgtgtttggtacgcgattgcgacgtgctgaagacgtatttccaccggtgatcggggttgctgcccataaaggtggcgtttacaaaacctcagtttctgttcatcttgctcaggatctggctctgaaggggctacgtgttttgctcgtggaagggccaggcggtgaagggcaatcagctgttgcccgtctcactggtgaaaagaaaaaccaccctggcgcccaatacgcaaaccgcctctccccgcgcgttggccgattcattaatgcagctggcacgacaggtttcccgactggaaagcgggcagtgagcgcaacgcaattaatggattttgccgatttcggaaccaccatcaaacaggattttcgcctgctggggcaaaccagcgtggaccgcttgctgcaactctctcagggccaggcggtgaagggcaatcagctgttgcccgtctcactggtgaaaagaaaaaccaccctggcgcccaatacgcaaaccgcctctccccgcgcgttggccgattcattaatgcagctggcacgacaggtttcccgactggaaagcgggcaggattttgccgatttcggaaccaccatcaaacaggattttcgcctgctggggcaaaccagcgtggaccgcttgctgcaactctctcagggccaggcggtgaagggcaatcagctgttgcccgtctcactggtgaaaagaaaaaccaccctggcgcccaatacgcaaaccgcctctccccgcgcgttggccgattcattaatgcagctggcacgacaggtttcccgactggaaagcgggcagtga

SEQ ID NO: 121251 - DNA, 1173 bp, Homo sapiens
atgccacagtttaatgatgacagcccgaaagcgaggaaaataacccggcgctggagaataggtgaagcagcggatttagttggggtctcttctcaggctatcagagatgccgagaaagcagggcgactaccgcacccggatatggaaattggaggacgggttgagcaacgtgttggttatacaattgaacaaattaatcatatgcgtgatgtgtttggtacgcgattgcgacgtgctgaagacgtatttccaccggtgatcggggttgctgcccataaaggtggcgtttacaaaacctcagtttctgttcatcttgaagctgccctctgtcgacagctccccatggaagctgagactcttgccccagttcaggctgctgtcaacccacccacgatgaccccagacatgagatccatcactaataatagctcagatcctttcctcaatggggattttgccgatttcggaaccaccatcaaacaggattttcgcctgctggggcaaaccagcgtggaccgcttgctgcaactctctcagggccaggcggtgaagggcaatcagctgttgcccgtctcactggtgaaaagaaaaaccaccctggcgcccaatacgcaaaccgcctctccccgcgcgttggccgattcattaatgcagctggcacgacaggtttcccgactggaaagcgggcaggattttgccgatttcggaaccaccatcaaacaggattttcgcctgctggggcaaaccagcgtggaccgcttgctgcaactctctcagggccaggcggtgaagggcaatcagctgttgcccgtctcactggtgaaaagaaaaaccaccctggcgcccaatacgcaaaccgcctctccccgcgcgttggccgattcattaatgcagctggcacgacaggtttcccgactggaaagcgggcaggattttgccgatttcggaaccaccatcaaacaggattttcgcctgctggggcaaaccagcgtggaccgcttgctgcaactctctcagggccaggcggtgaagggcaatcagctgttgcccgtctcactggtgaaaagaaaaaccaccctggcgcccaatacgcaaaccgcctctccccgcgcgttggccgattcattaatgcagctggcacgacaggtttcccgactggaaagcgggcagtga

SEQ ID NO: 121252 - DNA, 1296 bp, Homo sapiens
atgaaactcatggaaacacttaaccagtgcataaacgctggtcatgaaatgacgaaggctatcgccattgcacagtttaatgatgacagcccggaagcgaggaaaataacccggcgctggagaataggtgaagcagcggatttagttggggtttcttctcaggctatcagagatgccgagaaagcagggcgactaccgcacccggatatggaaattcgaggacgggttgagcaacgtgttggttatacaattgaacgggtttctctagagtcccagtgcaaggattcaagcctagtgtcaagtgtacaaatgaggtacccaggtcacagaaaggaacatgacggtatctgcgagatccatgttgctaaatatgctgaaatattcggattgacctctgcggaagccagtaaggatatacggcaggcattgaagagtttcgcggggaaggaagtggttttttatcgccctgaagaggatgccggcgatgaaaaaggctatgaatcttttccttggtttatcaaacgtgcgcacagtccatccagagggctttacagtgtacatatcaacccatatctcattcccttctttatcgggttacagaaccggtttacgcagtttcggcttagtgaaacaaaagaaatcaccactccgtatgccatgcgtttatacgaatccctgtgtcagtatcgtaagccggatggctcaggcatcgtctctctgaaaatcgactggatcatagagcgttaccagctgcctcaaagttaccagcgtatgcctgacttccgccgccgcttcctgcaggtagattttaggctcccagcttctctgcctctggatgccccaaaccccactcagccctcacctcacacagtgatagctgccatcctgtactcgaggcgaggcccaggcacacacacagatcctgtgtcatcctttagtggtcctgttgtagatgactaccctgcttttctaagtcatgctgcctcttctctctcctggagagtcagagagcagggtttcaaccagatgctaccaacgggtctaggaattaagcctggcggggcaatcaagagcctttatgggatccaggacacagttggtgcaaaatcctttcattcaaattcacttcttcaccccttcccccattatttttttgcgctagtgaacattccaacacttggtatacaagcatcctcctcatcccctccccaaatgacttggctatatctcatatccagaaaggccagctatggaggaccacaggtggaggaggaaaagcagcagcaacaacagtaa

SEQ ID NO: 121253 - DNA, 1182 bp, Homo sapiens
atgaaactcatggaaacacttaaccagtgcataaacgctggtcatgaaatgacgaaggctatcgccattgcacagtttaatgatgacagcccgcaagcgaggaaaataacccggcgctggagaataggtgaagcagcggatttagttggggtttcttctcaggctatcagagatgccgagaaagcagggcgactaccgcacccggatatggaaattcgaggacgggttgagcaacgtgttggttatacaattgaacaaattaatcatatgcgtaatgtgtttggaaacagctatgaccatgattacgaattcgagctcggtacccaacagcttgcaggaaagaagccaccaaagcccaccaaaaccaagatggtgacaagagtaacttctggtcgtcctcagtgctatactcccatcagcaccatggcagtttacaaatgccatgtcaatgtcaggaaggattttgccgatttcggaaccaccatcaaacaggattttcgcctgctggggcaaaccagcgtggaccgcttgctgcaactctctcagggccaggcggtgaagggcaatcagctgttgcccgtctcactggtgaaaagaaaaaccaccctggcgcccaatacgcaaaccgcctctccccgcgcgttggccgattcattaatgcagctggcacgacaggtttcccgactggaaagcgggcaggattttgccgatttcggaaccaccatcaaacaggattttcgcctgctggggcaaaccagcgtggaccgcttgctgcaactctctcagggccaggcggtgaagggcaatcagctgttgcccgtctcactggtgaaaagaaaaaccaccctggcgcccaatacgcaaaccgcctctccccgcgcgttggccgattcattaatgcagctggcacgacaggtttcccgactggaaagcgggcaggattttgccgatttcggaaccaccatcaaacaggattttcgcctgctggggcaaaccagcgtggaccgcttgctgcaactctctcagggccaggcggtgaagggcaatcagctgttgcccgtctcactggtgaaaagaaaaaccaccctggcgcccaatacgcaaaccgcctctccccgcgcgttggccgattcattaatgcagctggcacgacaggtttcccgactggaaagcgggcagtga

SEQ ID NO: 121254 - DNA, 507 bp, Homo sapiens
atgaaactcatggaaacacttaaccagtgcataaacgctggtcatgaaatgacgaaggctatcgccattgcacagtttaatgatgacagcccggaagcgaggaaaataacccggcgctggagaataggtgaagcagcggatttagttggggtttcttctcaggctatcagagatgccgagaaagcagggcgactaccgcacccggatatggaaattcgaggacgggttgagcaacgtgttggttatacaattgaacaaattaatcatatgcgtgatgtgtttggtacgcgattgcgacgtgctgaagacgtatttccaccggtgatcggggttgctgcccataaaggatacctctggccttttaccagggtaactgtgcaatgtggaaagaaaaatgatcagacatttcagggactactggacactggctctgagctgacgttgattccagaggacccaaaacgtcattgtggtcctccagttaaagtaggggcttatggaggtcag

SEQ ID NO: 121255 - DNA, 411 bp, Homo sapiens
atgaaactcatggaaacacttaaccagtgcataaacgctggtcatgaaatgacgaaggctatcgccattgcacagtttaatgatgacagcccggaagcgaggaaaataacccggcgctggagaataggtgaagcagcggatttagttggggtttcttctcaggctatcagagatgccgagaaagcagggcgactaccgcacccggatatggaaattcgaggacgggttgagcaacgccaggcggttaaggccaatcagttgttgccgttcccctgggaaaaagaaaaacccccccggcgcccaatacgcaaaccgccctctccccgcgcgtgggccgattcattaaatgcagctggcacgaccaggtatcccgactggaaaagcggccaagtaggcgcaacgccaaataat

SEQ ID NO: 121256 - DNA, 793 bp, Homo sapiens
atgaaactcatggaaacacttaaccagtgcataaacgctggtcatgaaatgacgaaggctatcgccattgcacagtttaatgatgacagcccggaagcgaggaaaataacccggcgctggagaataggtgaagcagcggatttagttggggtttcttctcaggctatcagagatgccgagaaagcagggcgactaccgcacccggatatggaaattcgaggacgggttgagcaacgtgttggttatacaattgaacaaattaatcatatgcgtgatgtgtttggtacgcgattgcgacgtgctgaagacgtatttccaccggtgatcggggttgctgcccataaaggtggcgtttacaaaacctcagtttctgttcatcttgctcaggatctggctctgaaggggctacgtgttttgctcgtggaaggtaacgacccccagggaacagcctcaatgtatcacggatgggtaccagatcttcatattcatgcagaagacactctcctgcctttctatcttggggaaaaggacgatgtcacttatgcaataaagcccacttgctggccggggcttgaccttattccttcctggctggctctgcccccgattgaaactgagttaatgggccaatttgatgaaggagacttggcgggtcgtgcagaaatactggggaagacatccctgaagatctggaatgtgacacggagagactcagccctttatcgctgtgaggtcgttgctcgaaatgaccgcaaggaaattgatgagattgtgatcgagttaactgtgcaag

SEQ ID NO: 121257 - DNA, 1502 bp, Homo sapiens
accccgatttttcaacacttacctcttggacaagtgttatgttgatccaagtgctaaactcttggatcagactcagaaggaaaaggagtcatgggataaatgaggtttggagaagtggagttctcctgaaaaagaaagagagaaagaaggtgaaggagaagaagaggaacaggaagggggagaaaagaagaagaagaagacgaagaggaagaaggtggaggaggaggaagaagaaaggggaaggggagggggatggggaggaagaggaaggagtaggaggaagagaaggaaggaaagacgagagagtgagaaagaaagaaggaagggaggaaggaaggagtaagaaaggaaagaaagaatgtgtgatggggtgctgctgtaaaagatacccgaaaaatgtggaagcaaccttggaactggataacaggcagaggttggaacggtttggaggactcagaagaagacagaaaaatgtagatctatggaactttgaacttgagagagaggagttagggcatctggtggaagaaatttctaagcagcaaagcgttcaaaaggaagcagagcataaaagtttggaaaacttgcagcctgatgaagccatagaaaagaaaaacccattttctggggagaaattcaagtcagctgcagaaatttgcataagtcacgaggagctgaatgttaatcaccaagacaatggggaacatgtctccagggcatgtcagagacctttgcggcacgcccttgcatcacaggcccaggaagctaggagggaaaagtggttttctggggcaggccgagaccacccctactccatgcagcccttgggacaggtccagttcgttgctaaaagggggcaaggttacgcttgggctactgcttcagggctgcatgtctgcaggtcgactctagaggatcccgaaaataaccggcgctggagaataggtgaagcagcggatttagttggggtttcttctcaggctatcagagatgccgagaaagcagggcatctaccgcacccggatatggaaattcgaggacgggttgagcaacgtgttggttatacaattgaacaaattaatcatatgcgtgatgtgtttggtacgcgattgcgacgtgctgaagacgtatttccaccggtgatcggggttgctgcccataaaggtggcgtttacaaaacctcagtttctgttcatcttgctcaggatctggctctgaaggggctacgtgttttgctcgtggaagcgcgcctaacctgggtatcggcacgattaattgtcgtatgtgctgctgatgtgctgattgtttccacgcctgctgagttgtttgactacacctccgcactgcagtttttcgatatgcttcgtgatctgctccagaacgttgatcttaaagggttcgagcctgatgtacgtattttgcttaccaatacagcaatagtaatggctctcagtcccgttgatggaggagcaattcgggatgctggggaagcatgggtctaa

SEQ ID NO: 121258 - DNA, 1110 bp, Homo sapiens
atggcatgcacgctgtggcgcgccgtcaaccaattctcatgtgtgacagcttatcatcgaatttctgccattcatccgcttattatcacttattcaggcgtagcaaccaggcgtttaagggcaccaataactgccttaaaaaaattacgccccgccctgccgagagcagagctgacatctgataaagacatgtaccttgacaacagctccattgaagaagcttcaggagtgtatcctattgatgacgatgactacgcttctgcgtctggctcggaatttatgtggatgaagaaaatgcccaaaaatattcaagaaaagcatgggaaaaacaaccaccagtgtctgtgcataaacgctggtcatgaaatgacgaaggctatcgccattgcacagtttaatgatgacagcccggaagcgaggaaaataacccggcgctggagaataggtgaagcagcggatttagttggggtttcttctcaggctatcagagatgccgagaaagcagggcgactaccgcacccggatatggaaattcgaggacgggttgagcaacgtgttggttatacaattgaacaaattaatcatatgcgtgatgtgtttgaagacactctcctgcctttctatcttggggaaaaggacgatgtcacttatgcaataaagcccacttgctggccggggcttgacattattccttcctgtctggctctgcaccgtattgaaactgagttaatgggcaaatttgatgaaggtaaactgcccaccgatccacacctgatgctccgactggccattgaaactgttgctcatgactatgatgtcatagttattgacagcgcgcctaacctgggtatcggcacgattaatgtcgtatgtgctgctgatgtgctgattgttcccacgcctgctgagttgtttgactacacctccgcactgcagtttttcgatatgcttcgtgatctgctcaagaacgttgatcttaaagggttcgagcctgatgtcaatgatgcctaccccacaaggttcctgtgcggccccaccctgacaatgtgtggaaagtactctgtaaataatgtcgtcccagacccttttccggaggctttcattatctga

SEQ ID NO: 121259 - DNA, 2391 bp, Homo sapiens
  misc_feature (1)...(2391): n = a,t,c or g
atgaaactcatggaaacacttaaccagtgcataaacgctggtcatgaaatgacgaaggctatcgccattgcacagtttaatgatgacagcccggaagcgaggaaaataacccggcgctggagaataggtgaagcagcggatttagttggggtttcttctcaggctatcagagatgccgagaaagcagggcgnctaccgcacccggatatggaaattcgaggacgggttgagcaacgtgttggttatacaattgaacaaattaatcatatgcgtgatgtgtttggtacgcgattgcgacgtgctgaagacgtatttccaccggtgatcggggttgctgcccataaaggtggcgtttacaaaacctcagtttctgttcatcttgctcaggatctggctctgaaggggctacgtgttttgctcgtggaaggtaacgacccccagggaacagcctcaatgtatcacggatgggtaccagatcttcatattcatgcagaagacactctcctgcctttctatcttggggaaaaggacgatgtcacttatgcaataaagcccacttgctggccggggcttgacattattccttcctgtctggctctgcaccgtattgaaactgagttaatgggcaaatttgatgaaggtaaactgcccaccgatccacacctgatgctccgactggccattgaaactgttgctcatgactatgatgtcatagttattgacagcgcgcctaacctgggtatcggcacgattaatgtccgaatactcttcctaccttactggtctgaagattcctattcatcttataagggagaggcctcttggaagcttgtgcctcatttcccctggacttcacccaatactcctttaccctttgctgattttgctttgtatccttttgctgtgaccgatcatagctgcnacaatgaatgcctgcaggtcgactctagaggatccccccatgataaagtgagagtcaatgaggtgacaaagctgtggaagtcctggggcactggatcagtcaaggtcctgtcactcaaggcagaaccagatggcaagggagcctattggtatagaccacataaggcaacctcttggatctcggagcagagtggagaagtctggagagtgcagctgaaggagccaacagtgaatatcccacagacttgttcagaattacaactccagggtccaaacctattagaaggcaatgttctcaagtttttcgatatgcttcgtgatctgctcaagaacgttgatcttaaagggttcgagcctgatgtacgtattttgcttaccaaatacagcaatagtaatggctctcagtccccgtggatggaggagcaaattcgggatgcctggggaagcatggttctaaaaaatgttgtacgtgaaacggatgaagttggtaaagatacttcgttatcgacaccagctgccccgatggtggattcgttaattgcgcgcgtaggagtaatggctcgcggtaatgccattactttgcctgtatgtggtcgggatgtgaagtttactcttgaagtgctccggggtgatagtgttgagaagacctctcgggtatggtcaggtaatgaacgtgaccaggagctgcttactgaggacgcactggatgatctcatcccttcttttctactgactggtcaacagacaccggcgttcggtcgaagagtatctggtgtcatagaaattgccgatgggagtcgccgtcgtaaagctgctgcacttaccgaaagtgattatcgtgttctggttggcgagctggatgatgagcagatggctgcattattcagattgggtaacgattatcgcccaacaagtgcttatgaacgtgttgcttcaaagagaataaaatacctaggaatccaacttacaagggacatgaaggacctcttcaaggagaactacaaactactgctcaatgaaataaaagaggatacaaacaaatggaagaccattccatgctcatgggtaggaagaatcaatatcgtgaaaatggccatactgcccaaggtaatttatagattcagtgccatccccctcaagctaccaatgactttcttcacagaattggaaaaaactactttaacgttcatatggaaccaaaaaagagcccgtattgccaagtcaatcctaagccaaaagaacaaagctggaggcatcaggctacctgacttcaaactatactacaagactacagtaaccaaaacagcatggtactggtaccacagcagagatagaggccaatggaacagaacagagccttcagaaataatgctgcgtatctacaaccatctgatctttgacaaacctgacaaaacaagcaattggggaaggattcccctgtttaataatgatgctgggaaaactgactag

SEQ ID NO: 121260 - DNA, 2260 bp, Homo sapiens
atgaaactcatggaaacacttaaccagtgcataaacgctggtcatgaaatgacgaaggctatcgccattgcacagtttaatgatgacagcccggaagcgaggaaaataacccggcgctggagaataggtgaagcagcggatttagttggggtttcttctcaggctatcagagatgccgagaaagcagggcgactaccgcacccggatatggaaattcgaggacgggttgagcaacgtgttggttatacaattgaacaaattaatcatatgcgtgatgtgtttggtacgcgattgccacgtgctgaagacgtattttcaccggtgatcggggttgctgcccataaaggtggcgtttacaaaacctcagtttctggttcatcttgctcaggatctggctctgaaggggttacgtgttttgctcgtgaaaggtaacgacccccagggaacagcctcaatgtatcacgaatgggtaccagatcttcatattcatgcagaagacactctcctgcctttctatcttggggaaaaggacgatgtcacttatgcaataaagcccacttgctggccggggcttgacattattccttcctgtctggctctgcaccgtattgaaactgagttaatgggcaaatttaatgaaggtaaactgcccaccgatccacacctgatgctccgactggccattgaaactgttgctcatgactatgatgtcatagttattgacagcgcgcctaacctgggtatcggcacgattaatgtcgtatgtgctgctgatgtgctgattgttcccacgcctgctgagttgtttgactacacctccgcactgcagtttttcgatatgcttcgtgatctgctcaagaacgttgatcttaaagggttcgagcctgatggcacacaggcaaagatgacacaaggtgaacgcaggaacgtccccaaacaagaatacatatctcgtgggtatttcacccttaaagaaaccgtgatcgatacaagcaatggaagcaggatttctttcacgactcgtataaccggcaaagacgtagtaagaaccaccagcattgtaatgctggctaaagtcactttcctgagctgtataacgatgagcgattttactttttctggctatgaattggcctgctttgtaacacactccggtctatcccgtagcgccgggcatatcctgtcgcaatgtgcaaatctcgcggcaacaaccagtgaatacttcattcacaagcctcaccgcctgatcgcggcagaaactggttatagccaatcaaccgtcgttcgtgcattccgtgaagctgtaaacaaaggaattctgtctgtagagattgttatcggcgatcaccgtgaacgtcgcgctaacctgtaccggtttacaccatcctttttggccttcgcacaacaagccaaaaatgcgctgatagaaagcaaattaaagatctcttcagcggcaaccaagtgtgacaatctaaaaacttgtcacacttcacatggatctgtcatggcggaaacagcggttatcaatcacaagaaacgtaaaaatagcccgcgaatcgtccagtcaaacgacctcactgaggcggcatatagtctctcccgggatcaaaaacgtatgctgtatctgttcgttgaccagatcagaaaatctgatggcaccctacaggaacatgacggtatctgcgagatccatgttgctaaatatgctgaaatattcggattgacctctgcggaagccagtaaggatatacggcaggcattgaagagtttcgcggggaaggaagtggttttttatcgccctgaagaggatgccggcgatgaaaaaggctatgaatcttttccttggtttatcaaacgtgcgcacagtccatccagagggctttacagtgtacatatcaacccatatctcattcccttctttatcgggttacagaaccggtttacgcagtttcggcttagtgaaacaaaagaaatcaccaatccgtatgccatgcgtttatacgaatccctgtgtcagtatcgtaagccggatggctcaggcatcgtctctctgaaaatcgactggatcatagagcgttaccagctgcctcaaagttaccagcgtatgcctgacttccgccgccgcttcctgcaggtctgtgttaatgagatcaacagcagaactccaatgcgcctctcatacattgagaaaaagaaaggccgccagacgactcatatcgtattttccttccgcgatatcacttccatgacgacaggatag

SEQ ID NO: 121261 - DNA, 1067 bp, Homo sapiens
atgaaactcatggaaacacttaaccagtgcataaacgctggtcatgaaatgacgaaggctatcgccattgcacagtttaatgatgacagcccggaagcgaggaaaataacccggcgctggagaataggtgaagcagcggatttagttggggtttcttctcaggctatcagagatgccgagaaagcagggcgactaccgcacccggatatggaaattcgaggacgggttgagcaacgtgttggttatacaattgaacaaattaatcatatgcgtgatgtgtttggtacgcgattgcgacgtgctgaagacgtatttccaccggtgatcggggttgctgcccataaaggtggcgtttacaaaacctcagtttctgttcatcttgctcaggatctggctctgaaggggctacgtgttttgctcgtggaaggtaacgacccccagggaacagcctcaatgtatcacggatgggtaccagatcttcatattcatgcagaagacactctcctgcctttctatcttggggaaaaggacgatgtcacttatgcaataaagcccacttgctggccggggcttgacattattccttcctgtctggctctgcaccgtattgaaactgagttaatgggcaaatttgatgaaggtaaactgcccaccgatccacacctgatgctccgactggccattgaaactgttgctcatgactatgatgtcatagttattgacagcgcgcctaacctgggtatcggcacgattaatgtcgtatgtgctgctgatgtgctgattgttcccacgcctgctgagttgtttgactacacctccgcactgcagtttttcgatatgcttcgtgatctgctcaagaacgttgatcttaaagggttcgagcctgatggttttcttgacctacattgggagaaaatgctgcccacaacagacccacttggcattatcggccatccccaccatttcaggtttcggcttgccccggaagagttctggttaaaaaggaaagaagaggagccggggggctgtatgttacgtttcgcggttttggcccccccaagtttcag

SEQ ID NO: 121262 - DNA, 1467 bp, Homo sapiens
  misc_feature (1)...(1467): n = a,t,c or g
ttaatacacagccaagattgagaagtgtgcttcgcacacgatggagtgggagtactctgcaactgaaccaaggcttgggcaagtgcctaacttcccagcaactctcagaggatgcaaccttctgctcaccgcctggccctgagagagttgcagcaagcggtccacgctggtttgccccagcaggcgaaaatcctgtttgatggtggttccgaaatcgcaaaatcccttataaatcaaaagaatagcccgagatagggttgagtgttgttccagtttggaacaagagtccactattaaagaacgtgggacctccaccgtcaaagggcgaaaaaaccgtctatcaggggcgatgggcccacctacgtggaccccatcaccccaattcaagtttttcttgggggtcgagggtgccgtaaaagcccctaaatcggaaacnccaacacgttgctcaacccgtcctcgaatttccatatccgggtgcggtagtcgccctgctttctcggcatctctgatagcctgagaagaaaccccaactaaatccgctgcttcacctattctccagcgccgggttattttcctcgcttccgggctgtcatcattaaactgtgcaatggcgatagccttcgtcatttcatgaccagcgtttatgcactggttaagtgtttccatgagtttcattctgaacatcctttaatcattgctttgcgtttttttggcggtatttccagcgaggtggactcaatgaccttccagggatttggggtagaaagcgaatatcccacagtcgacgggagttactctggaaggcgagccgcgcaggctgcaccattcgctcgctatgctcggtacacggctcggcgagcgctagtgataataagtgatgaggaaggggccaccaacccccgggttcggttgaaaagttatttggtgtcaaaaaatttgccgatggagttcccgtttgaaaagttgtgccattcccgaaaattattttctgtttggttggccaactggaatatgaccaaaagctgctttttcagaatggggaacgattatcgcccaccaagggttaataacggtgtcagcggtaagccaaccgaatgcaagattgattttgttgaaataatttttgcgtgggtgaatcggaaaattatttccggtgaggcacttcaaaaaccctttccagataaagaggaattacttaaccagcaggcatctacctttcatgagcagaaaaaagctggggtgatatttgaagctgaagaagttatcactcttttaacttctgtgcttaaaacgtcatctgcatcaagaactagtttaagctcacgacatcagtttgctcctgcagccacagtattgtataagggcgataaaatggtgcttaacctggacaggtctcgtgttccaactgagtgtatagagaaaattgaggccattcttaaggaacttgaaaagccagcaccctga

SEQ ID NO: 121263 - DNA, 1272 bp, Homo sapiens
atgaaactcatggaaacacttaaccagtgcataaacgctggtcatgaaatgacgaaggctatcgccattgcacagtttaatgatgacagcccggaagcgaggaaaataacccggcgctggagaataggtgaagcagcggatttagttggggtttcttctcaggctatcagagatgccgagaaagcagggcgactaccgcacccggatatggaaattcgaggacgggttgagcaacgtgttggttatacaattgaacaaattaatcatatgcgtgatgtgtttggtacgcgattgcgacgtgctgaagacgtatttccaccggtgatcggggttgctgcccataaaggtggcgtttacaaaacctcagtttctgttcatcttgctcaggatctggctctgaaggggctacgtgttttgctcgtggaaggtaacgacccccagggaacagcctcaatgtatcacggatgggtaccagatcttcatattcatgcagaagacactctcctgcctttctatcttggggaaaaggacgatgtcacttatgcaataaagcccacttgctggccggggcttgacattattccttcctgtctggctctgcaccgtattgaaactgagttaatgggcaaatttgatgaagaattttgctttgattccaacttcaaacctactactgacctaaacctaatgtctttaggaggagcgactcaagccttcgcgaaagaaaataaccaaaaagcatacaaagaaacgtacggcgtctctcatattacacgccatgatatgctgcagatccctaaacagcagcaaaacgaaaaataccaagtgcctcaattcgatcaatcaacgattaaaaatattgagtctgcaaaaggacttgatgtgtgggacagctggccgctgcaaaacgctgacggaacagtagctgaatacaacggctatcacgttgtgtttgctcttgcgggaagcccgaaagacgctgatgacacatcaatctacatgttttatcaaaaggtcggcgacaactcaatcgacagctggaaaaacgcgggccgtgtctttaaagacagcgataagttcgacgccaacgatccgatcctgaaagatcagacgcaagaatggtccggttctgcaacctttacatctgacggaaaaatccgtttattctacactgactattccggtaaacattacggcaaacaaagcctgacaacagcgcaggtaaatgtgtcaaaatctgatgacacactcaaaatcaacggggatctttag

SEQ ID NO: 121264 - DNA, 1725 bp, Homo sapiens
atgaaactcatggaaacacttaaccagtgcataaacgctggtcatgaaatgacgaaggctatcgccattgcacagtttaatgatgacagcccggaagcgaggaaaataacccggcgctggagaataggtgaagcagcggatttagttggggtttcttctcaggctatcagagatgccgagaaagcagggcgactaccgcacccggatatggaaattcgaggacgggttgagcaacgtgttggttatacaattgaacaaattaatcatatgcgtgatgtgtttggtacgcgattgcgacgtgctgaagacgtatttccaccggtgatcggggttgctgcccataaaggtggcgtttacaaaacctcagtttctgttcatcttgctcaggatctggctctgaaggggctacgtgttttgctcgtggaagccttgcaccagggattttctaaatctttctttctccccgcctatggcaggaccaccctggacgttctacagtccacagagttcagcccatcagggagtgagactggaagcccatgtgagaagtggggcctggtgccggggtctggagaaggggcttacacaggtccctgggcagccggggtctgggctgtgggcaggggtctgggtctaccagctgtgctctgcctgcagcccctctgtcgctcagaaatcccagacatacaaccagccaagctggaattgcgtgaatatgttcgccgaagcactggacatcatagcgatgctttacctgaattactgcccgccaaatacagtaatggctacgaattaaaagaagctctgcactatattcacgaaccaccgattgatgccaatatggtacaactcaatcaaggctcacatcctgcacagcagcgattgatttttgaagaactggtcgcgcatcaaatcagcttacttacacgtcgtgcttatattcgacaaatagcagcacctcgctttagcagcagcaaagttttagcaaagcgccttttagatgccctgcctttccagatgaccaacgcacaaaaaagggtttctaaagaaattctacggacaccggcgttcggtcgaagagtatctggtgtcatagaaattgccgatgggagtcgccgtcgtaaagctgcggcgcttaccgaaagtgattatcgtgttctggttggcgagctggatgatgagcagatggctgcattatccagattgggtaacgattatcgcccaacaagtgcttatgaacgtggtcagcgttatgcaagccgattgcagaatgaatttgctggaaatatttctgcgctggctgatgcggaaaatatttcacgtaagattattacccgctgtatcaacaccgccaaattgcctaaatcagttgttgctcttttttctcaccccggtgaactatctgcccggtcaggtgatgcacttcaaaaagcctttacagataaagaggaattacttaagcagcaggcatctaaccttcatgagcagaaaaaagctggggtgatatttgaagctgaagaagttatcactcttttaacttctgtgcttaaaacgtcatctgcatcaagaactagtttaagctcacgacatcagtttgctcctggagcgacagtattgtataagggcgataaaatggtgcttaacctggacaggtctcgtgttccaactgagtgtatagagaaaattgaggccattcttaaggaacttgaaaagccagcaccctga

SEQ ID NO: 121265 - DNA, 1917 bp, Homo sapiens
atgaaactcatggaaacacttaaccagtgcataaacgctggtcatgaaatgacgaaggctatcgccattgcacagtttaatgatgacagcccggaagcgaggaaaataacccggcgctggagaataggtgaagcagcggatttagttggggtttcttctcaggctatcagagatgccgagaaagcagggcgactaccgcacccggatatggaaattcgaggacgggttgagcaacgtgttggttatacaattgaacaaattaatcatatgcgtgatgtgtttggtacgcgattgcgacgtgctgaagacgtatttccaccggtgatcggggttgctgcccataaaggtggcgtttacaaaacctcagtttctgttcatcttgctcaggatctggctctgaaggggctacgtgttttgctcgtggaaggtaacgacccccagggaacagcctcaatgtatcacggatgggtaccagatcttcatattcatgcagaagacactctcctgcctttctatcttggggaaaaggacgatgtcacttatgcaataaagcccacttgctggccggggcttgacattattccttcctgtctggctctgcaccgtattgaaactgagttaatgggcaaatttgatgaaggtaaactgcccaccgatccacacctgatgctccgactggccattgaaactgttgctcatgactatgatgtcatagttattgacagcgcgcctaacctgggtatcggcacgattaatgtcgtatgtgctgctgatgtgctgattgttcccacgcctgctgagttgtttgactacacctccgcactgcagtttttcgatatgcttcgtgatctgctcaagaacgttgatcttaaagggttcgagcctgatgtacgtattttgcttaccaaatacagcaatagtaatggctctcagtccccgtggatggaggagcaaattcgggatgcctggggaagcatggttctaaaaaatgttgtacgtgaaacgaatgaagttggtaaagctgccccgatggtggattcgttaattgcgcgcgtaggagtaatggctcgcggtaatgccattactttgcctgtatgtggtcgggatgtgaagtttactcttgaagtgctccggggtgatagtgttgagaagacctctcgggtatggtcaggtaatgaacgtgaccaggagctgcttactgaggacgcactggatgatctcatcccttcttttctactgactggtcaacagacaccggcgttcggtcgaagagtatctggtgtcatagaaattgccgatgggagtcgccgtcgtaaagctgctgcacttaccgaaagtgattatcgtgttctggttggcgagctggatgatgagcagatggctgcattatccagattgggtaacgattatcgcccaacaagtgcttatgaacgtggtcagcgttatgcaagccgattgcagaatgaatttgctggaaatatttctgcgctggctgatgcggaaaatatttcacgtaagattattacccgctgtatcaacaccgccaaattgcctaaatcagttgttgctcttttttctcaccccggtgaactatctgcccggtcaggtgatgcacttcaaaaagcctttacagataaagaggaattacttaagcagcaggcatctaaccttcatgagcagaaaaaagctggggtgatatttgaagctgaagaagttatcactcttttaacttctgtgcttaaaacgtcatctgcatcaagaactagtttaagctcacgacatcagtttgctcctggagcgacagtattgtataagggcgataaaatggtgcttaacctggacaggtctcgtgttccaactgagtgtatagagaaaattgaggccattcttaaggaacttgaaaagccagcaccctga

SEQ ID NO: 121266 - DNA, 2682 bp, Homo sapiens
atgaaactcatggaaacacttaaccagtgcataaacgctggtcatgaaatgacgaaggctatcgccattgcacagtttaatgatgacagcccggaagcgaggaaaataacccggcgctggagaataggtgaagcagcggatttagttggggtttcttctcaggctatcagagatgccgagaaagcagggcgactaccgcacccggatatggaaattcgaggacgggttgagcaacgtgttggttatacaattgaacaaattaatcatatgcgtgatgtgtttggtacgcgattgcgacgtgctgaagacgtatttccaccggtgatcggggttgctgcccataaaggtggcgtttacaaaacctcagtttctgttcatcttgctcaggatctggctctgaaggggctacgtgttttgctcgtggaaggtaacgacccccagggaacagcctcaatgtatcacggatgggtaccagatcttcatattcatgcagaagacactctcctgcctttctatcttggggaaaaggacgatgtcacttatgcaataaagcccacttgctggccggggcttgacattattccttcctgtctggctctgcaccgtattgaaactgagttaatgggcaaatttgatgaaggtaaactgcccaccgatccacacctgatgctccgactggccattgaaactgttgctcatgactatgatgtcatagttattgacagcgcgcctaacctgggtatcggcacgattaatgtcgtatgtgctgctgatgtgctgattgttcccacgcctgctgagttgtttgactacacctccgcactgcagtttttcgatatgcttcgtgatctgctcaagaacgttgatcttaaagggttcgagcctgatgctgaaacaagccagggagctctgggcacactggcaaatgtagtgacctcccttgccaacctaagtgaatctttgaacaacggtgacacttcagaaatccagccagaggaccagtctgcaagtgagataactcgggcatttgataccttagctaaagcacttaataccacagacagctcctcttctccaagcttggcagatgggatagacaccagtggaggagggagcatccacgtcatcagcagagaccagtcgacacccatcattgaggttgaaggccccctcctttcagacacacacgtcacatttaagtcaattcgggaggatcgaaacggcagatcgcaaaaaacagtacatacagaaggagacatgaacatgaacatcaaaaaaattgtaaaacaagccacagttctgacttttacgactgcacttctggcaggaggagcgactcaagccttcgcgaaagaaaataaccaaaaagcatacaaagaaacgtacggcgtctctcatattacacgccatgatatgctgcagatccctaaacagcagcaaaacgaaaaataccaagtgcctcaattcgatcaatcaacgattaaaaatattgagtctgcaaaaggacttgatgtgtgggacagctggccgctgcaaaacgctgacggaacagtagctgaatacaacggctatcacgttgtgtttgctcttgcgggaagcccgaaagacgctgatgacacatcaatctacatgttttatcaaaaggtcggcgacaactcaatcgacagctggaaaaacgcgggccgtgtctttaaagacagcgataagttcgacgccaacgatccgatcctgaaagatcagacgcaagaatggtccggttctgcaacctttacatctgacggaaaaatccgtttattctacactgactattccggtaaacattacggcaaacaaagcctgacaacagcgcaggtaaatgtgtcaaaatctgatgacacactcaaaatcaacggagtggaagatcacaaaacgatttttgacggagacggaaaaacatatcagaacgttcagcagtttatcgatgaaggcaattatacatccggcgacaaccatacgctgagagaccctcactacgttgaagacaaaggccataaataccttgtattcgaagccaacacgggaacagaaaacggataccaaggcgaagaatctttatttaacaaagcgtactacggcggcggcacgaacttcttccgtaaagaaagccagaagcttcagcagagcgctaaaaaacgcgatgctgagttagcgaacggcgccctcggtatcatagagttaaataatgattacacattgaaaaaagtaatgaagccgctgatcacttcaaacacggtaactgatgaaatcgagcgcgcgaatgttttcaaaatgaacggcaaatggtacttgttcactgattcacgcggttcaaaaatgacgatcgatggtattaactcaaacgatatttacatgcttggttatgtatcaaactctttaaccggcccttacaagccgctgaacaaaacagggcttgtgctgcaaatgggtcttgatccaaacgatgtgacattcacttactctcacttcgcagtgccgcaagccaaaggcaacaatgtggttatcacaagctacatgacaaacagaggcttcttcgaggataaaaaggcaacatttgcgccaagcttcttaatgaacatcaaaggcaataaaacatccgttgtcaaaaacagcatcctggagcaaggacagctgacagtcaactaa

SEQ ID NO: 121267 - DNA, 1207 bp, Homo sapiens
atgaaactcatggaaacacttaaccagtgcataaacgctggtcatgaaatgacgaaggctatcgccattgcacagtttaatgatgacagcccggaagcgaggaaaataacccggcgctggagaataggtgaagcagcggatttagttggggtttcttctcaggccatcagagatgccgagaaagcagggcgactaccgcacccggatatggaaattcgaggacgggttgagcaacgtgttggttatacaattgaacaaattaatcatatgcgtgatgtgtttggtacgcgactgcgacgtgctgaagacgtatttccaccgggatttggggattttgcccgatttcgggaaccaccatcaaaacaggattttcgccctgttgggccaaaccagcgtggaccgcttgctgcaactctctcagggccaggcggtgaagggcaatcagcttttgcccgtctcactggtgaaaagaaaaaccaccctggcgcccaatacgcaaaccgcctctccccgcgcgttggccgattcattaatgcagctggcacgacaggtttcccgactggaaagcgggcaggctatcagagatgccgagaaagcagggcgactgccgcacccggatatggaaattcgaggacgggttgagcaacgtgttggttatacaattgaacaaattaatcatatgcgtgatgtgtttggtacgcgattgcgacgtgctgaagacgtatttccaccggtgatcggggttgctgcccataaaggtggcgtttacaaaacctcagtttctgttcatcttgctcaggatctggctctgaaggggctacgtgttttgctcgtggaagctgcaagaggactgaaaaaaaggggtctggccgggacagcccaggggcccggcgaacccggggaggcccccaagggcaaaaagggcaaaacagaacccggccacgaaagaaaaggaaattggacggggaaggggccccagatccgggagggaacctcaccgaacccgcccagggaacacgggggcgaatgtgcaccgccccccccgagcgcaaagagaaagcaacccaaagctcagaagagaaaagcaaattcaaacgcgcatccgcggcaaccgaagcctaagaagaagcggcccaaaagacaaaccaacagcagaacaaataccaggagtggtaaacgccagaacaaacagccggaagagccgaaa

SEQ ID NO: 121268 - DNA, 3198 bp, Homo sapiens
  misc_feature (1)...(3198): n = a,t,c or g
atggggacaggcaagaagcaagctgcaaacctcagctttgtgatgagtgctcagagacatatgagcactcatcacagtagaggagcaaaaatggcagctagggtcctgcgtggacagtcaggaaaggcccctctgccaagtccttgtgatgccccttcatcagaatatgttccttcaagggacccaggctttagtggttctcctcagagaggtgtggtcaaaacactggcaagacacacccttctcaggcatctccagaatggccccctgctcctgcccagtgtgcgctggcgagtttatgggaaggtgcctggagaggacactctgggaactggggctctgggaaagagaaagtggaaaaataaggcaacttctggaagcatgggcagcagggaggctaacgatagagcagggcttctcaacttcggctctgctgatattcagggcagggccactccttgctggggggactgcagctgtcgagcagcatccctaatctccaatcaggagtgcataaacgctggtcatgaaatgacgaaggctatcgccattgcacagtttaatgatgacagcccggaagcgaggaaaataaccgggcgctggagaataggtgaagcagcggatttagttggggtttcttctcaggctatcagagatgccgagaaagcagggcgactaccgcacccggatatggaaattcgaggacgggttgagcaacgtgttggttatacaattgaacaaattaatcatatgcgtgatgtgtttggtacgcgattgcgacgtgctgaagacgtatttccaccggtgatcggggttgctgcccataaaggtggcgtttacaaaacctcagtttctgttcatcttgctcaggatctggctctgaaggggctacgtgttttgctcgtggaaggtaacgacccccagggaacagcctcaatgtatcacggatgggtaccagatcttcatattcatgcagaagacactctcctgcctttctatcttggggaaaaggacgatgtcaattatgcaataaagcccacttgctggccggggcttgacattattccttcctgtctggctctgcaccgtattgaaactgagttaatgggcaaatttgatgaagagtggctgtgcacccccattgtgaataagacaccggcgttcggtcgaagagtatctggtgtcatagaaattgccgatgggagtcgccgtcgtaaagctgctgcacttaccgaaagtgattatcgtgttctggttggcgagctggatgatgagcagatggctgcattatccagattgggtaacgattatcgcccaacaagtgcttatgaacgtggtcagcgttatgcaagccgattgcagaatgaatttgctggaaatatttctgcgctggctgatgcggaaaatatttcacgtaagattattacccgctgtatcaacaccgccaaattgcctaaatcagttgttgctcttttttcttcaccccgaggtgtagtgagagaagcagctttcaaggtgatttctctgcatggaggttatgtccagatctggaaagcacccagccaggattccgtttctggatcaggtagtgcaatgtcaagagcagaaagaatccagtccaaaccctatgagatgagtaatgttatattcactttacagatggataaattgaggagcagagatgaaacggctgtcgcaagatcactcaggtcggcgccaactcaattgacagttggaaaaaacccgggccgtgtttttaaagacagcgataagttcgacgccaacgatccgatcctgaaagatcagacgcaagaatggtccggttctgcaacctttacatctgacggaaaaatccgtttattctacactgactattccggtaaacattacggcaaacaaagcctgacaacagcgcaggtaaatgtgtcaaaatctgatgacacactcaaaatcaacggagtggaagatcacaaaacgatttttgacggagacggaaaaacatatcagaacgttcagcagtttatcgatgaaggcaattatacatccggcgacaaccatacgctgagagaccctcactacgttgaagacaaaggccataaataccttgtattcgaagccaacacgggaacagaaaacggataccaaggcgaagaatctttatttaacaaagcgtactacggcggcggcacgaacttcttccgtaaagaaagccagaagcttcagcagagcgctaaaaaacgcgatgctgagttagcgaacggcgccctcggtatcatagagttaaataatgattacacattgaaaaaagtaatgaagccgctgatcacttcaaacacgggattttgccgatttcggaaccaccatcaaacaggattttcgcctgctggggcaaaccagcgtggaccgcttgctgcaactctctcagggccaggcggtgaagggcaatcagctgttgcccgtctcactggtgaaaagaaaaaccaccctggcgcccaatacgcaaaccgcctctccccgcgcgttggccgattcattaatgcagctggcacgacaggtttcccgactggaaagcgggcaatcagaaaatctgatggcacctacagggaacatgacggtatctgcgagatccatgttgctaaatatgctgaaatattcggattgacctctgcggaagccagtaaggatatacggcaggcattgaagagtttcgcggggaaggaagtggttttttatcgccctgaagaggatgccggcgatganaaaggctatgaatcttttccttggtttatcaaacgtgcgcacagtccatccagagggctttacagtgtacatatcaacccatatctcattcccttctttatcgggttacagaaccggtttacgcagtttcggcttagtgaaacaaaagaaatcaccaatccgtatgccatgcgtttatacgaatccctgtgtcagtatcgtaagccggatggctcaggcatcgtctctctgaaaatcgactggatcatagagcgttaccagctgcctcaaagttaccagcgtatgcctgacttccgccgccgcttcctgcaggtctgtgttaatgagatcaacagcagaactccaatgcgcctctcatacattgagaaaaacaaaggccgccagacgactcatatcgtattttccttccgcgatatcacttccatgacgacaggatag

SEQ ID NO: 121269 - DNA, 3779 bp, Homo sapiens
  misc_feature (1)...(3779): n = a,t,c or g
atgaaactcatggaaacacttaaccagtgcataaacgctggtcatgaaatgacgaaggctatcgccattgcacagtttaatgatgacagcccggaagcgaggaaaataacccggcgctggagaataggtgaagcagcggatttagttggggtttcttctcaggctatcagagatgccgagaaagcagggcgactaccgcacccggatatggaaattcgaggacgggttgagcaacgtgttggttatacaattgaacaaattaatcatatgcgtgatgtgtttggtacgcgattgcgacgtgctgaagacgtatttccaccggtgatcggggttgctgcccataaaggtggcgtttacaaaacctcagtttctgttcatcttgctcaggatctggctctgaaggggctacgtgttttgctcgtggaaggtaacgacccccagggaacagcctcaatgtatcacggatgggtaccagatcttcatattcatgcagaagacactctcctgcctttctatcttggggaaaaggacgatgtcacttatgcaataaagcccacttgctggccggggcttgacattattccttcctgtctggctctgcaccgtattgaaactgagttaatgggcaaatttgatgaaggtaaactgcccaccgatccacacctgatgctccgactggccattgaaactgttgctcatgactatgatgtcatagttattgacagcgcgcctaacctgggtatcggcacgattaatgtcgtatgtgctgctgatgtgctgattgttcccacgcctgctgagttgtttgactacacctccgcactgcagtttttcgatatgcttcgtgatctgctcaagaacgttgatcttaaagggttcgagcctgatgagttggacaagctgatctccgaccggcctgaaagctgccggcgccccggcaaaccgggggaaccagaggcccccgtgctgactcacgccaccacagtggccgtggcgcatggctgcctggctgtctcccagctcccaccccagccactgatgaccctgtccctgcagtcagtccccctgcaccaccaggtccagccccaggcacatcttgctccagactctccagcaccagcccagaccccgccactgcacgccctgccggacctcagccccagcccgctcccccaccccgccatgggaagggctcctgtagacttcatcaacatcagcaccgacatgaacactgaggtggatgccctcgacccgagcatcatggacttcgctctgcaggggaacctgtgggaggagatgaaggatgagggattcagcttggacacactgggcgcctttgcagactccccgcttggctgtgacctgggggcctcaggcctaacccctgcctcgggtggcagcgaccagtccttcccagacttgcaggcatcatttcaggcagggatcgtgaacgccatttaccactcagagcagaggcttggagaggtagggttggctgagtgtgtgtcctggagctcagtggcacagctcagctacgctatagccgacaacgcttaccgaatgatgtgtgctgaactaaataaccatttcatcctcatttctggagagagtggggcagggaaaacagaggcctccaagaaaattctcgagtattttgcagtgacctgcccaatgacccagtcactacaaatagcccgtgacagactgctgttctccaacccagtgctggaggcttttggaaatgccagaacgctccggaatgacaactccagcagatttgggaaatacatggatatacaatttgattttcagggcattcccgtaggtgggcatatcatcagttacttgatagagaagtcccgagttgtctaccaaaacgaaggcgagcggaatttccacatcttctaccagctgctggcaggtggcgaagaggagcgcctgtcttacctgggactcgagcgagacccccagctgtataaatacctctcacagtatattcgcactgctttcaaaccaacaggttttggagagggactgatttgcataaacccatcccttcagggacaggagcagatgttgctggttgtgcgggaaggcaaatttgatgacttcctcataaggcatcagatcaaatacctggggctgatggagcacctgcgggtgagacgggctggttttgcataccgaaggaaatacgagcatttcttgcaaaggtttagggacactggggaacaaatggtggacattgagaactatgaggtgaatctctttggaattattgccagtgtcttacacctggggaacattggttttgaagaagacgaccaaggctgtgccactatcccagacacccatgagatcaagtggatagccaaggtgatctgcccgttgacactagaactctctgtctacgctagagatgcaatggcaaaggctgtttatggacgaacgtttacttggctggtcaacaaaatcaattcctccttagttaacaagtgggagccaattaaatatttcaacaacaagatcatctgtgatttggtagaagagagacataaaggaatcatatctattctggatgaagaatgcattcggcctggtcctgctacagacttgagtttcctggagaaattggaagagaaagtgggcaaacatgcacacttcgaaactcaggcaccgtgtatgaaatctaacaatgggctctttgttcatcttgggcacggtcacctggaatgctgtaggcataggtttggttatgccggtactgccgggcctcttgcgggatatcgtccattccgacagcatcgccagtcactatggcgtgctgctagcgctatatgcgttgatgcaatttctatgcgcacccgttctcggagcactgtccgaccgctttggccgccgcccagtcctgctcgcttcgctacttggagccatgtcagctgtccttgctccaggatgctgtttttgacaacggatgttttatagcctttgatgttcattaagaagcttggcgcaaatgttgcctttttatcctcgaagaagcctctgtttgtcatgtagcttgtgataaccacattgttgcctttggcttgcggcacttccacgagcaaaacacgtagccccttcagagccagatcctgagcaagatgaacagaaactgaggttttgtaaacgccacctttatgggcagcaaccccgatcaccggtggaaatacgtcttcagcacgtcgcaatcgcgtaccaaacacatcacgcatatgattaatttgttcaattgtataaccaacacgttgctcaacccgtcctcgaatttccatatccgggtgcggtagtcgccctgctttctcggcatctctgatagcctgagaagaaaccccaactaaatccgctgcttcacctattctccagcgccgggttattttcctcgcttccgggctgtcatcattaaactgtgcaatggcgatagccttcgtcatttcatgaccagcgtttatgcactgggtaaggggttccatgaggttcattctgaacataccttaatcaatggtttgcgggtttttatataancttgcgaattaatgtggagggaccaccaaatcgcagagtttcaaaaacccgagggtgtgttaatataagacaactctccaaagggagtatagaggagcacacccttagncactaatatcattgcgctccccgacccgggacccgacctagggagggacttgcngagacccaaagaaaacgtgtttggaaatacttttaccttagcgcagaga

SEQ ID NO: 121270 - DNA, 2389 bp, Homo sapiens
atgaaactcatggaaacacttaaccagtgcataaacgctggtcatgaaatgacgaaggctatcgccattgcacagtttaatgatgacagcccggaagcgaggaaaataacccggcgctggagaataggtgaagcagcggatttagttggggtttcttctcaggctatcagagatgccgagaaagcagggcgactaccgcacccggatatggaaattcgaggacgggttgagcaacgtgttggttatacaattgaacaaattaatcatatgcgtgatgtgtttggtacgcgattgcgacgtgctgaagacgtatttccaccggtgatcggggttgctgcccataaagccaaaggactgactgctctttctcctcaaacagactggaacagaaaaagaaattcaagtaaacctttagcacaagtgcaagaagaagattctgcatggcatccagagtgcctccaaaagactagacaagcctggtgtgacaatctaaaaacttgtcacacttcacatggatctgtcatggcggaaacagcggttatcaatcacaagaaacgtaaaaatagcccgcgaatcgtccagtcaaacgacctcactgaggcggcatatagtctctcccgggatcaaaaacgtatgctgtatctgttcgttgaccagatcagaaaatctgatggcaccctacaggaacatgacggtatctgcgagatccatgttgctaaatatgctgaaatattcggattgacctctgcggaagccagtaaggatatacggcaggcattgaagagtttcgcggggaaggaagtggttttttatcgccctgaagaggatgccggcgatgaaaaaggctatgaatcttttccttggtttatcaaacgtgcgcacagtccatccagagggctttacagtgtacatatcaacccatatctcattcccttctttatcgggttacagaacccgttaacgcagtttcggcttagtgaaacaaaagaaatcaccaatccgtatgccatgcgtttatacgaatccctgtgtcagtatcgtaagccggatggctcaggcatcgtctctctgaaaatcgactggatcatagagcgttaccagctgcctcaaagttaccagcgtatgcctgacttccgccgccgcttcctgcagtgcataaacgctggtcatgaaatgacgaaggctatcgccattgcacagtttaatgatgacagcccggaagcgaggaaaataacccggcgctggagaataggtgaagcagcggatttagttggggtttcttctcaggctatcagagatgccgagaaagcagggcgactaccgcacccggatatggaaattcgaggacgggttgagcaacgtgttggttatacaattgaacaaattaatcatatgcgtgatgtgtttggtacgcgattgcgacgtgctgaagacgtatttccaccggtgatcggggttgctgcccataaaggtggcgtttacaaaaaccttaatttctgttcatcttgctcaagatctggctctgaaggggctacctggtttgcttcggggaaggtaacgacccccaaggaaacaacctcaatgtatcacggatgggtaccagatcttcatattcatgcagaagacactctcctgcctttctatcttggggaaaaggacgatgttcctttatgcaataaaacccacttgctgggccggggcttggcattttttccttccctgtcgggctttgcaccgtattgaaactgagttaatgggcaaatttgatgaaggtaaactgcccaccgatccacacctgatgctccgactggccattgaaactgttgctcatgactatgatgtcatagttattgacagcgcgcctaacctgggtatcggcacgattaatgtcgtatgtgctgctgatgtgctgattgttcccacgcctgctgagttgtttgactacacctccgcactgcagtttttcgatatgcttcgtgatctgctcaagaacgttgatcttaaagggttcgagcctgatgtatttattcgcgataagctcatggagcggcgtaaccgtcgcacaggaaggacagagaaagcgcggatctgggaagtgacggacagaacggtcaggacctggattggggaggcggttgccgccgctgctgctgacggtgtgacgttctctgttccggtcacaccacatacgttccgccattcctatgcgatgcacatgctgtatgccggtataccgctgaaagttctgcaaagcctgatgggacataagtccatcagttcaacggaagtctacacgaaggtttttgcgctggatgtggctgcccggcaccgggtgcagtttgcgatgccggagtctgatgcggttgcgatgctgaaacaattatcctga

SEQ ID NO: 121271 - DNA, 1483 bp, Homo sapiens
atgtgtgaagttaacctcaatcatccaccccaaaaagctggcaaaaaaaatcccgccacccaggggatcaccaaaccaatccacaagcaaagggtggatgcaatgggcctgacatcctgcaggcccgaaaagatccgaaacaccaggatgttcagaatgaaactcatggaaacacttaaccagtgcataaacgctggtcatgaaatgacgaaggctatcgccattgcacagtttaatgatgacagcccggaagcgaggaaaataacccggcgctggagaataggtgaagcagcggatttagttggggtttcttctcaggctatcagagatgccgagaaagcagggcgactaccgcacccggatatggaaattcgaggacgggttgagcaacgtgttggttatacaattgaacaaattaatcatatgcgtgatgtgtttggtacgcgattgcgacgtgctgaagacgtatttccaccggtgatcggggttgctgcccataaacggtggcgtttacaaaacctcagtttctgttcatcttgctcaggatctggctctgaacgggctacgtgttttgctcgtggaagttcagaccaagttgaactccttggcctgcggaggaaaagctcagtgtgcatgtggcaggaggggcggcatatgggagacactgaccagctggctgcacagtcgggaaacctgtcctgccagctgcattaatgaatcggccaacgcgcggggagaggcggtttgcgtattgggcgccagggtggtttttcttttcaccaatgaaaccggcaacagcttgattgcccttcaccggctggcccctgaaagagttgcagcaaagcggtccacgctggttttgccccaccaggcgaaaatcctgtttgatggtggttccgaaatcggcaaaatccgatgcatcttctcgctttctgggaagggaaggaagcctcagggaccgaggctctggcttggaaggaagataaggattaatctgatttatgccatctactttggcttctgtactcaggccagtcagtggttgctgctttccctcttccacgagcaaaacacgtagccccttcagagccagatcctgagcaagatgaacagaaactgaggttttgtaaacgccacctttatgggcagcaaccccgatcaccggtggaaatacgtcttcagcacgtcgcaatcgcgtaccaaacacatcacgcatatgattaatttgttcaattgtataaccaacacgttgctcaacccgtcctcgaatttccatatccgggtgcggtagtcgccctgctttctcggcatctctgatagcctgagaagaaaccccaactaaatccgctgcttcacctattctccagcgccgggttattttcctcgcttccgggctgtcatcattaaactgtgcaatggcgatagccttcgtcatttcatgaccagcgtttatgcactggttaagtgtttccatgagtttcat

SEQ ID NO: 121272 - DNA, 3644 bp, Homo sapiens
  misc_feature (1)...(3644): n = a,t,c or g
atgaaactcatggaaacacttaaccattgcataaacgctggtcatgaaatgacgaaggctgtcgccattgcacagtttaatgatgacagcccggaagcgaggaaaataacccggcgctggagaataggtgaagcagcggatttagttggggtttcttctcaggctatcagagatgccgagaaagcagggcgactaccgcacccggatatggaaattcgaggacgggttgagcaacgtgttggttatacaattgaacaaattaatcatatgcgtgatgtgtttggtacgcgattgcgacgtgctgaagacgtatttccaccggtgatcggggttgctgcccataaaggtggcgtttacaaaacctcagtttctgttcatcttgctcangatctggctctgaaggggctacgtgttttgctcgtggaaggtaacgacccccagggaacagcctcaatgtatcacggatgggtaccagatcttcatattcatgcagaagacactctcctgcctttctatcttggggaaaaggacgatgtcacttatgcaataaagcccacttgctggccggggcttgacattattccttcctgtctggctctgcaccgtattgaaactgagttatggggcaaattgatgaaggcagatccttcatgcctgggcctccacccaccacccactggggcggtcaagccagtagcaggtcagcaactctctggacagagctgcgaagggcaactgaaagcctctctgccactgcccctgcagtggaactacccatgctaccctcagactaataaaggagcaaagaccctacgtgccttatgcacacctccaacaagctgtagtcgacccaaggagaggaggccacatggttcttattatgttgtacgtgtaacgggtgacgttggtaaaggtcagatccggatgagaactgttgttgaacaggccattgatcaacgctcttcaactggtgcctggagaaatgctctttctatttgggaacctgtctgcaatgaaattttctatcgtctgattaaaccacgctgggagattagatgggggaagcgtgcgcctgttattccaaaacatacgctcaatactcaaccggttgaagatacttcgttatcgacaccagctgccccgatggtggattcgttaattgcgcgcgtaggagtaatggctcgcggtaatgccattactttgcctgtatgtggtcgggatgtgaagtttactcttgaagtgctccggggtgatagtgttgagaagacctctcgggtatggtcaggtaatgaacgtgaccaggagctgcttactgaggacgcactggatgatctcatcccttcttttctactgactggtcaacagacaccggcgttcggtcgaagagtatctggtgtcatagaaattgccgatgggagtcgccgtcgtaaagctgctgcacttaccgaaagtgattatcgtgttctggttggcgagctggatgatgagcagatggctgcattatccagattgggtaacgattatcgcccaacaagtgcttatgaacgtggtcagcgttatgcaagccgattgcagaatgaatttgctggaaatatttctgcgctggctgatgcggaaaatatttcacgtaagattattacccgctgtatcaacaccgccaaattgcctaaatcagttgttgctcttttttctcaccccggtgaagctatctgcccggtcaggatgttcagaatgaaactcatggaaacacttaaccagtgcataaacgctggtcatgaaatgacgaaggctatcgccattgcacagtttaatgatgacagcccgggaagcgaggaaaataacccggcgctggagaataggtgaagcagcggatttagttggggtttcttctcaggctatcagagatgccgagaaagcagggcgactaccgcacccggatatggaaattcgaggacgggttgagcaacgtgttggttatacaattgaacaaattaatcatatgcgtgatgtgtttggtacgcgattgcgacgtgctgaagacgtatttccaccggtgatcggggttgctgcccataaagactgggaccacggtccatatcgtatcgtcgtccagtttattaggcggggaccatggtccatctcgtatcggcggtctattattagtctgtgactacgggcctctcgtatcgtcgtctgggatcagcggtcctactcgtatcgtcggtctgattattagtctgggaccaggataccacttgtgttttcggtctgattatcggactgggatcacggatccactttatattggtgatgcgactattcgcgtgagtctacgagtatattctttgccgtcaaggtcaaggattgaacatgtcgtcgctaactgtggaatgatccctaaacagcagcaaaacgaaaaataccaagtgcctcaattcgatcaatcaacgattaaaaatattgagtctgcaaaaggacttgatgtgtgggacagctggccgctgcaaaacgctgacggaacagtagctgaatacaacggctatcacgttgtgtttgctcttgcgggaagcccgaaagacgctgatgacacatcaatctacatgttttatcaaaaggtcggcgacaactcaatcgacagctggaaaaacgcgggccgtgtctttaaagacagcgataagttcgacgccaacgatccgatcctgaaagatcagacgcaagaatggtccggttctgcaacctttacatctgacggaaaaatccgtttattctacactgactattccggagtaatggctcgcggtaatgccattactttgcctgtatgtggtcgggatgtgaagtatactcttgaagtgctccggggtgatagtgttgagaagacctctcgggtatggtcaggtaatgaacgtgaccaggagctgcttactgaggacgcactggatgatctcatcccttcttttctactgactggtcaacagacaccggcgttcggtcgaagagtatctggtgtcatagaaattgccgatgggagtcgccgtcgtaaagctgctgcacttaccgaaagtgattatcgtgttctggttggcgagctggatgatgagcagatggctgcattatccagattgggtaacgattatcgcccaacaagtgcttatgaacgtggtcagcgttatgcaagccgattgcagaatgaatttgctggaaatatttctgcgctggctgatgcggaaaatatttcacgtaagattattacccgctgtatcaacaccgccaaattgcctaaatcagttgttgctcttttttctcaccccggtgaactatctgcccggtcaggtgatgcacttcaaaaagcctttacagataaagaggaattacttatgcagcaggcatctaaccttcatgagcagaaaaaagctggggtgatatttgaagctgaagaagttatcactcttttaacttctgtggctaaaacgtcatctgcatccagaactagtttaagctcacgacatcagtttggctcctggagcgacagtatttgtataagggcgataaaatggtgcttaacctggacatgtctcgtggttcaactggagtgtttagatcgcttgcatgcctgcaggtcgactctagaggatcccccatag

SEQ ID NO: 121273 - DNA, 2727 bp, Homo sapiens
atgaaactcatggaaacacttaaccagtgcataaacgctggtcatgaaatgacgaaggctatcgccattgcacagtttaatgatgacagcccggaagcgaggaaaataacccggcgctggagaataggtgaagcagcggatttagttggggtttcttctcaggctatcagagatgccgagaaagcagggcgactaccgcacccggatatggaaattcgaggacgggttgagcaacgtgttggttatacaattgaacaaattaatcatatgcgtgatgtgtttggtacgcgattgcgacgtgctgaagacgtatttccaccggtgatcggggttgctgcccataaaggtggcgtttacaaaacctcagtttctgttcatcttgctcaggatctggctctgaaggggctacgtgttttgctcgtggaagcggttatcaatcacaagaaacgtaaaaatagcccgcgaatcgtccagtcaaacgacctcactgaggcggcatatagtctctcccgggatcaaaaacgtatgctgtatctgttcgttgaccagatcagaaaatctgatggcaccctacaggaacatgacggtatctgcgagatccatgttgctaaatatgctgaaatattcggattgacctctgcggaagccagtaaggatatacggcaggcattgaagagtaaagaggggaaggaagtggttttttatcgccctgaagaggatgccggcgatgaaaaaggctatgaatcttttccttggtttatcaaacgtgcgcacagtccatccagagggctttacagtaaccggtttacgcagtttcggcttagtgaaacaaaagaaatcaccaatccgtatgccatgcgtttatacgaatccctgtgtcagtatcgtaagccggatggctcaggcatcgtctctctgaaaatcgactggatcatagagcgttaccagctgcctcaaagttaccagcgtatgcctgacttccgccgccgcttcctgcagtgcataaacgctggtcatgaaatgacgaaggctatcgccattgcacagtttaatgatgacagcccggaagcgaggaaaataacccggcgctggagaataggtgaagcagcggatttagttggggtttcttctcaggctatcagagatgccgagaaagcagggcgactaccgcacccggatatggaaattcgaggacgggttgagcaacgtgttggttatacaattgaacaaattaatcatatgcgtgatgtgtttggtacgcgattgcgacgtgctgaagacgtatttccaccggtgatcggggttgctgcccataaaggtggcgtttacaaaacctcagtttctgttcatcttgctcaggatctggctctgaaggggctacgtgttttgctcgtggaaggtaacgacccccagggaacagcctcaatgtatcacggatgggtaccagatcttcatattcatgcagaagacactctcctgcctttctatcttggggaaaaggacgatgtcacttatgcaataaagcccacttgctggccggggcttgacattattccttcctgtctggctctgcaccgtattgaaactgagttaatgggcaaatttgatgaaggtaaactgcccaccgatccacacctgatgctccgactggccattgaaactgttgctcatgactatgatgtcatagttattgacagcgcgcctaacctgggtatcggcacgattaatgtcgtatgtgctgctgatgtgctgattgttcccacgcctgctgagttgtttgactacacctccgcactgcagtttttcgatatgcttcgtgatctgctcaagaacgttgatcttaaagggttcgagcctgattgggatgttaaattctcctattattattgtgtgggagtctctgaaattgaggcaataattaacagcttaccaaccaaaaaaagtccagaaacagatggattcacatccaaattctaccagaggtacaaggaggagctggtaccattccttctgaaactattccaatcaacagaaaaagagggaatccttcctaactcattttatgaggccagcatcatcctgataccaaagcctggcagagacacaataaacaaagagaattttagaccaatatccctgatgaacatcaatgcaaaaatcctcaataaaatactggcaaaccgaatccagcagcacatcaaaaagcttatccaccatgatcaagtaggcttcatccgtgggatgcaaggctggttcaacatacacaaatcaataaacgtaatccagcatataaacagaaccaaagacaaaaaccatacgattatctcaatagatgcagaaaaggcctttgacaaaattcgacagcgcttcatgctaaaaactctcagcaaattaggtattgatgggacatatctcaaaataataagagctacttatgacaaacccacagccaatatcatactgaatgggcaaaaactggacgcattccctttgaaaactggcacaagacagggatgccctctctcaccactcctattcaacacagtgttggaagttctggccagggcaatcaggcaggagaaagaaataaagggtattcaattaggaaaagaggaagtcaaattgtccctctttgcagatgacatgactgtatatttagaaaatcccatcgtctcagcccaaaatctccttaagctgataagcaacttcagcaaagtctcaggataa

SEQ ID NO: 121274 - DNA, 3255 bp, Homo sapiens
tttaatgatgacagcccggaagcgaggaaaataacccggcgctggagaataggtgaagcagcggatttagttggggtttcttctcaggctatcagagatgccgagaaagcagggcgactaccgcacccggatatggaaattcgaggacgggttgagcaacgtgttggttatacaattgaacaaattaatcatatgcgtgatgtgtttggtacgcgattgcgacgtgctgaagacgtatttccaccgtttaatgatgacagcccggaagcgaggaaaataacccgccgctggagaataggtgaagcagcggatttagttggggtttcttctcaggctatcagagatgccgagaaagcagggcgatctaccgccacccggatattggaaattcgaggacgggttgagcaacgtgttggttatacaattgaacaaattaatcatatgcgtgatgtgtttggtacgcgattgcgacgtgctgaagacgtatttccaccggtgatcggggttgctgcccataaaggtggcgtttacaaaacctcagtttctgttcatcttgctcaggatctggctctgaaggggctacgtgttttgctcgtggaaggcaggtcttttcctcagacagaggcttgtttactacagtattcctcatgggatgtatcctctgagaagccagctgctctgaataaaaataagtcagaaatgagaggggattttgccgatttcggaaccaccatcaaacaggattttcgcctgctggggcaaaccagcgtggaccgcttgctgcaactctctcagggccaggcggtgaagggcaatcagctgttgcccgtctcactggtgaaaagaaaaaccaccctggcgcccaatacgcaaaccgcctctccccgcgcgttggccgattcattaatgcagctggcacgacaggtttcccgactggaaagcgggcaggccccccaagcccagcccaccggaactccagctgacagggagtgggaacgcagcaagtggaacggcagcccaagttgccactcaggcttctccttcaacacttccctgaaagttagggagcgggctccggctttggccagccaagaaaggggctctcacagtgcagcggctatcagagatgccggagaaagcaggggcgactaccggaaccgggatatgggaaattcgagggacggggttgagcaacgtgtttggttatacaattgaacccacattaatcatatgcgtgatgtgttttggtacgcgaattgcgacggtgcctgaagacgtatattccaccggtgatcggggttgcctgcccataaaggtggcgtttacaaaaccctcatttcttgttcatcttgctcaggatctggctctgaaggggctacctggttttgctcgtggaaggtaacgacccccagggaaacagcctcaatgtatcacggatgggtaccagatcttcatattcatgcagaagacactctcctgcctttctatcttgcgatgaagtcagattgtctcttatacaataaagcccacttgctggccgggggcttgacatttattccttcctgtctggctctgcaccgtattgaaactgagttaatgggcaaatttgatgaaggtaaactgcccaccgatccacacctcatgctccgacaaaccattgaaactgttgctcatgctcatgactatgatgtcatagttattgacagcgcgcctaacctgggtatcggcacgattaatgtcgtatgtgctgctgatgtgcctgattgttcccacgcctgctgagttgtttgactacacctccgcactggcagtttttcgatatgcttcgtgatctgctcaagaacgttgatcttaaagggttcgagcctgatgtacgtattttgcttactacaatacagcaatagtaatggctctcagtccccgtggatggaggagcaaattcgggatgcctggggaagcatggttctaaaaaatgttgtacgtgaaacggatgaagttggtaaaggtcagatccggatgagaactgtttttgaacaggccattgatcaacgctcttcaactgatacttcgttatcgacaccagctgccccgatggtggattcgttaattgcgcgcgtaggagtaatggctcgcggtaatgccattactttgcctgtatgtggtcgggatgtgaagtttactcttgaagtgctccggggtgatagtgttgagaagacctctcgggtatggtcaggtaatgaacgtgaccaggagctgcttactgaggacgcactggatgatctcatcccttcttttctactgactggtcaacagacaccggcgttcggtcgaagagtatctggtgtcatagaaattgccgatgggagtcgccgtcgtaaagctgctgcacttaccgaaagtgattatcgtgttctggttggcgagctggatgatgagcagatggctgcattatccagattgggtaacgattatcgcccaacaagtgcttatgaacgtggtcagcgttatgcaagccgattgcagaatgaatttgctggaaatatttctgcgctggctgatgcggaaaatatttcacgtaagattattacccgctgtatcaacaccgccaaattgcctaaatcagttgttgctcttttttctcaccccggtgaactatctgcccggtcaggtgatgcacttcaaaaagcctttacagataaagaggaattacttaagcagcaggcatctaaccttcatgagcagaaaaaagctggggtgatatttgaagctgaagaagttatcactcttttaacttctgtgcttaaaacgtcatctgcatcaagaactagtttaagctcacgacatcagtttgctcctggagcgacagtattgtataagggcgataaaatgtttatcacagttaaaattgctaaacgcagtcaggcaccgtgtatgaaatctaacaatgcgctcatcgtcatcctcggcaccgtcaccctggatgctgtaggcataggcttggttatgccggtactgccgggcctcttgcgggatatcgtccattccgacagcatcgccagtcactatggcgtgctgctagcgctatatgcgttgatgcaatttctatgcgcacccgttctcggagcactgtccgaccgctttggccgccgcccagtcctgctcgcttcgctacttggagccactatcgactacgcgatcatggcgaccacacccgtcctgtggatctacccactagtcaattcaccatcttgttga

SEQ ID NO: 121275 - DNA, 468 bp, Homo sapiens
atgtaccgcggcgcgctgaaaagcatcctgtccgaactggtacgtcaggatcgtctgatcgttgtcgagaagttctctgtagaagcgccgaaaactaagctgctggcacagaaactgaaagacatggctaaccgggtcgataccagttgcatcgcgtacgtcaaccttgtgcatgcatcgttcctgcatctgcaaccgatggtggcgattgtcaccaatatcgaagccgaccacatggatacctaccagggcgactttgagaatttaaaacagacttttattaattttctgcacaacctgccgttttacggtcgtgcggtgatgtgtgttgatgatccggtgatccgcgaattgttaccgcgagtggggcgtcagaccacgacttacggcttcagcgaagatatcaaatttctcttttctgaagaatattctttaaaatttttatggtttagtactgatgacagttaa

SEQ ID NO: 121276 - DNA, 294 bp, Homo sapiens
atgtacgggttctacgactgggaaaacttctataacgggcgccataataaaccatgtagcgagcagcgttatacctttaaaaataccaagccgtatttatcctgggttgacaccggatttagtctctacttgcatgcgtatggcacctacggttctgcgaatcgcgtgaatttcctcgacgatatgttcctgtacggtatcggctacaatttcaccggcagcggttgcaactttatgctgggcagcgagaacttcactcttaccaactggaacgagtacgagtttgacctgtga

SEQ ID NO: 121277 - DNA, 1713 bp, Homo sapiens
atgctgtgtacaaagtgggataaactgggcttggagaaaaacgcgggtaaaaataaaaacgcgtacaaatggtatgggtggcccgcaaatgcacctgatgaaccgcatattgaacaattggttggcgagtgccgtgttatgcggcaattaaaacgactcattagccgtattgcacccagcccatccagcgttatggtggttggtgaaagcggcacggcgatacctgttgtatctcatgcagaatttaaaggcggttttgcagatatcggcgtgcattatctggactggaccagccggactaccgaaaaatcgtcgaccaaatcacacaaagatgattttggttatcttgaatttgaaggtggcgctaactttagttggggagaaatgtacgggttcttcgactgggaaaacttctataacggtcgccataataaaccaggtagcgagcagcgttatacctttaaaaataccaaccgtatttacctgggtgacaccggatttaatctctacttgcatgcgtatggcacctacggttctgcgaatcgcgtgaatttccacgacgatatggttcttggccgggttcgggttccaattttaaccggcgggggggtggggggttcaaacccgttctttgctaagccgttataccagatcaaaaccttattacacttggcgacaacggctatgttcgccggctgggttgcaggttacaactttatgctgggcagcgagaaattcactcttaccaactggaacgagtacgagtttgaccgtgacgctacctatgcagcggatttcctgccgttatacgacgttgactgccaggacaatggcaatctggaatatgacacctattcccaaccggaatggaaacataacttgttcgaccattatctggcggtgctttaccgctttaaagatgaaagtggcaaagaacaatttagcggcgcagtggtgaaaacgcgtgaagcaacgccgggtaaagaaatagaagcgatcactcgccgaatgcttgatttcagcccacgactgaaaaaactcgcggactgtccatccccacggcctgtgtttgaggccctgtgcatctgctctatgttagacgccttacttctcctttgtccactggactatcatgcctcctgtgacaattacagctatgcccttctggacccccaaggctttcctctaccacatcgccgactctggggcccctacatcgatgtggacgtccctatgctccacttaatacagcatgcttgggcacaagatgcgctactgtcttgcctatactctgacttactgtacatgtcctccttcccatatcctgcgggtaccctgaccagactgatgggcgtgacgagctacaaccataagaacacactgctgacttactgcatcacactcatgagcacaatcagattcgcttatgacggcgatgaagaaattgcgatgaaatatacggactttctcaaaggagagttatcaatgaatattcgtccattgcatgatcgcgtgatcgtcaagcgtaaagaagttgaaactaaatctgctggcggcatcgttctgaccggctctgcatcggctaaatccacccgcggcgaagtgctggctgtcggcaatggccgtatccttgaaaatggcgaagtgaaaccgctggatgtgaaaattggcgacatcgtatttttcaacgatggctaccggggtgaaatctga

SEQ ID NO: 121278 - DNA, 1588 bp, Homo sapiens
ctacccagacatctccaaagattcaagacagttcattcgggctgagccagcccactgggcagactgaccttcaaacaaggcccacccatgacatacaccagatggctctccaagaatctctccagttctcagggtccctaaggtactggacagagctaggaaagcaaacccatttgcttcttcctgcacggtccgtatctcctgctgggtgaggtccttggacacagtgcacttggtgcgcagcccgcgcaggctgccaagagagatgccgatgagcttctgaagctgcccgcactgctgcagcacccggctggctgcggcccctgcgcctccctccgcgatagccgcgtcaccccctccaccgctctccttcttctctcccatcggggccgagcgcagcgcagctctatgctggctgcagagtgggggcaagaagccgcggctggaaaaacctgtggcggagggggaaaaaagccgcggcggcgggggcggaaaggcgtaaaaagccgcggtggcctcggccaaaagccatgacggcaaaatgccggggcggcagggcaagaagccacggcgggaaaaaccttggccgatccctcccctcagtgcaacctctgtgcaagaatgaacttgaacttcattcagtgcaagagtgaacacacacttttctctggctttaaagaacccagcacaaagccagtctgcatggccgcgcctccgctttttgcccgccgcggctttttgccccccaagcgccaaggctttttgaccaccgcggctttttgaccttcgcctctgcgaattttgccgccgtggctttttgcccgccgcggctttttcccccaactggtgcagcggctgtttgccccctgccgctttttgccccccgccgctttttgccccccccgccgccgcggctttttcgctgccatggctttttccccccctgcctcggctttttgacctccgcggcttttttcctcccgccgccgcgacttttcgccctccgccgccgcggctttttgcccttcgccgctgccgcggcttttttcccgaccaggctttttgccccaccgccgacacagctttttgcaccctcgccgccatggctttttgccgccgcggctttttgcccgccgtggctttctgcccccacgccgccgcggctttttgtccccgccgccgcggctttttgctgccgcgactttttgcccccgtcgccgccgctttttcgccaccgcgactttttgcccccgccgccgaggatttttgtccccgccgccgcggctctgagggcgggagcagcagactcggctgccggctctactggcgtccttgggcaggatttgtggagcaggtgcgtggtgggaactgggatggaggctccagggtcccgtgggggtgggggtgggctgcgcgaggacatccccttaccccctgaatttccatctggtccagccctctcatcttgtaggtgaggaaaccgaaggcctgagggagaaatgacttgccaggaacccctgttatcctttcctggatcccttgagtcaaggagtttgagaccaacccggacaatatagtgagaccccat

SEQ ID NO: 121279 - DNA, 1628 bp, Homo sapiens
atgaccaagcaattagagttgccccagtcgcccggcgaggtccccggttctgattatccgttgctcattgcctgcgcctacattggttttctcacctggggtggcggcttctctggatcaatgcctctgttggctgcaacaccgggcaacccggttgagcatatcgccgggctgatcccggtgggcgatactctgttcagtggttttaacattttcatcactgtggcgttgattgtggtgatgccatttatcacccgcatgatgatgccaaaaccgtctgacgtggtgagtatcgatccaaaactactcatggaagaggctgattttcaaaagcagctaccgaaagatgccccaccatccgagcgactggaagaaagccgcattctgacgttgatcatcggcgcactcggtatcgcttaccttgcgatgtacttcagcgaacatggcttcaacatcaccatcaataccgtcaacctgatgtttatgattgcgggtctgctgctacataaaacgccaatggcttatatgcgtgctatcagcgcggcagcacgcagtactgccggtattctggtgcaattccccttctacgctgggatccaactgatgatggagcattccgttaccgggatagaagcggcaatgctggatctgctggggcagcatctgggggtaaacgtggcatcgctgctgggcgatggtcaacagcgtagcgaagtcgaaatgctcggttatctgttcttcgtcggtaatcgcaaagccacgccgctgccgtatcaaagccagccggatgactcatgcgactggtatcgcctgcgtcatgaagaagcgatgacgccggatgcggtggtgcgcctggcggaagcggcatatgaaaaatatggcttcaacgatttcaaactgaagggcggtgtactggccggggaagaagaggccgagtctattgtggcactggcgcaacgcttcccgcaggcgcgtattacgctcgatcctaacggtgccttggtcgctgaacgaagcgattaaaatcggtaaatacctgaaaggttcgctggcttatgcagaagatccgtgtggtgcggagcaaggtttctccgggcgtgaagtgatggcagagttccgtcgcgcgacaggtctaccgactgcaaccaatatgatcgccaccaactggcgcgaaatgggtcatgcggtgatagcccaatgcggtagatattccacttgccgatccgcacttctggacaatgcaaggttcggtacgtgtggcgcaaatgtgccatgaatttggcctgacctggggttcacactctaacaaccacttcgatatttccctggcgatgtttacccatgtgggcgcggcggcaccgggtaatcctaccgctatcgatacgcactggatttggcaggagggcgattgtcgcctgacccaaaatccgctggagattaaaaagggaaaaattgccgttcctgatgcgcccggtctgggcgtggaactggactgggaacaggtacaaaaggcacatgaggcctataaacgtctgcctggcggtgcgcgtaacgacgcaggtccgatgcagtacctgatccccggctggacctttgaccgtaaacgtcccgttttcggccgtcattga

SEQ ID NO: 121280 - DNA, 656 bp, Homo sapiens
tgtcttctcagaaaccaccagccttgaaggccgcggtgagcaaaaaacgtcatcgggaacgcaaggatagccatgatgatcagcgggatcataccgccaacaccggcgttgattggcaggaacagcacgcccgcgccgattgccgtgccgtaaaggccagcatccacatggtgtctgtcttgcgccaggcactacgagagtctttcgacgcaatcgtgctggcgcgtattacgctcgatcctaacggtgcctggtcgctgaacgaagcgattaaaatcggtaaatacctgaaaggttcgctggcttatgcagaagatccgtgtggtctaccgactgcaaccaatatgatcgccaccgactggcggcaaatgggccatacgctctccctgcaatccgttgatatcccgctggcggatccgcatttctggacaatgcaaggggttcctggcaagtcagttctccctcaggccttcggtttcctcacctacaagatgagagggctggaccagatggaaattcgggggggaggggaaatcctgcccaaggtgagggctggaccggggtcctccggctgccgcatcagcgagtgcaggagggagaagcctccaaccgggcgactcgagctcaaggatgcaactccaccagaagtgaactag

SEQ ID NO: 121281 - DNA, 636 bp, Homo sapiens
atgcaacacttgttcagtgaaatcgccctcgtcgcgccatcgaaagccacggtattgatcccggccgatcccgccaccggtaaagagatggtcgccagggcgattcacgccagtagcgcacgtagcgaaaacccgctggtaacgctcaactgtgcggcactcaacgaatccttgctggaatttgaattgttcggtcacgaaaaaggggcgtttactggagccgataaacgccgggaagggcgctttgttaaggcggacggcggcacgctgtttctcgatgaaattggcgatatctcgccgatgatgcaggtgcgtctgctgcgtgcgattcaggagcgcgaagttcagcgtgtcggtagcaaccagattatctcggttgatgtccggctgattgcggcgacccatcgcgatcttgccgcagaggtgaatgccgggcgttttcgccaggatctctactatcgcctgaatgtggtggcgattgaagtaccatcgatgcggcaacggcgggaagatatccctctgctggctggccattttatgcagcgctttgccgagcgtaatcgcaaggcggtaaaaggttttacgccccaggcgatggatctgttactcgaataccgaaggccggggatcctctag

SEQ ID NO: 121282 - DNA, 633 bp, Homo sapiens
atgcgcgcgagatcgcccgagtgcctcctgggcggggtggcgcaaggggtggtggggaaggctattcttatggcgggcgcctatggtcctcgctcaggctggcgccgggactatcatgactgcctgtatggggtgcgttcgctggacatcaacccgttctcgccgattggtgtagatgaacagcaggtgcgattcctcgacctgtttatggtctggtgtgcgctggctgatgcaccggaaatgagcagtagcgaacttgcctgtacaccgttaacccagactgctaaggacgggagtaactgcaaagaagtggatgccccacggccctacgtgaccgggagctgcgtggggcttattgcccgacacttaataatagtctcggttgctgataccgacttacgcggccgcgtttacaacgtccactatgcccccgttactattgccagttatgctcatgctttgaacgtttgtgtgtgctttaactcctatgcccttaacgcctgcggccttgctgccctgtacttaaatattgccagccctattgcccgtgccacgtcctcccgcgcctcgcccgctactgctatagaggatcccgaatgtatttctttgttttgttacttcctcgtacagtaa

SEQ ID NO: 121283 - DNA, 1494 bp, Homo sapiens
atgctgattccgtcaaaactaagtcgtccggttcgactcgaccataccgtggttcgtgagcgcctgctggctaaactttccggcgcgaacaacttccgcgtggcgctgatcacgagtcctgcgggctacggaaagaccaccctcatttcccagtgggcggcaggcaaaaacgatatcggctggtactcgctggatgaaggtgataaccagcaagagcgtttcgccagctatctcattgccgccgtgcagcaggcaaccaacggtcactgtgcgatatgtgagacgatggcgcaaaaacggcaatatgccagcctgacgtcactcttcgcccagcttttcattgagctggcggaatgcatagcccactttatctgtgatccacgagtcaatgcgcttctttattcgccatcaaccagaaaatctcaccctggtggtgttgtcacgcaaccttccgcaactggcattgccaatctgcgtgttcgtgatcaactgctggaaattggcagtcagcaactggcatttacccatcagcactggatgtgcagtgacgaaagacggacgctggagcccggagtttaccattaccggtcaagcgtggatctccccgttgtcggctatcgtaatggcgtggcgcagccgctgcgtctgtggcaggcgacgcacgcgcatccgtttgatctgactaaatttaacgacggtgatttcttgcgtgccgaacagcagggcatcaatgcggaaaaactgaccaaagttctctatccaaacgacaaccatactgccggtaaaaaactgcgcctgatgcagcaatacttccagtgtgcctgttcggtagcggatattttgcgtcgccatcatctggcggggcgtaaactgcacgaactggcggattacgaagttattcagctgaacgatacccacccaactatcgcgattccagaactgctgcgcgtgctgatcgatgagcaccagatgagctgggatgacgcctgggccattaccagcaaaactttcgcttacaccaaccataccctgatgccagaagcgctggaacgctgggatgtgaaactggtgaaagggcctctgccgcgccacatgcagattattaacgaaattaatactcgctttaaaacgctggacctgcaggacgctgaacaccggccgctgaaaatgcgcggttgcctgctgtgccagtgccacacgctcttccagggtaaacatcggttttttactggggctggcggcaatcgccagaataacgtgatcgaacatctggtggcggcgtcacgatatcgcttcaccaccgccagccgcagacccctgtttactgcgggctttacgctgctgacggcatttttatttcacagcaactttgctgaaggcgtcaactcgctgatgttcatgaaaaacctgacaatttctggcggattcctgctgctggcaattaccggtccgggcgcgtatagcatcgaccgcctgctgaataaaaagtggtaa

SEQ ID NO: 121284 - DNA, 663 bp, Homo sapiens
atgactgcaggcagcgaagttcgaatccccgccaatagaactcgcattcctgcaggtcatacggaagctagtctcagggaaaatcagttaagcctatacacccttttccaagggcgtaaactgcacgaactggcggattacgaagttattcagctgaacgatacccacccaactatcgcgattccagaactgctgcgcgtgctgatcgatgagcaccagatgagctgggatgacgcctgggccattaccagcaaaactttcgcttacaccaaccataccctgatgccagaagcgctggaacgctgggatgtgaaactgcagctttttcttacggctgatatcgccgccataacatttagccattccttaatccgcgaatctccgcttgtggacgtggatcgcacggtgtttctttgtgtgagtctgccgttactgcaccgtgtcctgggaagtgtttccctcgacgccgagactgactttgtgcggccaggcgtcgtagtgcgtctcgccggtccatatattccagcggaccccgactccgccaagctgcgcgccctgagtgcctttatcacgatagccgttgtcctgaacgtgagcaggacaagccgcaagcccagcaacatctgtgctcctctgtttgtctgctccatgccctgggcatga

SEQ ID NO: 121285 - DNA, 1322 bp, Homo sapiens
acattccgccgactgtggccaaccattgcgcctttcaaagcgggtctgatcgtggcgggcgtagcgttaatcctcaacgcagccagcgataccttcatgttatcgctccttaagccacttcttgatgatggctttggtaaaacagatcgctccgtgctggtgtggatgccgctggtggtgatcgggctgatgattttacgtggtatcaccagctatgtctccagctactgtatctcctgggtatcaggaaaggtggtaatgaccatgcgtcgccgcctgtttggtcacatgatgggaatgccagtttcattctttgacaaacagtcaacgggtacgctgttgtcacgtattacctacgattccgaacaggttgcttcttcttcttccggcgcactgattactgttgtgcgtgaaggtgcgtcgatcatcggcctgttcatcatgatgttccattacagttgggcactgtcgatccatttgattgtgctggcccgattgtttcgattgcgattccgttgtatcgaagcgtttcgaacatcagtaaaaacatgcagaacacctggggcaggcgacgcacgcgcatccgtttattctgactaaatttaaccccgggtattttttggcgtcgccaaacaaccaggggcatcaatgcggaaaaagctggccaaaatttttttttccaaaggccaaccattttgccggtaaaaagctgcgcctgatgcagcaatacttccagtgtgcctgttcggtagcggatattttgcgtccgccatcatctggcggggcgtaaactgcacgaactggcggattacgaagttattcagctgaacgatacccacccaactatcgcgattccagaactgctgcgcgtgctgatcgatgagcaccagatgagctgggatgacgcctgggccattaccagcaaaactttcgcttacaccaaccataccctgatgccagaagcgctggaacgctgggatgtgaaactggtgaaaggcttactgccgcgccacatgcagattattaacgaaattaatactcgctttaaaacgctggtagagaaaacctggccgggcgatgaaaaagtgtgggccaaactggcggtggtgcacgacaaacaagtgcatatggcgaacctgtgtgtggttggcggtttcgcggtgaacggtgttgcggcgctgcactcggatctggtggtgaaagatctgttcccggaatatcaccagctatggccgaacaaattccataacgtcaccaacggtattaccccacgtcgctgggatcaaacagtgcaacccggcactggcggctctgttggataa

SEQ ID NO: 121286 - DNA, 2448 bp, Homo sapiens
tcatgttcctttgaatttaactaaacgtaacaggatgttaaaacgaaacctggcatttttctttccttcagaaatatgcccacattttatagagaaagctatatattgaggttttaaaatattgacgccatcagcggtacgcaaaatgcagatacccactggcgcggaggcgacaatcttgcgattgaactgctcatgttcttccagtcgcagggcgtcgctttccgccggaatgaaaatacgtcgctcgtacatccgtgcgagagtaaacaatgcagctccggcaagcacattcagcaaaattgcgttaaggatcaacatgcgaatgcgttccagcaccttatcaaccggcaccgaatacacgatgcttagcgatgagggtggcagatttttcttcagcaccagctcccggaacccttccgtatagccaaaccaggagcgttcctgcatccagcgaggatcgcccttaattttactttctggtccggtaagcgaaatcagggtatgaccattttcatcaagaatggtaacccccatcggcaacgtacccggtaagaaaaagttctccatccggatggtctgctcgacacccaaaagcgcctgcaaccggttcgccagataaactggcgtcaacgcgtaaaaatacccgacgccagggcgcgaccttcgcatgttcatcactggtctttccgaaaggctgtaagaaataacttcgttgttgaagagatctattactggagacaaatacagcttgcgcccattgactgcaaattcagtaacatcggtaacccacttctcgtttggccgcgtagccttgaaatctctctcctctgtaagagcggtatcgcttgaccttaatcgctgctttaagtgagagggtcccatcaggcgctgaacagctttatggttaatctgtttcccttctcgatgaagagacagcgttaccctacggtatccgtatcgggctctattctcgtgataaatctcactaatacgctttttaacgtccgcatacttgtcaggcttgctgagagcctttagatgataataaaacgtactgcgcggtatctccgcagcctttttcgtgggatgagctaaggctttcagcttttttagatacataagccgcgtttcaagaaatcgaacttgcctttcaagatcctcaatgcgtcggtcttttgacagctccaatgctgatgccgctttttctggatcaactgatattgcaatgtttcttttggtgccaatcttgagcgcgcgtaaaccagcttctccgcgctcttcatagaccttcagccacctggctacagaaccactaccagcaagcataaagtgagcagcagcctgataagggacatgtgctgctcgatcacagctttcacgacctaatacgcactctggatcagcactaacgcctttaggtttgggaattaaacctttttctccatgtttttcatagagggcaacccatgtcctgacctgggttcgggggacaccaaaacgtgccgagatgatcctgggatcctctagatccatgtcagcggcggcggtcacggtattgatatcaccggcgacagcgcaacggtggataacaagggcaccatgaccgtcaccgatccggagtccatcggtatccagattgacggcgaccaggccatcgtcaataacgaaggcgagagcactatcaccaatggcggcaccggcactcagatcaacggtaacgacgccaccgcgaataacagtggaaaaaccactgttgatggaaaagattccacgggtaccaaaatcgcgggcaatatcggcattgtaaatctggatggtagcctgactgttacaggcggtgcgcatggtgttgagaacattggtgacaacggcacggttaacaacaaaggagatattgttgtttccgatactggatcgattggcgtgctcatcaacggtgaggggccaacaagtatccaataagtgtgggatcggattttgtttcggtcgcagattctcatcaaataccaggcgtttcctgccaggttcaatttcccgcaatggctcgacttgatgtaacgtctgcttacagcgtgtcaccagcacctggtactcatgcgtagcctgctttttccatgccaactcctgctcactgagttcacgaatcgctttcgccggctgccgacaatacaggtaagttaggtaccgagctcgatttatcaactcgggcgtatctgacatctcactttggccatggggcttgaaatgggtaacaagctggcgaaccgtattctgccagagctgaaagatgataaagaaatcagcagccacgatagctcgaccaatggtctgattaaccgctgtacaggtgggcgaagcggcagggtcggcagcaacgtcggtttcggcggggagttcctccgcgaccagcgtcagcaccgtaagggtaccgaggagagttcccat

SEQ ID NO: 121287 - DNA, 696 bp, Homo sapiens
atgcgtcggtcttttgacagctccaatgctgatgccgctttttatggatcaactgatattgcaatgtttcttttggtgccaatcttgagcgcgcggtattttggctttgacatattaggggctattccatttcatcgtccaacaaaatgggtgcagtacactgtgtcagtaatactggcgcaagccaaagagccgtttaatctcgggcgcttaatcgccctcgtgaaagagtctcatatgctgagcccgtcacttgttgactgcacttccagccaggcagtggcggatcaatatgccgacatcgtgcgcgaaggtatccacgttgtcacgccgaacaaagaggccaacgcgtcgtcgatggattactaccctcagttgcgttatgcggcggaaaaatcgcggcgtaaattcctgtatgacaccaacgttggggctggattaccggttattgagaacctgcaaaatctgctcaatgcaggtgatgaattgatgcagttctccggcattctttatggttcgctttcttctatcttcggcacgttagccgcaggcatgagtttctccgaggcgaccccgctggcgcgggaaatgggttataccgaaccggacccgcgagatgatctttctggtatggacgttgcgcgtaaacgccgcggtgctcaagcaaatcgttatgcgtaccgcgttccacaatga

SEQ ID NO: 121288 - DNA, 1308 bp, Homo sapiens
atgatgccgttaatcgatctagaggatccccgactgctggttaggcgagaaataggaatgcttttacatgtcgattatttggacttggttcatgaaaaggtgacatgtaggggacggaatggaggtcaagatagagagaagacaaccatggagaaggtccgctcatccgggaccatatgtcctcaagcgcctgaagtcgtgaatcactacttcacaactgatgatggttacaggatcatctcggcacgttttggtgtcccccgaacccaggtcaggacatgggttgccctctatgaaaaacatggagaaaaaggtttaattcccaaacctaaaggcgttagtgctgatccagagttgcgtattaaggtcgtgaaagctgtgatcgagcagcacatgtcccttaatcaggctgctgctcactttatgcttgctggtagtggttctgtagccaggtggctgaaggtctatgaagagcgcggagaagctggtttacgcgcgctcaagattggcaccaaaagaaacattgcaatatcagttgatccagaaaaagcggcatcagcattggagctgtcaaaagaccgacgcattgaggatcttgaaaggcaagttcgatttcttgaaacgcggcttatgtatctaaaagagctgaaagccttagctcatcccacgaaaaaggtaacgctgtctcttcatcgagaagggaaacagattaaccataaagctgttcagcgcctgatgggaaccctctcacttaaagcagcgattaaggtcaagcgataccgctcttacagaggagaggtagggcaaaccgcccctaatgttctccaaagagatttcaaggctacgcggccaaacgagaagtgggttaccgatgttactgaatttgcagtcaatgggcgcaagctgtatttgtctccagtaatagatctcttcaacaacgaagttatttcttacagcctttcggaaagaccagtgatgaacatggttgagaatatgctcgatcaggcattcaaaaagcttaatcctcacgagcatcctgttctgcactctgaccagggatggcagtatcgtatgagaagatatcaaaatatccttaaagaacatggtattaaacaaagcatgtccagaaaaggcaattgtctggataatgctgtggtggagtgtttctttggaaccttaaagtcggagtgtttttatcttgatgagttcagtaatataagcgaactgaaggatgctgttacggaatatattgaatactacaacagcagaagaattagcctgaaattaaaaggctctgactccaattga

SEQ ID NO: 121289 - DNA, 3222 bp, Homo sapiens
atgttcatcagcgggctggacgatttttttattgatgtcgtctactgggtacgccgcattaaacgcaagttgagtgtttatcgccgctacccgcgaatgagttaccgcgaactgtataaaccagatgaaaaaccgttagcgattatggttccggcgtggaatgaaacgggcgtcatcggcaatatggccgagctggcggcgaccacgctcgactacgaaaactatcatatctttgttggcacctaccccaacgaccccgatactcagcgtgatgttgacgaagtgtgcgctcgcttcccgaatgtgcataaggtagtctgcgcgcgtcctggccccaccagcaaagccgactgtctgaacaacgtgctggacgccatcacccaatttgagcgtagcgccaatttcgcttttgctggttttattctgcatgacgccgaagatgtgatttcaccgatggaattgcgtctgttcaactatctggtcgagcgtaaagatctgattcagatcccggtgtatccgttcgaacgcgaatggacgcacttcaccagcatgacttacattgatgagttttcagagctgcatggcaaagatgttccggtgcgtgaagccctcgccggacaagtgcccagcgccagggtcggacctgtttcagccgcgcgccgtgaaccggctgtagctgaggatattttgatatcttctcatacgatactgccatccctggtcagagtgcagaacaggatgctcgtgaggattaagctttttgaatgcctgatcgagcatattctcaaccatgttcatcactggtctttccgaaaggctgtaagaaataacttcgttgttgaagagatctattactggagacaaatacagcttgcgcccattgactgcaaattcagtaacatcggtaacccacttctcgtttggccgcgtagccttgaaatctctttggagaacattaggggcggtttgccctacctctcctctgtaagagcggtatcgcttgaccttaatcgctgctttaagatcatctcggcacgttttggtgtcccccgaacccaggtcaggacatgggttgccctctatgaaaaacatggagaaaaaggtttaattcccaaacctaaaggcgttagtgctgatccagagttgcgtattaaggtcgtgaaagctgtgatcgagcagcacatgtcccttaatcaggctgctgctcactttatgcttgctggtagtggttctgtagccaggtggctgaaggtctatgaagagcgcggagaagctggtttacgcgcgctcaagattggcaccaaaagaaacattgcaatatcagttgatccagaaaaagcggcatcagcattggagctgtcaaaagaccgacgcattgaggatcttgaaaggcaagttcgatttcttgaaacgcggcttatgtatctaaaaaagctgaaagccttagctcatcccacgaaaaattcaatcatccgttcgggcaactggcgtttatcgcgaccacgctggttgggctgtacccgattgctcgatcaggcattacggttgatcaaatccggcagctacttcgccattgaaaccttaatgagcgtagccgctattggtgcactgtttattggcgcaacggctgaagctgcgatggtgttgctgctgtttttgattggtgaacgactggaaggctgggccgccagccgcgcgcgtcagggcgttagcgcgttaatggcgctgaaaccagaaaccgccacgcgcctgcgtaagggtgagcgggaagaggtggcgattaacagcctgcgccctggcgatgtgattgaagtcgccgcaggtgggcgtttgcctgccgacggtaaactgctctcaccgtttgccagttttgatgaaagcgccctgaccggcgaatccattccggtggagcgcgcaacgggcgataaagtccctgctggtgccaccagcgtagaccgtctggtgacgttggaagtgctgtcagaaccgggagccagcgccattgaccggattctgaaactgatcgaagaagccgaagagcgtcgcgctcccattgagcggtttatcgaccgtttcagccgtatctatacgcccgcgattatggccgtcgctctgctggtgacgctggtgccaccgctgctgtttgccgccagctggcaggagtggatttataaagggctgacgctgctgctgattggctgcccgtgtgcgttagttatctcaacgcctgcggcgattacctccgggctggcggcggcagcgcgtcgtggggcgttgattaaaggcggagcggcgctggaacagctgggtcgtgttactcaggtggcgtttgataaaaccggtacgctgaccgtcggtaaaccgcgcgttaccgcgattcatccggcaacgggtattagtgaatctgaactgctgacactggcggcggcggtcgagcaaggcgcgacgcatccactggcgcaagccatcgtacgcgaagcacaggttgctgaactcgccattcccaccgccgaatcacagcgggcgctggtcgggtctggcattgaagcgcaggttaacggtgagcgcgtagtgatttgcgctgcacggaacatcccgctgatggcattgtggatacagacgggtcacaaaggcaacggcttccggatcgtccgcgttaacgtggaaaatcggggcctgaaccatcttaccgatatcagtacagtacggcgtagaacgggcatccagcggattagaggtggtgaaaccaacctggttgttgataacgatacgtaccgtaccgccaacttcataaccacgcgctttcgacatgttcagggtttcctgaaccacgccctgcccggtcactgcggcgtcaccgtggatggtgattggcagcactttgttgctgctcggctcatcaagtctgtccagacgggcacgaacagaaccgataactaccgggcttacaatctcaaggtgagacgggttaaacgccagcgccaggtgcaccaggccgccatcggtctggaagtcagacgagaagcccatgtggtatttcacgtcacccgtgccgaggtgttctttatgtttaccggcgaactcgtcgaacaagtcttgcggttttttacccagcacgttcaccagcacgttcagacgaccacggtgcgccatcccgagaaccacttcgcgggtgccgctgttgccagcgtggcggatcatctctttaagcatcgggattaa

SEQ ID NO: 121290 - DNA, 7521 bp, Homo sapiens
atggggctgaacgcgctggatatcgaaacgctgaacaatgacgaacatgcgtgggatgtggtagtcgaagagttcgatggttatcggcaaatctggcgcaaacgtggcgttatgccgttgccagcaagtttggccaagggtttgtgcgccagtgcgagcgagcgttgcttcgcatgcctgcatgtcgttgtgctctggcagcaacactgcgcgcagctgcgtgatgaacattcctggcgttacgaccatcccggtgacgctatctacgcgccgttgttgttaaaacaactgtcggatcgtaaacctgcggattgcgtcgtgaccacagatgtggggcagcaccagatgtgggctgcgcagcacatcgcccacactcgcccggaaaatttcatcacctccagcggtttaggtaccatgggttttggtttaccggcggcggttggcgcacaagtcgcgcgaccgaacgataccgttgtctgtatctccggtgacggctctttcatgatgaatgtgcaagagctgggcaccgtaaaacgcaagcagttaccgttgaaaatcgtcttactcgataaccaacgactagtcattggagaacagatgattgatgtcttagggccggagaaacgcagacggcgtaccacacaggaaaagatcgcaattgttcagcagagctttgaaccggggatgacggtctccctcgttgcccggcaacagtggtgtagcagccagccagttatttctctggcgatcatctcggcacgttttggtgtcccccgaacccaggtcaggacatgggttgccctctatgaaaaacatggagaaaaaggtttaattcccaaacctaaaggcgttagtgctgatccagagttgcgtattaaggtcgtgaaagctgtgatcgagcagcacatgtcccttaatcaggctgctgctcactttatgcttgctggtagtggttctgtagccaggtggctgaaggtctatgaagagcgcggagaagctggtttacgcgcgctcaagattggcaccaaaagaaacattgcaatatcagttgatccagaaaaagcggcatcagcattggagctgtcaaaagaccgacgcattgaggatcttgaaaggcaagttcgatttcttgaaacgcggcttatgtatctaaaaaagctgaaagccttagctcatcccacgaaaaaggctgcggagataccgcgcagtacgttttattatcatctaaaggctctcagcaagcctgacaagtatgcggacgttaaaaagcgtattagtgagatttatcacgagaatagaggccgatacggataccgtagggtaacgctgtctcttcatcgagaagggaaacagattaaccataaagctgtgtcacggacggaccccattgtgttctccaagagagatttcaaggctacgcggccaaacgagaagtgggttaccgatgttactgaatttgcagtcaatgggcgcaagctgtatatgtctccagtaatagatctcttatcatcagcttcgctgtggaaccttgcgggaaagcttatcgatatcactcatggtgaagtcgatttccgcttcctgcgccgccgccagcaggtgaagtacggtgttagtcgatccacccatcgcgatatccagcgtcatggcgttttcaaacgccgccttactggcgatattacgcggcagtgcactttcgtcgttttgctcgtaataacgtttggtcaattcaacaatgcgtttaccagcattaaggaacagctgcttacggtcggcgtgggtcctaaggggccgactggattaccgcgccgtatacgccaggagtgctgcgcggcggcagcatgtgcatgtctttgcccgaacggtgaaagggtgagctttacctataacgaccatgtaatgcatgaactcgatccggcgctggatttgcgaaacgtcggtgttgctgcgccgtttggcccggtcaacgtacaaaagcagcatccgcgtgaatacagcggtagccactggtgcgtgctggtgagcaaaaccacgcccacgccacagcctggcagtgatgaaatcaatcgtgcttatgaagaaggatgggtaggaaatcacgcgctggcatttattggcgacacactttcgccaaagggcgagaaagtgccggagctgtttatcgttgagttaccgcaagatgaagctggctggaaagcggcaggtgatgcgccgttaagcggaacggaaacaaccctgcccgcgccaccgcgtggcgtcgtgcagcgacgtttaacctttacccaccatcgggcttatccggggttagtcaacgtcccgcgccactgggtgcgctgtaatccgcagggtacacaaatcgcgtttttaatgcgagatgataacggcattgtgcaactgtggcttatctcgccacagggcggcgagccgcgccagttaacccataacaaaacggatattcagtctgcatttaactggcatccgtcaggagaatggttgggctttgtgctggataatcgaattgcttgtgcccatgcgcaaagcggcgaggttgagtatttaaccgaacaccacgccaattcaccttctgcggacgccgtcggtccttctcgccggatgccgctggtgcgcaaagatgtactgcatcaaaccgccagtctgaccgggctggtggaggtgttaaaacggcagggaaaaacggtcaccagccaggtgctgatttttgaaatcattggcccctgcgcctccggccattgccagccagttacggattcaaatcaacgagcagatctacttctcccgtcgcgttcgttttgtggaagggaaaccgctgatgctggaagacagctatatgccggtaaaactgttccactgctggcgcggcaaatgaaggtagcggaacacacgccactgctgcggatcacctcgttgtcatatagcgagagcggggagtttttgaattattcagtgatgttcagaaatgccagcgaataccaggaacattaccaacggatagacagtggcgtaagagagcgccgccgcaccgctggttggatgaagattattagcaaacgccagcgccggaggatcggtcatggaacctgccagcatcccgcacatggtcagcattatcgtgcgttatggacctcaaggtatggtcagtacgccgccgttgatttcgcagtcgatatcgctgtcgccatcccagtcgtccaggcgttcttcaatggtcagccagagttgatcagccaggcgatgaaattcactgtcgttcattgttgtatcctgtttttaagtgatggcggcagtatagcggcatggggtcaggtcttcaaagtttgcacctctgcggctgcgttccggcacgattcatccgtcaccggaataatgatgtctctgtgtagcgaaagatttgtctcttcattagggcgcagttacaccacgtctttccctgtttctggtaaacattatgatcaggtgattactaaagtccgtgttgtaccccgtgatggagtaatatgcgtctccaaatggtgcctggacgattttggtctccgggacaaaatatgcattgatggagtagttgatcgccccggaagcatcaaacgaagcctgcgatgtctgatcggcaatcacgcccgccagatagttcgcgatcgcgccagaaagcagcatgtagatgccggtcagaatgcagaatccggcgctcatcaggccaaggccaagagcaaatttcccccagatgcgcacggtacgattacccgcgacactctcttttaccacccacgccaggaacacaccgcacagcataactgcgaaggcattaatcgactggaacatcgcggtcggaacggtataaccaaacatatcgcggttaacgaagcggtcgatataaaggctaatcgagctaccgccctgttgtgcgaaggcccagaacaacatactgaagaaggcttagctgttggtctggctttgcaggggtcactgtctaacctggccgctggcgtgttacttgtcatgttccgcccgttccgtgccggagaatatgttgacctgggcggcgtagccggtactgtgctgagtgtgcagattttctccaccaccatgcgtactgcagacggtaaaattatcgttattccgaacggtaaaattattgccggaaatattattaacttctcccgcgagccagttcgccgtaacgaatttattattggcgtggcgtatgattccgatatcgatcaggttaagcagatcctgaccaatattatccagtctgaagatcgcattttgaaagatcgcgaaatgactgtgcgcctgaacgaacttggtgcatcgtcgattaatttcgtggtccgcgtctggagcaacagcggcgatctgcaaaacgtgtactgggatgtgctggagcgtattaaacgtgaatttgatgccgccggtatcagcttcccgtacccgcaaatggatgtgaactttaagcgggtgaaagaagacaaagctgcgtcttgcacttggggcggctatgatcctaccgctcggtccacaaaatgcttttgtgatgaatcagggcatacgtcgtcagtaccacattatgattgccttactttgtgctatcagcgatttggtcctgatttgcgccgggatttttggtggcagcgcgttattgatgcagtcgccgtggttgctggcgctggtcacctggggcggcgtaaacttcttgctgtgacaaacagactaccgggggaagaagagacggaagaaggaggaggagaagcagagcacgacacgacgcgaacgagggaacacagaaggagcagacaggagacagaggacggagcagcggaagacgacagaaagaggacgaaggacgacgaaggcaggagcgacggagaggcaagagaccgtcagcggagcagagaacgagagaacaacaaggccggaaaggaccgacaagcacgaagcacagccgccaccgagcaacgcaaggcagaagaacccacacacaggacagtactggatgtcccatcagtttcttatggtgtctacgccagtaacacattgatcaatcaacatggcgacatcaatcacacccatgaggtgcttcaggatgacagcaagtgcgagatgattgttggcattgaccacttcatgacggcctcggctaagtattgcgatatcctgttgcccgacctgatgccaacagagcaagaagaccttatctctcatgaatctgcagggaatatgggctatgtgatcctcgcccaacccgcaacctcagcaaaatttgaacgcaaacccatctactggatgctgagtgaagtcgccaaacgcttaggaccagacgtttatcaaacctttactgaaggtcgcagtcagcatgaatggatcaaatatctccatgcgaaaacgaaggaacgtaaccctgagatgcccgactacgaggagatgaaaacgaccgggatctttaagaaaaaatgcccggaagaacactacgtcgctttccgcgcattccgtgaagatccacaggcaaacccgttgaaaacaccttcggggaaaatcgaaatttattctgaacgactggcgaagattgcagatacctgggaattgaaaaaagatgaaattattcatccccttcctgcgtataccccaggttttgatggctgggacgatcccctgcggaaaacctatccactgcagttaacgggcttccattacaaagcgcgtacccactccagctacggcaatattgatgtgttacagcaggcctgcccacaagaggtgtggatcaaccccattgatgctcaggcacgcggtatccgtcatggcgataccgtgcgggtatttaacaataatggagaaatgctgattgccgcaaaagtgactccgcgtattctgcctggcgttaccgccatcgggcaaggtgcgtggcttaaagcggatatgtttggtgaccgggtcgatcacggcggcagtatcaatattctgacctctcaccgcccttcaccgctggcaaagggaaacccgtcgcacagcaatcttgtccagatcgaaaagcctgtcccgagaaatcggtacgatatcgacgaggtggataacatcagcgccgaactgttgcgccactactgcaaagaagtggaaaaataccagaacccgcgcggcggctacttcacgccgggatcgtataccgtttctgctcacgtcccgttgggatcggtggttggcgcgacgccagacggtcgttttgccggagaacagctggcagacggcggcttgtcacccatgctgggccaggacgcacaagggccaacagcggtactgaagtcagtcagtaagctcgataacacgctgctgtctaacggtacgttgctgaacgtgaaattcactccggcgaccctggaagcgccttctttgtcgaactgtcgaaggagatccaggatgacatcatccgccggacagcgcatcagctgtaacgttgtggaaacgcgccgcgatgatgtggcgcgcattttcaacattcagcgttattcactgaatgacggcgagggcattcgtacggtggtcttttttaaaggctgtccgcatctttgcccgtggtgtgctaatccggagtcgatctccggcaaaatccagacggtacgcagagaggcgaaatgtctgcactgtgcgaaatgtttgcgtgatgcggatgaatgcccctccggggcgtttgaacggattggtcgcgatatcagccttgacgctctggaacgggaagtgatgaaagatgacattttctttcgcacgtccggcggcggcgtcacgctttctggcggcgaagtgttaatgcaggcggagtttgctacccgttttttacagcgactgcggctgtggggtgtgtcatgcgccattgaaactgccggagacgcaccagccagcaagctattaccgctggcgaaattgtgcgatgaagtgttgttcgatttaaaaattatggacgcgactcaggcgcgggatgtggtgaagatgaacctgccacgcgtgctggagaatctgcgtttgctggtgaacgtcactggctttggcttcttcgtccgtctggacgacttgttcattgatggtctggtccatgtctcttcgctggacaatgactactatcgctttgaccaggtagggcaacgcctgatgggggaatccagcggccagacttatcgcctgggcgatcgcgtggaagttcgcgtcgaagcggttaatatggacgagcgcaaaatcgactttagcctgatctccagcgaacgcgcaccgcgcaacgtcggtaaaacggcgcgcgagaaagcgaaaaaaggcgatgcaggtaaaaaaggcggcaagcgtcgtcaggtcggtaaaaaggtaaactttgagccagacagcgccttccgcggtgagaaaaaaacgaagccgaaagcggcgaagaaagacgcgagaaaagcgaaaaagccatcggcgaaaacgcagaaaatagctgcagcgaccaaagcgaagcgtgcggcgaagaaaaaagtggcagagtga

SEQ ID NO: 121291 - DNA, 2209 bp, Homo sapiens
ctttgtgccccctatttttgaaaagggcgttccactcctttaagggatccctgcatatcgcgctaggagagtcactaggcgtaacacttatgtaatcgttcccttctcgagaagagacagcgttccctcgggtatccgtatcgccttttattctcgtgataaatctcactaatacgcttttaaccgtccgcatactgtcaaggcttgctgagagctttttcgtgggatgagctaaggctttcagcttttttagatacataagccgcgtttcaagaaatcgaacttgcctttcaagatcctcaatgcgtcggtcttttgacagctccaatgctgatgccgctttttctggatcaactgatattgcaatgtttcttttggtgccaatcttgagcgcgcgtaaaccagcttctccgcgctcttcatagaccttcagccacctggctacagaaccactaccagcaagcataaagtgagcagcagcctgattaagggacatgtgctgctcgatcacagctttcacgaccttaatacgcaactctggatcagcactaacgcctttaggtttgggaattaaacctttttctccatgtttttcatagagggcaacccatgtcctgacctgggttcgggggacaccaaaacgtgccgagatgatcgccgcaatggcgttcatgatcgccggaacggaaagctctgccagcgggatctccgccacctgtttgcgatcgcgcatgataatcacccgatcggcatagcccaccagctcttccagttcggaggagatcaccagcagcgccagaccatcggcgcatagcgtttcaatcaggcggatgatctcggcgtgggcaccaacatcaatgccgcgggttggctcatcgaggatcagaaattgcggtcgggtcagtagccaacgtgaaagcaacactttttgctgattgccgccggagagaaattcaatcggttgttcagttgaaggtgtgcgaatgccaagctggcggataaagcgttcggcaatctcttgctgttctttgcggggaatgggacgtacccagccgcgctgtgcccggagaacgaggatgattgctgcacgctctgtcgcttgttcaccggccagacggccgaagaccaccagttccgccagggagttagaacccagacggtttgcaccgtgcagaccaacagaggaacattcacccacggcgaacagacctttaatgcgggtttcacagttctgatcggtttcgataccttcaactttcacccacttgcctttttcgaggtctttgtagtgctcgaagaagtgagcgatttgcgctttcagcagttcaggcagatcgttaacgtctttaatgtgatcgtattctttgctcagcttgctgtgcggaaccgcaaccagtttcgcatcttcaccggcttcgtcggtcattttcagaacgccaaccggacggcaacggatcacagaacccggcgtccagagacagggtgtggttgatgtaaccgtaattgcatggatagaacatcgcggtggacatgaagcgcccagcggaccaggcgaggacggcatggacgcacccgccatcgcagcgggaacgttcagccccagagaggccagcacgctgccggtccaggtctcctgagtatgcaggttgaattgctgttcgcgtgatgtgccaaaggccacgcgtgtccctttgggaagctggctggcccactgcgccatcctctctttatgttgttccagacgtgcctgcatctctcgctttttacccaccatttcgccgatgatagccgcagattgcaaattttcagcgtaggtttcgttgcgggacttaagcagcagtaccggcgcgatttgctgcaaggcgatgtaaacccccgcatggcgactgctgtcggcaatgatcaggtctggtttcagagcggcaatggcttccaggctcggctgcgcgcgcgttccgacggactgccacggtttcaggtgcgcacgcacttcgggcaggatgcgttttgcatcgttatcgtcggcaataccgatcgggatgacgtccacggcggccagcgcatcggcgaacgagagttccagcaccacaatccgttgtggcgttttttcgagtgttaacgtgccgtgttcgtcctgaaccgtggcggcaaaggcgtggctgatcaccagcagcagggctgcaaaaagaaaacggattaatgcccacat

SEQ ID NO: 121292 - DNA, 1358 bp, Homo sapiens
aaatccgatcccacacttattggatacttgttggcccctcaccgttgatgagcacgccaatcgatccagtatcggaaacaacaatatctcctttgttgttaaccgtgccgttgtcaccaatgttctcaacaccatgcgcaccgcctgtaacagtcaggctaccatccagatttacaatgccgatattgcccgcgattttggtacccgtggaatcttttccatcaacagtggtttttccactgttattcgcggtggcgtcgttaccgttgatctgagtgccggtgccgccattggtgatagtgctctcgccttcgttattgacgatggcctggtcgccgtcaatctggataccgatggactccggatcggtgacggtcatggtgcccttgttatccaccgttgcgctgtcgccggtgatatcaataccgtgaccgccgccgctgacatggatctagaggatcccaggatcatctcggcacgttttggtgtcccccgaacccaggtcaggacatgggttgccctctatgaaaaacatggagaaaaaggtttaattcccaaacctaaaggcgttagtgctgatccagagtgcgtattaggtcgtgaaagctgtgatcgagcagcacatgtcccttatcaggctggtgctcactttatgcttgctggtagtggttctgtagccaggtggctgaaggtctatgaagagcgcggagaagctggtttacgcgcgctcaagattggcaccaaaagaaacattgcaatatcagttgatccagaaaaagcggcatcagcattggagctgtcaaaagaccgacgcattgaggatcttgaaaggcaagttcgatttcttgaaacgcggcttatgtatctaaaaaagctgaaagccttagctccttccccgaaaaaagtgaaagttctcacgaagctaaggcagttttatcctcttgatgagcttctcagggctgcggagataccgcgcagtacgttttattatcatctaaaggctctcagcaagcctgacaagtatgcggacgttaaaaagcgtattagtgagatttatcacgagaatagaggccgatacggataccgtagggtaacgctgtctcttcatcgagaagggaaacagattaaccataaagctgttcagcgcctgatgggaaccctctcacttaaagcagcgattaaggtcaagcgataccgctcttacagaggagaggtagggcaaaccgcccctaatgttctccaaagagatttcaagggtacgcggccaaacgagaagtgggttaccgatgttactgaatttgcagtcaatgggcgcaagctgtatttgtctccagtaatagatccccgggtaccgagct

SEQ ID NO: 121293 - DNA, 3694 bp, Homo sapiens
atgcggcgtattgctcagcaataccgtcggcacggcaaagacattcaggccgttctgtttgatagcaggcacggcaatgctgttgcccacgctgccgtaaaccacctgcgactgcacggcgacgatatccgcctgcagtgccctactcttatcttaactgcccatgaagaagcccgcatcaacgccatgctggagggattagcacagaaaaaggatttgatatttgtgcgcaacggtgatgaacatacctgctatgaagcggtttctcatctgcgtctgaagctcggcaatacccgtaaccgcatcgacactgccgagcagtttattgataaggttgcttcgtcgtcatcgattactgggaagccgtatattgtgaagatccccggtgaccactctgcacgtggtggcgggtacagaataggctgcaccctagacagtccgatgaggacctcagaggatgcggatcgggctaaaggaaggccaacaagcagcgccggcaggatatcacctaaattcaagcgttcttcccgcgtaccgacgggcgctaccactcaggatgccgaagtggatgatgcgaaatacggcttcgtcgcctctggcacgctgaacccgcaaaaagcgcgcgttctgctgcaactggctctgacgcaaaccaaagatccgcagcagatccagcagatcttcaatactctagaggatccccgagaccggcgtgaaccttctgttggggaccggccaactgctttacaaaccctcgctacggcgcgggtgcggcgacgaacccagatcctgaagtcttcagctgggcggcaacgcaagttgttacagcgatggaagcaacccataaattgggcggtgaaaactatgtcctgtggggcggtcgtgaagatggtggttgagcataaagataaaatcggtttccagggcattgctaccgtgaatgaaatcgctttcccggcgaacactccggtgtacttcaaagtgacctccaactccgtgatgaactccttcttcattccgcgtctgggtagccagatttatgccatggccggtatgcagactcgcctgcatctgatcgccaacgaacccggcacttatgacggtatctccgccagctacagcggcccgggcttctcaggcatgaagttcaaagctattgcaacaccggatcgcgccgcattcgaccagtgggtcgcaaaagcgaagcagtcgccgaacaccatgtctgacatggctgcgttcgaaaaactggccgcgcctagcgaatacaaccaggtggaatatttctccaacgtgaaaccagacttgtttgccgatgtaattaacaagtttatggctcacggtaagagcatggacatgacccagccagaaggtgagcacgcgcacacgaaggtacatctaggccgcattcagtctgcctttttgagcctcggcagcgacaccgcgacggcgctgggcagtcgcgtggcgcgcacacagttgattggtctgctggcgattaccgtgctttgtggtagtgcgacggcaatagttggcccgattgcctttattggcctgatgatgccgcatatggcgcgttggctggtgggtgccgatcatcgctggtcgctgcccgtcacgctacttgctacccctgcccctgctgctgtttgccgatatcatcgggcgcgtgattgtgcccggcgaactgcgcgtttctgtgccaaaatacccttttgaaaagcgccttgaagtcgtgaatcactacttcacaactgatgatggttacaggatcatctcggcacgttttggtgtcccccgaacccaggtcaggacatgggttgccctctatgaaaaacatggagaaaaaggtttaattcccaaacctaaaggcgttagtgctgatccagagttgcgtattaaggtcgtgaaagctgtgatcgagcagcacatgtcccttaatcaggctgctgctcactttatgcttgctggtagtggttctgtagccaggtggctgaaggtctatgaagagcgcggagaagctggtttacgcgcgctcaagattggcaccaaaagaaacattgcaatatcagttgatccagaaaaagcggcatcagcattggagctgtcaaaagaccgacgcattgaggatcttgaaaggcaagttcgatttcttgaaacgcggcttatgtatctaaaaaagctgaaagccttagctcatcccacgaaaaagctctcagcaagcctgacaagtatgcggacgttaaaaagcgtatttagtgagatttatcacgagaatagaggccgatacggataccgtagggtaacgctgtctcttcatcgagaagggaaacagattaaccataaagctgttcagcgcctgatgggaaccctctcacttaaagcagcgattaaggtcaagcgataccgctcttacagaggagaggtagggcaaaccgcccctaatgttctccaaagagatttcaaggctacgcggccaaacgagaagtgggttaccgatgttactgaatttgcagtcaatgggcgcaagctgtatttgtctccagtaatagatctcttcaacaacgaagttatttcttacagcctttcggaaagaccagtgatgaacatggttgagaatatgctcgatcaggcattcaaaaagcttaatcctcacgagcatcctgttctgcactctgaccagggatggcagtatcgtatgagaagatatcaaaatatccttaaagaacatggtattaaacaaagcatgtccagaaaaggcaattgtctggataatgctgtggtggagtgtttctttggaaccttaaagtcggagtgtttttatcttgatgagttcagtaatataagcgaactgaaggatgctgttacggaatatattgaatactacaacagcagaagaattagcctgaaattaaaaggtctgactccaattgaatatcggaatcagacctatatgcctcgtgttaactgtccactttttgatactctaaggattccggacatcggcggcgttgtgcgtgcccgcgctatcgctaagctgctgaacgataccgatatggcaatcatcgacaaacgtcgtccgcgtgcgaacgtttcacaggtgatgcatatcatcggtgacgttgcaggtcgtgactgcgtactggtcgatgatatgatcgacactggcggtacgctgtgtaaagctgctgaagctctgaaagaacgtggtgctaaacgtgtatttgcgtacgcgactcacccgatcttctctggcaacgcggcgaacaacctgcgtaactctgtaattgatgaagtcgttgtctgcgataccattccgctgagcgatgaaatcaaatcactgccgaacgtgcgtactctgaccctgtcagaaaaatatactgccgcacggtttacccgtgacctgattgccgggataaccgtcgggattattgctatcccgctggcgatggcgttggctattggtagtggtgtggcaccccagtacggtttatataccgcagctgttgcggggattgtcattgctctgacgggtgggtcacgctttagcgtttccggtccgactgcggcatttgtggtaattctctatcccgtgtcgcaacagtttggactggcaggactgctggttgcgaccttgctgctcggggatctttttgattctgatgggtctggcacgctttggtcgcctgattga

SEQ ID NO: 121294 - DNA, 4321 bp, Homo sapiens
atgctgccggttgaagtacgtatcttcccgacggtggaagtcatcgccaacctgcagatgctcgacagctacgccggtttaacgctgccgctgatggcctcggcgaccgctactttcctgttccgccagttctttatgacgctgccggatgagctggtggaagccgcgcggatcgacggcgcatcgccaatgcgcttcttttgcgacatcgtttttccgctctccaaaagtaatctggcggcgctgtttgtgatcacctttatctacggctggaatcagtatttgtggaccgttgttgattattaccgatgtggatctcggcaccaccgtggcagggatcaaagggatgatcgctacaggcgaaggcaccacggaatggaactcagtgatggtggcgatgttgttaacgcttatccctccggtggtgattgttttagtgatgcagcaggcgtggaagctgtcggacgactacatcggcgggcgcggcttcttcaccggcgcgtttgtgggcctgcactgcgaggacatcagcggcgacggctgctacgcggacttcgactacttcacctacgagccggccgggtagcccagcgcgcgcgagagcgcgagcccggcctgctgaagctgctcgcggaaattagccagctccgcgtcgtccacgcgggaggtcagcgtcgacaggctcagggcggcgatgacgcgggactcgtggttccacaccggcaccgccacgcagcgcacgccctgctcgttctcttcgctgtccagggcgtagccttgctcgcggccaaatacccttttgaaaagcgccttgaagtcgtgaatcactacttcacaactgatgatggttacaggatcatctcggcacgttttggtgtcccccgaacccaggtcaggacatgggttgccctctatgaaaaacatggagaaaaaggtttaattcccaaacctaaaggcgttagtgctgatccagagttgcgtattaaggtcgtgaaagctgtgatcgagcagcacatgtcccttaatcaggctgctgctcactttatgcttgctggtagtggttctgtagccaggtggctgaaggtctatgaagagcgcggagaagctggtttacgcgcgctcaagattggcaccaaaagaaacattgcaatatcagttgatccagaaaaagcggcatcagcattggagctgtcaaaagaccgacgcattgaggatcttgaaaggcaagttcgatttcttgaaacgcggcttatgtatctaaaaaagctgaaagccttagctcatcccacgaaaaaggctgcggagataccgcgcagtacgttttattatcatctaaaggctctcagcaagcctgacaagtatgcggacgttaaaaagcgtattagtgagatttatcacgagaatagaggccgatacggataccgtagggtaacgctgtctcttcatcgagaagggaaacagattaaccataaagctgttcagcgcctgatgggaaccctctcacttaaagcagcgattaaggtcaagcgataccgctcttacagaggagaggtagggcaaaccgcccctaatgttctccaaagagatttcaaggctacgcggccaaacgagaagtgggttaccgatgttactgaatttgcagtcaatgggcgcaagctgtatttgtctccagttatagatctctttcaacaacgaagttatttcttacaggctttcgggaaagaaccagtgattgaacctgggttgagaaatatggctcgaatcaggggctttcaaaaagcttaatcctcacgagcatcctgttctgcactctgaccagggatggcagtatcgtatgagaagatatcaaaatatccttaaagaacatggtattacccaaaagcatgtccaaaaaaggcaattgtctggatattgctgtggtggagtgtttattcggacccttaaagtcggagtgtttttatcgtgatgagttcagtaatataagcgaagtgaaggatgctgttccggaatatattgaatactacaacagcagaagaattagcctgaaattaaaaggtctgactccaattgaatatcggaatcagacctatatgcctcgtgtttacctgtccaactttttggggtcagtacaaggtgtgctgcacccattttgttggacgatgaaatggaatagcccctaatatgtcaaagccgaaatccccttttgaaaagcgccttgaagctcgtgaatctctacttcacaactgatgatggttgcaggatcatctcggcacgttttggtgtcccccgaacccaggtcaggacatgggttgccctctatgaaaaacatggagaaaaaggtttaattcccaaacctaaaggcgttagtgctgatccagagttgcgtattaaggtcgtgaaagctgtgatcgagcagcacatgtcccttaatcaggctgctgctcactttatgcttgctggtagtggttctgtagccaggtggctgaaggtctatgaagagcgcggagaagctggtttacgcgcgctcaagattggcaccaaaagaaacattgcaatatcagttgatccagaaaaagcggcatcagcattggagctgtcaaaagaccgacgcattgaggatcttgaaaggcaaggctgcggagataccgggcagtacggttattatcatctaaaggtcttagaagccctgaaagatatgggctactttggtcatagttggggggctgggagtggcatttactctggaaaatggagaaatgcaaaaaccatgttgaagaagaagaaataccccttaaagcttcttaagaattaccttagtggcttgccgctggatgcgattgcccgttatgccgggcaacctgcagtgcttgacgccattgccgctccggcaactaccgggttaagcagtgttccagtgaacggccacaaaataccggcggcgaccggaataccgatactgttgtaccgggtaaaaacgctttgggccgcgctgcgcggtaatcattacacctggcctgccatcgatatcaccctccccggcaatcgccattttcatctgattggcagtattcatatgggtagccacgatatggctcccctgcccacccgtttgctcaaaaagctcaaaaactgtctgccgatggcaaacgctgtatctggttgccccattcatcatattccgcgctccacgccgtatcgtccggaagagggcgttaagaaaaccggtttctctctggtaacgctgaaaaagccgctggagttcaacgccatccagaatcgcctggtagtaacgcggctctaccacatctgccgccaccagcagccagatagcccagcgacgctattttatttgcatggaggcggttttattctcggcaatctcgatacccacgatcgcatcatgcgcctgctggcaagctacagccaatgtacggtgattggtattgattacaccctttcacctgaagcgcgttttccgcaagcgatagaggaaattgtggctgcttgttgttatttccaccagcaggcggaggattatcaaatcaatatgtcccgcattggctttgccggtgattccgcaggtgccatgctggcgctcgccagtgcgttgtggttgcgtgataaacagatcgattgcggtaaagttgcgggcgttttgctgtggtatgggctttacggattacgggattccgtgactcgtcgtctgttgggcggtgtctgggatggcttaacgcaacaggatttgcagatgtacgaagaggcatatttaagcaacgacgcggaccgcgagtcgccgtattactgtctgtttaataatgatctcactcgcgaagcacgctgcacgcctttttgcatattcacggatgatgaaaaccgccgacgaggctcttcgcgacggcgctcagttctttaccgctcagctttagcgatacgcggcaacaagattagccatcatttcgatatgttccggcgtggcattaagcgccggaatatattcatattttttcccgccggcaccgaggaagacctcacggttttgctcggcaatctcttccagcgtctccagacaatccgcagcaaagcccgggcacatcacctgaatatgacctacgcctttttctccgagcattttcagcgtttcgtcggtataaggcatcagccagggttcccgaccaaagcgcgactgaaaggtcatcatcactttttccggtgccatccccaatgcggaagccagttcacgagtcgttgtgcggcaacgttgcgggtaatcatcgccttcatctgcataacgctggggaatgccatgataagagagcagtag

SEQ ID NO: 121295 - DNA, 421 bp, Homo sapiens
  misc_feature (1)...(421): n = a,t,c or g
cccgggtcgacgatttcgtgggtggcgcaggggccccggccagcccggggctgtagcagtgcggacagctccagaagctcatcggcatctccattggcagcctgcgcgggctgggcaccaagtgcgctgtgtccaacgacctcaccgagcaggagatacggaccctggagcattgtcccaattccttcttctaatgaagaaatacgcttagttgatgatgcgtttggaaaaatttgtcacatggtcagtgatggctcttgggtggttcgtgttcaggcagcaaaactgttggtaagttatactttttatgtatgtatgaatgcatgtatatatttatttgttttcttttctgtaaagatgaggcnnnnnnnnnnnnnnnnnnnnnnnnnnnnnnnnnnnnnnnnnnnnnnnnnnnnnnnnn

SEQ ID NO: 121296 - DNA, 419 bp, Homo sapiens; identical to SEQ ID NO: 67858
  misc_feature (1)...(419): n = a,t,c or g

SEQ ID NO: 121297 - DNA, 1395 bp, Homo sapiens
ctaggcccctgtggcctgcatagagcggcgctgcctgcggaggcgatgggggagaagaaggatggtggtggtgggggtgatgcggcggccacggagggtggcacaggggctgcggccagccgggcgctgcagcagtgcgggcagctccagaagctcatcgtcatcttcattggcagcctgtgcgggctgtgcaccaagtgcgctgtgtccagtgacctcacccagcaggagatacagacccccctgaatttccatctggtccagccctctcatcttgtaggtgaggaaaccgaaggcctgagggagaaatgacttgccaggaacccctgattgctccacttttagtggtgctaaattcaaataattcagctggtgagaaactgactcccgtgggagtgcgggcgtgcgtgcgtgccgcggaaatcccgccttccggcgccggcggttggccctggctgcagtgggtgagctccaagtaggaagataaacgggattgcgggaagcgggagagtcaggaggagcagggaagggctcctcttccccattggctgcgcccgcagagccgccttgcgattggcggtaagcgcgggtcggtggagggggcggcagtcccgcgcgggcacgcccctcgggtagcgagaggcgtcgggatcgcgggcgccggctgagccagcggctgctgggaggctgtgtgcgcacgcctctggtaaattctgctgtgaatccatctggtcctggactctttttggttggtaagctattgattattgccataatttcggagcctgttattggtctattcagagattcaacttcttcctggtttagtcttgggagagtgtatgtgtcgaggaatttatccatttcttctagattttctagtttatttgcatagaggtgtttgtagttttctgtgatggtagattgtatttctgtgggatcggtggtgattacccctttatcattttttgttgcatctatttgattcttctctcttttcttctttattagtcttgctagtggtctatcaattttgttgatctgttcaaaaaaccagctgctggattcattaattttttgaaaggttttttgtgtctctatttccttcagttctcctctgattttagttatttcttgctttctgctagcttttgaatgtgtttgctcttgcttttcaagttcttttaattgtgatgttagggtgtcaattttggatctttcctgctttctcttgtgggcatttagtgctataaatttccctctacacactgctttgactgtgtcccagagattctggtatgttttgtctttgttctcgttggtttcaaagaacatctttatttctgcctttattttgttatgtacccagtggtcattccggagcaggttgttcat

SEQ ID NO: 121298 - DNA, 758 bp, Homo sapiens
tttcgtgcccggggctgcagcagtgcggacagctccagaagctcatcggcatctccattggcagcctgcgcgggctgggcaccaagtgcgctgtgtccaacgacctcaccgagcaggagatacggaccctggaggcctgtaaattactctctgatgactatgaacaagtgtgcagtgctgcagtctagcttatctgggttgtcagtcagctctatcctgaaagcattgtcccaattccttcttctaatgaagaaatacgcttagttgatgatgcgtttggaaaaatttgtcacatggtcagtgatggctcttgggtggttcatgttcaggcagcaaaactgttgggctctatggagcaagtcagttctcatttcttggagcagacccttgacaagaagctgatgtcagatctgaggaggaaacgtactgcacatgagcgtgccaaggaactttacagttcgggggagttttccagtggcagaaagtggggagatgatgctcccaaggaagaagtagataccggggctgtgaacttgattgagtcaggagcttgtggagcttttgttcatgggttggaagatgagatgtatgatgattctctggagaaattacacctgaatcttaagaatatggctttaaaggtgtcggcaccacctgtttacctgctaccaccacacccacaggcagaaggtccaagacctgcagaaaaagtccacccatttctgtcctctataacagaagagattcaggaaaaataa

SEQ ID NO: 121299 - DNA, 1780 bp, Homo sapiens
atggagggcatccaaggtgtccccgtattcaagaggagactgtcatatagggctgcgaccctccgtaccaccgcaaccgggcgtgaataccgatgtccgaagtctcggcctattctgattcgatatgtacgagtcctaatgggcctaattaacatctctacgggaccatataggaaaactgacgcagagagcaggagatatgagaagtcaaacccctggttggggtccagcaatgtctcctactacctgggtggtttgggcaaatgcttggcatccctggtctatggttttctcacgggtcaaaggaaagagaggcccacgctggtccagcctacgtcgttcctccgcactcgagtagtcgggcttagggaagaggccttagagggtggggctccaaaaaccagtggggactccaaggggggctgcggagaagagctccaagcacggggcggaggaccggacacagaacatcatcatggtgctcaaggaccgcatgaagatccgggagcgcaacaagcccgagatcttcgagctcatccaggagatcttcgcggtgaccaagacggcgcacacgcagcagatgaaggcggtcaagcagagcgtgctggacggcacgtccaagtggtccgccaagatcagcatcacccctcatgtgggtttccccataaacagacctgagatgaggatttcaggttatgtgggttatccaggaagtgaccccaggacgagctggggtgtcaaaaaagccaagtttgatggtgcccaagggggtgagtggccagaaattcctgaggggatcacagcagatggtctagagcttgggaagggcattggagagtccctgagccccagcgctgacccctactctcactgccacgagaaattcaacacgtacgtgaccctgaaagtgcagaatgtcaagagcagaccatcgcgcttggagactcagaagtaccaacaccttcaggtctcgctgcagctgagccaggggacccagagcacactcatcattttacacacaagattcatcagcaacaaagcctccacctcctcatctccacctcctcgctgctcctatgccctgccagacccgtttccactaccgcccttgcaacagctgtttcccctgcctggaagtccatccccctgcgcccccacctgttcctactggccagggggcccttccccctcagcaccttgggtgctaagactgactgtcctctcagtcccttgcagccttctcatcctccgacaccatgtgaagcaggggcccatctccaccaaggagctggcggacttcatccggggaggtgaggtccccaagccccatccaccagaggccacgcccaccatccttagtcacgcccacctaatggctacgccctgcatgtaccacggacatatgtggatcctggggggtcgccgatcccgggaggctaagtgccggctgcggtttctacccgtggtcgccattgtccgagcttcgtccgacatttatgttaaagggcaactttttctgccactctcaatggaaattgggaccctctgccgcatgaaaggagtaggaaaaaatgaggcaacactatatcttaacgccggccagattctgtcacctgggaagggcatcatgctgaacactactaagctgtccattaaaaatggtatcatgccggggggcgtggctcacactgtgtcccgcacttgggagccccggaggcgatattgcagcggagtcagacaactgcccctggtgacccgtcccttaagtaaaattccgtga

SEQ ID NO: 121300 - DNA, 447 bp, Homo sapiens
aatcagggagaaacttattcgtcttcagcatgagaataagatgttaaagcttaaccaagaaggttcggacaatgaaaaaatagccttattgcagagccttctagatgatgcaaatctacgcaagaatgaactggagacagagaataggtacttgtgcccataaatttccctcttactacggcttttgctgtatcccatagatttcggctggtgaatcaaagacttctggaagtacagtcacaagttgaagaattacaaaaatctttacaggatcaaggctcaaaagcagaagattcagtccttctaaaaaagaagcttgaagaacatctagagaagctgcatgaggccaataatgaactacagaagaagagagccattattgaagatctcgagccaagatttaacaacagctccttaaaaattgaagaattacaagaagctttacga

SEQ ID NO: 121301 - DNA, 1042 bp, Homo sapiens
tcccggcccgtaattcccgggtcgacgatttcgtgtcttttttgcctcatagttataatcatttaaatcttgatttcagctgatgagtaaagaatctcctgtctctgctggaaatgatgcctatgttgaccttgatcgtcagctgaagaaaactacagaggaactaaatgaagctttgtcagcaaaggaagaaattgctcaaagatgccatgaactggatatgcaggttgcagcattgcaggaagagaaaagtagtttgttggcagagaatcaggtattaatggaaagactcaatcaatctgattctatagaagaccctaacagtccagcaggaagaaggcatttgcagctccagactcaattagaacagctccaagaagaaacattcaggttcctgttatcggcagttgacacctcatggtacccagagcatctgcatgaacttctcattctggttttaatctctgaggatttcccttattttcttgtagtagaactacaaaacagattatccgaagaatcaaagaaagcagataaactagattttgaatataagcggctaaaagaaaaagttgacagtcttcaaaaagaaaaggacaggctgagaacagaaagggattctctgaaggaaaccattgaagagcttcgttgtgtacaagctcaagaagggcagctcacaacacaaggctgtacaggagtggtgcgatttgggctggctggattctctcttcttcaggttgtagagattctcttctgtcatcctcctggggagaaacttattcgtcttcagcatgagaataagatgttaaagcttaaccaagaaggttcggacaatgaaaaaatagccttattgcagagccttctagatgatgcaaatctacgcaagaatgaactggagacagagaatagagagaagctgcatgaggccaataatgaactacagaagaagagagccattattgaagatctcgagccaagatttaacaacagctgcttcatataccaggaaactcatggtcgtgctcctccatactgcttctag

SEQ ID NO: 121302 - DNA, 273 bp, Homo sapiens
aacaggccccggtgtgtgatgttccccttcctgtgtccatgtgctctcattgttcaattcccacctatgagtgagaacatgcggtgtttggttttttgtccctgcaacagtttgctgagaatgatggtttccagcttcatccatgtccctgtccactctgatggtagtttcttttgctgtgcagaagctctttagtttaattagatcccatttgccaattttggcttttgttgccattgcttttggtgttttagacatgaagtccttgcccat

SEQ ID NO: 121303 - DNA, 666 bp, Homo sapiens
ctgctcctggccccagggggcgcgcatgcccagcgggagcgcatcttcacctgcggacgtgaggctgcagcgctgccggccccagccagccagggtgccctctcccggcttgaggggttcgtattgctgcctccaggcctccaagggagatttccgctcactctctggcggcaccttctccccagcttctgggacggtcaccaaatctgagatcctgtttattctgttgatagtttcttttgctgtgcagaagcttttaagtttaattagatcccatttgtcaatttttgcttttgttgcagttgcttttggtgtctttgtcataaaatccttgcccattcctacgtccagaatgatactgcctagtttgtcttccagagttgttatagttttgggttttacatttaagtctttaatccatttggagttaatttttgtatatggtataaggatggggtccagcttcaatcttctggcgaaggcatcaggaaggtctattgcacttctgtgcttcagatctgtatctctgctgagcagttgttgattggtctctttgtagcagcatctgtctagaggtaagaaaagctggtcattatctggcttccaattgtgtacaaagtctgataacactttctgtttttcaagaataattaaagcttttctgaa

SEQ ID NO: 121304 - DNA, 809 bp, Homo sapiens
ttaagtatttgtcctaatgctctccctcccctttcccccacaaccccggacaggccccggtgtgtgatgttcccctccctgtgcccatgtgttctcattgttcagttcccacttatgagtgagaacatgcagtgtttggttttctgttcctgtgttagtttgctgagtatgatggtttccagcgtcatccatgtccctgttgtttcctgactttttaatgattgccattctaactggtgtgagatggtatctcattgtggttttgatttgcatttctctgatggccagtgatgatgagcaatttttccatacatttgttggctgcataaatgtcttcttttgagaagtgtctgttcatgtgcttcgcccactttttgatggggttgtttgtttttttcttgtaaatttgtttaagttccttgtagattctggatattagacctttgtcagatggatagattacaaaaatgctctcccgttctgtaggttgcctgtacactctgatgatagtttcttttgctgtgcagaagctctttagtttaattagatcccatttgtcaattttggcttttgttgccattgcttttggtgttttagtcatgaagtctttgtccatgactatgtcctgaatggtattacctaggttttcttctagggtttttatggttttaggttttacatttaaatctttaatccatcttgagttaatttctagtttattgagtgtttttagcatgaagcgatgttcagttttattgaaggccttttctgcatctattgagataatcatgtggtttttgtcgttggtt

SEQ ID NO: 121305 - DNA, 1039 bp, Homo sapiens
atgacggaacaattcaccgggcacatgccagatccgattgaccggcaccctctagagctgatcagaagctcaccacagagccccagaaaggcttcaaaaaccgtggccccagatgggtatatgccattttctgaactggtctctttggcccagagaataccatgggaagttggaaaaagcctaggttacccgaatcaatctctgtggcaagaggaagagaacattcttgaaggccttcccgctgatgggggagacacaagagcgtgagcgggtccacacacacttctcccgccggtactgccagtgcaaccctgatgacagcacttcgaagatgtccaaatggattcttcggacagagatgtttggagaaactgcctttgcgattgtacatgccagatcctaagcaaagtgtcctgtgggatacaccggggacaggtgtcagcagttcgcaatggtcaacttctccaggaggacagctgggccccatgaggagtgtggaccaagtgtccacatggcactggatactgggagggtctctcctccttcactctatgcagttcccgagcaatcttgtaaagtcacagctctgctgaagccggtcttcctgtttaccacccaggctgagggaacaaggtacagaggtgatcagtctgccccaaatcacacggtggtggagctgggcttagaaaatctggctacttcccagagcctacagcagactgggtctctctgccctggtgtggtgtcatgtttagcaccttccaaggctgctcctttacgtaaggaggcccatgtcttcttgtcactccgtatctccacaatgactaaaacaccaaaagcaatgcaacaaaagccaaaattggcaaatggattaattaaattaaacagcttctgcacagcaaaagaaactatcaacaggcagaagatctttgccggggaaggcaagaaggccgtgtcctacttccactctggaccaagccgagtgggcccacttgtcccttgctgggatgatgaccatggccttgctctagtctcctag

SEQ ID NO: 121306 - DNA, 316 bp, Homo sapiens
atggtggaaggcaaggaggagcaagtcacatcttacatggatggcagcagcccaactaaactccccttccccataaacaaacttaaaaatctaactgcttactgttcaacttgcaaacgttggcttcatgagttgggaaagagactggaatctccatactatggcaacaataccttggggggcccgtcgatccgaagtgcctatattgccgctctgtacttcacgctgagcagcctcaccagcgtgggttttgggaacgtctctgctaatacagatgcagaaaagatcttctccatctgcaccatgctgattggtg

SEQ ID NO: 121307 - DNA, 1062 bp, Homo sapiens
atggatactgaagcaacgctttccagggtttgtgcatgttcattaggggtcgatcatgagaggccttacagcagccattaccgaagccactctcaaatatcaaaactggggactgggattctgcaattgcagaaaaggataatcttggaaagaggcagaacagaagtaaagcgagtgggagctgaggaaaatgaggtcatatggtgtgaaatgacttacccaaagtcacgcagccagtcagcaacaggactaggactcatgtctttgactcttctgactatgcaaattgctgaagaacacctgaaggataaattggaagaatacatggcccgattttccaaagtgaggattgttcgcaccaagaaaagagaaggactcatccggacccgtctcctgggggcatctatggccagaggagaagtcctgacattcctggactcccactgcgaggtcaatgtgaactggctgcccccactcctcactctgccatcagaaagaaggggcggtgatccccaccagctccagctagaaaaacgtgaagggaagacctatcttgtgcaggcctatgtcacagccacttccacccccatggctctggccaggactgtgcccgagagaactgcctgccaaggaaagaagaggatgggctgcccttccagcatgggagttgagggaggtggaaccaagagatcagctggacaggaagacatcaatcatgtcagggtggcccctgacaaatgcacccttggagagggccaatatctgggcacctgccatgacagaggaaacccaacagccaagagagatctagaaagagcaccagctaatcaaatggccattggccgctttcctccactgtctccttctctcaccctggaggagcctgaagcaaagcagggagaaatgaagggagaggatgtgaaggcacgggagtacaccagagcgatgcttccacaagccaaggaatgcatgcagcttggagaagctaagagaggcttggaacagatccttccccagtgtttcagagggagcatgcatagctccgccgacaccttgacttag

SEQ ID NO: 121308 - DNA, 516 bp, Homo sapiens
gaagatgctctggaacaagagaagaaagagctgcaaatccaggtggagcattacgagttccagacgcgccagctggagctgaaggccaagaactatgccgatcagatttcccggttggaggagcgggagtcggagatgaagaaggagtacaatgccctgcaccagcggcacacagagatgatacagacctacgtggagcacattgagaggtccaagatgcagcaggtcggaggaaacagccagaccgagagcagcctgccggggcggagcaggaaggagcgccccacctccctgaacgtgttccccctggctgacggcacggtacgtgcacagatcgggggcaagctcgtgcctgcgggggaccactggcacctgagtgacctcggccagctgcagtccagctccagctaccaggttttgtagccgtgccgtggagtgagaggctcctccctgttgctggtgttccccgttcactggggcgggagcctcgtctgcaggcagcccttcacggctctg

SEQ ID NO: 121309 - DNA, 1179 bp, Homo sapiens
aaattcattgagtttgaagatgctctggaacaagagaagaaagagctgcaaatccaggtggagcactacgagttccagacgcgccagctggagctgaaggccaagaactatgccgatcagatttcccggttggaggagcgggagtcggagatgaagaaggagtacaatgccctgcaccagcggcacacagagatgatacagacctacgtggagcacattgagaggtccaagatgcagcaggtcggaggaaacagccagaccgagagcagcctgccggggcggaggtacgcggggcgcggcggggtggagccagggctgcgatggcaaaagcctccctcacaccccatcaaggcctggccagctgcgaaagctgcatcgtgcctgcctgttctgggggttacacctgcaaacgagaagggtcagaacgtccagctctgggcttcatgggtcacgttctggatgatacagaagaagctgtcagactctgcttccgagtctctggacgtgagagcaaatgcacggcccacagacaacacccgagaggtcctgagagccccagggccatgtgagctcagccaagagcagaggctgccccagctccagagccgcctgatgctgccgtcgtcatgggccaggccaggcctacctggaagaggcgcgtggctgcggggcaaggagtacttcgtcctgcatgtttctctcatggtgtggggcagaagggaaccagacggtgccctctggaagaagcccctcgatcattttgtaagggatggatctggggtgctctcttgtcagcgctgccacaaccaggtccttctgcctgacctggccccagccattcacttcttctgggcacacaggacctttggcaccggccgtgggagcaacgccagcagcagtggctgtgtggtaggggccttccccagccacggaccccaggaagcctccatttgtgaaacaggacccctgcacctctgtgggagagggaggggtctcatccaggtttacaccaaagccttggttgccatgactggatccagccagaaggcaccctgcagtggggtctgcgcagctacattactctggcccctgggcctccttgccagatctccacagcacgtgagaagacgttggccctgcgggaagaaggcgctggggctggcggccctgtctccctga

SEQ ID NO: 121310 - DNA, 914 bp, Homo sapiens
ctaacgtttccacgtattcatcattactactgttggcttccctcccccaccagatatctcgccatcgttcaccccttgaaaccacggatgaattatcaaacggcctccttcctgatcgccttggtctggatggtgtccattctcattgccatcccatcggcttactttgcaacagaaacggtcctctttattgtcaagagccaggagaagatcttctgtggccagatctggcctgtggatcagcagctctactacaagtcctacttcctcttcatctttggtgtcgagttcgtgggccctgtggtcaccatgaccctgtgctatgccaggatctcccgggagctctggttcaaggcagtccctgggttccagacggagcagattcgcaagcggctgcgctgccgcaggaagacggtcctggtgctcatgtgcattctcacggcctatgtgctgtgctgggcacccttctacggtttcaccatcgttcgtgacttcttccccactgtgttcgtgaaggaaaagcactacctcactgccttctacgtggtcgagtgcatcgccatgagcaacagcatgatcaacaccgtgtgcttcgtgacggtcaagaacaacaccatgaagtacttcaagaagatgatgctgctgcactggcgtccctcccagcgggggagcaagtccagtgctgaccttgacctcagaaccaacggggtgcccaccacagaagaggtggactgtatcaggctgaagtgacccactggtgtcacacaattgaaaaccccagtccagtactcagagcatcacccaccatcaaccaagatcataggctgcatgggaaatgacatctgtgttcatgcctcccccgtgccctcaagaagccgaatgctgcaaagtcgtaacatacaatgagactgtat

SEQ ID NO: 121311 - DNA, 691 bp, Homo sapiens
atgaatgaaaagattctgcagaaaaattgtactagagatgctgagtgggaggaggacagtctaggcgggaggacatttaccgaagcatgtgtgagactacagactcctacgcagtcagccccaaaagaaagcagactttttttggttgggtcctctttaaatggatttggtacccggagcagtgatggtgatttatgcctagttgttaaggaagaaccagtaacgggctacattgagagacctcagctgattcgagcaaaagtgccaattgtgaagttcagggataaagtcagttgtgtggagtttgacttgaatgtaaacaatattgttggaataagaaacacattccttctcagaacttatgcataccttgaaaatcgagttcgtccgttagtgctggtgattaagaagtgggcaagtcaccatcagataaatgatgccagtcgtggtactttaagcagctatagtcttgtattgatggttttgcactatttacaaaccctattggtggccagcattaggttaggttttcagcccctgttgcaaaacagatctagttacctggagattgctcaactcatcacttctgcggctgcttctgtggttctctggggcctctccacacctgccaggctggctgctcttcatggctggtgctgccatgggccaaccccaggatggcatgctttga

SEQ ID NO: 121312 - DNA, 813 bp, Homo sapiens
ggtgatgatgacgggctacaataatggtcgctgtccccggaattctctctacagtgactgcattattgaggagaagacggtggtcctgcagaaaaaagacaatgagggctttggattcgtgcttcgaggggccaaagctgacacacccattgaagaattcacaccaacaccggctttcccagccctacagtacctgggagtccgtggatgaaggtggggtggcgtggcaagccggactaaggaccggggacttcttgattgaggttaacaatgagaatgttgtcaaagtcggccacaggcaggtggtgaacatgatccggcagggagggaatcaccctgttccttaaggtggtcacggtgaccaggaatctggaccccgacgacaccgccaggaagaaagctcccccgcctccaaagcgggcaccgaccacagccctcaccctgcgctccaagtccatgacctcggagctggaggagctcgtggataaagcctcggtccggaagaagaaggataaacccgaggagatagtcccggcctccaagccctcccgcgctgctgagaacatggctgtggaaccgagggtggcgaccatcaagcagcggcccagcagccggtgcttcccggcgggctcagacatgaactctgtgtacgaacgccaaggaatcgccgtgatgacgcccactgttcctgggagcccaaaagccccgtttctgggcatccctcgaggtacgatgcgaaggcagaaatcaataggtaagaagtgtggcactcccccacagaagttgcccctgggctttcaaacacagccttag

SEQ ID NO: 121313 - DNA, 1419 bp, Homo sapiens
atgatgaacgtccccggcggaggagcggccgcggtgatgatgacgggctacaataatggtcgctgtccccggaattctctctacagtgactgcattattgaggagaagacggtggtcctgcagaaaaaagacaatgagggctttggattcgtgcttcgaggggccaaagctgacacacccattgaagaattcacaccaacaccggctttcccagccctacagtacctggagtccgtggatgaaggaggggactgggcagggcgcaccgtcttctgttttggggagaggttacgatgcacgtcctccttggaggacagctcatcaattcctatgaaaatgatcgatgcagatgccctctggcccagcctctgtgctaacaggactggatcccacagctctacttgtccaggtgtgtccccaggaaagcgcgggccagacgcgctgcaggccgactccaacgggggctgctttctctccatgcagcagctgtgctgctgttttctttcacgtcctccaggaagccggagccctcctgtgctctcctgtagctgcctcatccctgcgctctgggccgtcagtgtgtctttctggtcgcctcccgctcagactgtgggaatcttggaggacacagctgtgaggggccccccacccacagctcccccaggccccactgtcagctcttgccctggccccgcggtgctgccagcctgctccctgctcccggctttagcagcaagaccgacatcaagctctggaatgagcctcccaagggtcacatccagcctcagagccaggactgccaactccatctgggctcctcccccactgctgagcatccagaacatctgtctggaagcttccatatggaacgccctccatgatgaaattggaccgccaatgagcggcgtgggcctgcagcctgggctgctggggacccggccttgtctgggcagtctgggtctgctcggtgttgccagaagaaattgtgggcacctggtggcacccacgggggctcaagatgaaggaggagggagtgcacctaagtgttcgtcactgcgaggccttctgaggagccaccagggaggggggatgccagatctaggggcaagaggcacctggaccaagaatagattaaggttcagggcactcccttctccagaaatcaccatgaggatctccatcagggacgacggcaaaagggcatcgccttctcagtgtccctggaccttcctggagagcgtttaccactgcagcgtggctgtttgggtccacacgtgtctgctcatgaggctagacaagttcctctccataaccatccatccacacctcgatgtttctcagacctgctccatggaggccctgaggctggactcacatttccaccacctctgggccctcctggagcttgtcctgccctga

SEQ ID NO: 121314 - DNA, 1144 bp, Homo sapiens
ggagagcatcgaccagggcgcagtgcgacgacacgacgcgtgccgacggatgggagcgtacagggcgaggaggtacggcgccaggtcgagcagcgggggtggtgtgccgggggaacaggtggaagcggagagctcacttaatctctccaaacctcatttgcaaagcagggatgacgatgcctacctaatggttcgtttgtgggcattaagtgaggtgatgtatgcaggaagcttcattcaggaagtacacgccacaaatggcagctctcgcagcatttggcaggctttgttgttagctgcttcattatctcttactagaatggagaattggataggagctgggtttttcattctatttagacctgcattcggggaaccaatgttcacgggaatgaagggttccagttacattttccagaatcatgatgataaatacacaacggaaatacaggacagagtcagcaaagtaaaagtccatcagtggattatccctgcccccatagctggagagctgctctgcctggtggctttctatggccctgcatgggccttccctggaggctctccaatttctccttgtcctcctgagaagctgaataaccttgttcttacggggacccacagtgaacctacagagggggggagccgtgcaaggatgctgagctgtatgcaggcaacattctacgtggtttcagatattgtaggtgaaaagaaaaggaatctaaaccccaaagataaagatcttagggaaatgataattaaaggaattcgggagtcagtgccccacactcagaatctttcccgagcatttgacgtacaacaggaaaaagatgaaggccccatgaaatttctaaaaagaccaagggaacaaacaaaaaaatatgcagatttagatccagaagactctctcgggcaagaaatgttaaagctacatgttgtcacaaacagctggtcagacataacaaagcagttgcaaaaactagaaaactggaaaaacctgtccatagagaaactcctaggagaagcccaaaaattctatgcatccataaggaagcccattgacctaattgctgccatcaacccagggacaaagccaatcgggtggacagcggagaggcaatatgggaaggaccttggtccttga

SEQ ID NO: 121315 - DNA, 579 bp, Homo sapiens
atggtggaaacagtaagagaactagaattagaagtggagcctgaagatgtgactgaattatttcagtcttataataaaaccttaatggatgtgaagttgcgccttatagaaaaaataaaaggaaaaaagtcaagagaaaagaaaaccattaactacagttcggtggaagcagggacgaggcaaatgcacaatgaagttacgtcttcggttcagggtcacatgcctccgctcatgatcccaatttttccacatgaccagcggaccctggcagcagctgctgctgcccaacagggattcctcttcccccctggaataacatacaaaccaggtacacctgagagcctggcagaaaaagaacggcagctctccaccatgattacccagctgatcagtttacgggagcagctactggcagcgcatgatgaacagaaaaaactggcagcgtcacaaattgagaaacaacggcagcaaatggaccttgctcgccaacagcaagaacaggttggcagtgagtgtgttctcactaaggatcatctctctggacttcgagctgtagcagctcagcttttgagtcaatag

SEQ ID NO: 121316 - DNA, 290 bp, Homo sapiens
atggctcggtccaagtctgaaggcctcagggtgaacggggggaagcagggcctcctggaagaggtgagcgaggggaacctggagcccccggaccaaaggggaaacaaggtgaatcaggaactagaggcccaaaggggtcaaagggggatcgtggagaaaaaggggactctggagctcagggaccaaggggtccacctggtcaaaaaggggatcaaggagccactgagatcatagactacaacggcaacctccacgaagccttacaggcaagtgactggtccctgccctga

SEQ ID NO: 121317 - DNA, 482 bp, Homo sapiens
  misc_feature (1)...(482): n = a,t,c or g
ccttttaattacatttattttaatgctgaatttactcccgtgccataagtttttgtttcttcagtttcttctgggatatctttttcttctgggcaacctcctcttctggtttaggaacaatctgttccttttccgtaaggatcatctcaatgtggcagggagagctcatgtatgggttaatccgaccatgagctctgtaggtccggcggcgcatcttaggtgctttgttcacttggatatgctcaatgaccagagaattcagcactctttttgggccaccgaccttgtgtccagccccattgcttggcctgcgcacacctgccaactccaccattgtaacgtcggaatggtacacactgtttctgtaaagtgacatctttcagatacttcgtggctnttcgtatatgcatacccttgatggcctgagcagtttcacgagtgttcttaaagtgaacacgaagattggaacctcttgatttgca

SEQ ID NO: 121318 - DNA, 879 bp, Homo sapiens
ttactcctgtgccataagtttttgtttcttcagtttcttctgggatatctttttcttctgggcaacctcctcttctggtttaggaacaatctgttccttttcagtaaggatcatctcaatgtggcagggagagctcatgtatgggttaatccgaccacgagctctgtaggtccggcggcgcatcttaggtgctttgttcacttggatatgctcagtgaccagagaatctacatctaaacccttaagttcagcgttactctctgccaaacttttacacagggcacgttcccgaaccggcctctcaggacggaacccaaagacaatttcacaggatttacaatttgcagctattggttctcctttgaccgaatccttgaatttgcactcacgccaggcgctgcgcgactgctgctggacacacacgatcccaccgaatccagacacggtatggcggttcccactttcctcaccagtcagcgcggctccgaagcaggagagggccagctccgagccctgctcgtggagccattggtgcaggtgctccctttcctggctgagcagtatccccacagaagggtgcaccccagtctgttcatccatctgcttgttgatggccacgttcccaatgttcagtttaatcaagattgtcaggtaagatttcatgaagataacatctgagtcaaaaccttgatgagataaaggaggaagtgcattccaggcagaaggaacagcaagcacaagggccctgatggcgctgggaggccctgagtgtgcagggagcagcaggaaggccagtgcgcctggacaggttacccaggggcacagggcccagacccgtactgtggaaaaggtccgtacagctaggcttgatgcagccat

SEQ ID NO: 121319 - DNA, 1728 bp, Homo sapiens
atggctcataaagaaggagatatgccagctgagcaaggatttggggcaggatatggattcaagagattttatgtgcccatgaaggaaggcttgaagggctcatggtcatttctgaaataccagcgaaggcggaagtacagcctgtctgccgtgtttcattcagccaccatgttgcaagatgttggtgaggccattcagtttgaagtcagcattgggaactatggcaacaagtttgacaccacctgtaagcctttggcatcaacaactcagtacagccgtgctgtatttgatggcaactactattattacttgccttgggcccacaccaagccagttgttaccctgacttcatactgggaggatattagtcatcgcctggatgcggtgaacactctcctagctatggcagaacggctgtatccacaggagaaaaacaacgggccaaaggtgcctgtggagttgcgagtgaacatctggctaggcttaagtgctgtggagaagaagtttaacagcttcgcagaaggaactttcaccgtctttgctgaaatgtatgaaaatcaagctctcatgtttggaaaatggggtacttctggattagtaggacgtcataagttttctgatgtcacaggaaaaataaaactcaagagggaattttttctgcctccaaaaggctgggaatgggaaggagagtggatagttgatcctgaaagaagcttgctgactgaggcagatgcaggtcacacggagttcactgatgaagtctatcagaacgagagccgctaccccgggggcgactggaagccggccgaggacacctacacggatgcgaacggcgataaagcagcatcacccagcgagttgacttgtcctccaggttgggaatgggaagatgatgcatggtcttatgacataaatcgagcggtggatgagaaaggctgggaatatggaatcaccattcctcctgatcataagcccaaatcctgggttgcagcagagaaaatgtaccacactcatagacggcgaaggctggtccgaaaacgcaagaaagatttaacacagactgcttcaagcaccgcaagggccatggaggaattgcaagaccaagagggctgggaatatgcttctctaattggctggaaatttcactggaaacaacgtagttcagataccttccgccgcagacgctggaggagaaaaatggctccttcagaaacacatggtgcagctgccatctttaaacttgaaggtgcccttaacacttgtgaaactgctcaggccatcaagggtatgcatatacgaaaagccacgaagtatcttaaagatgtcactttacagaaacagtgcgtaccattccgacgttacaatgctggagttggcaggtgtgcgcaggccaagcagcggggctggacacaaggtcggtggcccagaaagagtactgaatttttgctgcatatgcttaaaaacgcagagagtaatgctgaacttaagggtttagatgtagattctctggtcattgagcatatccaagtgaacaaggcacctaagatgcgccgctggacctacagagctcatggtcggattaacccatacatgagctctccctgccgcattgagatgattcttactgaaaaggaacagattgttcctaaaccagaagaggaggttgcccagaagaaaaagatatcccagaagaaactgcagaagcaaaaacttatggcatgggagtaa

SEQ ID NO: 121320 - DNA, 935 bp, Homo sapiens
ggcacgaggagcaagcctggagggtgcctggattggtgaggcccgtgtggctacttctgtggaagcagtgctgtagttactggaagataaaagggaaagcaagcccttggtgggggaaagtatggctgcgatgatggcatttcttaggacacctttggattaataatgaaccacactctcttctgaagcaagctgttcgaatcatctgatatttatactgaatgagttactgtaagtacgtattgacagaattacactgtactttcctctagggtgatctgtgaaaatggttcgctattcacttgaccccggagaactcctatgaaatcatgcaaaatcaaagaggttccaatcttcgtgttccctttaaggaccactcgtgaaaactgcctcaggcccatcaaagggtatgccatatacgaaaaagccccacgaagtatcctgaaagatgtccaccttaccagaaaccagtgtgtccccattcccgaccgttacaaatggtggagttggcaggtgtgccgcaggcccaagcaatggggctggacacaaggtccggtggccccaaaaaggagtgctgaattttttgctgcacatgcttaaaaacgcagaagagtaatgctgaacttaaggggtttagatgtagattctctggtcattgagcatatccaagtgaacaaagcaccctaagatgccgccgccggacctacagagctcatggtcggattaacccatacatgagctctccctgccacgattgagatgactccttacggaaaaggaacagattgttcctaaaccagaagaggaggttgcccagaagaaaaagatatccccagaagaaactgaaagaaacaccaactttatggcacggggagtaaatttcagcattaaaataaatgtaatttaaaaggaaaaaaaaaaaaaaaaaaatttca

SEQ ID NO: 121321 - DNA, 279 bp, Homo sapiens
atggagctgctcaaagaatcggatgggctgggaattcaggttagtggaggccgaggatcaaagcgctcacctcacgctatcgttgtcactcaagtgaaggaaggaggtgccgctcacagggatggcaggctgtccttaggagatgagctgctggtaatcaatggtcatttactggtcgggctctcccacgaggaagcagtggccattcttcgctccgccacgggaatggtgcagcttgtggtggccagcaagatcagcggcggcactggactctcatag

SEQ ID NO: 121322 - DNA, 729 bp, Homo sapiens
atgacgagctatgagctgtggaagggaatgggggaagtgaagggcacaaacagaagtactggagggagacgctgggctctcaggaagcagcaggcacgtgccagttggaagccagctgcagccaggaggaaggaggccttaatcttctctgtcatggaccattactgtgccgtaagggagaatccagaaagaccccctttcatacgtgaagagcagaaacaaaaggaggagacagagagaagagagaacgagcgcagacaggacgcaaaaaggaagagagaagagaagacgaaggagaagagcagaacaaaacgagaaagagaggaagcgaggaaaagacgagaggacaaaaagaagtacgaaggagggccggcaagaaaaaaaagagagaaaagaagcaaaaaaacacaagaacatgatttctctctagccatgggaaggaaaaaagattatgtctatgaagttatatttacccgttgtctgaaggttttcaaaatctgccttataacgtctatggtaacactgtccaaaagaactttcggaaactatggaaatgtgatttctaatagggaaagaattgagttgatagggtatgagaaggaggagagtgatttccacttagatatattaataacgatagaaataacgaaaatgataatgatgactaatgttattgagcacttgctgtttgctaagcacaattctaggcattttgtgcatctaatttaa

SEQ ID NO: 121323 - DNA, 700 bp, Homo sapiens
cggacgcgtgggggaagttggaggaagagaacaggagcctgaaggctgacctgcagaagctaaaggacgagctggccagcactaagcaaaaactagagaaagctgaaaaccaggttctggccatgcggaagcagtctgagggcctcaccaaggagtacgaccgcttgctggaggagcacgcaaagctgcaggctgcagtagatggtcccatggacaagaaggaagagtaagggcctccttccttcccctgcctgcaagctggcttcccacctggcacgtgcctgctgcttccctgaagaaccccggcctctccctccagtaacttctgtttgtgcccttctgcttcccccaattcccttccacagctcatagctcgtcatctcggcccttgtccacactctccaagcacattacagggggacctgattgctacacgttcagaatgcgtttgctgtcatcctgccttgcctggccaggctctgcacagccttggcatctcacgcctgagcggacgaagcacgagttagttgtagtccggcttgcggtggggctgacttcctgttggttttgagccccttttttgttttggccctctgggtgttttctttggtcccgcagaagggtgggtggaagcaggtggactggagtttctctatgagggccctaaaagttcgtcatggtgtgtaaaaaaaaaaaaaaa

SEQ ID NO: 121324 - DNA, 412 bp, Homo sapiens
cgagcggctgcatcccgcgtccagcacctacgtcccgctgccgtcgccgccgccaccatgcccaagagaaaggctgaaggggatgctaagggagataaagcaaaggtgaaggacgaaccacagagaagatccgcgaggttgtctgctaaacctgctcctccaaagccagagcccaagcctaaaaaggcccctgctgaaggtgctggagatgccaagtgaagtgtgtgcatctttcagcatagacttaactcccttaagcccagacatctgttgagacctgacccctagtcattggttaccagtgtgtcaggcaatctggactttccagtgatgccactgagatggcacctgtcaaaagagcagtggttccatttctagattgtggatcttcagataaattctgccattttca

SEQ ID NO: 121325 - DNA, 283 bp, Homo sapiens
  misc_feature (1)...(283): n = a,t,c or g
ccaagagaaagactgaaggggatgctaaaggagataaagccaaggtgaaggatgaatcacagagaagatctgcgaggttgtctgctaaacctgctcctccaaagccagagcccaagcctaaaaaggcccctgcaaagaagggagagaaggtacccaaagggaaaaagagaaaagctgatgctggcaaggagcgggaaggttactggagatcccaagtgaagtgtgtncattttttataactgtacttctggtgactgtacagtttgaaatattactttataca

SEQ ID NO: 121326 - DNA, 1191 bp, Homo sapiens
atgtttacagacggtagcagcttccttgagcagggagttcaaaagactggtgcggccatcactatggagactgatattctgtgggcccaagctctaccagtggtcacttcagctcagagagctgagttggttgccttcacacaggctctccgatggggcaaggacaaacatattaacatttacactgacagtaggtatgcttttgctactgtgcatgtgcacagagccatctatcaagagcatgggctacttaccttagcaggaaagactatcaaaaacaaagaagaaattctagccctgcttgaagccacagggattcctcagcaggtggctgtaattcactgcaaaggacatcaaagggaagacatggccattgcccgtggtaatcagagggcagattctgcagcccaggaggcagcacggcttccagtcgcacctctaatcttactgcctgcagtgtcttttccacagtctaacctacaagatcatccaatatactcagcagaggaagtaaaactggtttcggatccccaggccagtaaaaatcaggaaagttggtggattcttcctgactcaagaatcttcataccccaaactcttggagaaattttaattggtcgcctgcattctaccacccatttgggaggagtaaaactgacccagctcctaagaagctgtttcaagatcccccaccttcagaacttagcgaaccaagcatctctccagtgcaaggcttgtgctcaggtaaacgccaagcaaggtcctaaaccgagctcaagcaaccgcctctggggagacttgccaggagaaaggggcctttctaggcttgggctgtctggctttggaggaggaggtttagcagacaaccttgcggatcttctctgtggttcatccttcaccttggctttatctcccttagcatccccttcagcctttctcttgggcatggtggcagtggcgacagtggcgggaggatgcaaagctggaataagagcaatgactgccacacctgacagacctgtcgctgaacacatctgcactctccaatccaaaagacctgatgcagaaaacaaaaaaggggagatgtggtggtttagtcaggctggttggaaaaaaaaattagttataatagccacaaaccctcttggaaggcatgagattttgcataactttggtaataaatctggctga

SEQ ID NO: 121327 - DNA, 1276 bp, Homo sapiens
ctaaccggtccggggctcccagcgctataaaaactttataaaccccccggagcccgagcattgttatagaagaggcgagaacgacccccggaccgaccagagcccgcgcgccgctgcatcccgcgtccagcacctacgtcccgctgccgtcgccgccgccaccatgcccaagagaaaggctgaaggggatgctaagggagataaagcaaaggtgaaggacgaaccacagagaagatccgcgaggttgtctgctaaacctgctcctccaaagccagagcccaagcctaaaaaggcccctgcaaagaagggagagaaggtacccaaagggaaaaagggaaaagctgattcttggcaaggaggggaataacccttgcagaaaaatgggggatggccaaacagaccacgctcagaaagctgaaagtgctggagatgccaagtgaaagtgtgtgcattttttgattaactgtgttacttctggtgactgtacagtttgaaatactagttttttatcaaggttttataaaaatgcatgaattttgttttactttttttttttttttttaaaagctatgttgttagcacacagaaacactttcattgttgtttttttgggggaaagggggcataatgtcactaataagaatgtctccaaagctggattgatgtgggagaaaacacctttcccttctagttttgagagacttcctcttggctcccaggaggagggattccctgactttgacacacatggccaccttggcacaaaagccttgtggtataaaaaaacaaatttgtttttatgtcctcttctccctttccatctttcagcatagacttaactcccttaagcccagacatctgttgagacctgacccctagtcattggttaccagtgtgtcaggcaatctggactttccagtgatgccactgagatggcacctgtcaaaagagcagtggttccatttctagattgtggatcttcagataaattctgccattttcatttcacttcctgaaagtcagggtcggcttgtgaaaagttgttaaacaacatgctaaatgtgaaatgtcaaccctcactctaaactttccctgttcagagcatcagatgaagacttcattgggttttatagtggctttctgatttttggtagtccattgaagaagggagtttgaaagttgttgtatactgttaacgattgtctgcccatgtcctgcctgaaataccatgattgtttatggaaagtatctttaataaagctggatacagtttggc

SEQ ID NO: 121328 - DNA, 456 bp, Homo sapiens
atgctcatggataggaagagtcaatattgtgaaaatggccatactgcccaagcacgggaagcccgtaaagcgcaagccagagcgaaacaggcagaactgcagcaaactaacgacgcagcaaccgttgctgatccaccgcgcaagctggaacagcaacaggctaatgcgtgtccagaacaacaggtcgatccgcgcagagccgccgtcgaagccgctattgcccgtgccaaagcgcgcaagctggaacagcaacaggctaatgcggaaccagaagaacaggtcgatccgcgcaaagccgccgtcgaagccgctattgcccagtttttcgagctgtacaggaaaatgctgtcacggtccatgatgtcaattctggatgaccacattagccacgatccacagctagaggatcccatgggcttcctgaatgcatacctgggcttcatcaagtccttttga

SEQ ID NO: 121329 - DNA, 2503 bp, Homo sapiens
cggcaaccagcacaccccggcacctcctctgcggcagctgcgcctcgcaagcgcagtgccgcagcgcacgccggagtggctgtagctgcctcggcgcggctgccgccctgcgcgggctgtgggctgcgggctgcgcccccgctgctggccagctctgcacggctgcgggctctgcggcgcccggtgctctgcaacgctgcggcgggcggcatgggataacgcggccatggtgcgccgagatcgcctccgcaggatgagggagtggtgggtccaggtggggctgctggccgtgcccctgcttgctgcgtacctgcacatcccaccccctcagctctcccctgcccttcactcatggaagtcttcaggcaagtttttcacttacaagggactgcgtatcttctaccaagactctgtgggtgtggttggaagtccagagatagttgtgcttttacacggttttccaacatccagctacgactggtacaagatttggaagggtctgaccttgaggtttcatcgggtgattgcccttgatttcttaggctttggcttcagtgacaaaccgagaccacatcactattccatatttgagcaggccagcatcgtggaagcgcttttgcggcatctggggctccagaaccgcagaatcaaccttctttctcatgactatggagatattgttgctcaggagcttctctacaggtacaagcagaatcgatctggtcggcataccataaagagtctctgtctgtcaaatggaggtatctttcctgagactcaccgtccactccttctccaaaagctactcaaagatggaggtgtgctgtcacccatcctcacacgactgatgaacttctttgtattctctcgaggtctcaccccagtctttgggccgtatactcggccctctgagagtgagctgtgggacatgtgggcagggatccgcaacaatgacgggaacttagtcattgacagtctcttacagtacatcaatcagaggaagaagttcagaaggcgctgggtgggagctcttgcctctgtaactatccccattcattttatctatgggccattggatcctgtaaatccctatccagagtttttggagctgtacaggaaaacgctgccgcggtccacagtgtcggattctggatgaccacattagccactatccacagctagaggatcccatgggcttcttgaatgcatatatgggcttcatcaaactccttctgagctggaaagagtagcttccctgtattacctcccctactcccttatgtgttgtgtattcccacttgggaagaaatgcccaaaaagaggtcctgggccatcaaacatatattctctcacacagtccactyttactcaaattggtgaacagtgtataggaagagvgccagcaggagctctgactaaggttgacataatagtccacctcccattaactttgatatctgattcaaatgtatagacttgggctttggtttttttgtgctattagggaaattctgatgagcattactattcactgatgcagaaagacgttcttttgcataaaagactttttttttaacactttggacttctctgaaatatttaggaagtgctaatttctggcccacccccaacagggaattctatagtaaggggggcagggagaaggggggctccttccctctcctcggaattgacgttatggggcacatgccttttttaaaagttccttttaaggccaacacagagctgagtcctctttgtcatacctttgggatttagtgtttcatcagctgtttttagttataaacattttgttaaaataggatattgggttaaatgatacagtattttagggtatggatttaaggactatgatttacccatacattatatatattttataaaggtaccaaaccagcatacccttactctgccagagtaagtgaagctaattaaacacgtttggtttccgaataaattgaactaaatccaaactatttcctaaaatcacaggacattaaggaccaatagcatctgtgccagagatgtactgttattagctgggaagaccaattctaacagcaaataacagtctgagactcctcatacctcagtggttagaagcatgtctctcttgagctacagtagaggggaagggattgttgtgtagtcaagtcaccatgctgaatgtacactgattcctttatgatgactgcttaactccccactgcctgtcccagagaggctttccaatgtagctcagtaattcctgttactttacagacaggaaagttccagaaactttaagaacaaactctgaaagacctatgagcaaatggtgctgaatactttttttttaaagccacatttcattgtcttagtcaaagcaggattattaagtgattatttaaaattcgtttttttaaattagcaacttcaagtataacaactttgaaactggaataagtgtttattttctattaataaaaatgaattgtgacaa

SEQ ID NO: 121330 - DNA, 1957 bp, Homo sapiens
tcatgtacagttgcctatagtctcaacttcagcctcagaccctggagggacatccacacagttgatgacatctccagtctttgacaccatgtctgcacctctaatgggagtaccaaactctggagcattgtccccacccctaatgccagcctcagactctggggcactttccccattgctaatgccagcctcagactctggggcactgtccccattgctaatgccagccttagattctggaacattgtccccattgctgtccacttcagagtatggggtaatgtccccagggatgatgacaattcctgattttggaacgatgtccgcaacgctaatggtagcaccagattctgcagagatatcaccattggcaatgccagctccatcctctggagtggtgtgtacacctataatgagcacttcatcctctgaggcaatgtccacaccattaatgctagccccagattctggagagttatccccaattctaatgcaagatatgaatcctggagtgatgtctacacagccagtgccagctcccagctctgaggcaatgtccccattgcaaattacagatgaagacaccgaagcaatgtccaaagtgctaatgactgctctagcctctggagagatatcttcgctgctaatgtcaggcacggactctgaagcaatatcctcactgataatgtcagctgtagcttctggaggtacatcaccccagccaacaagcacccaaaactctgggggaatacctaccccgctcatgtcagatctagactctggaataatgtcatcgcttttaatgtcatctccaggctctgaagtaatgtccacaccgctactgtcagtcccagatgctggagaaatgtccacattaccaaagccagctccagatgctgaagcaatgtccccagcactaatgacggccctaccctctggagtgatgcccacccaaacgatgccagccccaggctctggggcgatgtccccatggtcaacacaaaatgtagactctgaaatgatgtctaatccgccagtgagagcaacagcctctggggtgatgtctgcaccaccagtaagagctttagattctggagcaatgtccacaccgctaatgggagccccagcctctggaaatatgtctacattgcaaaagacagttccagcctctggagccatgaccacctcactgatgacagtcccaagctctggagtgatgtccacagagcaaatgtcagccacagcctctagagtaatgtccgcacagttaacaatggccaaaacttctggagcaatgcccacaggctctatgaaagccgtggcaaaacaatacaagagagccacagcctctggaaagatgtccacgccactgaggagagctccaacttctggagcaatgtccacccaaccagttacggcaacagcctctgaaacaatgtccatgccacaattgacagtcccagcctctggatcaatgtccatgctgcaaatgagagcccctgtctctgaagcaatgtccatgccacaaatgagaaccatggcctcaggattgacatctgcagcacagatgaaagccatgacttctggagcaatgtccaccccactaatgacagcccaaacctctggatcaacatccacgctgttaatgagagacacagcctcaggagtgatgtcctgtccacaaatgagatctctggcctctggagcattgtccaagccactaatgacacccaaagcctcaggaacgatgttcacggagaaaatgacaaccacagcttctgaagcaatgcccacactgctaatgagagacacagtttctggagctctgtccatgccgcaaatgacagacacagccttttggaaggttgtctgcatcgctaatgagagacacagcttctggagcaatgtccacatcacaaatgacagccacagtctctggagggatgtccatgccact

SEQ ID NO: 121331 - DNA, 681 bp, Homo sapiens
atggaacaaggtgcccaccttgccaccggcagcaccttctgcccacagtgtctgcagcccccagtggaccagctgacccacaaagcccttctgcccccaggaatggtcctcgtccgaagtgagaatgggcagttgttaatgattcctcagcaggccttggcccagatgcaggcgcaggcccatgcccagcctcagaccaccatggcgcctcgccctgccacccccacaagtgcccctcccgtccagatctccaccgtacagaggatccctggtataaacatctgtgcgcagcgatttcgtgtggacataaattttcagcccctttgggtaaataccaaggagcacgattgctggaccgtgtgtgttctcgacgtcctttctgccccggaccctcgcggcttctcgctccttggtctcctctgcttggtggtagctgctcagtctttcctggtctttgatggccttgacgtgctggagagctctggtccttgtctggtggacgtttccttagtttgcgtttgtctggtgtctcctcgtgatgacgtccaggctgtagaatctcagttagaatgccgcgggccggctggcgtgtcctcagagcactggattgggaggcaggcctttggcccctgcgtgggcattcgcaaggacgctgccagtggaggctgctgtggcgtctga

SEQ ID NO: 121332 - DNA, 723 bp, Homo sapiens
atgattttgtccaagttcctgaaagtacctgaaaaaagttctgagagcttttttgcatatttaaatcaaaatcctgggtatgggaatattgctccgagcactgaaggaggcaaaatcttttgtattttatatgccatctttggaattccactctttggtttcttattggctggaattggagaccaacttggaaccatctttgggaaaagcattgcaagagtggagaaggtctttcgactccttgcagcaccatcaaagatcaagattcttttaggaaggcgagacagttgcatattattgaattggcagtgcacaatgaatgcatttgctgagtattggagggtgctattggaaagggtgaccgaattccagggggaatttatgacagccaaaatgtctccagacattactaaatgtgtcctcaggggcaaaatcgccctagttaatttgaccatagctatactgggatataaggggacaattgccccaaagactaccaggtgcatgccctggtcccctgtccaaatcttccacacgagctctggtgcctccaccaatgatcctaatcagtttttcagtgctagcgccattccgactcagaactctcctccttcagatgggtccttaaagagggctttgcagattttatactccgggaatgagatcatttctcaccaagaaagcaaaaatgcctggagacttgactctgatgagtacacataa

SEQ ID NO: 121333 - DNA, 2948 bp, Homo sapiens
ctgtgaactagccagtgctctgtcccatctggatgccagccacctcacagagaacctgcccaaagctgcatcagagctggggcaacaacccatgactgtccaacaagtctcggtacgccacacgcagccctcgcccgtgtcccgctccaagctccaggagctgagagccttgagcatgcctgaccttgacaagctctgcagcgaggattactcagcagggccgagcgccgtgctcttcaaaactgagctggagatcacccccaggagaagggcgggaacagggcctgtccaggaggaagtggccctaaaaccagtgctgctgagacacccagttcagccagtgatacgggtgaagctgcccaggatctgccttttagaagaagctggtcagttaaggggtgtacaccgccttgagtcagttgaagaatattacgaggctgatggtgcggaatggggacccccggataccgcgatgttggagagtctcccggagatggccgggaaacactccctcccgcagctgctggactcttccagtgcctcacagccaggggcgattcagatcatctattctcatcctatatcaaattcattacctaaaacatttattgagctcttactggggtgccagccagtggaaacataccaggcatacacattacttcgaatctttgtggtaggaacatctgccatcatagaaataccaaaagagagaaaaatgggcagatctcacaaggagcctggaaaacccagagccaacagcctcgtgactcttgggagccatcgggcttctgggctcttccacaagcaggtgacagttgccagacaagccagtctccccggaagcccacaggccctccgaaaccctctcctccgccagaggaaggtaggctgctacgatgccaacgatgccagtgatgaggaagagtttgacagagaaggggactgcatttcactctccaggggccctcccgggtcccatcaggcctctgtcagaggatgacccgagggcgtgtctcaatttcctcttccaagggcatggacgtccacaaccaagaaggaacgaccccggaaaacactgctcagtggacttagaggagagtatcccagagggcatggtggatgctgcgtcctatgcagccaacctcacggactctgcagaggcccccaaggggagccctggaagctggtggaagaaggaactgtcaggatcaagtagtcgcaccctaaattggaatacacagtccgtacagacacccagagtccgagcgaacacgtgggagaccccagttccccccagcagaaaagtgaaggcctgggctccaggcacagaccagtggccacgaaacccaccagagaccagtagcaagggctctgattcggaactaaagaaatcacttggtcctttgggaattcccaccccaacgatgaccctggcttctcctgttaagaggaacaagtcctcggtacgccacacgcagccctcgcccgtgtcccgctccaagctccaggagctgagagccttgagcatgcctgaccttgacaagctctgcagcgaggattactcagcagggccgagcgccgtgctcttcaaaactgagctggagatcacccccaggagaagggcgggaacagggcctgtccaggaggaagtggccctaaaaccagtgctgctgagacacccagttcagccagtgatacgggtgaagctgcccaggatctgccttttagaagaagctggtcagttaaagggggatttggcagggtcacaggacaatagtggagggaagacctcccacaaaacactttctaaggcagtgtcacagcggctccatgtagccgaccacgaggaccctgacagaaacaccacagctgcccccaggtccccccagtgtgtgctggaaagcaagccacctcttgccacctctgggccactgaaaccctcagtgtctgacacgagcatcaggacatttgtctcgcccctgacctctcccaagcctgttcctgagcaaggcatgtggagcaggttccacatggctgtcctctctgaacccgacagaggttgcccaaccacccctaaatctcctaagtgtagagcagagggcagggcgccccgtgctgactccgggccggtgagtccggcagcgtctaggaacggcatgtccgtggcagggaacagacagagtgagccgcgcctggccagccatgtggcagcagacacagcccaacccaggccgactggcgaaaaaggaggcaacataatggccagcgatcgcctcgaaagaacaaaccagctgaaaatcgtggagatttctgctgaagcagtgtcagagactgtatgtggtaacaagccagctgaaagcgacagacggggagggtgcttggcccagggcaactgtcaggagaagagtgaaatcaggctctatcgccaggtcgcagaatcatccacaagtcatccatcctcactcccatctcatgcctcccaggcagagcaggaaatgtcacgatcattcagcatggcaaaactggcgtcctcctcctcctcccttcaaacagccattagaaaggcagaatactcccagggaaaatcaagcctgatgtcagactcccgaggggtgcccagaaacagcattccagggggcccctcgggggaggaccatctctacttcaccccaaggccagcgaccaggacctactccatgccagcccagttctcaagccattttggacgggagggtcaccccccacacagcctgggtcgctctcgggacagccaggtccctgtgacaagcagtgttgtccccgaggcaaaggcatccagaggtggtcttcccagcctggctaatggacagggcatatatagtgtaaagccgctgctggacacatcgaggaatcttccagccacagatgaaggggatatcatttcagtccaggagacgagctgctag

SEQ ID NO: 121334 - DNA, 440 bp, Homo sapiens
ggggtgtacaccgccttgagtcagttgaagaatataacgagctgatggtgcggaatggggacccccggatccggatgttggaggtctcccgagatggccggaaacactccctcccgcagctgctggactcttccagtgcctcacaggaataccacattgtgaagaagtctacccgctccttaagcacgactcaggtggaatctccttggaggctcattcggccatccgtcatctcgatcattgggttgtacaaagaaaaaggcaagggccttggctttagtattgctggaggtcgagactgcattcgtggacagatggggatttttgtcaagaccatcttcccaaatggatcagctgcagaggacggaagacttaaagaagatgcagatccaggaagcctgcatgaggtctctgctgaaccacttacagaggaggcatag

SEQ ID NO: 121335 - DNA, 276 bp, Homo sapiens
atgaagacactggtagtgcatagcattgaaaatgaagagatgaggtcagaaatggaatatctttcactgatagagccaacaggactatctgatgtaatacaggggcacagggaaggttactggaggagtggcccagtggttctcagcacccctgcccagctcatcgctcccgtggtggtggccaaggggactctctccatcaccacgacagaaatctacttcgaggtagatgaggatgattctgccttcaagaagatcgacacgaaagtgagttaa

SEQ ID NO: 121336 - DNA, 1666 bp, Homo sapiens
gtcgggctgggccctgcagcgctcctactcccccttcccagcccccagacttaatgctgataccaccactagcaccgatgccaatacaaccgctgtcgccctcaatgcagcagcccaccctacaaggctcctaccaccttgcccccgcgggcaccctcctaccactccagtcgagctgcagtctccgtcgctgccaccaatctcgaaaagctcccactgcaggccacccttcgaccgctccatccccaccaccaaccggagacagccagtgccctggctccagctggcagcagatggcgagctgctcagggcccagcttagaggaccgggaatgggtaatcacaggccgtacgctggaggctggagccgcggtaggacggctcgcctcgctgcggtttgtggtgacggcaacggagaaagcagtgtggtgcaagagccgggccaggagcagctgtactgggacacgctgaagcagctgtccaagcacatcaagcccctgcaccgcgtggtcaacaagatcgacaagagtgaaggtcccctgaagaccttgccaaagtgtgagatcaccctggagaaactcaagaatgacatggcggtgcccgctgcccctggtgccgctgaccaaacagcagtacctatgccagcagctcctggatgctgtcctagccaatatctgctcaccctcttcagccattccctgtaccgcacattcgctccagccatgactgccatccacggcccactcatcacatacatccagctgggctgggctttacagagggcggatggccagccctggaccatgtgtgcccactgtgtggtgtgcacccggaagcacaggcttgaggacgatgagcggcagagcatccccagcatgctccagggcgaggtggccaggctggaccccaagtgcatgataaacctggactcttctcgctgcagcaacaatggcaccgtccacctgagtcttatatttaaagaaaaagtaacaagccttaaatttaaagaaaaacctacaggcttggagacaagaagctcgcagaccagtctagaagtggccctgtacatgtttctgcggaaccctgacactgaagctgttctggttgccatgtcctgtttccgccacctctgtgaggaagcagatacccggtgtggggtggacgaagtgtcgacttgggaagatacacatgcaaaatgggaacaagcaacaaaactaatccttagctatccaaaagcccaaatggaagatggccaggttttattgactgataccaatactcaatttgtagaggaaaccctagctatattgaagaacttgctagataatcatactgaaggcagctctgaacatctagagcaagctagcattgaaacaatgatgttaaatctggtcaggtacgtttgtgtgcttgggaatatggtccatgcaattcaaataaaaacgaaactgtgtcagttggttgaagtaacgatggcaaggagagatgacctctcattttgccgagagatgaaatttaggaataagatggtagaatacctgacagactgggttatgggaacatcaaaccaagcagcagatgatgatgtaaaatgtcttacaagactttcaggaaaaataaatgtgcgagagcggtatgtttgggaagttattgttgtcagtttatga

SEQ ID NO: 121337 - DNA, 7790 bp, Homo sapiens
aattgggaagataactctgtcattttcctacttgttcagtccatggtggttgatcttaagaacctgctttttaatccaagtaagccattctcaagaggcagtcagcctgcagatgtggatctaatgattgactgccttgtttcttgctttcgtataagccctcacaacaaccaacactttaagatctgcctggctcagaattcaccttctacatttcactatgtgctggtaaattcactccatcgaatcatcaccaattccgcattggattggtggcctaagattgatgctgtgtattgtcactcggttgaacttcgaaatatgtttggtgaaacacttcataaagcagtgcaaggttgtggagcacacccagcaatacgaatggccccgagtcttacatttaaagaaaaagtaacaagccttaaatttaaagaaaaacctacagacctggagacaagaagctataagtatcttctcttgtccatagtgaaactaattcatgcagatccaaagctcttgctttgtaatccaagaaaacaggggcccgaaacccaaggcagtacagcagaattaattacagggctcgtccaactggtccctcagtcacacatgccagagattgctcaggaagcaatggaggctctgctggttcttcatcagttagatagcattgatttgtggaatcctgatgctcctgtagaaacattttgggagattagctcacaaatgcttttttacatctgcaagaaattaactagtcatcaaatgcttagtagcacagaaattctcaagtggttgcgggaaatattgatctgcaggaataaatttcttcttaaaaataagcaggcagatagaagttcctgtcactttctccttttttacggggtaggatgtgatattccttctagtggaaataccagtcaaatgtccatggatcatgaagaattactacgtactcctggagcctctctccggaagggaaaagggaactcctctatggatagtgcagcaggatgcagcggaacccccccratttgccgacaagcccagaccaaactagaagtggccctgtacatgtttctgtggaaccctgacactgaagctgttctggttgccatgtcctgtttccgccacctctgtgaggaagcagatatccggtgtggggtggatgaagtgtcagtgcataacctcttgcccaactataacacattcatggagtttgcctctgtcagcaatatgatgtcaacaggaagagcagcacttcagaaaagagtgatggcactgctgaggcgcattgagcatcccactgcaggaaacactgaggcttgggaagatacacatgcaaaatgggaacaagcaacaaagctaatccttaactatccaaaagccaaaatggaagatggccaggctgctgaaagccttcacaagaccattgttaagaggcgaatgtcccatgtgagtggaggaggatccatagatttgtctgacacagactccctacaggaatggatcaacatgactggcttcctttgtgcccttggaggagtgtgcctccagcagagaagcaattctggcctggcaacctatagcccacccatgggtccagtcagtgaacgtaagggttctatgatttcagtgatgtcttcagagggaaacgcagatacacctgtcagcaaatttatggatcggctgttgtccttaatggtgtgtaaccatgagaaagtgggacttcaaatacggaccaatgttaaggatctggtgggtctagaattgagtcctgctctgtatccaatgctatttaacaaattgaagaataccatcagcaagttttttgactcccaaggacaggttttattgactgataccaatactcaatttgtagaacaaaccatagctataatgaagaacttgctagataatcatactgaaggcagctctgaacatctagggcaagctagcattgaaacaatgatgttaaatctggtcaggtatgttcgtgtgcttgggaatatggtccatgcaattcaaataaaaacgaaactgtgtcaattagttgaagtaatgatggcaaggagagatgacctctcattttgccaagagatgaaatttaggaataagatggtagaatacctgacagactgggttatgggaacatcaaaccaagcagcagatgatgatgtaaaatgtcttacaagagatttggaccaggcaagcatggaagcagtagtttcacttctagctggtctccctctgcagcctgaagaaggagatggtgtggaattgatggaagccaaatcacagttatttcttaaatacttcacattatttatgaaccttttgaatgactgcagtgaagttgaagatgaaagtgcgcaaacaggtggcaggaaacgtggcatgtctcggaggctggcatcactgaggcactgtacggtccttgcaatgtcaaacttactcaatgccaacgtagacagtggtctcatgcactccataggcttaggttaccacaaggatctccagacaagagctacatttatggaagttctcacaaaaatccttcaacaaggcacagaatttgacacacttgcagaaacagtattggctgatcggtttgagagattggtggaactggtcacaatgatgggtgatcaaggagaactccctatagcgatggctctggccaatgtggttccttgttctcagtgggatgaactagctcgagttctggttactctgtttgattctcggcatttactctaccaactgctctggaacatgttttctaaagaagtagaattggcagactccatgcagactctcttccgaggcaacagcttggccagtaaaataatgacattctgtttcaaggtatatggtgctacctatctacaaaaactcctggatcctttattacgaattgtgatcacatcctctgattggcaacatgttagctttgaagtggatcctaccaggttagaaccatcagagagccttgaggaaaaccagcggaacctccttcagatgactgaaaagttcttccatgccatcatcagttcctcctcagaattcccccctcaacttcgaagtgtgtgccactgtttataccaggtggttagccagcgtttccctcagaacagcatcggtgcagtaggaagtgccatgttcctcagatttatcaatcctgccattgtctcaccgtatgaagcagggattttagataaaaagccaccacctagaatcgaaaggggcttgaagttaatgtcaaagatacttcagagtattgccaatcatgttctcttcacaaaagaagaacatatgcggcctttcaatgattttgtgaaaagcaactttgatgcagcacgcaggtttttccttgatatagcatctgattgtcctacaagtgatgcagtaaatcatagtctttccttcataagtgacggcaatgtgcttgctttacatcgtctactctggaacaatcaggagaaaattgggcagtatctttccagcaacagggatcataaagctgttggaagacgaccttttgataagatggcaacacttcttgcatacctgggtcctccagagcacaaacctgtggcagatacacactggtccagccttaaccttaccagttcaaagtttgaggaatttatgactaggcatcatcaggtacatgaaaaagaagaattcaaggctttgaaaacgttaagtattttctaccaagctgggacttccaaagctgggaatcctattttttattatgttgcacggaggttcaaaactggtcaaatcaatggtgatttgctgatataccatgtcttactgactttaaagccatattatgcaaagccatatgaaattgtagtggaccttacccataccgggcctagcaatcgctttaaaacagactttctctctaagtggtttgttgtttttcctggctttgcttacgacaacgtctccgcagtctatatctataactgtaactcctgggtcagggagtacaccaagtatcatgagcggctgctgactggcctcaaaggtagcaaaaggcttgttttcatagactgtcctgggaaactggctgagcacatagagcatgaacaacagaaactacctgctgccaccttggctttagaagaggacctgaaggtattccacaatgctctcaagctagctcacaaagacaccaaagtttctattaaagttggttctactgctgtccaagtaacttcagcagagcgaacaaaagtcctagggcaatcagtctttctaaatgacatttattatgcttcggaaattgaagaaatctgcctagtagatgagaaccagttcaccttaaccattgcaaaccagggcacgccgctcaccttcatgcaccaggagtgtgaagccattgtccagtctatcattcatatccggacccgctgggaactgtcacagcccgactctatcccccaacacaccaagattcggccaaaagatgtccctgggacactgctcaatatcgcattacttaatttaggcagttctgacccgagtttacggtcagctgcctataatcttctgtgtgccttaacttgtacctttaatttaaaaatcgagggccagttactagagacatcaggtttatgtatccctgccaacaacaccctctttattgtctctattagtaagacactggcagccaatgagccacacctcacgttagaatttttggaagagtgtatttctggatttagcaaatctagtattgaattgaaacacctttgtttggaatacatgactccatggctgtcaaatctagttcgtttttgcaagcataatgatgatgccaaacgacaaagagttactgctattcttgacaagctgataacaatgaccatcaatgaaaaacagatgtacccatctattcaagcaaaaatatggggaagccttgggcagattacagatctgcttgatgttgtactagacagtttcatcaaaaccagtgcaacaggtggcttgggatcaataaaagctgaggtgatggcagatactgctgtagctttggcttctggaaatgtgaaattggtttcaagcaaggttattggaaggatgtgcaaaataattgacaagacatgcttatctccaactcctactttagaacaacatcttatgtgggatgatattgctattttagcacgctacatgctgatgctgtccttcaacaattcccttgatgtggcagctcatcttccctacctcttccacgttgttactttcttagtagccacaggtccgctctcccttagagcttccacacatggactggtcattaatatcattcactctctgtgtacttgttcacagcttcattttagtgaagagaccaagcaagttttgagactcagtctgacagagttctcattacccaaattttacttgctgtttggcattagcaaagtcaagtcagctgctgtcattgccttccgttccagttaccgggacaggtcattctctcctggctcctatgagagagagacttttgctttgacatccttggaaacagtcacagaagctttgttggagatcatggaggcatgcatgagagatattccaacgtgcaagtggctggaccagtggacagaactagctcaaagatttgcattccaatataatccatccctgcaaccaagagctcttgttgtctttgggtgtattagcaaacgagtgtctcatgggcagataaagcagataatccgtattcttagcaaggcacttgagagttgcttaaaaggacctgacacttacaacagtcaagttctgatagaagctacagtaatagcactaaccaaattacagccacttcttaataaggactcgcctctgcacaaagccctcttttgggtagctgtggctgtgctgcagcttgatgaggtcaacttgtattcagcaggtaccgcacttcttgaacaaaacctgcatactttagatagtctccgtatattcaatgacaagagtccagaggaagtatttatggcaatccggaatcctctggagtggcactgcaagcaaatggatcattttgttggactcaatttcaactctaactttaactttgcattggttggacaccttttaaaagggtacaggcatccttcacctgctattgttgcaagaacagtcagaattttacatacactactaactctggttaacaaacacagaaattgtgacaaatttgaagtgaatacacagagcgtggcctacttagcagctttacttacagtgtctgaagaagttcgaagtcgctgcagcctaaaacatagaaagtcacttcttcttactgatatttcaatggaaaatgttcctatggatacatatcccattcatcatggtgacccttcctataggacactaaaggagactcagccatggtcctctcccaaaggttctgaaggataccttgcagccacctatccaactgtcggccagaccagtccccgagccaggaaatccatgagcctggacatggggcaaccttctcaggccaacactaagaagttgcttggaacaaggaaaagttttgatcacttgatatcagacacaaaggctcctaaaaggcaagaaatggaatcagggatcacaacaccccccaaaatgaggagagtagcagaaactgattatgaaatggaaactcagaggatttcctcatcacaacagcacccacatttacgtaaagtttcagtgtctgaatcaaatgttctcttggatgaagaagtacttactgatccgaagatccaggcgctgcttcttactgttctagctacactggtaaaatataccacagatgagtttgatcaacgaattctttatgaatacttagcagaggccagtgttgtgtttcccaaagtctttcctgttgtgcataatttgttggactctaagatcaacaccctgttatcattgtgccaagatccaaatttgttaaatccaatccatggaattgtgcagagtgtggtgtaccatgaagaatccccaccacaataccaaacatcttacctgcaaagttttggttttaatggcttgtggcggtttgcaggaccgttttcaaagcaaacacaaattccagactatgctgagcttattgttaagtttcttgatgccttgattgacacgtacctgcctggaattgatgaagaaaccagtgaagaatccctcctgactcccacatctccttaccctcctgcactgcagagccagcttagtatcactgccaaccttaacctttctaattccatgacctcacttgcaacttcccagcattccccagcttctctgccttgctctaactcagcagttttcatgcagctgttccctcatcaaggaatcgacaaggagaacgttgaactctcccctaccactggccactgtaacagtggacgaactcgccacggatccgcaagccaagtgcagaagcaaagaagcgctggcagtttcaaacgtaatagcattaagaagatcgtgtgaagcttgcttgctttcttttttaaaatcaacttaacatgggctcttcactagtgaccccttccctgtccttgccctttccccccatgttgtaatgctgcacttcctgttttataatgaacccatccggtttgccatgttgccagatgatcaactcttcgaagccttgcctaaatttaatgctgccttttctttaactttttttcttctacttttggcgtgtatctggtatatgtaagtgttcagaacaactgcaaagaaagtgggaggtcaggaaactt

SEQ ID NO: 121338 - DNA, 5049 bp, Homo sapiens; identical to SEQ ID NO: 117737

SEQ ID NO: 121339 - DNA, 9026 bp, Homo sapiens
ccggggcggcgcgggggcctcccactcccgctcggcgctgaccccccatccccacccccgtgggaacactgggagcctgcactccacagaccctctccttgcctcttccctcacctcagcctccgctccccgccctcttcccggcccagggcgccggcccacccttccctccgccgccccccggccgcggggaggacatggccgcgcacaggccggtggaatgggtccaggccgtggtcagccgcttcgacgagcagcttccaataaaaacaggacagcagaacacacataccaaagtcagtactgagcacaacaaggaatgtctaatcaatatttccaaatacaagttttctttggttataagcggcctcactactattttaaagaatgttaacaatatgagaatatttggagaagctgctgaaaaaaatttatatctctctcagttgattatattggatacactggaaaaatgtcttgctgggcaaccaaaggacacaatgagattagatgaaacgatgctggtcaaacagttgctgccagaaatctgccattttcttcacacctgtcgtgaaggaaaccagcatgcagctgaacttcggaattctgcctctggggttttattttctctcagctgcaacaacttcaatgcagtctttagtcgcatttctaccaggttacaggaattaactgtttgttcagaagacaatgttgatgttcatgatatagaattgttacagtatatcaatgtggattgtgcaaaattaaaacgactcctgaaggaaacagcatttaaatttaaagccctaaagaaggttgcgcagttagcagttataaatagcctggaaaaggcattttggaactgggtagaaaattatccagatgaatttacaaaactataccagatcccacagactgatatggctgaatgtgcagaaaagctatttgacttggtggatggttttgctgaaagcaccaaacgtaaagcagcagtttggccactacaaatcattctccttatcttgtgtccagaaataatccaggatatatccaaagacgtggttgatgaaaacaacatgaataagaagttatttctggacagtctacgaaaagctcttgctggccatggaggaagtaggcagctgacagaaagtgctgcaattgcctgtgtcaaactgtgtaaagcaagtacttacatcaattgggaagataactctgtcattttcctacttgttcagtccatggtggttgatcttaagaacctgctttttaatccaagtaagccattctcaagaggcagtcagcctgcagatgtggatctaatgattgactgccttgtttcttgctttcgtataagccctcacaacaaccaacactttaagatctgcctggctcagaattcaccttctacatttcactatgtgctggtaaattcactccatcgaatcatcaccaattccgcattggattggtggcctaagattgatgctgtgtattgtcactcggttgaacttcgaaatatgtttggtgaaacacttcataaagcagtgcaaggttgtggagcacacccagcaatacgaatggcaccgagtcttacatttaaagaaaaagtaacaagccttaaatttaaagaaaaacctacagacctggagacaagaagctataagtatcttctcttgtccatggtgaaactaattcatgcagatccaaagctcttgctttgtaatccaagaaaacaggggcccgaaacccaaggcagtacagcagaattaattacagggctcgtccaactggtccctcagtcacacatgccagagattgctcaggaagcaatggaggctctgctggttcttcatcagttagatagcattgatttgtggaatcctgatgctcctgtagaaacattttgggagattagctcacaaatgcttttttacatctgcaagaaattaactagtcatcaaatgcttagtagcacagaaattctcaagtggttgcgggaaatattgatctgcaggaataaatttcttcttaaaaataagcaggcagatagaagttcctgtcactttctccttttttacggggtaggatgtgatattccttctagtggaaataccagtcaaatgtccatggatcatgaagaattactacgtactcctggagcctctctccggaagggaaaagggaactcctctatggatagtgcagcaggatgcagcggaacccccccgatttgccgacaagcccagaccaaactagaagtggccctgtacatgtttctgtggaaccctgacactgaagctgttctggttgccatgtcctgtttccgccacctctgtgaggaagcagatatccggtgtggggtggatgaagtgtcagtgcataacctcttgcccaactataacacattcatggagtttgcctctgtcagcaatatgatgtcaacaggaagagcagcacttcagaaaagagtgatggcactgctgaggcgcattgagcatcccactgcaggaaacactgaggcttgggaagatacacatgcaaaatgggaacaagcaacaaagctaatccttaactatccaaaagccaaaatggaagatggccaggctgctgaaagccttcacaagaccattgttaagaggcgaatgtcccatgtgagtggaggaggatccatagatttgtctgacacagactccctacaggaatggatcaacatgactggcttcctttgtgcccttgggggagtgtgcctccagcagagaagcaattctggcctggcaacctatagcccacccatgggtccagtcagtgaacgtaagggttctatgatttcagtgatgtcttcagagggaaacgcagatacacctgtcagcaaatttatggatcggctgttgtccttaatggtgtgtaaccatgagaaagtgggacttcaaatacggaccaatgttaaggatctggtgggtctagaattgagtcctgctctgtatccaatgctatttaacaaattgaagaataccatcagcaagttttttgactcccaaggacaggttttattgactgataccaatactcaatttgtagaacaaaccatagctataatgaagaacttgctagataatcatactgaaggcagctctgaacatctagggcaagctagcattgaaacaatgatgttaaatctggtcaggtatgttcgtgtgcttgggaatatggtccatgcaattcaaataaaaacgaaactgtgtcaattagttgaagtaatgatggcaaggagagatgacctctcattttgccaagagatgaaatttaggaataagatggtagaatacctgacagactgggttatgggaacatcaaaccaagcagcagatgatgatgtaaaatgtcttacaagagatttggaccaggcaagcatggaagcagtagtttcacttctagctggtctccctctgcagcctgaagaaggagatggtgtggaattgatggaagccaaatcacagttatttcttaaatacttcacattatttatgaaccttttgaatgactgcagtgaagttgaagatgaaagtgcgcaaacaggtggcaggaaacgtggcatgtctcggaggctggcatcactgaggcactgtacggtccttgcaatgtcaaacttactcaatgccaacgtagacagtggtctcatgcactccataggcttaggttaccacaaggatctccagacaagagctacatttatggaagttctgacaaaaatccttcaacaaggcacagaatttgacacacttgcagaaacagtattggctgatcggtttgagagattggtggaactggtcacaatgatgggtgatcaaggagaactccctatagcgatggctctggccaatgtggttccttgttctcagtgggatgaactagctcgagttctggttactctgtttgattctcggcatttactctaccaactgctctggaacatgttttctaaagaagtagaattggcagactccatgcagactctcttccgaggcaacagcttggccagtaaaataatgacattctgtttcaaggtatatggtgctacctatctacaaaaactcctggatcctttattacgaattgtgatcacatcctctgattggcaacatgttagctttgaagtggatcctaccaggttagaaccatcagagagccttgaggaaaaccagcggaacctccttcagatgactgaaaagttcttccatgccatcatcagttcctcctcagaattcccccctcaacttcgaagtgtgtgccactgtttataccaggcaacttgccactccctactgaataaagctacagtaaaagaaaaaaaggaaaacaaaaaatcagtggttagccagcgtttccctcagaacagcatcggtgcagtaggaagtgccatgttcctcagatttatcaatcctgccattgtctcaccgtatgaagcagggattttagataaaaagccaccacctagaatcgaaaggggcttgaagttaatgtcaaagatacttcagagtattgccaatcatgttctcttcacaaaagaagaacatatgcggcctttcaatgattttgtgaaaagcaactttgatgcagcacgcaggtttttccttgatatagcatctgattgtcctacaagtgatgcagtaaatcatagtctttccttcataagtgacggcaatgtgcttgctttacatcgtctactctggaacaatcaggagaaaattgggcagtatctttccagcaacagggatcataaagctgttggaagacgaccttttgataagatggcaacacttcttgcatacctgggtcctccagagcacaaacctgtggcagatacacactggtccagccttaaccttaccagttcaaagtttgaggaatttatgactaggcatcaggtacatgaaaaagaagaattcaaggctttgaaaacgttaagtattttctaccaagctgggacttccaaagctgggaatcctattttttattatgttgcacggaggttcaaaactggtcaaatcaatggtgatttgctgatataccatgtcttactgactttaaagccatattatgcaaagccatatgaaattgtagtggaccttacccataccgggcctagcaatcgctttaaaacagactttctctctaagtggtttgttgtttttcctggctttgcttacgacaacgtctccgcagtctatatctataactgtaactcctgggtcagggagtacaccaagtatcatgagcggctgctgactggcctcaaaggtagcaaaaggcttgttttcatagactgtcctgggaaactggctgagcacatagagcatgaacaacagaaactacctgctgccaccttggctttagaagaggacctgaaggtattccacaatgctctcaagctagctcacaaagacaccaaagtttccattaaagttggttctactgctgtccaagtaacttcagcagagcgaacaaaagtcctagggcaatcagtctttctaaatgacatttattatgcttcggaaattgaagaaatctgcctagtagatgagaaccagttcaccttaaccattgcaaaccagggcacgccgctcaccttcatgcaccaggagtgtgaagccattgtccagtctatcattcatatccggacccgctgggaactgtcacagcccgactctatcccccaacacaccaagattcggccaaaagatgtccctgggacactgctcaatatcgcattacttaatttaggcagttctgacccgagtttacggtcagctgcctataatcttctgtgtgccttaacttgtacctttaatttaaaaatcgagggccagttactagagacatcaggtttatgtatccctgccaacaacaccctctttattgtctctattagtaagacactggcagccaatgagccacacctcacgttagaatttttggaagagtgtatttctggatttagcaaatctagtattgaattgaaacacctttgtttggaatacatgactccatggctgtcaaatctagttcgtttttgcaagcataatgatgatgccaaacgacaaagagttactgctattcttgacaagctgataacaatgaccatcaatgaaaaacagatgtacccatctattcaagcaaaaatatggggaagccttgggcagattacagatctgcttgatgttgtactagacagtttcatcaaaaccagtgcaacaggtggcttgggatcaataaaagctgaggtgatggcagatactgctgtagctttggcttctggaaatgtgaaattggtttcaagcaaggttattggaaggatgtgcaaaataattgacaagacatgcttatctccaactcctactttagaacaacatcttatgtgggatgatattgctattttagcacgctacatgctgatgctgtccttcaacaattcccttgatgtggcagctcatcttccctacctcttccacgttgttactttcttagtagccacaggtccgctctcccttagagcttccacacatggactggtcattaatatcattcactctctgtgtacttgttcacagcttcattttagtgaagagaccaagcaagttttgagactcagtctgacagagttctcattacccaaattttacttgctgtttggcattagcaaagtcaagtcagctgctgtcattgccttccgttccagttaccgggacaggtcattctctcctggctcctatgagagagagacttttgctttgacatccttggaaacagtcacagaagctttgttggagatcatggaggcatgcatgagagatattccaacgtgcaagtggctggaccagtggacagaactagctcaaagatttgcattccaatataatccatccctgcaaccaagagctcttgttgtctttgggtgtattagcaaacgagtgtctcatgggcagataaagcagataatccgtattcttagcaaggcacttgagagttgcttaaaaggacctgacacttacaacagtcaagttctgatagaagctacagtaatagcactaaccaaattacagccacttcttaataaggactcgcctctgcacaaagccctcttttgggtagctgtggctgtgctgcagcttgatgaggtcaacttgtattcagcaggtaccgcacttcttgaacaaaacctgcatactttagatagtctccgtatattcaatgacaagagtccagaggaagtatttatggcaatccggaatcctctggagtggcactgcaagcaaatggatcattttgttggactcaatttcaactctaactttaactttgcattggttggacaccttttaaaagggtacaggcatccttcacctgctattgttgcaagaacagtcagaattttacatacactactaactctggttaacaaacacagaaattgtgacaaatttgaagtgaatacacagagcgtggcctacttagcagctttacttacagtgtctgaagaagttcgaagtcgctgcagcctaaaacatagaaagtcacttcttcttactgatatttcaatggaaaatgttcctatggatacatatcccattcatcatggtgacccttcctataggacactaaaggagactcagccatggtcctctcccaaaggttctgaaggataccttgcagccacctatccaactgtcggccagaccagtccccgagccaggaaatccatgagcctggacatggggcaaccttctcaggccaacactaagaagttgcttggaacaaggaaaagttttgatcacttgatatcagacacaaaggctcctaaaaggcaagaaatggaatcagggatcacaacaccccccaaaatgaggagagtagcagaaactgattatgaaatggaaactcagaggatttcctcatcacaacagcacccacatttacgtaaagtttcagtgtctgaatcaaatgttctcttggatgaagaagtacttactgatccgaagatccaggcgctgcttcttactgttctagctacactggtaaaatataccacagatgagtttgatcaacgaattctttatgaatacttagcagaggccagtgttgtgtttcccaaagtctttcctgttgtgcataatttgttggactctaagatcaacaccctgttatcattgtgccaagatccaaatttgttaaatccaatccatggaattgtgcagagtgtggtgtaccatgaagaatccccaccacaataccaaacatcttacctgcaaagttttggttttaatggcttgtggcggtttgcaggaccgttttcaaagcaaacacaaattccagactatgctgagcttattgttaagtttcttgatgccttgattgacacgtacctgcctggaattgatgaagaaaccagtgaagaatccctcctgactcccacatctccttaccctcctgcactgcagagccagcttagtatcactgccaaccttaacctttctaattccatgacctcacttgcaacttcccagcattccccaggaatcgacaaggagaacgttgaactctcccctaccactggccactgtaacagtggacgaactcgccacggatccgcaagccaagtgcagaagcaaagaagcgctggcagtttcaaacgtaatagcattaagaagatcgtgtgaagcttgcttgctttcttttttaaaatcaacttaacatgggctcttcactagtgaccccttccctgtccttgccctttccccccatgttgtaatgctgcacttcctgttttataatgaacccatccggtttgccatgttgccagatgatcaactcttcgaagccttgcctaaatttaatgctgccttttctttaacttttttcttctacttttggcgtgtatctggtatatgtaagtgttcagaacaactgcaaagaaagtgggaggtcaggaaacttttaactgagaaatctcaattgtaagagaggat

SEQ ID NO: 121340 - DNA, 461 bp, Homo sapiens
catccctgcagtcttggctaggcggctgagaggcagggcttggtggacgctctgggcccagttgttgagcaagccggtgaccgagtgcttgtccgggagctgcagcagcctggaggtcatgcagcggtgcaccgactggaggaaggggttggcgtcgtactgccactgccggtctatccacagcgggctttgggcaggatagtcagcgggcacactgagctccagtggtggcacacttgggaggtccttgtcatccagcttgcagatcaggtggacagtgccattgttgctgcagtgagaagggtccaggtttaccaggaacttggggtccagcctggccacctcaccctggagcacactggggatgctctgccgctcatcatcctcaagcctgcgcttccgggtgcacaccactggggccgtgatgggtgggcccctcgtgccaagcttggcgtatgcat

SEQ ID NO: 121341 - DNA, 2253 bp, Homo sapiens
atgcagcggagccccccgacttgccgacaagcgcagaccagtctagaagtggccctgtacatgtttctgcagaaccctgacactgaagctgttctggttgccatgtcctgtttctgccacctctgtgaggaagcagatacccagtgtggggtggatgaagtgtcagtgcataacctcttgcccaactctaacacattcatggagtttgcctgtcagcaatgtgatgtcaacagcccacccgtgggtccggtcagtgaacataagggttccatgatttcagtgatgtcctcagagggaaacgcagatacacctgtcagcaaatatatggatcagctcttgtcgttaatggtgtgtaaccttgagaaagtgggacttcaaataccgaccaatgataaggacctggttttattgactgataccaatactcaatttgtagagcaaaccctagatataatgaagaacttgctagataatcatactgaaggcagccctgaacatctagagcaagctagcattgaaacaatgatgttaaatctggtcaggaataagatggtggaatacctgacagactgggttatgggaacatcaaaccaagcagcagatgatgatgtaaaatgtcttacaagccgcatcaccatcctggtggaactctcctgtgaggacagccaaggcctgaactacctgcgggtttgcccaggcaaccagccagccctggtccaaggcatcctggagcgagttgtggatggccccgtgccccaccagacagtgcgcctggaggacctggacgagagcggtgagccccaggctggggagccagtgctgcctggcatcctccggccaccctacctggctgaggggctgggcctgggcctgccggtccctggagctcccggtccctggagctctgcacttgggggcacaacttgcatgaggcagcgcgactctggcgactggctggccatgccgtcccgggctgagaactatgaagtgttgtacaccattggcacaggctcctgtggccgctgccagaagatccagaggaagagtgacggcaagatactagtttggaaagaacttcattatggctccatgacagaagctgagaaacagatgcttgtttctgaagtgaatttgctttgtgaactgaaaaatccaaacatcgttcattactatgatcgtattattgaccggaccaacacaacactgtacattgtaatggaatattgtgaagaaggagacctggctagtgtaattacaaagggaaccaaggaaaggcaatacttagatgaagagtttgttcttcgagtgacgactcagttgactctggccctgaaacgaagtgatggtgatcatactgtagtgcgtcgggatctgaaaccagccagtgttttcctggatggcaagcaaaacgtcaagcttggagatttggggctagccagaatattaaaccacgacacgagttttgcaaaaacatttgttggcacaccttattacatgtctcctgaacaaacgaatcacatgtcctacaatgagaaaccagatatctggtcattgggccgtttgctgtatgagttaggtgcattaatgcctccatttacagcttttagccagaaagaacttgctgggaaaatcagagaaggcaaattcaggcaaattctataccgtgactctgacgaattgaatgaaattattatgaggatgttaaaggattaccatcgaccttctgttgaagaaattctcgagaaccctttaatagcagatttggttgcagaagaacgaagaagaaatcttgagagaagagggcgacaattaggagagccagaaaaattgcaggattccagccctgtattgagtgagctgaaactaaaggaaattcagttagaggagcgagagcgagctctcaaagcaagagaagaaagattggagcagaaagaacaggagttttgtgtccgtgagagactagcagaggacagactggctagagcagaaaatctgttgaagaattacagcttgctaaagaagttcctgtctctggcaagtagtccagaacttcttagtcttccatcctcagtaattaagaagaaaggtcatttcagtggggaaagtaaagagaatgtcatgaggagtgagaattctgagagtcagctcacatctaagtccaagtgcaaggacctgaaggtccttgcttcatgcttcatgctgcccagctgcgggctcaagccctgtcagatattgagaaaaattatcaactaa

SEQ ID NO: 121342 - DNA, 8962 bp, Homo sapiens
ccccagcctccttgccaacgccccctttccctctccccctcccgctcggcgctgaccccccatccccacccccgtgggaacactgggagcctgcactccacagaccctctccttgcctcttccctcacctcagcctccgctccccgccctcttcccggcccagggcgccggcccacccttccctccgccgccccccggccgcggggaggacatggccgcgcacaggccggtggaatgggtccaggccgtggtcagccgcttcgacgagcagcttccaataaaaacaggacagcagaacacacataccaaagtcagtactgagcacaacaaggaatgtctaatcaatatttccaaatacaagttttctttggttataagcggcctcactactattttaaagaatgttaacaatatgagaatatttggagaagctgctgaaaaaaatttatatctctctcagttgattatattggatacactggaaaaatgtcttgctgggcaaccaaaggacacaatgagattagatgaaacgatgctggtcaaacagttgctgccagaaatctgccattttcttcacacctgtcgtgaaggaaaccagcatgcagctgaacttcggaattctgcctctggggttttattttctctcagctgcaacaacttcaatgcagtctttagtcgcatttctaccaggttacaggaattaactgtttgttcagaagacaatgttgatgttcatgatatagaattgttacagtatatcaatgtggattgtgcaaaattaaaacgactcctgaaggaaacagcatttaaatttaaagccctaaagaaggttgcgcagttagcagttataaatagcctggaaaaggcattttggaactgggtagaaaattatccagatgaatttacaaaactgtaccagatcccacagactgatatggctgaatgtgcagaaaagctatttgacttggtggatggttttgctgaaagcaccaaacgtaaagcagcagtttggccactacaaatcattctccttatcttgtgtccagaaataatccaggatatatccaaagacgtggttgatgaaaacaacatgaataagaagttatttctggacagtctacgaaaagctcttgctggccatggaggaagtaggcagctgacagaaagtgctgcaattgcctgtgtcaaactgtgtaaagcaagtacttacatcaattgggaagataactctgtcattttcctacttgttcagtccatggtggttgatcttaagaacctgctttttaatccaagtaagccattctcaagaggcagtcagcctgcagatgtggatctaatgattgactgccttgtttcttgctttcgtataagccctcacaacaaccaacactttaagatctgcctggctcagaattcaccttctacatttcactatgtgctggtaaattcactccatcgaatcatcaccaattccgcattggattggtggcctaagattgatgctgtgtattgtcactcggttgaacttcgaaatatgtttggtgaaacacttcataaagcagtgcaaggttgtggagcacacccagcaatacgaatggcaccgagtcttacatttaaagaaaaagtaacaagccttaaatttaaagaaaaacctacagacctggagacaagaagctataagtatcttctcttgtccatggtgaaactaattcatgcagatccaaagctcttgctttgtaatccaagaaaacaggggcccgaaacccaaggcagtacagcagaattaattacagggctcgtccaactggtccctcagtcacacatgccagagattgctcaggaagcaatggaggctctgctggttcttcatcagttagatagcattgatttgtggaatcctgatgctcctgtagaaacattttgggagattagctcacaaatgcttttttacatctgcaagaaattaactagtcatcaaatgcttagtagcacagaaattctcaagtggttgcgggaaatattgatctgcaggaataaatttcttcttaaaaataagcaggcagatagaagttcctgtcactttctccttttttacggggtaggatgtgatattccttctagtggaaataccagtcaaatgtccatggatcatgaagaattactacgtactcctggagcctctctccggaagggaaaagggaactcctctatggatagtgcagcaggatgcagcggaacccccccaatttgccgacaagcccagaccaaactagaagtggccctgtacatgtttctgtggaaccctgacactgaagctgttctggttgccatgtcctgtttccgccacctctgtgaggaagcagatatccggtgtggggtggatgaagtgtcagtgcataacctcttgcccaactataacacattcatggagtttgcctctgtcagcaatatgatgtcaacaggaagagcagcacttcagaaaagagtgatggcactgctgaggcgcattgagcatcccactgcaggaaacactgaggcttgggaagatacacatgcaaaatgggaacaagcaacaaagctaatccttaactatccaaaagccaaaatggaagatggccaggctgctgaaagccttcacaagaccattgttaagaggcgaatgtcccatgtgagtggaggaggatccatagatttgtctgacacagactccctacaggaatggatcaacatgactggcttcctttgtgcccttggaggagtgtgcctccagcagagaagcaattctggcctggcaacctatagcccacccatgggtccagtcagtgaacgtaagggttctatgatttcagtgatgtcttcagagggaaacgcagatacacctgtcagcaaatttatggatcggctgttgtccttaatggtgtgtaaccatgagaaagtgggacttcaaatacggaccaatgttaaggatctggtgggtctagaattgagtcctgctctgtatccaatgctatttaacaaattgaagaataccatcagcaagttttttgactcccaaggacaggttttattgactgataccaatactcaatttgtagaacaaaccatagctataatgaagaacttgctagataatcatactgaaggcagctctgaacatctagggcaagctagcattgaaacaatgatgttaaatctggtcaggtatgttcgtgtgcttgggaatatggtccatgcaattcaaataaaaacgaaactgtgtcaattagttgaagtaatgatggcaaggagagatgacctctcattttgccaagagatgaaatttaggaataagatggtagaatacctgacagactgggttatgggaacatcaaaccaagcagcagatgatgatgtaaaatgtcttacaagagatttggaccaggcaagcatggaagcagtagtttcacttctagctggtctccctctgcagcctgaagaaggagatggtgtggaattgatggaagccaaatcacagttatttcttaaatacttcacattatttatgaaccttttgaatgactgcagtgaagttgaagatgaaagtgcgcaaacaggtggcaggaaacgtggcatgtctcggaggctggcatcactgaggcactgtacggtccttgcaatgtcaaacttactcaatgccaacgtagacagtggtctcatgcactccataggcttaggttaccacaaggatctccagacaagagctacatttatggaagttctgacaaaaatccttcaacaaggcacagaatttgacacacttgcagaaacagtattggctgatcggtttgagagattggtggaactggtcacaatgatgggtgatcaaggagaactccctatagcgatggctctggccaatgtggttccttgttctcagtgggatgaactagctcgagttctggttactctgtttgattctcggcatttactctaccaactgctctggaacatgttttctaaagaagtagaattggcagactccatgcagactctcttccgaggcaacagcttggccagtaaaataatgacattctgtttcaaggtatatggtgctacctatctacaaaaactcctggatcctttattacgaattgtgatcacatcctctgattggcaacatgttagctttgaagtggatcctaccaggttagaaccatcagagagccttgaggaaaaccagcggaacctccttcagatgactgaaaagttcttccatgccatcatcagttcctcctcagaattcccccctcaacttcgaagtgtgtgccactgtttataccaggtggttagccagcgtttccctcagaacagcatcggtgcagtaggaagtgccatgttcctcagatttatcaatcctgccattgtctcaccgtatgaagcagggattttagataaaaagccaccacctagaatcgaaaggggcttgaagttaatgtcaaagatacttcagagtattgccaatcatgttctcttcacaaaagaagaacatatgcggcctttcaatgattttgtgaaaagcaactttgatgcagcacgcaggtttttccttgatatagcatctgattgtcctacaagtgatgcagtaaatcatagtctttccttcataagtgacggcaatgtgcttgctttacatcgtctactctggaacaatcaggagaaaattgggcagtatctttccagcaacagggatcataaagctgttggaagacgaccttttgataagatggcaacacttcttgcatacctgggtcctccagagcacaaacctgtggcagatacacactggtccagccttaaccttaccagttcaaagtttgaggaatttatgactaggcatcatcaggtacatgaaaaagaagaattcaaggctttgaaaacgttaagtattttctaccaagctgggacttccaaagctgggaatcctattttttattatgttgcacggaggttcaaaactggtcaaatcaatggtgatttgctgatataccatgtcttactgactttaaagccatattatgcaaagccatatgaaattgtagtggaccttacccataccgggcctagcaatcgctttaaaacagactttctctctaagtggtttgttgtttttcctggctttgcttacgacaacgtctccgcagtctatatctataactgtaactcctgggtcagggagtacaccaagtatcatgagcggctgctgactggcctcaaaggtagcaaaaggcttgttttcatagactgtcctgggaaactggctgagcacatagagcatgaacaacagaaactacctgctgccaccttggctttagaagaggacctgaaggtattccacaatgctctcaagctagctcacaaagacaccaaagtttctattaaagttggttctactgctgtccaagtaacttcagcagagcgaacaaaagtcctagggcaatcagtctttctaaatgacatttattatgcttcggaaattgaagaaatctgcctagtagatgagaaccagttcaccttaaccattgcaaaccagggcacgccgctcaccttcatgcaccaggagtgtgaagccattgtccagtctatcattcatatccggacccgctgggaactgtcacagcccgactctatcccccaacacaccaagattcggccaaaagatgtccctgggacactgctcaatatcgcattacttaatttaggcagttctgacccgagtttacggtcagctgcctataatcttctgtgtgccttaacttgtacctttaatttaaaaatcgagggccagttactagagacatcaggtttatgtatccctgccaacaacaccctctttattgtctctattagtaagacactggcagccaatgagccacacctcacgttagaatttttggaagagtgtatttctggatttagcaaatctagtattgaattgaaacacctttgtttggaatacatgactccatggctgtcaaatctagttcgtttttgcaagcataatgatgatgccaaacgacaaagagttactgctattcttgacaagctgataacaatgaccatcaatgaaaaacagatgtacccatctattcaagcaaaaatatggggaagccttgggcagattacagatctgcttgatgttgtactagacagtttcatcaaaaccagtgcaacaggtggcttgggatcaataaaagctgaggtgatggcagatactgctgtagctttggcttctggaaatgtgaaattggtttcaagcaaggttattggaaggatgtgcaaaataattgacaagacatgcttatctccaactcctactttagaacaacatcttatgtgggatgatattgctattttagcacgctacatgctgatgctgtccttcaacaattcccttgatgtggcagctcatcttccctacctcttccacgttgttactttcttagtagccacaggtccgctctcccttagagcttccacacatggactggtcattaatatcattcactctctgtgtacttgttcacagcttcattttagtgaagagaccaagcaagttttgagactcagtctgacagagttctcattacccaaattttacttgctgtttggcattagcaaagtcaagtcagctgctgtcattgccttccgttccagttaccgggacaggtcattctctcctggctcctatgagagagagacttttgctttgacatccttggaaacagtcacagaagctttgttggagatcatggaggcatgcatgagagatattccaacgtgcaagtggctggaccagtggacagaactagctcaaagatttgcattccaatataatccatccctgcaaccaagagctcttgttgtctttgggtgtattagcaaacgagtgtctcatgggcagataaagcagataatccgtattcttagcaaggcacttgagagttgcttaaaaggacctgacacttacaacagtcaagttctgatagaagctacagtaatagcactaaccaaattacagccacttcttaataaggactcgcctctgcacaaagccctcttttgggtagctgtggctgtgctgcagcttgatgaggtcaacttgtattcagcaggtaccgcacttcttgaacaaaacctgcatactttagatagtctccgtatattcaatgacaagagtccagaggaagtatttatggcaatccggaatcctctggagtggcactgcaagcaaatggatcattttgttggactcaatttcaactctaactttaactttgcattggttggacaccttttaaaagggtacaggcatccttcacctgctattgttgcaagaacagtcagaattttacatacactactaactctggttaacaaacacagaaattgtgacaaatttgaagtgaatacacagagcgtggcctacttagcagctttacttacagtgtctgaagaagttcgaagtcgctgcagcctaaaacatagaaagtcacttcttcttactgatatttcaatggaaaatgttcctatggatacatatcccattcatcatggtgacccttcctataggacactaaaggagactcagccatggtcctctcccaaaggttctgaaggataccttgcagccacctatccaactgtcggccagaccagtccccgagccaggaaatccatgagcctggacatggggcaaccttctcaggccaacactaagaagttgcttggaacaaggaaaagttttgatcacttgatatcagacacaaaggctcctaaaaggcaagaaatggaatcagggatcacaacaccccccaaaatgaggagagtagcagaaactgattatgaaatggaaactcagaggatttcctcatcacaacagcacccacatttacgtaaagtttcagtgtctgaatcaaatgttctcttggatgaagaagtacttactgatccgaagatccaggcgctgcttcttactgttctagctacactggtaaaatataccacagatgagtttgatcaacgaattctttatgaatacttagcagaggccagtgttgtgtttcccaaagtctttcctgttgtgcataatttgttggactctaagatcaacaccctgttatcattgtgccaagatccaaatttgttaaatccaatccatggaattgtgcagagtgtggtgtaccatgaagaatccccaccacaataccaaacatcttacctgcaaagttttggttttaatggcttgtggcggtttgcaggaccgttttcaaagcaaacacaaattccagactatgctgagcttattgttaagtttcttgatgccttgattgacacgtacctgcctggaattgatgaagaaaccagtgaagaatccctcctgactcccacatctccttaccctcctgcactgcagagccagcttagtatcactgccaaccttaacctttctaattccatgacctcacttgcaacttcccagcattccccaggaatcgacaaggagaacgttgaactctcccctaccactggccactgtaacagtggacgaactcgccacggatccgcaagccaagtgcagaagcaaagaagcgctggcagtttcaaacgtaatagcattaagaagatcgtgtgaagcttgcttgctttcttttttaaaatcaacttaacatgggctcttcactagtgaccccttccctgtccttgccctttccccccatgttgtaatgctgcacttcctgttttataatgaacccatccggtttgccatgttgccagatgatcaactcttcgaagccttgcctaaatttaatgctgccttttctttaactttttttcttctacttttggcgtgtatctggtatatgtaagtgttcagaacaactgcaaagaaagtgggaggtcaggaaacttttaactgagaaat

SEQ ID NO: 121343 - DNA, 2367 bp, Homo sapiens
caccgatgccaatacaaccgctgtcgccctcaatgcagcagcccaccctacaaggctcctaccaccttgcccccgcgggcaccctcctaccactccagtcgagctgcagtctccgtcgctgccaccaatctcgtgagaccagctgcagagccatatgcaggctccagtttaccacaggcagtggagcagaaaatagtgcccctaacccatcacccacaaccagcagtacacattagtgcacacaatctgcctccctccaccacccccgccaccgcaggcagtgtagccagtgatagccagccaacccccccccaaccgccagcaataccccagagagtgccccgaaccagctgcctgccacagggagtgcagccttgggcagtgagccccaaaaggacacccaacccctgcccccagaggaaaagctcccactgcaggccacccttcgaccgctccatccccaccaccaaccggagacagccagtgccctggctccagctggcagcagatggcgagctgctcagggcccagcttagaggaccgggaatgggtaatcacaggccgtacgctggaggctggagccgcggtaggacggctcgcctcgctgcggtttgtggtgacggcaacggagaaagcagtgtggtgcaagagccgggccaggagcagctgtactgggacacgctgaagcagctgtccaagcacatcaagcccctgcaccgcgtggtcaacaagatcgacaagagtgaaggtcccctgaagaccttgccaaagtgtgagatcaccctggagaaactcaagaatgacatggcggtggtgagtgggatgctggggacccctgggggatcggggctccctcaagagctcctgggggcaccactggaggggccttcatggtcaggctggcccgctgcccctggtgccgctgaccaaacagcagtacctatgccagcagctcctggatgctgtcctagccaatatctgctcaccctcttcagccattccctgtaccgcacattcgctccagccatgactgccatccacggcccactcatcacatacatccagctgggctgggctttacagagggcggatggccagccctggaccatgtgtgcccactgtgtggtgtgcacccggaagcacaggcttgaggacgatgagcggcagagcatccccagcatgctccagggcgaggtggccaggctggaccccaagtgcatgataaacctggactcttctcgctgcagcaacaatggcaccgtccacctgagtcttatatttaaagaaaaagtaacaagccttaaatttaaagaaaaacctacaggcttggagacaagaagctgtaagtatcttctcttgtccatggtgaaactaattcatgcagatccagagctcttgctttgtaccagtctagaagtggccctgtacatgtttctgcggaaccctgacactgaagctgttctggttgccatgtcctgtttccgccacctctgtgaggaagcagatacccggtgtggggtggacgaagtgtcgacttgggaagatacacatgcaaaatgggaacaagcaacaaaactaatccttagctatccaaaagcccaaatggaagatggccagcttcacaagaccattgttaagaggcgaatgtcccatgtgagtggaggaggacccatagatttgtctgacacagactccctacaggcatggatcaacatgactagcttcctttgtgcccttgggggagtgtgcctccagcagagaaggaattctggcctggcaacctatagcccacccatgggtccggtcagtgaacataagggttccatgatttcagtgatgtcctcagagggaaacgcagatacacctgtcagcaaatatatggatcagctgttgtcgttaatggtgtgtaagcttgagaaagtgggacttcaaatacggaccaatggtaaggacctggttttattgactgataccaatactcaatttgtagaggaaaccctagctatattgaagaacttgctagataatcatactgaaggcagctctgaacatctagagcaagctagcattgaaacaatgatgttaaatctggtcaggtacgtttgtgtgcttgggaatatggtccatgcaattcaaataaaaacgaaactgtgtcagttggttgaagtaacgatggcaaggagagatgacctctcattttgccgagagatgaaatttaggaataagatggtagaatacctgacagactgggttatgggaacatcaaaccaagcagcagatgatgatgtaaaatgtcttacaagactttcaggaaaaataaatgtgcgagagcggtatgtttgggaagttattgttgtcagtttatga

SEQ ID NO: 121344 - DNA, 426 bp, Homo sapiens
atgcagggactggtggaaagactggaacgagctgtcagccgcctggagtcgctgtctgcagagtcccacaggccccctgggaactgcggggaagtcaatggtgtcattgcaggtttttttgggctgagaaaagccgtggggaagaagggacttcagaaaaagctttcaccaggaaagacctacattggtgcttctagaatttcaggcgaatttggacccgtgcctgtattacataccatgggacaaaaattactgtgtgtggcaccctccgtggaagcctttgacaagctgatggacagtatggtggccgagtttttaaagaacagtaggatccttgctggggacgtggagacccatatcagtggcggcattagattctcagaggagcataaaccctatggtgaactgcgcattcgagggatctag

SEQ ID NO: 121345 - DNA, 1690 bp, Homo sapiens
tcccctttatttccactccccacccgcgtggctttgctctccctctcccccctcagctcgtctgtatttggagctccggaagctgccggcgactctcccctggagcagcgtgactgacaccggctcctattcagctgggaggagggagaggggaggagaaggggagggccgcggaaggagggtacgagtggccgaccacagatctgcattgccgaggacgggaccccagggcagcgaagaggaattggccaacatgcagggacttggtggaaagactggaacgagctgtcagccgcctggagtcgctgttctgcagagtcccacaggccccctgggaacttgcggggaagtcaatggtgtcattgccaggtgtggcaccctcccgtgggaagcctttgcacaagctgatggacagtatggtggccgagttttttaaagaacagtaggatcctttctggggacgtggagacccttgcagaaattgtgcacagtgctttccaggcccagcgggctttccttctgatggcctctcagtaccaacaaccccacgagaatgacgtggccgcacttctgaaacccatatcggaaaagatttaaggaaatccaaacttttcaaagagagaaacccgggggagtaacatgtttaatcatctttcggccgtcagcgaaagcatccctgcccttggatgggatagctgtgtctcccaaacctggtccttatgtcaaggagatgaatgacgctgccaccttttacactaacagggtcttaaaggactacaaacacagtgatttgcgtcatgtggattgggtgaagtcatatttgaacatttggagtgaacttcaagcatacatcaaggaacaccacaccacgggcctcacatggagcaaaacaggtcctgtagcatccacagtatcagcgttttctgtcctctcctctgggcctggccttcctccaccccctcctcctctgcctcctccagggccacctccacttttcgagaatgaaggcaaaaaagaggaatcttctccttcacgctcagctttatttgcccaacttaaccagggagaagcaattacaaaagggctccgccatgtcacagatgaccagaagacatacaaaaatcccagcctgcgggctcaaggagggcaaactcaatctcccaccaaaagtcacactccaagtcccacatctcctaaatcttatccttctcaaaaacatgccccagtgttggagttggaaggaaagaaatggagagtggagtaccaagaggacaggaatgaccttgtgatttcagagactgagctgaaacaagtggcttacattttcaaatgcgaaaaatcaactattcagataaaagggaaagtaaactccattataattgacaactgtaagaaactcggcctggtgtttgacaatgtggtgggcattgtggaagtgatcaactcccaggacattcaaatccaggtaatggggagagtgccaacaatttccattaataagacagaaggttgccacatatacctcagtgaagatgcattagactgtgagatcgtgagcgccaagtcatctgaaatgaacatacttatccctcaggatggtgattatagagaatttcccattcctgaacagttcaagacagcatgggatggatccaagttaatcactgaacctgcagaaattatggcctaa

SEQ ID NO: 121346 - DNA, 433 bp, Homo sapiens
aggtgctttgaaagctactctctcactcttggaaagggttttgatgaaagatattgttaccccagtgccacaagaggaggtaaaaacagttatccgtaaatgtctggaacaggctgcgttagtcaactattctcggctctcagagtatgccaaaatcgaagaaaatgtaggccggttaatcactcctgccaaaaagcttgaagatacaatacgtcttgctgaactagtcattgaagttcttcagcaaaatgaggagcaccacgcagaggcctttgcgtggtggtcagatttaatggtggagcatgcggagacgttcctgtcactctttgcagtagacatggatgcagccttagaggtgcaacctccagacacatgggacagttttccactatttcagctgctgaatgattttctccgtactgactataatttg

SEQ ID NO: 121347 - DNA, 3625 bp, Homo sapiens
agcgagaaggagaaggaagagttggagcggctgcagaaagaggaggaggagaggaagaagaggctgcagctgtatgtgttcgtgatgcgctgcatcgcctacccctttaatgccaagcagcccaccgacatggctcgccggcagcagaagatcagcaaacagcagctgcagacagtcaaggaccggtttcaggctttcctcaatggggaaacccagatcatggctgacgaagccttcatgaacgctgtgcagagttactatgaggtgttcctgaagagcgaccgtgtggcccgcatggttcagagtggaggctgttccgccaacgactcccgggaggtcttcaagaagcacattgagaagagagtgcgcagcctgcctgagattgacggcctcagcaaggagactgtgctgagctcctggatggccaaatttgatgccatctaccgtggagaagaggacccgcggaagcagcaggcccggatgacagccagcgcagcctccgagctgattctgagcaaggagcaactctatgagatgttccagaacattcttgggatcaagaagttcgaacatcagctcctttacaatgcctgccagctggacaatccagatgagcaagcagcccagatcagacgagagctggatggacgtctacaaatggcagaccaaatagccagggaacgcaaatttcccaagtttgtatccaaagaaatggaaaacatgtacattgaggagctgaagtcatctgtcaacctgctcatggccaacttggagagcatgccggtatccaaaggcggggagttcaagctccagaaactcaaacgcagccacaatgcttccatcatcgacatgggcgaggagagtgagaaccagctctccaagtcagatgtcgtgctgtctttctcattggaggtggtaattatggaagtccaaggcctcaaatctttggctccaaatcgcatcgtatattgcacaatggaggtggaaggaggagagaaactacagactgatcaggccgaggcttctaaaccaacctggggcacccagggtgacttctccacaacccatgcactgccagctgtgaaggtgaagctgttcacagagagcacaggcgtcctggcgttggaggacaaggagcttgggcgggttattctccatcccaccccgaacagccccaaacagtcagagtggcacaaaatgacagtctccaaaaactgccccgaccaagatctcaaaatcaaacttgctgtccgaatggataagcctcaaaacatgaagcattctgggtatttatgggccatcggtaagaatgtctggaagagatggaagaaaaggttttttgtattggtgcaggtcagtcagtacacgtttgccatgtgcagttatcgggagaagaaagcggagcctcaggaacttctacaattggatggctacactgtggattacaccgacccccagccaggtttggagggtggccgagccttcttcaatgctgtcaaggagggagacaccgtgatatttgccagtgacgatgaacaagaccgcatcctgtgggtccaggccatgtatcgggccacggggcagtcacacaagcctgtgcccccgacccaagtccagaaactcaacgccaagggaggaaatgtacctcagctggatgcccctatctctcaattttctggactgaaggacgcagatagagctcaaaaacatggcatggatgaatttatctcttccaacccctgtaactttgaccacgcttccctctttgagatggtacaacgccttactttggatcacagacttaatgattcctattcttgcctgggctggttcagtcctggccaggtgtttgtactagacgagtattgcgcccgaaatggagtccgggggtgtcaccgacatctctgctacctcaaaagacttgcttgaacgggcagaaaatggcgccatgatcgaccccacccttcttcactacagctttgccttctgtgcatcccatgtccatgggaacaggcctgatggaattggaactgtgactgttgaagaaaaggaacgttttgaagaaatcaaagagaggctccgagttctgctagaaaatcagattacacattttaggtattgctttccatttggtcgacctgaaggtgctttgaaagctactctctcactcttggaaagggttttgatgaaagatattgttaccccagtgccacaagaggaggtaaaaacagttatccgtaaatgtctggaacaggctgcgttagtcaactattctcggctctcagagtatgccaaaatcgaagagaatcaaaaggatgcagaaaatgtaggccggttaatcactcctgccaaaaagcttgaagatacaatacgtcttgctgaactagtcattgaagttcttcagcaaaatgaggagcaccacgcagaggggaaagaggcctttgcgtggtggtcagatttaatggtggagcatgcggagacgttcctgtcactctttgcagtagacatggatgcagccttagaggtgcaacctccagacacatgggacagttttccactatttcagctgctgaatgattttctccgtactgactataatttgtgcaatggaaaatttcacaaacacctgcaagacctgtttgccccacttgttgttagatatgtggatctgatggagtcctcaattgcacaatccattcacaggggctttgagcgggagtcatgggaaccagtcaataatgggtcaggcacctcagaagatctgttttggaaacttgacgcccttcagaccttcattcgggacctgcactggcctgaagaagagtttggaaagcacctggaacaacggctgaagttgatggcaagtgacatgatcgaatcttgtgtcaaaagaaccaggattgcatttgaagttaagctgcaaaaaaccagtcgatcaacagattttcgagtcccacagtcaatatgcaccatgtttaatgttatggttgatgccaaagctcaatcaacaaaactttgcagcatggaaatgggccaagagcatcaataccattcaaaaatagacgaactaattgaagaaactgttaaagaaatgataacactcttggttgcaaagttcgttactatcttggaaggagtgctggcaaaattatccagatatgacgaagggactttgttttcttcttttctgtcatttaccgtgaaggcagcttccaaatatgtggatgtacctaaacccgggatggacgtggccgacgcctacgtgactttcgtccgccattctcaggatgtcctgcgtgataaggtcaatgaggagatgtacatagaaaggttatttgatcaatggtacaacagctccatgaacgtgatctgcacctggttgacggaccggatggacttacagcttcatatttatcagttgaaaacactaattaggatggtaaagaaaacctacagagatttccgattgcaaggggtcctggactccaccttaaacagcaagacctatgaaacgatccggaaccgtctcactgtggaggaagccacagcatcagtgagtgaaggtgggggactgcagggcatcagcatgaaggacagcgatgaggaagacgaagaagacgattag

SEQ ID NO: 121348 - DNA, 1752 bp, Homo sapiens
atgacattacatccggtgcttctcaaccctttttcccacaaagataaagggcaaaaactgtgtagtggggatagctctgttttactaacctctgcatgtagcactttatatagcaggcaggcactgatgcggtataaaaaacacctccacattcttggtctcatgttacacactgaacacaaagattattgcacttgtgaacatgagcatgttgctggctggccttccaattctgagcaagttattctccatcccaccccgaacagccccaaacagtcagagtggcacaaaatgacagtctccaaaaactgccccgaccaagatctcaaaatcaaacttgctgtccgaatggataagcctcaaaacatgaagcattctgggacaattcaaaactttcctagcagcatgctaggtgattctagtttggagaggtcttacaggctccgcgtaccttgtcggaggcatccagatcattcaaactctgcatatgactcacttgcacctcaatcagcaacccacatctttgaggtgcctgatggaattggaactgtgactgttgaagaaaaggaacgttttgaagaaatcaaagagaggctccgagttctgctagaaaatcagattacacattttaggtattgctttccatttggtcgacctgaaggtgctttgaaagctactctctcactcttggaaagggttttgatgaaagatattgttaccccagtgccacaagaggaggtaaaaacagttatccgtaaatgtctggaacaggctgcgttagtcaactattctcggctctcagagtatgccaaaatcgaaggtttggagggtggccgagccttcttcaatgctgtcaaggagggagacaccgtgatatttgccagtgacgatgaacaagaccgcatcctgtgggtccaggccatgtatcgggccacggggcagtcacacaagcctgtgcccccgacccaagtccagaaactcaacgccaagggaggaaatgtacctcagctggatgcccctatctctcaatttttgagaaaatggtttgccgaaaacttaaaaggtgaattccgaagatgcccgccgtgtcagatccgatatagtctgctgtggctgaagagactcatttctggctccagtgatggcccgcagtggcacttagagtgtggtcctcgaaccagcagcactagcagcaccagtaaacttgttagaaatgcaagttctcaacccctaccccccagctctactgaatcagcaactttaggggaccaaccaatccaggttgtcaccagtaaatatcaagtatcccctgtgcttagagttagtgtggacatggttcccactttcaagggggctcataggctggtggagaaaccccaaaatgaacaagacatgtgtgatgagatttatgaagagaacataaactctaagatggtgtcatctgaagggaatgagacccttcactttaagcgggataatgacctccaaggcagtgtttctccaagggtggcctttggaccacctgcatcagtatctcctggggtgccttttataagtacggaatactgggccccaccccagacttactgtatcagagtcttctggatggcaccttggggtctgcattttaaacaacacctaatgcagatggtccaggcccccatttacagacactctctcattgcacaggaatgcttgaatctctgtcacagaagctcctcgcaactgcttcattcccttcacagttggtag

SEQ ID NO: 121349 - DNA, 1059 bp, Homo sapiens
atggatcaaggtgcctgcaattcagtgtctagtgaagatttccgtctctgcttcatggatgatgcctcttgctgtgtccttagctggcttaatgttaagcttgttaaagagagggtctggagtgagcattcaaggccaaacagaaggaaggagttacccttcctgttcatggcctcggagccagcagagcagtgtgaaggaagctgggcactgctcagctcagtatcttgtgtgcacaagctctgccagtctgcaccctccagcaaatgtcttcactatccacggaccattgctatggaccagctcccatctgcagcctctgactcaaaagaatttttcattgtatacaagtcagttatgtttatgtctttgcatgtgtactggtttgtaagctccttgaagacagggcccatgtcatttgcaatgttatgcattgagccattgtatgttggcgatgatggtaaagctaatgcaacagtggatggtcttgagcagggatacgttgtttgtccctctgaaaaaagattccttctgccctttgctgtccttaagaagaaccgaaagaggaagattatggtcttcttttcatcttctatgtctgtgaaatatcactatgagttgctaaattacatggatttgcccatcttggccattcatggaaagcaaaagcaaaataagggtacaaccacattcttccagttctgcaaagcagattcaggaatactattgtgtatggatgtggcagcaagaggactggacattcctgaagtcgactggatcgttcagcatgaccctctggatgaccctaaggaatatattcatcgtgtaagcagaacagccagaggtctaaatgggagaggtcatgtcttgctcattttgtgcccagaagaaatggggttccttcactacttgaaacaatccaagtttccattaagtgaatttgacttttcctggtctaaaatttctgacattcagtctcagcttgagaaattaattgaaaagaactgctttcttcataaggcagcccaggaagcatataagtcatacacacgagcctag

SEQ ID NO: 121350 - DNA, 2192 bp, Homo sapiens
aatcaaaacaaaagcccatgaatgtgggcttatcagaaactcaaaatggaggcatgtctcaagaagcagtgggaaatataaaagttacaaagtctccccagaaatccactgtattaaccaatggagaagcagcaatgcagtcttccaattcagaatcaaaaaagaaaaagaagaaaaagagaaaaatggtgaatgatgctgagcctgatacgaaaaaagcaaaaactgaaaacaaagggaaatctgaagaagaaagtgccgagactactaaagaaacagaaaataatgtggagaagccagataatgatgaagatgagagtgaggtgcccagtctgcccctgggactgacaggagcttttgaggatacttcgtttgcttctctatgtaatcttgtcaatgaaaacactctgaaggcaataaaagaaatgggttttacaaacatgactgaaattcagcataaaagtatcagaccacttctggaaggcagggatcttctagcagctgcaaaaacaggcagtggtaaaaccctggcttttctcatccctgcagttgaactcattgttaagttaaggttcatgcccaggaatggaacaggagtccttattctctcacctactagagaactagccatgcaaacctttggtgttcttaaggagctgatgactcaccacgtgcatacctatggcttgataatgggtggcagtaacagatctgctgaagcacagaaacttggtaatgggatcaacatcattgtggccacaccaggccgtctgctggaccatatgcagaataccccaggatttatgtataaaaacctgcagtgtctggttattgatgaagctgatcgtatcttggatgtggggtttgaagaggaattaaagcaaattattaaacttttgccaacacgtagacagactatgctcttttctgccacccaaactcgaaaagttgaagacctggcaaggatttctctgaaaaaggagccattgtatgttggcgttgatgatgataaagcgaatgcaacagtggatggtcttgaacagggatatgttgtttgtccttctgaaaagagattccttctgctctttacattccttaagaagaaccgaaagaagaagcttatggtcttcttttcatcttgtatgtctgtgaaataccactatgagttgctgaactacattgatttgcccgtcttggccattcatggaaagcaaaagcaaaataagcgtacaaccacattcttccagttctgcaatgcagattcgggaacactattgtgtacggatgtggcagcgagaggactagacattcctgaagtcgactggattgttcagtatgaccctccggatgaccctaaggaatatattcatcgtgtgggtagaacagccagaggcctaaatgggagagggcatgccttgctcattttgcgcccagaagaattgggttttcttcgttacttaaaacaatccaaggttccattaagtgaatttgacttttcctggtctaaaatttctgacattcagctctcagcttgagaaattgattgaaaaagaattactttcttcataagtcagccccaggaagcatataagtcatacatacgagcctatgattcccattctctgaaacagatctttaatgttaataacctaaatttgcctcaggttgctctgtcatttggtttcaaggtgcctcccttcgttgatctgaacgtcaacagtaatgaaggcaagcagaaaaagcgaggaggtggtggtggatttgggctaccagaaaaccaaggaaagttgaggaaatccaaaatcttttaaacacattaggcaagaaatcatctggacaggcagggcagttctctcactgaacacatgccttcctttcatcttgaataactttgtcctaaaatgaattttttttccccttgatttaacaggatttttgtagactttagaatttggacttacctaacaagagtataaattgacttgggttgcaagcactgagcactgttacttctatcacgtctctcttttatttctgggatataaaacaggctttaagtttcttggcttgcccaagggcagagcaacggaatatctggtgtttcttgtgatgataatattttaattttaaatatccctccctcatacaagtgtatgttaccattttaaaataattctttttgtacctttaaa

SEQ ID NO: 121351 - DNA, 987 bp, Homo sapiens
atggatcaaggtgcctgcaattcagtgtctagtgaagatttccgtctctgcttcatggatgatgcctcttgctgtgtccttagctggcttaatgttaagcttgttaaagagagggtctggagtgagcattcaaggccaaacagaaggaaggagttacccttcctgttcatggcctcggagccagcagagcagtgtgaaggaagctgggcactgctcagctcagtatcttgtgtgcacaagctctgccagtctgcaccctccagcaaatgtcttcactatccacggaccattgctatggaccagctcccatctgcagcctctggctttcggcgtggggttgttctggccgcccccgactttaaagagccattgtatgttggcgatgatggtaaagctaatgcaacagtggatggtcttgagcagggatacgttgtttgtccctctgaaaaaagattccttctgccctttgctgtccttaagaagaaccgaaagaggaagattatggtcttcttttcatcttctatgtctgtgaaatatcactatgagttgctaaattacatggatttgcccatcttggccattcatggaaagcaaaagcaaaataagggtacaaccacattcttccagttctgcaaagcagattcaggaatactattgtgtatggatgtggcagcaagaggactggacattcctgaagtcgactggatcgttcagcatgaccctctggatgaccctaaggaatatattcatcgtgtaagcagaacagccagaggtctaaatgggagaggtcatgtcttgctcattttgtgcccagaagaaatggggttccttcactacttgaaacaatccaagtttccattaagtgaatttgacttttcctggtctaaaatttctgacattcagtctcagcttgagaaattaattgaaaagaactgctttcttcataaggcagcccaggaagcatataagtcatacacacgagcctag

SEQ ID NO: 121352 - DNA, 1369 bp, Homo sapiens
gaggacttccgacgaggctgatcgtatcttggatgtggggtttgaagaggaattaaagcaaattattaaacttttgccaacacgtagacagactatgctcttttctgccacccaaactcgaaaagttgaagacctggcaaggatttctctgaaaaaggagccattgtatgttggcgttgatgatgataaagcgaatgcaacagtggatggtcttgaacagggatatgttgtttgtccttctgaaaagagattccttctgctctttacattccttaagaagaaccgaaagaagaagcttatggtcttcttttcatcttgtatgtctgtgaaataccactatgagttgctgaactacattgatttgcccgtcttggccattcatggaaagcaaaagcaaaataagcgtacaaccacattcttccagttctgcaatgcagattcgggaacactattgtgtacggatgtggcagcgagaggactagacattcctgaagtcgactggattgttcagtatgaccctccggatgaccctaaggaatatattcatcgtgtgggtagaacagccagaggcctaaatgggagagggcatgccttgctcattttgcgcccagaagaattgggttttcttcgctacttgaaacaatccaaggttccattaagtgaatttgacttttcctggtctaaaatttctgacattcagctctcagcttgagaaattgattgaaaaagaattactttcttcataagtcagccccaggaagcatataagtcatacatacgagcctatgattcccattctctgaaacagatctttaatgttaataacctaaatttgcctcaggttgctctgtcatttggtttcaaggtgcctcccttcgttgatctgaacgtcaacagtaatgaaggcaagcagaaaaagcgaggaggtggtggtggatttgggctaccagaaaaccaaggaaagttgaggaaatccaaaatcttttaaacacattaggcaagaaatcatctggacaggcagggcagttctctcactgaacacatgccttcctttcatcttgaataactttgtcctaaaatgaattttttttccccttgatttaacaggatttttgtagactttagaatttggacttacctaacaagagtataaattgacttgggttgcaagcactgagcactgttacttctatcacgtctctcttttatttctgggatataaaacaggctttaagtttcttggcttgcccaagggcagagcaacggaatatctggtgtttcttgtgatgataatattttaattttaaatatccctccctcatacaagtgtatgttaccattttaaaataattctttttgtacctttaaa

SEQ ID NO: 121353 - DNA, 4557 bp, Homo sapiens
atggatggtgccaaagcattttttagtgcagtggcagcaggatttgtcatcattctcacatgccagctgcagtggcagtggcaacatggtggggtgcatgctcatcagctgtggcagcttgctagtgggtaccgggatgcctgcttctgtgtgagcacttacagcagtggcccttctgaatttcctggacctactctcggaaccctcaacgagctagcgatagatttagaggaaaggaagcaccgtcggaaagcaaaggtttggaagggtgagggcggcggtttgcgatccccgcggcagagccttcttgcgtttagggctgtcctagcatcccgagggactcggtcctgtcacgtttcgccctatttgggggtttctggggctctcagctcgcccaatccgcatccctccactactggcgcggggccgattcccccggtacaacgttggggtcttccccagatcaaccagaaaaatagagaaattgctatcccactgacattgggtatgagcacacacttgcgaagagggtgcaagaacatgtctcgatttagcccatctttgcactgctgcactactcccatatccactaatttcacggacccaggcagccactgcaagggagcacatggggatatctgcttgttgattcaaaacctgaagggggctctgccaatgagcatcaacaggtcctactttaatgcacaccccctacttcaaatttctgaggcagtgacattcaaggatgtggctgtggtcttcactgaggaggagctggggctgctggaccctgcccagaggaagctgtaccgagatgtgatgctagagaacttcaggaacctgctctcagtagggaatcaaccattccaccaagatactttccacttcttagggaaggaaaagttttggaagatgaagacaacaagccaaagagaagggaattcaggaggcaagatccaaattgagatggagactgttccagaagcaggaccacatgaagagtggtcctgtcagcaaatatgggaacaaattgcaagtgacctaaccaggtctcaaaactccataaggaacagctctcagttcttcaaagaaggtgatgtcccctgccagattgaggcaagactatctataagtcacgtgcaacagaaaccttaccgttgtaatgaatgtaaacagtccttcagtgatgtttctgtctttgatcttcatcaacaatcacactcaggagagaaatctcatacatgtggtgagtgtggaaaaagcttctgttacagcccagcccttcatattcatcagagagtccatatgggagaaaaatgctataagtgtgatgtgtgtggtaaggaatttaatcagagctcacatctgcaaactcatcagagagtccatactggagagaaaccattcaaatgtgggcaatgtgggaaaggcttccatagtagatcagcacttaatgttcattgcaaattgcacacaggagagaaaccttataattgtgaggaatgtgggaaagccttcattcatgattcacagcttcaagaacatcagagaatccatactggggagaagccattcaaatgtgatatatgtggtaagagcttccgtgttagatcaagacttaataggcattccatggttcacacaggagaaaaagcattcagatgtgatacatgtggcaagaactttcgtcagagatcagcacttaatagtcattccatggtccacatagaagagaagccatacaaatgtgagcaatgtggaaaaggcttcatttgtaggcgagatttttgtaagcatcagatggtccacacaggagagaaaccatataattgtaaagaatgtgggaagaccttcagatggtcctcatgtcttttgaaccatcagcaagtccacagtggacaaaaatccttcaaatgtgaagaatgtgggaagggattttatacaaattcacgacgatcttcccatcagagatcccacaatggagaaaagccatataactgtgaggagtgtggtaaggactataaaaggaggttggatcttgagtttcaccagagggtccacacgggtgagagaccctataattgtaaggaatgtggcaagagctttggctgggcctcctgtcttttgaaacatcagagactccacagtggggaaaaacctttcaaatgtgaagagtgtggaaagagatttactcagagttcacaacttcattcccatcagacatgccatactggagaaaagctatacaaatgtgagcagtgtgagaaggggtacaacagtaaatttaatcttgacatgcaccagagggtccacgggggagagcgaccctataattgtaaggaatgtggaaagagctttggctgggcttcatgtcttttgaaacatcagagactccacagtggagaaaagccattgaaatctggagtgtgggaagagatctactcagaattcacagcttcatttacatcagagtcttcaggccagaaactggtcagtatccccctgggacagagtttccaaaagaaggagaaggctgccatctttgctgttttgcagctttcactggtgacacctccaggtacgggaaaaacggaggcaactagggtctcgagcagaccccagcaaactgtggcagccctacagttgctaacagtcagtggcttgactgttaaaaacaggcagaaaacaacaagaacatcaacaaaaagaccccacaaaaaccccattcaagggtcagcaacctcaagattgaagagcaaatggactccatttcccaagataccagcgaaacgcctgcgggagtctaattgcccggtcgatgcgcaggaaatttggctcccgcaggcgtttcgcgaactgtggcacgtttcaggcaggattcctccttcattcaaactgcatcacccaggagtctgcaaattccccaaagtaggaggaaaaatgaccacattcaaggaggcagtgaccttcaaggatgtggctgtggtcttcactgaggaggagctggggctgctggaccctgcccagaggaagctgtaccgagatgtgatgctggagaacttcaggaacctgctctcagtggggcatcaaccgttccaccaagatacttgccacttcctaagggaagaaaagttttggatgatggggacagcaacccaaagagaagggaattcaggaggcaagatccaaactgagttggagtctgttccagaagcaggagcacatgaagagtggtcctgccagcaaatctgggaacaaattgcaaaagacttaaccaggtctcaggactctatcataaataactctcagttctttgaaaatggtgatgtcccctcccaggttgaagcaggactacccacaattcatacaggacagaaaccttcccagggtgggaagtgtaaacagtccatcagtgatgttcccatctttgatcttcctcagcagttatactcagaagagaagtcttatacatgtgatgagtgtggaaaaagcatctgttacatctcagctcttcatgttcatcagagagtccacgtgggagagaaactctttatgtgtgatgtgtgtggcaaggaatttagtcaaagctcacatctgcaaactcatcagagagtccacactggagagaaaccattcaaatgtgagcaatgtgggaaaggtttcagtcgtagatcagcacttaatgttcatcgtaaattacacacaggagagaaaccttacatttgtgaggcatgtgggaaggccttcattcatgattcccagcttaaggaacataagagaatccatactggggagaaaccattcaaatgtgatatatgtggtaagaccttctattttaggtcaagacttaagagccattccatggttcacacaggagaaaaaccatttaggtgtgatacatgtgataagagctttcatcagagatcagcacttaataggcattgcatggtccacacaggagagaaaccgtacagatgtgagcagtgtggaaaaggctttattggtaggctagatttttataagcatcaggtggtccacacaggagaaaaaccatataattgtaaagaatgtgggaagagcttcagatggtcctcatgccttttgaaccatcagcgagtccacagtggagaaaaaagcttcaaatgtgaagaatgtggaaagggattttatacaaattcacaactgtcttcccatcagagatcccacagtggtgaaaagccatataaatgtgaggagtgtgggaagggctatgttactaagtttaatcttgacttgcaccagagggtccacacgggagagagaccttataattgtaaggaatgtgggaagaactttagccgggcctcaagtattttgaatcataagagactccactgccagaaaaaaccattcaaatgtgaggactgtggaaagaggcttgtacacaggacataccgtaaagaccagccgagagactatagtggggaaaacccatccaaatgtgaggattgtgggagacgctacaagaggcgcttgaatctggatatacttttatcattatttctaaatgacacataa

SEQ ID NO: 121354 - DNA, 326 bp, Homo sapiens
agggtgcaagaacatgtctcgatttagcccatctttgcactgctgcactactcccatatccactaatttcacggacccaggcagccactgcaagggagcacatggggatatctgcttgttgattcaaaacctgaagggggctctgccaatgagcatcaacaggtcctactttaatgcacaccccctacttcaaatttctgaggcagtgacattcaaggatgtggctgtggtcttcactgaggaggagctggggctgctggaccctgcccagaggaagctgtaccgagatgtgatgctagagaacttcaggaacctgctctcagtag

SEQ ID NO: 121355 - DNA, 443 bp, Homo sapiens
cggaattcccgcgtcgacgatttcgtggggcagttccgcgcgttgcaggcccttctgaatttcctggacctacgcattggatcctcaaagaactggtgatcgaattaggggaaaaggggcctcgtcggagagtagagctgaataccactagaaacatacctgtaaccagagacagctgattatagctttctgcagcaaggaagcccacgtaccaggggctgtcttggcacaattctgctttcccaggaactgcatcactcaggactctgcaagtttccagaagtaagagggaaaatgaccacgttcaaggaggcaatgaccttcaaggacgtggctgtggtcttcactgaggaagagctggggctgctggaccttgctcagaggaagctgtatcgagatgtgatgctggagaacttcaggaacctgctctcagtgggacatca

SEQ ID NO: 121356 - DNA, 2693 bp, Homo sapiens
atggaccctggtacgttgcagagtgcttcacaaggccctacagccattaacccgtgtgactatgtactcaaaaggagaaatattcaaacatcttggcaacgactaactcctattatcaaatggcacgtttatattttgatgattgggcctggtgagaaggaagcaggaaggaatctaggcatatttggcaaatggactccatttcccaagataccagcgaaacgcctgcgggagtctaattgcccggtcgatgcgcaggaaatttggctcccgcaggcgtttcgcgagtatcttgggaggcgtgggaattttggcccaggcaggaggacctgtgaattctgggaagtggagtccatttgctctgtggagtcgtgggaactttggctcaggcaggcggattcgggggattctgggaagtgtagtccagacgcctgtggcatcatcgacacttccggtctccgagcaggacactgctacttaacaagactgtggcacgtttcaggcaggattcctccttcattcaaactgcatcacccaggagtctgcaaattccccaaagtaggaggaaaaatgaccacattcaaggaggcagtgaccttcaaggatgtggctgtggtcttcactgaggaggagctggggctgctggaccctgcccagaggaagctgtaccgagatgtgatgctggagaacttcaggaacctgctctcagtggggcatcaaccgttccaccaagatacttgccacttcctaagggaaggaaaagttttggatgatggggacagcaacccagagagaagggaattcaggaggcaagatccaaactgagatggagactggttccagaagcaggaacacatgaagaattttcctgcaagcaaatttgggaacaaattgcaagtgacttaaccaggtctcaagataccaccataagtaactctcagttatttgaacaagatgacaacccctcccagattaaagcaagactatctataattcacgttaagacagaaacttctgagggtaggacgtgtaaaaagtcctttagtgatgtctccgtccttgatcttcatcaacaactacagtcaagagagaagtctcatacatgtgatgaatgtggaaagagtttctgttatagctcagctcttcgtattcatcagagagttcacatgggggagaaactctataattgtgatgtgtgtggtaaggaattcaatcagagctcacatcagcaaattcatcagagaatccacactggagagaaaccattcaaatgtgagcagtgtgggaaaggctttagtcgtagatcaggactttatgttcatcgtaaattacacacaggagtgaaacctcatatttgtgagaaatgtgggaaggccttcattcatgattcccagcttcaggaacatcaaagaatccatactggggagaagccattcaaatgtgatatatgttgtaagagcttccgtagtagagcaaatcttaataggcattccatggttcacatgcgagagaaaccattcagatgtgatacatgtggtaagagctttggtctgaaatcagcacttaatagtcatcgcatggtccacacaggagagaaacggtacaaatgtgaggaatgtggaaaacgcttcatttataggcaagatctttataagcatcagatagaccacacaggggagaagccatataattgtaaagaatgtggaaagagcttcagatgggcctcaggtctttcaagacatgtgcgagtccacagtggagagacaacattcaaatgtgaagaatgtgggaagggattttatacaaattcacaacgttattctcaccagagagcgcacagtggagaaaagccatatagatgtgaggagtgtgggaagggctacaaaaggaggttggaccttgactttcatcagagggtccacagaggagagaaaccctataattgtaaggaatgtgggaagagctttggctgggcctcgtgtcttttgaatcatcagagaatccacagtggagaaaaaccatttaaatgtgaagaatgtgggaaaagatttactcagaattcacaactttatacccatcgtagagtccacagtggagaaaaaccattcaaatgtgaagagtgtgggaaaagatttactcagaattcacaactttattctcatcgcagagtccacactggagtaaagccatacaaatgtgaagagtgtgggaagggcttcaacagtaagtttaatcttgacatgcaccagagggtccacaccggagagagaccttataattgtaaagaatgtgggaagagctttagccgggcctcaagtattttgaatcataagagactccatggtgatgaaaagccattcaaatgtgaagagtgtgggaagagatttactgagaattcacagcttcattcccatcagagggttcacactggggaaaagccatacaaatgtgagaagtgtggaaagagcttcagatgggcctcaactcatctaacccatcagagactccacagtagagaaaaactacttcaatgtgaggactgtgggaagagcattgtgcacagttcatgccttaaagaccaacaaagagaccaaagtggagagaaaacatctaaatgtgaggactgtgggaagcgctacaagaggcgcttgaatcttgatacgcttttgtcattatttttaaatgacacataa

SEQ ID NO: 121357 - DNA, 585 bp, Homo sapiens
aagaggactgccatttcgccaaaggatgcttttgaaactcggcaggacttaaatgaggaagaagctgctcaggtgcatggagtcaaggacccggcgccacatcaacccagagcgtgcttgccgatgggacagattctgcaggtaactaagcaagacaagaacctcataaagccgctttatgaccgatacagaattatcaagcaaatcttgtcaacaccttcccttattccaacaattcaggaggaagaggactctgatgaagaccgtccacagggaagccaacaaccttctttggcagatccagcatctcaccttcctgttggtgaccacctcacctactctaatgagactgagcctgttagggcccttttaccagatgaaaagaaagaagtaaaaccaccagctctctccatgtctaatttacatgaggctaccatgcctgtacttcttgaccatctccgagaaactagggctgacaagaagagactgcggaaagccttaagagaatttgaagaacagttttttaaacaaacaggaagaagtccacaaaaggaagataggataccaatggcagatgagtattat

SEQ ID NO: 121358 - DNA, 369 bp, Homo sapiens
atgcccagagaagcacgggatatgggtcatattactgagccaccaaattcatatgttgaagccttaatctccaatgtagctgtattcagcgatgagggctgtaaggaagtaattaagccccaagctctgggctctgactcctttgtgcagaattccttgctgaagctgcaagccctcgaatctgatctgtgctctgcatttttaacaaaccaggaagaagctgctcaggtgcatggagtcaaggacccggcgccagcatcaacccagagcgtgcttgccgatgggacagattctgcagctgaagcaaatatttccagcatggaattagtaagcacctattctgatgtgattgaacggaaaatggaatga

SEQ ID NO: 121359 - DNA, 1267 bp, Homo sapiens
aggtaccggcccggaattcctgggtcgacgatttcgtctctggtagaagagcacgcgccgccctcttgggagccgcagcatcagaatgtagaggcgaccgtgctggtggacagcgtattgcgacccagcatgggcaacttcaagtccaggaagcccaagtccatcttcaaagcggagagcgggaggagccacggagaaagtcaggagacagagcatgtggtatccagccagtcagagtgtcaggtgagagcaggaacaccagctcatgagagtccacaaaacaatgccttcaagtgccaagaaaccagtgcgacttccaaccaagaatagaccagaggactgccacttcgccaaaggatgcttttgaaactcggccaggacttaaatgaggaagaagctgctcaggtgcatggagtcaaggacccggcgccagcatcaacccagagcgtgcttgccgaatgggacagattctgcagacccctcaccagtccacaaagatgggcagaatgaggccgacagtgcaccagaagacctccactctgtggggaccagcaggctgcttctattcacatcactgatggtgataacccactgctgttcgccacggttgttccctctttcaggccaaagccagagattcaacttagaccccgagtcagccccatctccacccagcactcagcagtttatgatgccgcggagttcttcacgctgcagctgtggagatggcaaggagccacagaccatcacccagctcaccaagcacatccagagcctcaagcggaaaattcggaaatttgaagaaaaatttgaacaagaaaagaaataccggccttcacatggtgacaagacttctaatcctgaagtcctgaaatggatgaatgatttggctaaaggtcgtaaacagctcaaagaactaaagctaaagctgtcagaagaacaagggagtgctcccaaaggtccacctagaaacctgttgtgtgagcaacccacagtccccagagaaaatgggaaaccggaagctgcgggcccggagccaagctcctctggagaagagactccagatgctgccttgacatgcctgaaggagagaagagagcaacttcctccccaggaggattctaaggtaactaagcaagacaagaacctcataaagccgctttatgaccgatacagaattatcaagcaaatcttgtcaacaccttcccttattccaacaattgtaagtcaggatacttgcatgctgttactttgtactgatgtgtag

SEQ ID NO: 121360 - DNA, 1782 bp, Homo sapiens
tcacaatcggcagcataagcacagacgtaaacgcaggaaccaatgcgattttaggttgaatttaggacagcgctggaacttcactttacccctcttgcggtcacacgaggtgggcggcggccggcaggtttgggcgggagaaacgcggttcgggactccgctgccgcctaggcgcgggggctgacctttgatgacacctgcgcagtccccggtctgcctccacccctggccattcgcaattttattcctcatcccaactgcagcaaagcagaggacggccaaatagagccgatcctggagctccgggctgggaagacgcacggtgttcgcctctgtaaggcgtcgcggggctgcggacggccctctggcagtggtgttggaggttgcctctttgctgggatcccgggccgtcagaaggaagacatcgggagtcattaagtgtgatgtttccttgtagctgtaagtttgcttgtagatgagctttatcaagttgagaaacagcatctctattcctaatttgctgagaatttttcgtgaatggatgtaggattcggtaaatgctttttctaaatcatttgatataatcatataatttttcttctttagcctgttgctatggttattagaataattttcaagtattgaaacaaccttggatatcccgtcctctggtgggcagcagccctgggcccagccgctctgtccgggaacgcgcctggcgaactgcagctctggggtggccaggtcctggcagtggcggcgggtggcctggtccaggtctggtggcagccggtagcccaggatgggcgccaggccgcgcgctcccgcagcgcagccacctccagcggcagcccagcggcccccagcgcgcccagccacgcccacagcgtgcggttcaagtgcgcacagagcgccaagtccagcgcgttctaggcgctcgccctgcactccacgcgcggctccagcggctccgggcccgaaggccgcgcgccagtgggcggggacggccaccaggtcatccaggccccagcgcagtgcgcgcaggagccccagggactcgtccaggtgctgggcgatcagcagcaggtcgaagcgcgcggccaccgcttgcacccccggggccaagaggcgcgttgccaccaaggcgcgcggcgcgttgtggtcgaagcctaagtccaaggccatgaggttgtggccatggtgcctgtcgggccgcctggggtcgtagaaggcgcaggaagtggcgcaggatccgggctccgacgaagggagaggccgtcttgtagaaagcggactccaggacgagggctgggtcccgcagggtggtgaaggaggtgtcgcggggcaggatgcgtcgcatcgtgggagtttcaggggtgcattaaagtagaacatgacaatatccatcagaagaaccccttccaggatcagaaggtgatcggaactggcaaatgggagtcctggtgcattcacttgggatggccacaagggcccatggaagccgtggatgtggaggctgcagcggcgcagggaagggctgcgcctaaacatgtcctccccctcaacacaccctcggagccatgagatgcaactatctgctgatacagagacagagactgcagatggctgcagggcagatttaccttttctttctttcatggctattgtctttggtgttgtgtctaaaaagtcatcaccaaacccaagatcctctagaatttctcctatgttagtttctaagggtctacagttttgtgttttacatttaaggatgttatccat

SEQ ID NO: 121361 - DNA, 981 bp, Homo sapiens
ttagctctcaatctcgatttttctctctttctcactctcttgtgctctcaccttccacagtgggatgatgcagtaaggaggcccttgccagatgctaggcaccttgatctcagattttccagcctccagaagttcttgatgctttttgcttttccccctcacaaccgaaagagaaagtttttgccagcaggtggcagcgctggtgcctgaaaacgccaaaaagcatcgtcctgggttggcccggagactaacgattgccgccgggaatcggcagcataagcacagacgtaaacgcaggaaccaatgcgattttaggttgaatttaggacagcgctggaacttcactttacccctcttgcggtcacacgaggtgggcggcggccccggcagggtttgggcgggagaaacgcggttcgggactccgctgccgcctaggcgcggggctgacctctttcgagatgaatatttccttctctgatcagttttcctacactcagaattttctgtggttctcgagtccctctcttctgagtgcggcataggttgaatttcgcgcatttgttccggtgggtttgatatctgtgcgtccctggctctttgatgacacctgcgcagctccccggtctgcctccacccctggccattcgcaattttattcctcatcccaactgcagcaaagcagaggacggccaaatagagccgatcctggagctccgggctgggaagacgcacggtgttcgcctctgtaaggcgtcgcggggctgcggacggccctcccctgcggaattgggaaggccaatcagcggcacacatgctgtatgtctgacccacatgctgtaagggcattgtggttgggttcctcagtgggttggggtcttgagattctagagtggaagtcctgggatccagcctccaatccagtgcagcagcccctataggattctgcaggactgtagccttgagagctggtttggttttcat

SEQ ID NO: 121362 - DNA, 1266 bp, Homo sapiens
atgatggaagaaatagagataagaatggatcaacagttggaggattcagaggttgacaatgtaggtatcacaggcatctattttgcacccatggctgacagcctacaagagtttaaggactacattgaaaatctgcctttgatcgatgacccagaaatttttggaatgcatgaaaatgctaatctagtcttccagtacaaagagaccagcactttaatcaacaccatacttgaggttcagccaaggtcatctactggtggagagggaaaaagcaatgacgaaattgttcaagaacttgttgcttctgtccagaccagagttccagaaaaactggaaatggagggtgcttctgagagcctttttgtcaaggatcttcaaggacgtctgaactccttgaccaccgttcttggacaggaagtggaccggtttaacaacctgctgaagttaattcatccaggtggcaaacatcgccctgtactccactccagcccagtgtctcccaggactgtggcctgcctccatcttctgacttctctggaaacactcaacaaagccatcgctggatttgtggtgatgtctgaagaaatggaaaaagtgtataacagtttcctcaacaaccaggttcccgctctgtggtccaacacagcctacccatccctgaagccactaggatcatgggtcaaagaccttatcctgaggacctcatttgtggatctgtggctcaaaagaggacagcctaagtcctactggatctctggtttcttctttcctcaaggatttctaacaggaactcttcaaaatcatgctcgaaaatacaatttgcctatagatgagctgagtttcaaatacagcgtaattcccacctatcgggatcaagctgcagtgatagaagctgccaagacagtgcaatttggacaagaactgcccatggacatggagttgccctctcctgaggatggtgttcttgttcatgggatgttcatggatgcttctcgatgggatgataaggagatggtgatagaagatgcattgcccggacagatgaatccagtgctgcctgtggtgcattttgaaccacaacaaaactataagccaagcccaacactttaccactgcccactttataaaacaggagcccgggcaggaacactctcaaccacaggacattcaaccaattttgtggtaaccgtcctgttaccctccaagcggtccaaagactactggattgccaagggatcagctttgctctgccagctgagcgaatga

SEQ ID NO: 121363 - DNA, 1192 bp, Homo sapiens
tttcgtgggagccggaggagaggcagccgcggagcgccgagctggcctcgccccgaggcccggccctgggtgtggggaaccgcgctgaggagctggaaactttcccggcaggagctgactgctgggcaggaacgtctctcaggagaaagagtggaagagaaaattgtgaactaaggccccctgcccccttttcctggtgcatgtgaagttatcaaaaacagaaacaagtgttgaaaatgtttaaaggctttgctgaagaagacccgagagggatggaaaagggaggcaaggaaggaagcaggaagtgactttggtccagagacttctccagtcctggcaccttgaccacagtgctgactctcctgtgagcagtcttcccacagcagaggacacctataggatcgtccagttatcagattctcaaaatggacagcgacttaaagcaattaaagaccactgcgacaaatgctcctgcgaacaccactccgaagttaatggcgcagacgtctggactttaaaaggtggtggtaaagtgcgctcaggcatggaggcaccctcccctcacaatcggcagcataagcacagacgtaaacgcaggaaccaatgcgattttaggttgaatttaggacagcgctggaacttcactttacccctcttgcggtcacacgaggtcacagagtgcgttcgcggagtgaccactgtccgagccttgcgtgtccagccgggcgctttagatgttcgcatcaacgttttgtgggtctggaggagccagcccttaggggttctctgcgccctgcaggactgtgggtctttcctccctcactggcctctggtcccttctcagctcttccgctgggctgactggcctggggttcaacgcactgtccttagggtgctggagagggccctacctggggagtgtttgccctctcctgaggatggtgttcttgttcatgggatgttcatggatgcttctcgatgggatgataaggagatggtgatagaagatgcattgcccggacagatgaatccagtgctgcctgtggtgcattttgaaccacaacaaaactataagccaagcccaacactttaccactgcccactttataaaacaggagcccgggcaggaacactctcaaccacaggtaacctgaaaggagaaaataaagaatggaggagagagaatgtttga

SEQ ID NO: 121364 - DNA, 500 bp, Homo sapiens
gcagatcatagaacttttatttagatggaatcattgcgaattacatagaagctaccagcctcaagccaaacccatgaggttgatgtgaacttacagttacacaaataagaaacaaatggtacatccaaaaccataaggaaatattctgatgcccagatgatgaagactggggtgcaacttaagtccacacatttatttcaagttgttaaagagtttgtgggccacgcaatggtccctcgcatgcaagaagtcaaagagctcctccgtgcaatcctcttctgtatgtgatcgagaggatacacgctcatcacagagctctagccgctcccgggcctttacacatttctccaactgctcgcattgctctctcactgttgttaggggatccactaattcctcctcttcctcttcctcctcctcaggatctccggattcggtaagcatcttttgctcgtcctccagtcccatgtctggctacggttctagattcaacacgagca

SEQ ID NO: 121365 - DNA, 674 bp, Homo sapiens
ttacgagttggccgtagtgagagggaccgatcccttggggccgccggcggcgagagcccgagccgctcctcccaatggcgaagaagacgtacgacctgcttttcaagctgctcctgatcggggattccggagtggggaagacctgcgtcctttttcgtttttcggatgatgccttcaatactacctttatttccaccataggaatagacttcaagatcaaaacagttgaattacaaggaaagaagatcaagctacagatatgggatacagcaggccaggagcgatttcacaccatcacaacctcctactacagaggcgcaatgggtatcatgctagtatatgacatcaccaatggtaaaagttttgaaaacatcagcaaatggcttataaacatagatgagcatgccaatgaagatgtggaaagaatgttactaggaaacaagtgtgatatggacgacaaaagagttgtacctaaaggaaaaggagaacagattgcaagggagcatggtattaggttttttgagactagtgcaaaagcaaatataaacatcgaaaaggcgttcctcacgttagctgaagatatccttcgaaagacccctgtaaaagagcccaacagtgaaaatgtagatatcagcagtggaggaggcgtgacaggctggaagagcaaatgctgc

SEQ ID NO: 121366 - DNA, 396 bp, Homo sapiens
caaagggtcccggacggcagccacagcgtccgactcgactcggagggtttctgtgagagacaaattgcttgttaaaggtcaaagcctacggcgaatcttgtgaaaaattagttctcttcacggaattaataacatatagtgttctagagttttcgtgacttctgctatccatgttgaggttgcagaacttgaagctaatttaccttgtacatgtaaagtgcattttcctgatccaaacaagcttcattgttttcagctaacagtaaccccagatgagggttactaccagggtggaaaatttcagtttgaaactgaagttcccgatgcgtacaacatggtgcctcccaaagtgaaatgcctgaccaagatctggcaccccaacatcacagagacagg

SEQ ID NO: 121367 - DNA, 342 bp, Homo sapiens
cttgtgagtagtggtgatttcaacttgctgcagcagcacaggaagatgggtccgcatcacaggctcctggctaatgctgctgatggcgaaatgctggagaaaccagtccagctctgggagtttggctgagagtaactttagggaactccgtttctccccagcaggctggctcagggcactgaagagcttctgtgcactggagtgcaatctcttttgttccacagataatccatcttcctggatcacttttaaagagatccttgagttatcgtgctgtttacagagggagaagaccttcctcaggccaggactgtagattgctggaataaagatatgctcctt

SEQ ID NO: 121368 - DNA, 390 bp, Homo sapiens
ggcacgaggctagcaagtaaactgaagcgtgacgatggtctcaaagggtcccggacggcagccacagcgtccgactcgactcggagggtttctgtgagagacaaattgcttgttaaagaggttgcagaacttgaagctaatttaccttatgagggttactaccagggtggaaaatttcagtttgaaactgaagttcccgatgcgtacaacatggtgcctcccaaagtgaaatgcctgaccaagatctggcaccccaacatcacagagacaggggaaatatgtctgagtttattgagagaacattcaattgatggcactggctgggctcccacaagaacattaaaggatgtcgtttggggattaaactctttggttactgatcttttgaag

SEQ ID NO: 121369 - DNA, 2601 bp, Homo sapiens
ggacatctggtacgaagcactggtcccggcgggagctttgccaagcacatggtagcccagtgtgtctcaccaaagggacctcttgcttgttcgagaacatacctttttggagctactcatgttccttacttgggtggtgacagcaagctgcccaagaaaactgaacaaattaggctattgtcccagatatatgctgctgttattgaggctgttttggctggcattgcatgttatgctaaaacttccagtctaacaaaggccaaggaggtagcagagcaaactctgggatctgggttagattcctttgagttgattccgtttaaggcagccctgcgctccaagatgacttttcatatacatgctgtgaataatcagggaagaattgtaccgctggacagtgaagatagcttatcctttgtgaagacggcttgtatggccgtctatgacattcctgacttactgggaggcaatggttgtttaggatctgtggttttctctgaatcatttttgacttctcagatcttagttaaagaaaaggatggcactgttaccacagaaaccagctccgtagtcctgactgctgctgtacccagattctgctcctggctggtggaagataatgaagtaaaattgtctgagaaaacccagcaagcagtgaggggggatgagtctttcctgggcacttatctaacaggaggagaaggagcatatctttattccagcaatctacagtcctggcctgaggaagggaatgttcatttcttctctagtggccttctgttttctcactgtcgtcatggaagtatcatcatttccaaggatcacatgaattccatttccttctatgatggggattccaccagtactgttgctgctcttctcatagacttcaaaagctcattgcttcctcacctcccagttcatttccatggatcaagcaattttctgatgattgcccttttccccaaatcgaagatataccaagcattttactcagaggtcttctccctctggaaacagcaggataactcagggatctctttaaaagtgatccaggaagatggattatctgtggaacaaaagagattgcactccagtgcacagaagctcttcagtgccctgagccagcctgctggggagaaacggagttccctaaagttactctcagccaaactcccagagctggactggtttctccagcatttcgccatcagcagcattagccaggagcctgtgatgcggacccatcttcctgtgctgctgcagcaagctgaaatcaacactactcacagaatagaaagtgacaaggtaattatcagcattgtaaccggcctcccaggctgtcacgctagcgagctctgtgcttttctggtcactctgcataaggaatgtggcagatggatggtgtatcgccaaatcatggacagctctgaatgttttcatgctgcacacttccagagatacctttccagtgccctagaggcccagcagaaccgctctgcgcgccagtcagcctacatccgcaagaagaccagactgctggtggtgttacaaggctacacagatgttattgatgttgtccaggccctgcagacccacccagactcaaatgtcaaggcctccttcaccattggtgccatcacagcatgtgtggagcccatgagctgctacatggagcacagatttctctttcctaaatgtcttgaccagtgttcacaaggcctggtgagtaacgtggtattcaccagtcacaccacggagcagcggcaccctctccttgttcagctgcagagcctcatcagggctgccaatcctgctgcagccttcattcttgcagaaaatgggattgtcaccaggaatgaagacattgagctgattctctcagaaaacagtttttcaagtcctgagatgctacgatctcgatatttaatgtatcctggctggtatgaaggtaaattgaatgctggatcagtctatcccctaatggttcagatctgcgtatggtttggccgtcccttggagaagactcgctttgtggccaaatgtaaagcaattcagtcctccatcaagccaagtcccttctccggaaacatctaccacatcctgggcaaagtgaagttttcagactctgagaggaccatggaggtctgctacaacacactggccaactccttgagcatcatgccagttttggaaggacccacaccaccaccagactccaaaagcgtatctcaagacagcagcgggcagcaggagtgctaccttgtgttcatcggctgctccctgaaggaagacagcatcaaggactggctgcggcagtcagctaagcagaagcctcagaggaaagccctgaagaccagggggatgctgacgcaacaggagatcaggagcatccacgtaaaacgccacttggaacccctacctgcaggctacttttataatggcacccaatttgttaacttctttggtgacaaaactgattttcacccactcatggaccagttcatgaatgactacgtggaagaagccaaccgggaaattgagaagtataaccaggagctggaacagcaggagtatcatgacctctttgagctgaagccc

SEQ ID NO: 121370 - DNA, 1368 bp, Homo sapiens
atggacgtgtaccccccgcgccggcaggggctgccccgcgctcggtcccctggcggctccagccgcgggtcaccctccgtcagagaaacccttctgggaaccagagtggttaggaacatggacattgaagttagagctggaatcgaaactcagttcgaatgcagccacctttttgctttgctgagtgggaaatgcaagagggaggctagagaccactgtctgacagtcaagagtccagagcagataccagaagggttattgcttcaagcagatgaggatctgagaccagagcacaggcactgggccacccataaatggaatgtgccagcttctccaatctgtgcttttttctggaagcttcaggattttgagctttgtccaggaggcctttcaagtggcactggacttgtttctaaaaaggttcacttcaaaagtacaaatgtagagggatacccaggacagggaagggtgcaggtactaaccactcagcagcaggagcagtttctacctcgtgacacctatggagccctcttatctctggaaacaagggcctcaggaaaaggcagtgtgcacagaaagccaggctacttgttggagggtagaggtttccagagcttgaacctagatagtcgctggctgtggctgccacagatggattccaccagtactgttgctgctcttctcatagacttcaaaagctcattgcttcctcacctcccagttcatttccatggatcaagcaattttctgatgattgcccttttccccaaatcgaagatataccaagcattttactcagaggtcttctccctctggaaacagcaggataactcagggatctctttaaaagtgatccaggaagatggattatctgtggaacaaaagagattgctttgtgggtgtgctctctctgcaggatgcctcgcattatgtaacacaggggtcttggcttctgaaagggtcaacacagacatttcaatgctgccaacttgcaggctcaggttatcctcccgcttagcaggtgggactacagaggttgcagaacttgaagctaatttaccttgtacatgtaaagtgcattttcctgatccaaacaagcttcactgttctcagctaacagtaactccagatgagggttactaccagggtggaaaatttcagcttgaaaccgaagttcccgatgtgtacaacatggtgcctcccaaagtgaaatgcctgaccaagatctggcaccccaacatcacagagacaggggaaatatgtctgagtttactgagagaacattcaattgacggcactggctgggctcccatgagaacattaaaggatgtcgtttggggattaaactctttgtttactgatttttga

SEQ ID NO: 121371 - DNA, 1006 bp, Homo sapiens
gcaagctctggcctcaattttgagttcattacaacttcttaagaatttcaccaacagcctatacagtacaagttcaaaaaagtaaacatgttaaggtaagcagacaactcttcagaagcccaaacacattttcttgctgtatttatgttgaattctccatctacaatgagcagtcatgaagatggtcttcttcagggcaacatggtcacaggactggggcaatccaggggactgagagggagcatgaggacgggagagggggctacctcttgctgtttcatgttagagacaaactgtaacacagtccatgggcctgcaatcgtccccttttatcatctggcataacgtttgatgtagtccatcccacttttattccggaagtcctccttgtcccgcaaatgatgttctgcagcttcaatattcagtggatcatcaaaattcaaaagatcagtaaacaaagagtttaatccccaaacgacatcctttaatgttcttgtgggagcccagccagtgccatcaattgaatgttctctcaataaactcagacatatttcccctgtctctgtgattgttggggtgccagattccttggtccaggcatttcactttgggaggcaccatgttgtacgcattcgggaacttcagtttcaaactgaaattttccaccctggtagtaaccctcatctggggttactgttagctgaaaacaatgaagcttgtttggatcaggaaaatgcactttacatgtacaaggtaaattagcttcaagttctgcaacctctttaacaagcaatttgtctctcacagaaaccctccgagtcgagtcggacgctgtggctgccgtccgggaccctttgagaccatcgtcacgcttcgagttcgcagtctagcgttagcattactgctgcctttaccctgggctccccgagacaggcgaggcgggcccggcgcccaacaccatgcccggtcagggcggctgctgcgagacgcggcccctcacacgaaa

SEQ ID NO: 121372 - DNA, 1731 bp, Homo sapiens
atggcggcggcaggagcaggacctggccaggaagcgggtgccgggcctggcccaggagcggtcgcaaatgcaacaggggcagaagagggggagatgaagccggtggcagcgggagcagccgctcctcctggagaggggatctctgctgctccgacagttgagcccagttccggggaggctgaaggcggggaggcaaacttggtcgatgtaagcggtggcttggagacagaatcatctaatggaaaagatacactagaaggtgctggggatacatcagaggtgatggatactcaggcgggctccgtggatgaagagaatggccgacagttgggtgaggtagagctgcaatgtgggatttgtacaaaatggttcacggctgacacatttggcatagatacctcatcctgtctacctttcatgaccaactacagttttcattgcaacgtctgccatcacagtgggaatacctatttcctccggaagcaagcaaacttgaaggaaatgtgccttagtgctttggccaacctgacatggcagtcccgaacacaggatgaacatccgaagacaatgttctccaaagataagagtaaagaaagagatgtattcttggtaaaggaacacccagatccaggcagtaaagatccagaagaagattaccccaaatttggacttttggatcaggaccttagtaacattggtcctgcttatgacaaccaaaaacagagcagtgctgtgtctactagtgggaatttaaatgggggaattgcagcaggaagcagcggaaaaggacgaggagccaagcgcaaacagcaggatggagggaccacagggaccaccaagaaggcccggagtgaccctttgttttctgctcagcgccttccccctcatggctacccattggaacacccgtttaacaaagatggctatcggtatattctagctgagcctgatccgcacgcccctgaccccgagaagctggaacttgactgctgggcaggaaaacctattcctggagacctctacagagcctgcttgtatgaacgggttttgttagccctacatgatcgagctccccagttaaagatctcagatgaccggctgactgtggttggagagaagggctactctatggtgagggcctctcatggagtacggaagggtgcctggtattttgaaatcactgtggatgagatgccaccagataccgctgccagactgggttggtcccagcccctaggaaaccttcaagctcctttaggttatgataaatttagctattcttggcggagcaaaaagggaaccaagttccaccagtccattggcaaacactactcttctggctatggacagggagacgtcctgggattttatattaatcttcctgaagacacagagacagccaagtcattgccagacacatacaaagataaggctttgataaaattcaagagttatttgtattttgaggaaaaagactttgtggataaagcagagaagagcctgaagcagactccccatagtgagataatattttataaaaatggtgtcaatcaaggtgtggcttacaaagatatttttgagggggtttacttcccagccatctcactgtacaagagctgcacgatgagtgacatgggctggggcgccgtggtagagcacaccctggctgacgtcttgtatcacgtggagacagaagtggatgggaggcgcagtcccccatgggaaccctga

SEQ ID NO: 121373 - DNA, 702 bp, Homo sapiens
  misc_feature (1)...(702): n = a,t,c or g
atggcggcggcacgagcaggacctggccaggaagcgggtgccgggcctggcccaggagcggtcgcaaatgcaacaggggcagaagagggggagatgaagccggtggcagcgggagcagccgctcctcctggagaggggatctctgctgctccgacagttgagcccagttccggggaggctgaaggcggggaggcaaacttggtcgatgtaagcggtggcttggagacagaatcatctaatggaaaagatacactatcatcgctcgcgtcgccgcattcgcactgtgactgcggtcacgaccacctgaggaacacgctgcagatccacgagagaaaccgagcaagcaaagcgggcgccaccagcacagcgagcaacctgcacgaaacaaccgacagcgagcacaagcaaagaaaaatacaaagccaccaggaaacagaagagcacacacaaatccagcaatacacacacaggcgcaagcagaacagaaacaaacgcaacgtgaacggcagagacacagccccacaaccgaaagagacaatcaccagcaaacaacgaacaanaacccgcaacaagcacaagtcaaacaccgcagatctacgtaaaaacacagaacgagcaaaccaaaaatgcccgacaaaggacccaagaaaagacacgcatcacgaaaacgatgaggatagacacagaaatgacgtaccgtaa

SEQ ID NO: 121374 - DNA, 2353 bp, Homo sapiens
cccggctggagcaggacctggccaggaagcgggtgccgggcctggcccaggagcggtcgcatatgcaacaggggcagaagagggggagatgaagccggtggcagcgggagcagccgttcctcctggagaggggatctctgctgctccgacagttgagcccagttccggtgaggctgaaggcggggaggcaaacttggtcgatgtaagcggtggcttggagacagaatcatctaatggaataagatacactagaaggtgctggggatacatcagaggtgatggatactcaggcgggctccgtggatgaagagaatggccgacagttgggtgaggtagagctgcaatgtgggatttgtacaaaatggttcacggctgacacatttggcatagatacctcatcctgtctacctttcatgaccaactacagttttcattgcaacgtctgccatcacagtgggaatacctatttcctccggaagcaagcaaacttgaaggaaatgtgccttagtgctttggccaacctgacatggcagttccgaacacaggaagaacatccgaagacaatgttctccaaagataaggatattataccatttattgataaatactgggagtgcatgacaaccagacacagacctgggaaaacgacttggccaaataacattgttaaaacaatgagtaaagaaagagatgtattcttggtaaaggaacacccagatccaggcagtaaagatccagaagaagattaccccaaatttggacttttggatcaggaccttagtaacattggtcctgcttatgacaaccaaaaacagagcagtgctgtgtctactagtgggaatttaaatgggggaattgcagcaggaagcagcggaaaaggacgaggagccaagcgcaaacagcaggatggagggaccacagggaccaccaagaaggcccggagtgaccctttgttttctgctcagcgccttccccctcatggctacccattggaacacccgtttaacaaagatggctatcggtatattctagctgagcctgatccgcaagcccctgaccccgagaagctggaaattgactgctgggcagggaaacctatttctggagacctttacagagcctgcttgtatgaacgggttttgttagccctacatgatcgagctccccagttaaagatctcagatgaccggctgactgtggttggagagaagggctactctatggtgagggcctctcatggagtacggaagggtgcctggtattttgaaatcactgtggatgagatgccaccagataccgctgccagactgggttggtcccagcccctaggaaaccttcaagctcctttaggttatgataaatttagctattcttggcggagcaaaaagggaaccaagttccaccagtccattggcaaacactactcttctggctatggacagggagacgtcctgggattttatattaatcttcctgaagacacagagacagccaagtcattgccagacacatacaaagataaggctttgataaaattcaagagttatttgtattttgaggaaaaagactttgtggataaagcagagaagagcctgaagcagactccccatagtgagataatattttataaaaatggtgtcaatcaaggtgtggcttacaaagatatttttgagggggtttacttcccagccatctcactgtacaagagctgcacggtttccattaactttggaccatgcttcaagtatcctccgaaggatctcacttaccgccctatgagtgacatgggctggggcgccgtggtagagcacaccctggctgacgtcttgtatcacgtggagacagaagtggatgggaggcgcagtcccccatgggaaccctgaccaggtccctcttttctgtcaaggactttctgggaataatactgggggttttgtttttgtttttgaactgtctcaaatgttctcccaaagatgctaaaaacacagcctctccttttagcaagttaaaaggctgggtaggactgcgggagactgcctgcctttcaccattttctccccacttccagtgactgctcttattttgtgtaccataagccaacaaccgctgactccaggattgcataagccccctgtgaaatcggtgctgtactgcataccctgccagctgtgacttgttatcctactatattttctaaggagtgaataatattgtccgagtaactaacttatttaaaagacatttccttctgtgggcattgactgtatcccacctgttttccaaggaaatggtaacctgtttctgagaacacctgaaatcaatggctatacattccaaaccaatctaaacgcta

SEQ ID NO: 121375 - DNA, 270 bp, Homo sapiens
atgtcagccccgctgccagccatcgtgcccgccacctggaaggccaccgcggcggtgattttccttcatggattgggagatactgggcaccgatggatagaagcctttgcagattcacaggaggacgaacctgggattaaacaggcagcagaaaatataaaagctttgatcgatcaagaagtgaagaatggcattccttctaaccgaattattgtaggaggattttctcagggaggagctttatctttatatactgcccttaccacgtag

SEQ ID NO: 121376 - DNA, 1538 bp, Homo sapiens
cggcgggcgaggggcagggcagggcggaccctggacgcgcgggcgcgcgcggaaggtagcgcggggccgcgttggcgcgcacgcgcctgagcgtgcgcccggtggggccggccgggactcgccgctcgcacgcccttgggccgcggccgggcgcccgctcttccttccgcttgcgctgtgagctgaggcggtgtatgtgcggcaataacatgtcaaccccgctgcccgccatcgtgcccgccgcccggaaggccaccgctgcggtgattttcctgcatggattgggagatactgggcacggatgggcagaagcctttgcaggtatcagaagttcacatatcaaatatatctgcccgcatgcgcctgttaggcctgttacattaaatatgaacgtggctatgccttcatggttttgatattattgggctttcaccagattcacaggaggatgaatctgggattaaacaggcagcagaaaatataaaagctttgattgatcaagaagtgaagaatggcattccttctaacagaattattttggggagggttttctcagggaggagctttatctttatatactgcccttaccacacagcagaaactggcaggtgtcactgcactcagttgctggcttccacttcgggcttcctttccacagggtcctatcggtggtgctaatagagatatttctattctccagtgccacggggattgtgaccctttggttcccctgatgtttggttctcttacggtggaaaaactaaaaacattggtgaatccagccaatgtgacctttaaaacctatgaaggtatgatgcacagttcgtgtcaacaggaaatgatggatgtcaagcaattcattgataaactcctacctccaattgattgacgtcactaagaggccttgtgtagaagtacaccagcatcattgtagtagagtgtaaaccttttcccatgcccagtcttcaaatttctaatgttttgcagtgttaaaatgttttgcaaatacatgccaataacacagatcaaataatatctcctcatgagaaatttatgatcttttaagtttctatacatgtattcttataagacgacccaggatctactatattagaatagatgaagcaggtagcttcttttttctcaaatgtaattcagcaaaataatacagtactgccaccagattttttattacatcatttgaaaattagcagtatgcttaatgaaaatttgttcaggtataaatgagcagttaagatataaacaatttatgcatgctgtgacttagtctatggatttattccaaaattgcttagtcaccatgcagtgtctgtatttttatatatgtgttcatatatacataatgattataatacataataagaatgaggtggtattacattattcctaataatagggataatgctgtttattgtcaagaaaaagtaaaatcgttctcttcaattaatggcccttttattttgggaccaggcttttattttccctgatattatttctatttaatactcttttctctc

SEQ ID NO: 121377 - DNA, 1185 bp, Homo sapiens
atgggggaataccttcaggccagagctcaaaatctcatagttcaccagggcatccacactggagagaaatcttttgaatgtggtaagtgtgggaaagccttcagccggagtcagggcctcactgtccctcagaggatccacacgggggagaagccatttgagtgtaatgaatgcggcaaagctttcagttgtagttcataccttattgtgcatcagagaattcacacaggggagaaaccctatcagtgtaatgagtgtgaaagagcctttggccagagctcccatcttattctccatcagacaactcatgcccagaagaaacctcagctggctacttggtgtgacaatctaaaaacttgtcacacttcacatggatctgtcatggcggaaacagcggttatcaatcacaagaaacgtaaaaatagcccgcgaatcgtccagtcaaacgacctcactgaggcggcatatagtctctcccgggatcaaaaacgtatgctgtatctgttcgttgaccagatcagaaaatctgatggcaccctacaggaacatgacggtatctgcgagatccatgttgctaaatatgctgaaatattcggattgacctctgcggaagccagtaaggatatacggcaggcattgaagagtttcgcggggaaggaagtggttttttatcgccctgaagaggatgccggcgatgaaaaaggctatgaatcttttccttggtttatcaaacctgaagttaggcgatgccgtatctactacctagagttagcaccagatcccccaggtccgtcagaatctgatcagaagtctgatgagagtactcactgtaggcagtcttatacacaaggtggaactagtcttaaggaccttcataccagattgaattcggatagtgatggaaagaatagtcctccagaattaaggtttgtcacaggaatgaaagtattgcattacttaataaattcagtgtatacagtaagtggccagagtgaagctgcagaccttcgcggtgttacagctcataaaggcagtgtggacccaaagagtgagcagtggcaagatttactgcaaagagcaaaagaacaaagcttccacactgcggaaggggaccggagcgggttgtcactgctgctcgggcagcctgctgttattctcttatctggccccaccacatcctgctga

SEQ ID NO: 121378 - DNA, 2472 bp, Homo sapiens
atggtagatcgggccaggcccacagtgttggtcacagaagtgcctctgaagtctaaacacactgctcagatgggcctggtccttacagccaatgaaagccaaccacttgtgcatgaaacagctctgaagaataaaaaacctcaatcttggtttccaaatccttgtgtctcctataataggaagccaggactgcaggacaacacgtggtcaaggagacctgaaaatcagagtttgggcgccaccggtaatagggaaccctcagaatgttctgtgggattagcctcagacaagactgaggaagagcagaaaggcctgagctgggggagcaggctactgaggcagctcttctcaaagcgccagcagagtccgttagacaggagcaccggtccacaaacacacacagactcggagctgctgtcctcagtacttccctcgggccggctgcctgcccagccgaggccacgacgtcgaaccccaacacgaagctggcgacggaccatgccgggggataagaaatgggtaaaagttgttgtcttctttctttgggcagcaggtgagaacatgatgaagggttcagagttgactccaaagcaggaattttttaaaggatcagagtcatctaacaggacatcagggggactctttggggtggttcctggggcagcagagactggagatgtttgtgtttatactttcaaggagttagaaggacaaacctcagatgaagaagggagcagactagaaaatgatttcttggaaataacagatgaagataagaaaaaatccacaaaagacagatatgacaaatataaggaagttggggaacatccacctctgtcttccagtcctgttgaacatgaaggagttttaaagggacagaaatcctatcgatgtgatgaatgtggcaaagctttcaatcggagttctcaccttattggccatcagagaatccacactggagagaaaccctatgagtgtaatgagtgtgggaagaccttcaggcaaacctcccagctcattgttcatctcagaacccacacaggggaaaaaccctatgaatgcagtgagtgtggaaaggcctataggcacagctcccatctcattcaacaccagagactccataatggggagaaaccctataaatgtaatgaatgtgcaaaagcctttactcagagttcccgactcactgaccaccagagaacccatactggggagaaaccttatgaatgcaatgagtgtggagaggcattcattcgaagcaaaagtcttgctcgacatcaggtcctgcacactggtaagaaaccttacaaatgcaatgagtgtgggagagcattctgttccaatagaaatctcattgaccatcagagaatccacactggggagaagccttatgagtgtagtgaatgtgggaaagcctttagtcggagttcgggccttatatcacatcacagagttcacaccggagagaagccctattcttgtattgagtgtgggaaagccttcaatcagaactctcaactcattgagcatcagcgaatgcacagaggaaaaaaagtttacaaatgtaaggagtgtggtaaggcatttggtctgagtaaatgtcttattcggcaccagagacttcacacgggtgaaaagccctataaatgcaatgagtgtggaaaatccttcaatcaaaactcacaccttattatacaccagagaattcacactggtgagaaaccctatgaatgtaatgagtgtgggaaggtattcagttatagctccagccttatggtacatcagagaacccatactggggaaaaaccctataaatgcaatgattgtgggaaagcttttagtgacagctcacagcttattgtacaccagagagtccacaccggagagaaaccttatgaatgtagtgaatgtgggaaagcctttagtcagcgttccacttttaatcaccaccagcgaactcacactggagagaagtcctcaggtctggcttgccaagaaggaaataaagaaatctccaaaggaccacaaaaacccccaggctatcggttatgtccccttcaagctgtagggggaggggaatttggcccaaccagggtacacatctccttctctctctctgatttaaagcagatcaaggttttttttcccggggggcctttaatgttggaaaaacaaaaaaagaaatcccccaatccgtatgccatgcgtttatcgaaatccctgtgtcagtatcgtaagccggatggctcaggcatcgtctctctgaaaatcgactggatcatagagcgttaccagctgcctcaaagttaccagcgtatgcctgacttccgccgccgcttcctgcaggtctgtgttaatgagatcaacagcagaactccaatgcgcctctcatacattgagaaaaagaaaggccgccagacgactcatatcgtattttccttccgcgatatcacttccatgacgacaggatag

SEQ ID NO: 121379 - DNA, 1599 bp, Homo sapiens
atggcacgccgtgtacggcccggggcaggggggccctcgccccggggcccgcttcggaacgtcggtgccgcggaccgttccgtggaggcgacgggattggcagagacgaagcagggggaaacggagaggatccatactggtgagaaaccctatgaatgccaggaatgtgggaataccttcagccagagctcaaatctcatagttcatcagggcatccacactggagagaaatcttttgaatgtggtaagtgtgggaaagccttcagccggagttcaggcctcactgtccctcagaggatccacacgggggagaagccatttgagtgtaatgaatgcggcaaagctttcagttgtagttcataccttattgtgcatcagagaattcacacaggggagaaaccctatcagtgtaatgagtgtgaaagagcctttggccagagctcccatcttattctccatcagacaactcatgcccagaagaaacctcagctggctacttggagaatccacactggagagaaaccctatgagtgtaatgagtgtgggaagaccttcaggcaaacctcccagctcattgttcatctcagaacccacacaggggaaaaaccctatgaatgcagtgagtgtggaaaggcctataggcacagctcccatctcattcaacaccagagactccataatggggagaaaccctataaatgtaatgaatgtgcaaaagcctttactcagagttcccgactcactgaccaccagagaacccatactggggagaaaccttatgaatgcaatgagtgtggagaggcattcattcgaagcaaaagtaaagctcgacatcaggtcctgcacactggtaagaaaccttacaaatgcaatgagtgtgggagagcattctgttccaatagaaatctcattgaccatcagagaatccacactggggagaagccttatgagtgtagtgaatgtggcaaagccttcagtcggagtaaatgtcttattcgacatcagagcctccatactggggaaaagccatacaaatgtagtgaatgtgggaaagccttcaatcagaactctcaactcattgagcatgagcgaattcatactggagaaaaaccttttgaatgtagcgagtgtggtaaggcatttggtctgagtaaatgtcttattcggcaccagagacttcacacgggtgaaaagccctataaatgcaatgagtgtggaaaatccttcaatcaaaactcacaccttattatacaccagagaattcacactggtgagaaaccctatgaatgtaatgagtgtgggaaggtattcagttatagctccagccttatggtacatcagagaacccatactggggaaaaaccctataaatgcaatgattgtgggaaagcttttagtgacagctcacagcttattgtacaccagagagtccacaccggagagaaaccttatgaatgtagtgaatgtgggaaagcctttagtcagcgttccacttttaatcaccaccagcgaactcacactggagagaaggtcctcagtgctgcgttggtcagtttcttaaggtatggttctctagagacagagagcaaggacctttga

SEQ ID NO: 121380 - DNA, 3394 bp, Homo sapiens
catggcgcacgctggcggtggcagcggtggcagcggtgccggcggccccgcgggccgggggctgagcggcgcccgctggggtcgctcgggctccgcaggccacgagaagctgccggtgcacgtagaagacgccctcacctatctggaccaggtgaagatccgctttggcagcgaccctgccacctacaacggcttcctggagatcatgaaggagttcaaaagccagagcatcgatactcctggagtcatcagacgtgtctcgcagctcttccacgagcaccctgacctcattgttggattcaacgcttttcttcccctcggatatagaatagacattcccaagaatggcaagttaaacatacagtcgcctctgacaagccaggagaattcgcacaaccacggggacggtgcagaggacttcaagcagcaggtgccgtataaagaggacaaaccccaggtgcccctggagtccgattccgtggaattcaacaacgccatcagctatgtgaataagattaaaacccgcttcctagaccacccagaaatctacaggtcattcctggagatcctgcacacgtaccagaaggagcagctgaacacgaggggccggccattccgaggcatgtctgaagaggaggtgttcaccgaggtggccaacctcttccggggccaggaggacctgctctcagagtttggacagttcctgcccgaagccaagcggtctctgttcacaggaaacgggccgtgcgagatgcacagcgtgcagaagaacgagcacgacaagaccccggagcacagcaggaagcgctcccggccctcgctcctccgccccgtgtctgcacccgccaagaaaaaaatgaaacttcgtggtaccaaagacctgtccatcgctgcagtggggaagtacgggactctgcaggaattttctttctttgacaaggtccgccgggtgctgaagagccaggaggtgtatgaaaacttcctccgctgcatcgcactcttcaaccaggagctggtgtctggctctgagctcctgcagctcgtcagcccatttctggggaaatttccagaactctttgcacagttcaagtccttcctgggggtaaaagagctgtccttcgcgccacccatgagcgacagatccggggacgggataagccgggaaattgattatgcatcctgcaagcgcataggatccagctaccgggcactccccaaaacctaccagcagcccaagtgcagtgggaggacagccatctgcaaggaggtactgaacgacacctgggtctccttcccttcctggtctgaggactccacgttcgtcagctccaagaagacaccgtacgaggagcagcttcaccgctgtgaggacgagcgcttcgagttagacgttgtcctggagacgaacctggccacaatccgtgtgttggaaagtgtgcagaagaagctgtctcggatggcgccggaagaccaggagaagttccggctggacgactccctgggaggcacgtcggaggtgatccagcgccgtgccatttatcgcatctatggcgacaaggccccggagatcatcgagagcctcaagaagaaccctgtcaccgctgtccccgttgtcctgaaaagactgaaggccaaggaagaggagtggcgggaggcccagcagggcttcaacaagatctggcgggagcagtatgagaaggcgtacctcaagtcccttgaccaccaggctgtgaacttcaagcagaacgacaccaaggccctgcgctccaagagcttgctcaacgagatcgagagcgtctacgacgagcaccaagaacaggcactccgaagggccggaagtgccccccctagcgaggcgcacctcatctttgtgtacgaggaccggcagatcctggaggacgcagcagcgctcatcagctactacgtgaagcggcagccggccatccagaaggaggaccagggcaccatccaccagctgctgcaccagttcgtgcccagcctcttcttctctcagcagctggacctgggcgcctccgaggagtcagctgatgaggaccgggacagcccccaggggcagaccacagaccccagtgagcggaagaagccggcgccaggaccccacagtagccccccagaggagaagggggccttcggggatgccccggccactgagcagccacccctgccgcccccagccccgcacaagcccctggacgatgtctacagcctattttttgccaacaacaactggtacttcttcctgcgcctgcaccagaccctgtgctccaggctgctgaagatctaccgccaggcgcagaagcagcttctggagtatcggaccgagaaggagcgggagaagctgctgtgtgagggccgcagggagaagggcagcgaccccgccatggagctgcggctgaagcagcccagtgaagtggagctggaggagtactacccggccttcctggacatggtgcggagcctgctggagggcagcatcgaccccacgcagtacgaggacaccctacgcgagatgttcaccatccatgcctacgtgggcttcaccatggacaagctggtgcagaacattgcgcggcagctgcaccacctcgtgagcgatgacgtctgcctgaaggtggtggagctctacctgaacgagaagaagcggggtgccgctggtgggaacctgtcctcccgctgcgtccgcgctgctagggagaccagctaccagtggaaggctgagcgctgcatggccgacgagaactgcttcaaggtgatgttcctgcagcgcaaagggcaggtgatcatgaccatcgagctcctggacaccgaggaggcccagacggaggaccctgtggaggtccagcacctggctcggtacgtggagcagtatgtggggaccgagggcgcgtccagctcgcccactgagggcttcctcctgaaacctgtgttcctgcagaggaacctcaagaagttccgccgccggtggcagagcgagcaggcgcgggccctgcgcggtgaggccaggagctcctggaagcggctggtgggcgtggagagcgcctgcgacgtggactgccgcttcaagctcagcactcacaagatggtgttcatcgtgaactccgaggactacatgtaccgtcgcgggaccctctgccgggccaagcaggtgcagcccctggtcctgctccgccaccaccagcactttgaggagtggcacagccgctggctggaggacaatgtgacggtggaggcggctagcctggtgcaggactggctgatgggtgaggaggacgaggacatggtaccctgcaagacgctgtgtgagacagtgcacgtgcacggcctgcccgtgacccgctaccgcgtgcagtacagccgccgcccggcctcgccc

SEQ ID NO: 121381 - DNA, 741 bp, Homo sapiens
atggcgacgattggtgggtggctgcatgcagggtcttccaatatggctgtcctggaggtgcccctgctgtcaggcttccgggcagacatcgagagcctggagcaggtgaggcagcgccgacacggtctctcggaggcggagctgaaggatgttttgtccctggacgacgaggtcctgcaggatgtgtaccgagattggaccccgcccagcaaggagctgctgcgcttcccgcccctgctgtgggtgcggcttcgtcgggatctgggatactacttggcccggcggcccgtggatggcttcaccctcctggccattgcccacagccgtaaattctatacaaaattaccgccgctccagaatctcaaagcaatagctgtgagagttctgcgcatcagcatcgtggaattcgctgaataccgattcccagtcatccggctcttagacgttgtcctggagacgaacctggccacaatccgtgtgttggaaagtgtgcagaagaagctatctcggatggcgccggaagaccaggagaagttccggctggacgactccctgggaggcacgtcggaggtgatccagcgccgtgccatttatcgcatctatggcgacaaggccccggagatcatcgagagcctcaagaagaaccctgtcaccgctgtccccgttgtcctgaaaagggagcccttggagagctcattagtgctgtttgtcaacaggtgtcgtctccaggggggtcgttaa

SEQ ID NO: 121382 - DNA, 402 bp, Homo sapiens
atggagcacagtggtgtgaccaaggctaactgcagccctgacgggctcaaccaagcctcccaccttagtctcctgtgtagctgggactacaggtgtttttgtggtcgcttggtcaagcaacatgcttgttttactgcaagtcttgccatgaaatactcagatgtgaaattgggtgaccattttaatcaggcaatagaagaatggtctgtggaaaagcatacagaacagagcccaacggatgcttatggagtcataaattttcaagggggttctcattcctacagagctaaggtaaggaagcaaaaagaggctctgaaacttgcacaaggttgcacacatagtaaacagcagagctgggatcctaactcagaccagtctgattccagaatctgtactatttaa

SEQ ID NO: 121383 - DNA, 224 bp, Homo sapiens
tgttcacaataatgtttcgacccaaagtaatggctcccaacaggctctctgctgccagcgactgctgtcaacgtggtggaaaccagtggaacacaagggccttgcccccaccccagaccgcacatagaaactacactgactttgttcatgagcacaatgtgaagaatgcaggaatccgtcatgatgttcattttcctggccatacagccatgactgagatatga

SEQ ID NO: 121384 - DNA, 1262 bp, Homo sapiens
aataaccttcgtgaggagctaacccggtatttatttgttcttcagttaaaacaagatattctcagtggaaaattagactgtccctttgatacagcagtgcaattggcagcttataatctgcaagctgaacttggtgactatgatcttgctgagcatagtcctgaacttgtctcagagttcagattcgtgcctattcagactgaagagatggaactggctatttttgagaaatggaaggaatacagaggtcaaacaccagcacaggctgaaaccaattatctgaataaagccaaatggctagaaatgtatggggttgatatgcatgtggtcaaggctagagatgggaatgactatagtttgggactaacaccaacaggagtccttgtttttgaaggagataccaaaattggcttatttttttggccgaagataaccagattggattttaagaagaatgaattaaccttggtggttgtagaagatgatgatcagggcaaagaacaggaacatacatttgtctttagactggatcatccaaaagcatgcaaacatttatggaaatgtgctgtggagcatcatgctttcttccgccttcgaggccccgtccaaaagagttctcatcgatcaggatttattcgactaggatcacgatttagatatagtgggaaaacagagtatcagcccacaaaaaccaataaagcaagaagatcaacatcctttgaaagaaggcccagcaaacgatattctagacgaactctacaaatgaaagcatgtgctacaaaacctgaagaacttagtgttcacaataatgtttcgacccaaagtaatggctcccaacaggcttgggggatgagatctgctctgcctgtgagtccttccatttcctctgctcctgtgccagtggagatagagaatcttccacagagtcctggaacagaccagcatgacaggaaatggctctctgctgccagcgactgctgtcaacgtggggggaaaccagaggaacacaagggccttgcccccaccccagaccgcacatagaaactacactgactttggtcatgagcacaatgtgaagaatgcaggaatccgtcatgaagttcattttcctggccatacagccatgactgagatatgagtgctgagcctcttaggctttgggactctttgtcatgcaagctgatggtatacattatctggcgtttataaaggattaatcacattacgagtatttgggagaatttacagggagtcactagttg

SEQ ID NO: 121385 - DNA, 465 bp, Homo sapiens
atgaggcggtgtgtctccgcaggtggagtggagctggaggagtactacccggccttcctggacatggtgcggagcatgctggagggcagcatcgaccccacgcagtacgaggacaccctacgcgagatgttcaccatccatgcctacgtgggcttcaccatggacaagctggtgcagaacattgcgcggcagatcaatgcttggaatctggaaactgcagagccggtattccatatcctgggagatgcctctgatccttggatgtgcatggccgtgctggcctcccaggccacactgctgacagtgtccagggatggtgtggtcagtctgtggagctcagctacgggaaaacttcaggggaagcaacatatgtccagcatcaaagaagaaacacctacctgtgccgtctcagtccagaagcaaggaaagcttgttaccgggtttagcaatggctccatctctttg

SEQ ID NO: 121386 - DNA, 288 bp, Homo sapiens
cgggagtgctacgaggccttcctggacatagtgcgaagcctgctgaagggcagcatcgaccccacacagtacaaggacaccatacgcgagatgttcaccatccatgcctacgtgggcttcaccatggacaagctggtgcagagcattgcgcggcaggtgagccgggccggggtggggccggccctgaggacggcggaaatggctctaccatcatttcactccccgctcgggagggggcccgtggtcagcacagcaaacctatcctgttttttcttaattgagacaaaa

SEQ ID NO: 121387 - DNA, 4773 bp, Homo sapiens
ctcacttccgcccaggtgaggcagggccgacaccgagcccgcccgacccgggctcccacctgctcctccagcgcaccaggtgtctttaagagtgattgaagagaataattcaaaatgcctgaaaatcctgctacagataaactgcaggtgctgcaggtacttgatcgcctgaaaatgaaattgcaggagaagggtgacacgtcgcagaatgagaagttatctatgttttatgagacactaaagagtcctctcttcaaccagatactcacacttcagcagtccatcaagcaactgaagggtcaactcaaccatataccctcagattgttcagccaactttgatttttctaggaaaggtttgttagtgttcacagatggttccattactaatggaaatgtccacaggccctctaataactcgactgtatctgggttatttccgtggaccccgaagttgggaaatgaagactttaactcagtcattcaacagatggctcagggccggcaaattgaatatatagatatagaacggccttcaactggaggccttggattcagtgtggtggccctcagaagtcaaaatctcggaaaagttgatatcttcgtgaaggatgtccagccagggagtgtagcagacagggatcaaagattaaaggaaaatgatcaaatattggccattaatcacacgccattggatcagaacatttcccatcagcaagcaattgcattattacaacaaaccactggatctttgagactgattgtggccagggaaccagtccacacaaaaagcagtacttctagcagcctaaatgatacaactctgcctgaaacagtttgttggggccatgttgaagaggttgagctcattaatgatggctctggactaggttttggaatagttggaggaaaaacaagtggcgtggttgtgaggactatagttcctggaggattagcagatcgagatggaagactccagacaggggaccacatcttgaagattggtggcacaaacgtgcagggaatgaccagtgagcaagttgcacaagttctaaggaactgtgggaattcagtcaggatgctcgttgctagagatccagctggtgacatttcagtcaccccccctgcccctgcagccttacctgttgccctgcctactgtagccagcaagggccctggttctgacagttctctttttgaaacttataatgttgagcttgtgagaaaagatgggcagagtcttggaattagaattgttggctatgttggaacatctcatacaggggaagcttcagggatttatgtgaaaagtataatacctggcagtgctgcgtaccacaatggccacattcaagtgaatgacaaaatagttgctgtcgatggcgtgaacattcagggttttgccaaccatgatgttgttgaagtattacgaaatgcagggcaggtggtacacctaaccctagttcgaaggaagacatcctcatctacttctccacttgaaccaccttcagacagaggaactgttgtagaaccactgaaaccaccagctctctttctaactggagcagtggaaactgaaactaatgtggatggtgaagatgaggaaattaaagaaagaattgatactttaaaaaatgacaacatacaagccttagaaaaattggaaaaagtcccagactctccagaaaatgagctgaaatccagatgggaaaacctgttgggtcctgattatgaagtaatggttgctactttggacacacagattgcagatgatgctgagttacagaaatattcaaagctgctgcctattcacactctgaggcttggtgtggaagtggattcctttgatgggcaccattatatttcttcaattgtttctggtggtcctgttgatacattgggtctcctacagccagaagatgagctgcttgaggtcaatggcatgcagctttatggaaaatctcgccgagaagcagtctcctttcttaaagaagtgccacccccttttactttggtttgctgtcggaggttgtttgatgatgaagcttctgtagatgaaccaaggcgcactgaaacctctcttcctgagacagaggttgaccacaatatggatgtcaatactgaagaagatgatgatggggaattagcactgtggtcccctgaagtcaagattgttgaactagtaaaagattgtaaaggtttgggattcagcattttggattaccaggaccctttagatcctacaagatcagtgattgtgatccgctccctggtagcagatggtgtagcagaaagaagtgggggactattacctggagaccgcctggtctcagtcaatgaataccgtttggacaacacctcacttgctgaagctgtggaaatattgaaagctgtgccaccaggcctagtacaccttggcatctgtaagcctttggtggaagataatgaagaagaaagttgttatattttacattcaagcagtaatgaagacaagactgaattttcaggaacaattcatgatataaattcatctttaatactcgaagcacccaagggatttagagatgaaccatattttaaagaagaacttgtggatgaaccatttctagatctgggaaagtctttccattcccaacaaaaagagatagagcaaagcaaggaggcctgggagatgcatgaatttctgactcctagattgcaggaaatggatgaagaaagagaaatgcttgttgatgaagaatatgagttatatcaagatccctcaccatccatggagttgtatcccttgtcgcacattcaagaggccactcctgtgccctctgtgaatgaacttcactttggtacacagtggttgcatgataatgaaccatccgagtctcaagaggcaagaaccgggaggactgtctattcccaggaggcacagccgtatggctattgccctgaaaatgtgatgaaagaaaattttgtcatggagtccctaccatctgtaccatcaactgaaggaaacagtcaacaaggcagatttgacgacctggaaaatcttaattcattagcaaaaactagtctggatttaggcatgatcccgaatgatgtccaaggtcctagcttgctcattgaccttcctgttgtggctcaaaggagggagcaagaagatttgcctttatatcaacaccaagcgacacgagttatttccaaggcctcagcatacacaggaatgttgtcttctagatatgccactgatacatgtgagttacctgagagagaagaaggcgaaggagaagaaactccaaattttagccactggggtccaccgagaattgttgagatttttagagaacccaatgtgtctcttgggatcagtattgttggtggacaaactgttataaaacgtctaaagaatggagaggagcttaaaggtatattcatcaaacaagttttagaagacagtccagcagggaagacgaacgcacttaaaactggagataaaatacttgaggtgtctggagtagatttgcagaatgcctcacacagcgaagcagttgaggccattaagaatgcaggaaaccctgtggtgttcattgttcagagtttgtcatccactccacgagtcattcctaacgtacataacaaggccaacaaaatcaccggtaaccagaaccaggacacccaagaaaagaaagaaaagaggcaaggaactgctccaccgccaatgaaacttcctcctccttataaagctctgactgatgacagtgatgaaaatgaagaagaagatgcctttaccgaccaaaaaatcagacaaagatatgcagatctgcctggagaactgcacattattgaacttgaaaaagataagaatggacttggactcagccttgctggtaataaagaccgatcacgcatgagcatatttgtggtgggaattaacccggaaggacctgctgccgcagatggacgaatgcgtattggagatgaactcttagagataaacaatcagattctgtatggaagaagtcaccaaaatgcatctgccattattaagactgccccatcaaaggtcaagctggttttcatcagaaacgaggatgcagtcaatcagatggccgttactccctttccagtgccatcaagttctccatcttctattgaggatcagagcggcaccgaacctattagtagtgaggaagatggcagcctcgaagttggtattaaacaattgcctgaaagtgaaagcttcaaactggctgtcagccagatgaaacagcaaaaatatccaacaaaagtctccttcagttcacaagagataccattagcaccagcttcatcataccattcaacagatgcagacttcacaggctatggtggtttccaggctcctctgtcagtggaccccgcaacgtgtcccattgtccctggacaggaaatgattatagaaatatccaagggacgttcagggcttggtctcagcattgtgggaggaaaagacacacccttgaatgctatagttatccatgaagtctatgaagaaggggcagcagccagagatggaagactttgggctggtgaccagatattagaggttaatggggttgacctgaggaactccagccacgaagaagccatcacagccctgaggcagaccccccagaaggtgcggctggtggtgtatagagatgaggcacactaccgggatgaggagaacttggagattttccctgtggatctgcagaagaaagctggccggggcctgggcctgagcatcgttgggaaacggtaa

SEQ ID NO: 121388 - DNA, 5350 bp, Homo sapiens; identical to SEQ ID NO: 120210

SEQ ID NO: 121389 - DNA, 4863 bp, Homo sapiens
ctcacttccgcccaggtgaggcagggccgacaccgagcccgcccgacccgggctcccacctgctcctccagcgcaccaggtgtctttaagagtgattgaagagaataattcaaaatgcctgaaaatcctgctacagataaactgcaggtgctgcaggtacttgatcgcctgaaaatgaaattgcaggagaagggtgacacgtcgcagaatgagaagttatctatgttttatgagacactaaagagtcctctcttcaaccagatactcacacttcagcagtccatcaagcaactgaagggtcaactcaaccatataccctcagattgttcagccaactttgatttttctaggaaaggtttgttagtgttcacagatggttccattactaatggaaatgtccacaggccctctaataactcgactgtatctgggttatttccgtggaccccgaagttgggaaatgaagactttaactcagtcattcaacagatggctcagggccggcaaattgaatatatagatatagaacggccttcaactggaggccttggattcagtgtggtggccctcagaagtcaaaatctcggaaaagttgatatcttcgtgaaggatgtccagccagggagtgtagcagacagggatcaaagattaaaggaaaatgatcaaatattggccattaatcacacgccattggatcagaacatttcccatcagcaagcaattgcattattacaacaaaccactggatctttgagactgattgtggccagggaaccagtccacacaaaaagcagtacttctagcagcctaaatgatacaactctgcctgaaacagtttgttggggccatgttgaagaggttgagctcattaatgatggctctggactaggttttggaatagttggaggaaaaacaagtggcgtggttgtgaggactatagttcctggaggattagcagatcgagatggaagactccagacaggggaccacatcttgaagattggtggcacaaacgtgcagggaatgaccagtgagcaagttgcacaagttctaaggaactgtgggaattcagtcaggatgctcgttgctagagatccagctggtgacatttcagtcaccccccctgcccctgcagccttacctgttgccctgcctactgtagccagcaagggccctggttctgacagttctctttttgaaacttataatgttgagcttgtgagaaaagatgggcagagtcttggaattagaattgttggctatgttggaacatctcatacaggggaagcttcagggatttatgtgaaaagtataatacctggcagtgctgcgtaccacaatggccacattcaagtgaatgacaaaatagttgctgtcgatggcgtgaacattcagggttttgccaaccatgatgttgttgaagtattacgaaatgcagggcaggtggtacacctaaccctagttcgaaggaagacatcctcatctacttctccacttgaaccaccttcagacagaggaactgttgtagaaccactgaaaccaccagctctctttctaactggagcagtggaaactgaaactaatgtggatggtgaagatgaggaaattaaagaaagaattgatactttaaaaaatgacaacatacaagccttagaaaaattggaaaaagtcccagactctccagaaaatgagctgaaatccagatgggaaaacctgttgggtcctgattatgaagtaatggttgctactttggacacacagattgcagatgatgctgagttacagaaatattcaaagctgctgcctattcacactctgaggcttggtgtggaagtggattcctttgatgggcaccattatatttcttcaattgtttctggtggtcctgttgatacattgggtctcctacagccagaagatgagctgcttgaggtcaatggcatgcagctttatggaaaatctcgccgagaagcagtctcctttcttaaagaagtgccacccccttttactttggtttgctgtcggaggttgtttgatgatgaagcttctgtagatgaaccaaggcgcactgaaacctctcttcctgagacagaggttgaccacaatatggatgtcaatactgaagaagatgatgatggggaattagcactgtggtcccctgaagtcaagattgttgaactagtaaaagattgtaaaggtttgggattcagcattttggattaccaggaccctttagatcctacaagatcagtgattgtgatccgctccctggtagcagatggtgtagcagaaagaagtgggggactattacctggagaccgcctggtctcagtcaatgaataccgtttggacaacacctcacttgctgaagctgtggaaatattgaaagctgtgccaccaggcctagtacaccttggcatctgtaagcctttggtggaagataatgaagaagaaagttgttatattttacattcaagcagtaatgaagacaagactgaattttcaggaacaattcatgatataaattcatctttaatactcgaagcacccaagggatttagagatgaaccatattttaaagaagaacttgtggatgaaccatttctagatctgggaaagtctttccattcccaacaaaaagagatagagcaaagcaaggaggcctgggagatgcatgaatttctgactcctagattgcaggaaatggatgaagaaagagaaatgcttgttgatgaagaatatgagttatatcaagatccctcaccatccatggagttgtatcccttgtcgcacattcaagaggccactcctgtgccctctgtgaatgaacttcactttggtacacagtggttgcatgataatgaaccatccgagtctcaagaggcaagaaccgggaggactgtctattcccaggaggcacagccgtatggctattgccctgaaaatgtgatgaaagaaaattttgtcatggagtccctaccatctgtaccatcaactgaaggaaacagtcaacaaggcagatttgacgacctggaaaatcttaattcattagcaaaaactagtctggatttaggcatgatcccgaatgatgtccaaggtcctagcttgctcattgaccttcctgttgtggctcaaaggagggagcaagaagatttgcctttatatcaacaccaagcgacacgagttatttccaaggcctcagcatacacaggaatgttgtcttctagatatgccactgatacatgtgagttacctgagagagaagaaggcgaaggagaagaaactccaaattttagccactggggtccaccgagaattgttgagatttttagagaacccaatgtgtctcttgggatcagtattgttggtggacaaactgttataaaacgtctaaagaatggagaggagcttaaaggtatattcatcaaacaagttttagaagacagtccagcagggaagacgaacgcacttaaaactggagataaaatacttgaggtgtctggagtagatttgcagaatgcctcacacagcgaagcagttgaggccattaagaatgcaggaaaccctgtggtgttcattgttcagagtttgtcatccactccacgagtcattcctaacgtacataacaaggccaacaaaatcaccggtaaccagaaccaggacacccaagaaaagaaagaaaagaggcaaggaactgctccaccgccaatgaaacttcctcctccttataaagctctgactgatgacagtgatgaaaatgaagaagaagatgcctttaccgaccaaaaaatcagacaaagatatgcagatctgcctggagaactgcacattattgaacttgaaaaagataagaatggacttggactcagccttgctggtaataaagaccgatcacgcatgagcatatttgtggtgggaattaacccggaaggacctgctgccgcagatggacgaatgcgtattggagatgaactcttagagataaacaatcagattctgtatggaagaagtcaccaaaatgcatctgccattattaagactgccccatcaaaggtcaagctggttttcatcagaaacgaggatgcagtcaatcagatggccgttactccctttccagtgccatcaagttctccatcttctattgaggatcagagcggcaccgaacctattagtagtgaggaagatggcagcctcgaagttggtattaaacaattgcctgaaagtgaaagcttcaaactggctgtcagccagatgaaacagcaaaaatatccaacaaaagtctccttcagttcacaagagataccattagcaccagcttcatcataccattcaacagatgcagacttcacaggctatggtggtttccaggctcctctgtcagtggaccccgcaacgtgtcccattgtccctggacaggaaatgattatagaaatatccaagggacgttcagggcttggtctcagcattgtgggaggaaaagacacacccttgttctggaggctgggaagtccaagagcatggagccagcatctggtgagggccttcatgctgcatcatcctgtgacagaagttgaagggcaaaatgctatagttatccatgaagtctatgaagaaggggcagcagccagagatggaagactttgggctggtgaccagatattagaggttaatggggttgacctgaggaactccagccacgaagaagccatcacagccctgaggcagaccccccagaaggtgcggctggtggtgtatagagatgaggcacactaccgggatgaggagaacttggagattttccctgtggatctgcagaagaaagctggccggggcctgggcctgagcatcgttgggaaacggtaa

SEQ ID NO: 121390 - DNA, 339 bp, Homo sapiens
atgcccattgaagcattttggatttcagatttttcattttggttttgggatgctcagctggatcagagcggcaccgaacctattagtagtgaggaagatggcagcgtcgaagttggtattaaacaattgcctgaaagtgaaagcttcaaactggttttggaaaatatatcttgcgactgccacagattgcatatcctagaaagtgagcttattctggctgaagggaaagaatgtttcagcaagagtggaaattgtaatgggccactcatgaataaaccctacatgggacctgagacccctggcatgaagagtactagcagtttatttaccagagattga

SEQ ID NO: 121391 - DNA, 444 bp, Homo sapiens
atgtgcagggaagaaccagcagatcggtctggctggagcatatcatacgaggggagcgtaatgggcaaggaagccaaagaggaggtaggagctagatcgttcatcacgcagggcctcgaaggcaagggcaggataaaaccaaaggataacaggggtagatttgttgttgttgagaaactactttttacatttgctctgccgccatgtgatccatcggaatattttcgacttgctctttcaaaactgcagagttgtgatctctttgatgagtttgacaaaagaggggagcagagtccgagcttatctaaatatgaatgtggccacaaagctgtggaaggtgacaaagcaaaacaccttgccctggctctgcattgtcacctagagagcaagaggtctatagaaacatcatgtcacatgaaacgattctctgctttttggttctga

SEQ ID NO: 121392 - DNA, 940 bp, Homo sapiens
gcagcgcggaggaattccaattatagaaatacatcggagacacaacaaatgtggccattacaggtttcataatattacactgacttggctgttacttgatcttaggaaacagcacagtttaagatattgtgaattctgacttatactttattaaatgctataaatctaaatagatcctgttggatgtgatgggtctagtccagtttatttaagttcatgtttcactgtttgcactttgcattgaacaatgggtttattcgctgatgtaaacggttcgagtgaagaattaatgcagtaagtatgactaccacatacacacttgcctctccccatctccagaagaggggagcagagtccgagcttatctaaatatgaatgtggccacaaagctgtggaaggtgaccaaggcttaaccacctttgccctgggctcttgcattgtcacctaagagagcaagagggtctatagaaacatcatgtcacatgaaacgattctctgctttttggttctgaacttgaagtccctaaactgcaaaatctaagagttgggtggttattaaaatgcttttaaaaagttaactgtggcaccaattctaatgtaatccaacttgtgactgtttttttttgttttgttttgtttttgtgtgtgtgtgtgtgtggccctcggcaaaagttggaaacaaacatggtattgaaatacatattggaaataaaaatggtttgagccgccagtaatattctcccagaatgtacttatcttacctcggcatgtactgtagtcactcagtatttgtatatgttgctagaatttagattgtaaaatagtgaaattttaatgtgttcatttgtttttaatgtatatatgtcttgctcagattatttggtttaaatacacccccccttgaggtttgtagcttttccttatactaaaaaaaaaaaaa

SEQ ID NO: 121393 - DNA, 461 bp, Homo sapiens; identical to SEQ ID NO: 86076
  misc_feature (1)...(461): n = a,t,c or g

SEQ ID NO: 121394 - DNA, 717 bp, Homo sapiens; identical to SEQ ID NO: 119392

SEQ ID NO: 121395 - DNA, 1413 bp, Homo sapiens
atgcaggatgatgccatagagcagcttagaggagtatgcattagagcttgggaaaaaatcacttcaggtggagaacaatacctttcctttagtgctataaaacagggaccaagagaaccatacattaattttatagctcggtttcaggagtctcttcgaaagatgatcgcagatttggctgctcaggatatagtgctgcagttattagctttcgacaatgctaatcccaattgccaggctgctctgcgacctatcagagggaaagcacatttagttgattatatcaaggcctgtgatggcatcagagccagtagtgccacagtagatttatgctgcacaaaagctgtgagccttctacctggggaacccctgcaaaaggtcccaacaggagtctgtggacccttgccagcagggacaataggattacttttaggaaggtctagtttaggtttaaaagggatacaaatacatacaggagtcattgattcaaattacaatggggaaattcaaattgttatatctacttctgtttcctggaaagcagagccgggagagcgcatagcacagctcctgatcgtgccatatgtgggaatgggaaaaagtgaaattaaacgaacaggaggatttggaagcacaaataaacaaggcaaagcagcttattgggtaaatcaaattactgataaacatcctacctgtgaaacaaccattcagggaaagaaatttaaaggtttggtagatacaggagtggacatttcgatcatttctctgcagcactggctgtccacgtggcgaattcaacccactcaatttaacataggacctttgactgaagggaatcaaatggctgatcacctagttgctaatgcaatatctaatgctagacactttcacaatttaacccatgttaatgcctctggtctcaaacacagatacagcattacctggaaagaagctaaaaatattatccagcgatgcccaacttgccaaatggtacattcctcatcttttagaggaggagttaatcctcgaggactggaacctaattcactttggcaaatggatgtcacacatattcccttgtttgggagactagcttatgtacataaaagaagaagaataagaggaggaggaggaggagaaggagaaggagaaggagaaggagaaggagaagaagaagaagaagaagaagaagaagaagaagaagaagaagaagaagaagaagaagaagaagaagaacaagaacaagaacaagaagaacaagaacaagaagaacaagaacaagaagaacaagaacaagaagaaagaagaagaaaagacactgaagagctttcatactctctccccctcaacagaacccaaccatgctggcaccctgattttggacttccagccaccagaactgtgagaagataa

SEQ ID NO: 121396 - DNA, 1743 bp, Homo sapiens
atgggacaagtgtgggctctggttcattccaccttggaaacttttcacactgatgaggaggaaggagagtataatgaagtaacagagcaggtttgtttgccagctaaagccggtagtgctgcagtagatttatgctgcacaaaagctgtgagccttctgcctggggaatccccgcaaaaggtcccaacaggagccggtggacccttgccagcggggatgacaggattacttctaggcaggtctagtttaaatataaaagcggtacaagtacaaacaggagtcactgattctgattacaatggggaaattcaaattgttacatctacttctgttccctggaaagcaaagcctggagaccatatagcacagctcctaattgtgccgaaaaaatttgcaaggtttgaaggaaccgcttcaagtggaaagacaaagttcctgccaaggtttaggatatcatttttgatggcggccattgttaagcctccagaacctatacctttaaaatggttaacagataagccaatttggacagaacaatggccgctgagtaaagagaaactggaggctttagaagacttaattactcaacaattaaaaaagggacacatagctccaacattttccccttggaattctccagttttcataattaagaaaaaatcagctgagcaggactgtgaatggtttgtatttacaattcttgcagtaaacaatctgcagcttaagcctgctaaacgttttcactggaaagtgttgccacaaggaccaaatcaacagccaatttggataccatcaagatacctgaaaccttatcataagccagatgccaaggaagagattccggaaggatcccaaggattcccagttgcagccatgtcaagactgacgctgaggaggaccccaactgtcacgagcaacacccatcgaacacagccacccacctggggacagatcgagaagctgccacagatggcggaagaaaacctgaggaaagctggacaaccagtcacaataagtaattggattctccctagaataactaaatttaaaccaattgaaggtgctgagaatgtttttacagatgggtctagcaacggtaaagcttcttattctggctcaaaaggacctttgactgaagggaatcaaatggctgatcgccttgttgctaaagtaatatctaatgctagacactttcacaatttaacccatgttaatgcctctggtctcaaacgcagatacagcattacctggaaagaagctaaagctattatccagcgatgcccaacttgccaagtgatgctatcagcagctgaacagcatctacagaaatcagctgcaaagacagaagcagaaaaactggtttggtggagagacccaataacaaaaagtcgggaaataggtaaaataataacttggggtagaggttatgcttgtgtttctccaggaccaaatcaacagccgatttggataccatcaaaacacctgaaaccttatcataagccagatgctggggaaaagattccaggagaatcccgaggacccccggttgcagccatgtcaagactgacgctgaggaggatgccaactgtcatgagcaacacccatcgaacacagccacccacctggggacagatcaagaagctgtcacagatggcggaagaaaacctgaggaaagcgggacaaccagtcacaatgaataatttaatgatagcggtgatcaccactgccttcaacaagggctga

SEQ ID NO: 121397 - DNA, 1242 bp, Homo sapiens
atgggacaagtgtgggttctggttcattccaccttggaaccttttcacactaataatgaggaggaagcaaagtataacgaagtaacagaagaggtgacagagcaggtttgtttgccagctaaagctaacgcagcaaaggagaaagaggttcatccctacccttctgcacctcttaattattttgaagaaaaggagtggcctgaccctccagatctttcttttctggaggacactggaggagatcctagtctcactagccattggcaattaacaaaggaggctgaggcagagttacagctgattgaaaagcaagtccataaagctcaaataaatagaatagatccagagaagattccagatttgctaattttttcaactcagcattctactggtgttattgttcaagagcaaggtcttgtagagtggctttttcttccacatactaattcacggactctaactccttatgtggatcaaatcgctactatgataggaaatgggagaactcagattgttaaattacatggatattatcctggaaaaattattgtccctctcatgaaggcacaaatacagcaagcttttataaatagtcttacttggcaaacccatttagctgactttgtggttattctcgataatcattttcctaaaatgaaactgtttcaatttttgaaattaactaattggattctccctaaaataactaaatttaaaccaattaaaggtgctgaaaatgtcttcacagatgggtctagtaatggtaaagcttcttattctgaattgaaaggacttttaactgaagggaatcaagtggctgaacacctagttgctactgcaatatctaatgctagacactttcacaatttaacccatgttaatgccgctggtctcaaacgcagatacagcattacctggaaagaagctaaagctattatccagcaatgtccaacttgccaaatgttgtattcctcatcttttacaggaccaaatcaacagccaatttgggtgccatcaagacatctaaagccttatcatgagccagatgccaaagaagagactctgggaggaacccgagaaccccccagttgcagccatgtcaagactgatgctgaggaggaccccaactgtcacaagcaacacctattgaacacagccaactacctgcggacagatcaagaagctgtcacagatagcagaagaaaacctgaggaaagcaggacaaccagtcaccatgagtaa

SEQ ID NO: 121398 - DNA, 780 bp, Homo sapiens
atgccacagaacagcttagaggagtgtgcattagagcttgggaaaaaatcacttcaggaaaatgtcaataattttcctaaaacaaagctgtttcagtttttgaaattaactaattggattctccctaaaataactaaatttaaaccaattgaaggtgctgagaatgttttcacagatgggtctagtaacggtaaagcttcttattttggattaaaaggtaaagttttccagacgccctatactgcagctcaaaaagtggagctggtagcggtaattgaggtattgactgcttttgatatgcctgttagtatgatttctgattctacatacgtggttcattccacacagttaactgaaaatgctcagttacgacttcatacagatgaacaactgatgactttattttctcaactgcaaacagcagttagaatgttttgcggtgatgggcattccagcttctactacaacaataatgccccaggttatactagccaagctctagctacatttttctctatgtggaatattaaacgcattactggtatcccatacaattctcaaggacaagccatagtggaaagaatgaatctctccctaaaacagcagttgcaaaagcagactgagggagacagagaatatggaaccccacagatgcaactgaatctagcattattaactttaaattttttgagcctgcccaaaggccagatgttatcagcagctgaacagcatctacagaaaccagctgtaaagacagaagcagaacaactgatttggtga

SEQ ID NO: 121399 - DNA, 1307 bp, Homo sapiens
atgggtatttcctgcccagggtcctcaaaaatgcttaatagtcgagcgctccctgtgctgaaactgacccaaggagctctgcgggattgtaaagaacgagcaaactacacaaacttcaacatttacaaggctgtagagagccagggaaagtttgtatgtgttctctataatggacagcaaagccctgaatatgtcatgataccatgtacatctgtgtctccaacaggccaggaagtccctgaggacagaggaatgagaatggtgatgaagaataaacccaataagcctagcaaaatgcagagtctgaaatccagtaagcatctcacaaattctgtcattgttattgctgtaggaattttcttctcggtcactttgcaagccagggacccccagctggatgatgccatagaacagcttagaggagtgtgcattagagcttgggaaaaaatcacttcaggtggagaacaatacccttcctttagtgctataaaacagggaccaaaagaaccatacattgattttatagctcggttacaggagtctcttaaaaagatgattgcagattcggctgctcaggatatagtgttgcagttattagctttcgacaatgctaatcccgattgccaggctgctctgcgacctatcagagggaaagcacatttagttgattgtatcaaggcctgtgatgatattggagatgggtctagtaatggtaaagcttcttattttggctcaaaaagtaaagttttccagacatcctatacttcagctcaaaaagcagagcttgtagcggtaattgaggtattgactgcttttgatatgcctattaatgtgatttctgattcttcatacatggtttattccacacagttaattgaaaatgctcagttacgatttcatacagatgaacaactgatgactttatttacccaattgcaaacagcatttaggagtacaatgcatcctttttacatcactcacattagggctcatacacctcttccaggacctttgactgaagggaatcaaatggccgatcgcctagttgctaatgcaatatctaatgctagacactttcacaatttaacccatgttaatgcctctggtctcaaacgcagatacaacattacctggaaagaagctaaagctattatccagcgatgcccaacttgccaaatggtacattcctcatcttttacaggaggagttaatcctcgaggattggaacctaattctcaagctctagctaaatttttctctatacggaatattaaacacattactgatatcccatataattctgaagg

SEQ ID NO: 121400 - DNA, 2043 bp, Homo sapiens
atggaggaacagcaagtgattggggaaggaaatccacttaggagagggtgtgctatagaagctggaggagaaattggtgttacaaaagttcaagtaaccggggaagagagaattttcctgagaaaggaaaaaggtggcaaagataggtctagtaatggtaaagcatcttattctggctggaaaagtaaggtttttcagatgccctatacttcagctcaaaaagcggagcttgtagctgtaattgaggtattgactgcttttaatatgcctattaatgtgatttctgattcttcatacgtggttcatttcacacagttaattgaaaatgctcagttacgatttcatacagatgaacaacttatgactttatttacccaattgcaaacagcagttagaaaactagaaaagcaagagcaaacacattcaaaagctagcagaagacaagaaataactaaaatcagagcagaactgaaggaaatagagacacaaaaaacccttcaaaaaattaatgaatccaggagctggttttttgaaaggatcaacaaaatagatagactgctagcaagactaataaagaaaaagagagagaagaatctcatagatgcaataaaaaatgataaaggggatatcaccactgatcccacagaaatacaaactaccatcagagaatactacaaacacctctacacaaataaactagaaaatctagaagaaatggataaattcctcgacacctacactctcccaagactaaaccaagaagaagttgaatttctgaataaaccaataacaggatctgaaattgtggcaataatcaatagtttaccaaccaaaaagagtccaggaccagatggattcacagccaaattctaccagagaaaaggcagaagagcaatacccaagaggtatctgtgggatagtggtgagaggccagaggctaagaggtggtattatagcttccagtttaaagaattagtccaggaagatgtgaagcgctttacactgcaggattgcttggtagccaccaaggggtacaatgataaacaacgtaagaaagcccagttaagcacagccataaagttcaattctttgcaattagttctctttgaaaaaaattttcatgcaaagagaattgtgctggaaaaaagctggtctcggcaagtggcgtccatcttgggggctcagatccaggtcgaagggtcaccggagcagcggttggagaacgtggaactagctggaggacacctgaatactcttaaagcaatccccatgcactggccgtccatgtggccaattcaacccactcaatttaacatagttgaagttggtaaagcccctgaagtatatcaaagtagttatattttgcattgtaaaggacccgatggacaacctgcgactattcaaccaattataacttctgtacctataaatttatgtgggagagatttattacaacaatggggagcacaagttctaattgcagaacaattatatagccctcaaagtcgacatatgatgcatgaaatggggcatgtccctgataggtctagtaatggtaaagcatcttattctggctggaaaagtaaggtttttcagatgccctatacttcagctcaaaaagcggagcttgtagctgtaattgaggtattgactgcttttaatatgcctattaatgtgatttctgattcttcatacgtggttcatttcacacagttaattgaaaatgctcagttacgatttcatacagatgaacaacttatgactttatttacccaattgcaaacagcagttagaagccaaaatcaagagtcgatttggataccatcaagacttctgaaaccttatcataagccagatgccaaggaagaggctctgggagtatcccaaggatcccccagttgcagccatgttgagattgacaaccccaactgtcatgagcaacacccatcgaacacagccacccacctagggacggatcaagaagctgtcacagatggcggaagaaaacctgaggaaagcaggacaaccactcactatgagtaa

SEQ ID NO: 121401 - DNA, 1900 bp, Homo sapiens
atggcaggcgcccctcccccagcctggctgccacattgcagttcgatctcagactgctgtgctcgcaatgagcgaggctctgtgggtgtggcaccctctaagccagccaggagtgctgcagtagatttatgctgcacaaaagctgtgagccttctgcctggggaacccccacaaaaggtcccagcaagagtctgtggacccttgccagcagggacagtaggattacttttaggaaggtctagtttaagtttaaaagaggtacagatacatacaggagtcattgattcagattataaagtggaaattcagattgttgtatctacttctgttccctggaaagcagagccaggagagcgcatagcacagctcctggttgtgccctatgtgggaacgggaaaaagtgaaattaaacaaacagaaggatttggaagcacaaataaacaaggcaaagcagcttactgggtaaatcaaattactgataaacatcttacctgtgaaataactattcagggaaagaaatttaaaggtttggtagatacaggagcagacgtttcaatcatttctctgcagcactggccatccatgtggccaattcaatccactcaatttaacatagttggagttgatgggtctagtaatggtaaagcttcttattttggatcaaaatgtaaagtttttcagatgccctatacttcagctcaaaaagtggagcttgtagctataattgaggtattgactacttttgatatgcctattaatgtgatttctgattcttcatatgtggttcattccacacagttaattgaaaatgctcagttacaatttcatacagatgaacaactgatgactttatttacccaattgcaaacagcagttaggagtagaatgcatcctttttacatcactcacattagggctcgctcatacacctcttccaggacctttgactgaagggaatcaaatggccgattgcctagttgctactgcagtatctaatgctagacactttcacaatttaacccatgttaatgcctctggtctcaaatgcagatacagcaatacctggaaagcagctaaagctattatccagcgacgcccaacttgccaaatggtgcattcctcatcttttacaggaggagttaatcctcaaggattggaacctaattctctttggcaaatggatgtcacacatgttccctcgtttgggagactagcttatgtacatgtatgtgtggacaccttttctcactttgtctgggctacatgccaatcaggagagtcttctgcctgtgttaaacatcatcttttgcagggttttgtggtgatgggcattccagcttctattaaaacagataatgtcccaggctatactagccaagctctggctacatttttctctatgttgaatattaaacgcattactgatatcccatacaattctcaagatgtggaggctgatgcaaatgcagatgtaggggtagatgtggatgcagatgcagatgtagatgcagaagaagaggtattcactgatgcagatgcggatgcagaggtagatgtagatgaggatgcagatgcagagagactcagatgcaatgcagatgaagattcagatttagatttagatgttgatgctgaaatggatgcagatgtagatacaaatttagatgtagatgcagctgtagatgtggatgtggatgcagatgcagacgtagatgcagatacagatgtagatgtagacacaggtctaaatttagaggcagatttagatttagatgtggatgcggatgtggacacggatgcagatgtagacagggatgcggatgtggaagtggctgtggatgcagatgccactgtgaatgcagatgtagattatgtagatgtagatacagattcagactga

SEQ ID NO: 121402 - DNA, 565 bp, Homo sapiens
gtccagggcggaggaattcgcccgcgctcacagtcctgcttccttgtcttttgcctcatatcgtcaggtagctagtttcggttcagctgctcctcccagacagtttgatgcatctcaattcagccaaggccctgtgcctggcacttgtgctgactggatcccacagtcggcgtcttgtcccacaggacctccccagaacccaccttctgcaccctattgtggcattgttttttcagggagctcattaagctctgcacagtctgctccactgcaacatcctggaggctttactaccaggccttctgctggcaccttccctgagctggattctccccagcttcatttctctcttcctacagaccctgatcccatcagaggttttgggtcttatcatccctctgcttactctccttttcattttcaaccttccgcagcctctttgactgccaaccttaggctgccaatggcctctgctttacctgaggctctttgcagtcagtcccggactaccccagtagatctctgtcttctagaagaatcagtaggcagtctcgaaggaagtcga

SEQ ID NO: 121403 - DNA, 999 bp, Homo sapiens
atgaagtgttatacacggatagaaaaatacagatatgagatcatcaggcgagacttacttttaaatcaatgtatagaaaggcgaattaaaattaaaatgatgatatcaataaaacagaactgcaggaagcggcggcggaatatcagacaaacgcagacaacagcaaattccataccttcagagttacaccagctcatctgcagtaggagtagaaatatcaaagctctcagtctaccaccttgtgctccagagatgtggcccaagcacatctttggacatgaactggggcaacccaaagcagagctggatttctgggagtttctccctggctttttctttgacagtgaccttggacagtctggtgcagaacttctttctattgatgtctaccagaaatcagtgaaatgtagaactaaactcagaacgctaaaaatactaggctgtctgtgtggacaccagcatcctgaccccatggcacctatagcatccagcactgacaccatctcaggacctccccagaacccctcttctgcaccctactgtggcattgctctttcagggagctcattgagctccacacagtctgctccactgcaacctgttggaggccgtacgaccaggccttctactggcacctaccctgagctggattctccccagcttcatttctctcttcctacagaccctgatcccatcagagtgggaatgcgtgggaaacacacatcgggaacactaaataaagcggaaacatcggaagactttcagcaaagtactcctacacaagacaacttaaggactctgacacgtagctcccacccagaagcaaggatagacaataatatggggcaagcctttcagcatgagagggtacagagagctatgacgatgggatgggcatctgtacgcatacagtcacttgcagcagcgagaggagtggaatgttacgcagacacacaagatacaaagcgggaaatgtcccacctcgaaaggaggaattga

SEQ ID NO: 121404 - DNA, 372 bp, Homo sapiens
gtaaatgcttttactaaaagctgccaacatttctatcagtagtaaccgtaaggaggccgctggttgtaaccataatgtccatattgctggggatagtaaggttcttgtctgtgttgcgggtagttgttaccccaggatcgtccatgccactgattggatcgattgtcacttggccacccccatctgttgtccctgcctctgaactgtctgttgtcttgcaaccccaaaggtttgaggcagctgtactgcttaatgtttaggttgtttaaatccgccaagggctatgtctatccagctcaggccgaaccccgccggcgagacactgagaagcccaggagaggtggcctctggtccactacaccgtggaactcc

SEQ ID NO: 121405 - DNA, 597 bp, Homo sapiens
atggggttttaccatgttgggcaggttggtctcgaacgcctgacctcagaaggctctgtaggcagtgatcgtggcagtattgtggacactgaggaagagaaagaagaggagtcgtcttcaccacggggtgaagtacggacgcggtacttcacccgtggtgaagacttcgacgtaggcgctgtgggcaaggaaaaggcctggcctgctgcctcttctcttgcagcaaaatccgctgctgtgaaggagctgctgcctcaaatctttgggaatttcagaatgactgacactgccaaagctgttccaaattttgaagagatgtttgctagtagattcacagaagatgacgaggagtatcaggaatacttgaaacgccctcctgagtcctctccaattgttgaggaatggaatagcagagctggtgggaaccaaagaaacagagacaatcggttgcaagatagcagacagttcagaggcagggacggcagatgggggtggccaagtgacaatcgatccaatcagtggcgtggacaatcctgcggtaacaattacccgcaacacagacaagaaccttactatcccgaccaatatggacattaa

SEQ ID NO: 121406 - DNA, 895 bp, Homo sapiens
ctgtgtaaaacaaagaattcctagaggtcaaataatataccaaacttaaagcactattaagtcatgaaacaaagaagattctgaggtagaagtcaagcaataataatcccacagtttcaggtatcccccagcaacccatcgcatttccgcaaggtaaggacctattttttttaaagtctcaacttcccaaaaaatcaataatccattctgtaaaattcagatgtaaaacctatgacccaacagaagacaccccaaacttttcctcatggtaacagagtaaatgcttttactaaaagctgcccaacatttctatcagtagtaaccgtaaggaggccgctggttgtaacccataaatgtccaaaattgctggggatagtaaggttcttgtctgtgttgcggggtagttgttaccccagggatcgtccatgccactggattgggatcgattgtcaacttggccacccccatcctgttgtccctgcctctgaactgtctgttgtcttgcaaccgattgcctctgtttctttggttcccacccagctctgctattccattcctcaacaattggaggagactcaggaggggcgtttcaggtattcctgatactccttgtcattttctgtgaatctactagcaaacatctcttcaaactttggagcagcttcggcagtgtcagtcattctgaaaatcccaaaggtttgaggcagctgtactgcttaatgtttaggttgtttaaatccgccaagggctatgtcaatccagctcaggccgaaccccgccggcgagacactgagaagcccaggagaggtggcctctggtccactaaaacgtgaaactccagaccactccagttctccaatgtaaccgagcgcctgtcctctaaaatccaaatggc

SEQ ID NO: 121407 - DNA, 1239 bp, Homo sapiens
atgaatcagtgtgtgactgcaatgagccacctgatttcttcaaatggaagatacttatattgttaccaagctattgcttttgctaagattcgcatggctctacctggacctcgtgtttgtcctgatatagtacagaaaaaaaagaagaaagaagaagaggaagaagaaggagaaggagaaggagaaggagaagaagaagaagaagaagaagaagaagaagaagaagaagaagaagaagaagaagaagaagaagaagaaaagaaaaaaagaaatggccctgcaaagctgttctttatggtacttgtatgcctgagagaccaaaatgctgattccgtttaccttcctggaaactgtaaaactaaccaatcagaggatcaggtcattgagaagaagaaacttgcccaacctaagatatcttttaatccaggggtccccaatccccaggccagagactgctaccgggatctgtggcctgcgaggaaccaagcagcacagcaggaggtgagcggagggcaaatgagactgtctagttgcaagaaaacaagctcatggctcccactgattctacattatgccgctctcctcttccgggcgcgctgcttgcctgcgtgcgccgggacgcgcggggccgagcgtctgaagccgcccgtacgcgacgcgctttctaggagccccgccctcaggtgcgctctgcaggaggcgggtcgcgacttcggcgctgccagctctgcctgcgccaactcagatatcagtgatcttattagctttttcacaagccagaacataatggtgacgatgattaatgacagtgactatgtatccgtggctccccatagtgcggctttaaatgtgatgcattcagaaaagatcaaagcttatactcaacttaaactttcaggtcttttgccatctgcatattggattggacaagctgttgttgatatccccttattttttatcattcttattttgatgctaggaagcttattggcatttcattatggattatatttttatactgtaaagttccttgctgtgctgctgaacatattgttggtgctatgggaaaatgaattgcagattgactttcaagctacaatccatttgccagctgtggactccgcacgcctatgcagagaaatgaattgtgctaagcatctctggcttccttgtgaaaaaggtgatgccgttctccatcagggtgctgtgtacccactatgtgtgagcggtacagaatga

SEQ ID NO: 121408 - DNA, 2951 bp, Homo sapiens
  misc_feature (1)...(2951): n = a,t,c or g
ggcttctggttcggcccacctctgaaggttccagaatcgatagtgaattcgtggttccaagtttggagcttttagctgccagccctggcccatcatcgtagctgcagcacagccttccctaacgttgcaactgggggaaaaatcactttccagtctgttttgcaaggtgtgcatttccatcttgattccctgaaagtccatctgctgcatcggtcaagagaaactccacttgcatgaagattgcacgcctgcagcttgcatctttgttgcaaaactagctacagaagagaagcaaggcaaagtcttttgtgctcccctccccccatcaaaggaaaggggaaaatgtctcagtcgaaaggcaagaagcgagaccctgggccttaaaattccaaaagcaaggcatttgaacaaccttcaggaccagtttccacaccacctcgaggatttaggactccaagggttggcatttctattgggaaattcaggaacttttgagggttgaagggcagattgaccggggagcctattaatgggaactggggacggaggtgcgtacggggtgggtnggagaagatgcggcacgtgcccagcgggcagatcatggcagtgaagcggatccgagccacagtaaatagccaggaacagaaacggctactgatggatttggatatttccatgaggacggtggactgtccattcactgtcaccttttatggcgcactgtttcgggagggtgatgtgtggatctgcatggagctcatggatacatcactagataaattctacaaacaagttattgataaaggccagacaattccagaggacatcttagggaaaatagcagtttctattgtaaaagcattagaacatttacatagtaagctgtctgtcattcacagagacgtcaagccttctaatgtactcatcaatgctctcggtcaagtgaagatgtgcgattttggaatcagtggctacttggtggactctgttgctaaaacaattgatgcaggttgcaaaccatacatggcccctgaaagaataaacccagagctcaaccagaagggatacagtgtgaagtctgacatttggagtctgggcatcacgatgattgagttggccatccttcgatttccctatgattcatggggaactccatttcagcagctcaaacaggtggtagaggagccatcgccacaactcccagcagacaagttctctgcagagtttgttgactttacctcacagtgcttaaagaagaattccaaagaacggcctacatacccagagctaatgcaacatccatttttcaccctacatgaatccaaaggaacagatgtggcatcttttgtaaaactgattcttggagactaaaaagcagtggacttaatcggttgaccctacttgtggattggtgggtttcggggtgaagcaagttcactacagcatcaatagaaagtcatctttgagataatttaaccctgcctctcagagggttttctctcccaattttctttttactccccctcttaagggggccttggaatctatagtatagaatgaactgtctagatggatgaattatgataaaggcttaggacttccaaaggtgattaaatatttaatgatgtgtcatatgagtcctcaagcttctcagacttctcttattctttacaaaatgaatgcattggccctgacaaaaaggtgctacggtagtgatgaaattataagtagatttgtagtttgtcccatttattattttaatatttatgtttaagtgcttggttgaaaagattccattttatacaagaagggagattcaaaaaaaaaatataaggttgggttagcaatatttatagggcttttattttttaagttcaattgtgtctgtggtccagaagaaattatttaatatgcatctttgagaatattataaaaatatcaaaaaggagctcttcttgtgaaatgtctgttccagctgttgtgactgctgccatttttggaaacatctgcccaatcctgggtgatcaccacatcttttaggggaagtgacaagatgctctggtcatactctttttcccaactttggaaaacataaaaatcactcatataacagctcaaagagtaaaacatttggttcttctgacacttgtggtatagtattagtggaaagtgatttgtaatatgattttatatccacctacctattcatctacctgtgtgtatgtgtgtgtttgtgtgtctatttggcaattcacaagtcctgccaagtggtttctatgagcatctctgtttggtaaggaggacaattgtcagttttgagggggacatgtgttaaatcacagaaaaaaatggtgccttcttctgcgtttgtccctcctgccatgtgtaagttgtaaggattgcctttgtagttaatgtactctttggctttgtttgtttgttttcttcttcagtgaagcagccttactattcatagaagggctagaataggagaaaatgaaaggtagtgagtaattctttgataagatgaggaaataatgggaaaggttgaattaattcctgggcatggactaccagatgaccacaagttgcgttgaggccgcatctttcttcagcagcgtgcaatagctggctcctctataggagatgagcttcattgggagttcctagcaagttgactaaacagcaaaagttctttctcgtgggtaaatatacccacaggttctatgatttgtagctctaggtttcttgatgatcaaggagtgaagtaattgacagggaaaatatagacctatgataaataaccaggaagcattgcttttggacaaggaagaacagagggttttgattttaaaaagaagaaaaaaaaaccttattttttctttcttggcctcaagttcaatatggagaggattgcttccctgaatcctctcttccttccccttttagag

SEQ ID NO: 121409 - DNA, 1803 bp, Homo sapiens
atgattaatgacagtgactatgtatccgtggctccccatagtgcggctttaaatgtggtgcattcagaaaaggaaattactgatatagtttttaaaattgagctgtattttcaagcagctttgcttggaatcattgttactgcaatgccaccttactttgccatggaaaatgcagagaatcataagatcaaagcttatactcaacttaaactttcaggtcttttgccatctgcatattggattggacaagctgttgttgatatccccttattttttatcattcttattttgatgctaggaagcttattggcatttcattatggattatatttttatactgtaaagttccttgctgtggaaacttccagaaaagataaatgtagggacagaatgccaactggtgattgtcagaggccagggagagtaaagaatgaggagaaactgcttacaagcctcctcattcgccctcacaccccgacctgggaggtcctcccactgagggtgcttgtagttcgcggagtgtcctcatcaaagactgggaatgcggcagatgctgaattttccaaacggcctgagacacatgacatcttaaagaaaatggactttacgttggtaaagatggtacttgtatgcctgagagaccaaaatgctgattccgtttaccttcctggaaactgtaaaactaaccaatcagaggatcaggtcattgagaagaagaaacttgcccaacctaagatgtcagcaggggcagcagtgtcaaatacatctcccattaccgtgaaggagtcagccaatcctgaccagttggctgcagaaattggaagaaataaatctccgctgaaggagaaaaggatgaagacagggccagtcactgccctcattctttccattgcatcgggaccacgtgctgctggctatgttcacagggcaggctgctggtctgcaagtccagggaccatacttggagtagcaagcccccagggaaggacagactttaataagaagaggatcccctatgaaaattccaacttgagctcctatgttcattcagacattcatacaaataccaactgtgggccaaacactgaagatttccagctatctggtaatgaattgtggattcaatactcagacatccaaggcaggaacagagaagttatcaagtatgaagtggtggcagatgaagtcagaagtgtctttcaaggagggagaccatcaggattaaggatccaaggagaggcaagatctagggagcaagatctggaagttgccatcatgagaggtaaaatccagaggtctggaaacagtgaagtgctcttagagcaacagcatacctcaagagaaaagccactctgggaagcgtccacatttggaaggtgccaacagaggccccgtggagaatctagatgtctacacccacctggcagtaaggaggcagcaccccctttcagccaccagctagttttgcaacaaagatgcaagctgcaggcgtgcaatcttcatgcaagtggagtttctcttgaccgatgcagcagatggactttcagggaatcaagatggaaatgcacaccttgcaaaacagactggaaagtgatttttcccccagttgcaacgttagggaaggctgtgctgcagctacatgatgggccagggctggcagctaaaagctccaaacttggaactgagtatcttagtgcgcagacgtccttcctgcgaagggcgcgaaggccgctgggtaatgtagttctccggcggagtccacggggctctgatttaaggaaacgtggtcgccccggtcgctga

SEQ ID NO: 121410 - DNA, 501 bp, Homo sapiens
atgaccacaagcgaccccaggcccacaccagacaattctctggaaactcagagaggcggtagccacaaagaggcaacaaggttttacggaatcaaggttctacagaatcaaggttcaagacaaaatcgccagaggctcaactgtgacatgggagggtatacagctctggggacagtggcttctgggatcctggatgacacttggtgtcagagtgggcttggcaagtttcttaaattctctgaacctgttaccccaggaccctgggcctcagttttcctatctgagaagaagggcgaagagctgtgcccccggaccacacccgtcggtgatggggcaaaaaccgagggcaagcaggtttggttcctgcccagcaaagggctctttattttgaagtccacagttatccatggatttgtcccctttgcgaatcctggtactctgctggacacgaacggcctgtacgatgaggatgtgtgcacccccgacaacctgcagaagtaa

SEQ ID NO: 121411 - DNA, 3459 bp, Homo sapiens
atggactgttctgaaaagtggcgggacccactggatgcagtgtgtgtacttcctgccacagaggagcctgtggtgcagggctcagcgctctatctggtagcccaccacgatgactactgcgtatggtacagcctgcagaggaccagccctgaaaagaatgagagagtccgccagatgcgccccgtgtgtgactgccaggctcacctgctctggaaccggcctcggtttggagagatcaatgaccaggacagaactgatcgatacgtccaggctctgaggaccgaaattcccctgactttgaaaggggccaaactgcagagggaggagaaggagggtgacatgccatgccgtgccaacatcctggtcacagagttgtttgacacagagctgatcggggagggggcgctgccctcctatgagcacgcacacaggcatctcgtggagaccagcctcggagagcaggtcatcgtccctcccgttgacgtggagagctgccctggcgcaccctctgtctgtgacattcagctgaaccaggtgtcaccagccgactttacagtcctcagcgatgtgctgcccatgttcagcatagacttcagcaagcaagtcagtagctcagcagcctgccatagcaggcggtttgaacctctgacatctggccgagctcaggtggttctctcgtggtgggacattgaaatggaccctgaggggaagatcaagtgcaccatggcccccttctgggcacactcagacccagaggagatgcagggttttgtaaagaggaggatcgaggatgtggaagagacagaggacacttacccctcccacttggaccctcctagaagagctgtcaccgcagacctgaaaggagatgagcagttcacaggggtgcccggaacaatctccagagctcacctgacagccaccgagcagcccagaacaggtttcatgtcttaccttatcctcaacatcactaatttctttgttgtatttgtttctgttaatgccaattactacttccagcatgtccactcaccactgtgcttcgtttatgaatgtcagcccctggtcccacaggccttggatgtaaagagaacaactctgctgtccccacgcccccagtacatctgctggcttggaatggagggaagctctccttcccgactgccagcccagatgaccaacagcgaccccaggcccacaccagacaattctctgaaaactcacagaggcgccccgatgaccaacagcgaccccaggcccacaccagacaattctctggaaactcagagaggcggtagccacaaagaggcaacaaggttctacggaatcaaggttctacagaatcaaggttcaagctgtctgtccgccctgcactgtgtgtcctgggcccttatctttccatgctactggctggtggaccggctcgctgcctccttcatacccaccacctacgagaagcgccagcgggcagacaacccgtgctgcctgcagctgctctgcactgccctcttcacgcccatctacctggccctcctggtggcctcgctgccctttgcgtttctcggctttctcttctggtccccactgcagtcggcccgccggccctacatctattcacggctggaagacaagggcctggccggtggggcagccctgctcagtgaatggaagggcacggggcctggcaaaagcttctgctttgccactgccaacgtctgcctcctgcccgactcactcgccagggtcaacaacctttttaacacccaagcgcgggccaaggagatcgggcagagaatccgcaatggggccgcccggccccagatcaaaatttacatcgactcccccaccaatacctccatcagcgccgctagcttcagcagcctggtgtcaccacagggcggcgatggggtggcccgggccgtccccgggagcattaagaggacagcctctgtggagtacaagggtgacggtgggcggcaccccggtgacgaggctgccaacggcccagcctctggggaccctgtcgacagcagcagcccggaggatgcctgcatcgtgcgcatcggtggcgaggagggcggccggccacctgaagctgacgaccctgtgcctgggggccaggccaggaacggagctggcgggggcccaaggggccagacgcccaaccataatcagcaggacggggattcagggagcctgggcagcccctcggcctcccgggagtccctggtgaaggggcgagctgggccagacaccagtgccagcggggagccaggtgccaacagcaagctcctgtacaaggcctcggtggtgaagaaggcggctgcacgcaggaggcggcaccccgacgaggccttcgaccatgaggtctccgccttcttccccgccaacctggacttcctgtgcctgcaggaggtgtttgacaagcgagcagccaccaaattgaaagagcagctgcacggctacttcgagtacatcctgtacgacgtcggggtctacggctgccagggctgctgcagcttcaagtgtctcaacagcggcctcctctttgccagccgctaccccatcatggacgtggcctatcactgttaccccaacaagtgtaacgacgatgccctggcctctaagggagctctgtttctcaagagccttattctggacacctcttccgttgacagtctttgcccgccaggactcaaaggcacagcctttcgtgtgattgcttgtttttgcaagagaaacacaaggctctgcggctcccaaggccacgagccaggaatcaatgaggcccagcaaataatcaagtggatcttggtgcaggtgggaagcacacctcaggaccaaagaatcgtcgggtacatcgcctgcacacacctgcatgccccgcaagaggacagcgccatccggtgtgggcagctggacctgcttcaggactggctggctgatttccgaaaatctacctcctcgtccagcgcagccaaccccgaggagctggtggcatttgacgtcgtctgtggagatttcaactttgataactgctcctctgacgacaagctggagcagcaacactccctgttcacccactacagggacccctgccgcctggggcctggtgaggagaagccgtgggccatcggtactctgctggacacgaacggcctgtacgatgaggatgtgtgcacccccgacaacctgcagaaggtcctggagagtgaggagggccgcagggagtacctggcgtttcccaccagcaagagctcgggccagaaggggcggaaggagctgctgaagggcaacggccggcgcatcgactacatgctgcatgcagaggaggggctgtgcccagactggaaggccgaggtggaagaattcagttttatcacccagctgtccggcctgacggaccacctgccagtagccatgcgactgatggtgtcttcgggggaggaggaggcatag

SEQ ID NO: 121412 - DNA, 690 bp, Homo sapiens
gctttgcagaattatcagcggtataccggcatacagcatgtgcatcgcataggaatggcggaacgtatgtggtgtgaccggaacagagaacgtcacaccgtcagcagcagcggcgcaaccgcctccccaatccagaccgttcagctggatattacggcctttttaaagaccgtaaagaaaaataagcacaagttttatccggcctttattcacattcttgcccgcctgatgaatgctcatccggagttccgtatggcaatgaaagacggtgagctggtgatatgggatagtgttcacccttgttacaccgttttccatgagcaaactgaaacgttttcatcgctctggagtgaataccacgacgatttccggcagtttctacacatatattcgcaagatgtggcgtgttacggtgaaaacctggcctatttccctaaagggtttattgagaatatgtttttcgtctcagccaatccctgggtgagtttcaccagttttgatttaaacgtggccaatatggacaacttcttcgcccccgttttcaccatgggcaaatattatacgcaaggcgacaaggtgctgatgccgctggcgattcaggttcatcatgccgtttgtgatggcttccatgtcggcagaatgcttaatgaattacaacagtactgcgatgagtggcagggcggggcgtaa

SEQ ID NO: 121413 - DNA, 663 bp, Homo sapiens
ggatttgccgactcggaacccaccatcaaacaggattttcgcctgctggggcaaaccagcgtggcccgcttgctgcaactctctcagggccaggcggtgaagggcaatcagctgttgcccgtctcactggtgaaaagaaaaaccaccctggcgcccaatacgcaaaccgcctctccccgcgcgttggccgattcattaatgcagctggcacgacaggtttcccgactggaaagcgggcatatggcaatgaaagacggtgagctggtgatatgggatagtgttcacccttgttacgccgttttccatgagcaaactgaaacgttttcatcgctgtggagtgaataccacgacgatttccggcagtttctacacatatattcgcaagatgtggcgtgttacggtgaaaacctggcctatttccataaagggtttattgagaatatgtttttcgtctcagccaatccctgggtgagtttcaccagttttgatttaaacgtggccaatatggacaacttattcgcccccgttttcaccatgggcaaatattatacgcaaggcgacaaggtgctgatgccgctggcgattcaggttcatcatgccgtttgtgatggcttccatgtcggcagaatgcttaatgagttacaacagtactgcgatgagtga

SEQ ID NO: 121414 - DNA, 474 bp, Homo sapiens
tcaggataattgtttcagcatcgcaaccgcatcagactccggcatcgcaaactgcacccggtgccgggcagccacatccagcgcaaaaaccttcgtgtagacttccgttgaactgatggacttatgtcccatcaggctttgcagaactttcagcggtataccggcatacagcatgtgcatcgcataggaatggcggaacgtatgtggtgtgaccggaacagagaacgtcacaccgtcagcagcagcggcggcaaccgcctccccaatccaggtcctgaccgttctgtccgtcacttcccagatccgcgctttctctgtccttcctgtgcgacggttacgccgctccatgagcttatcgcgaataaatacgttttcaccatgggcaaatattatacgcaaggcgacaaggtgctgatgccgctggcgattcaggttcatcatgccgtttgtgatggcttccatgtcggcagaatg

SEQ ID NO: 121415 - DNA, 441 bp, Homo sapiens
tcagcggattccggcaaccaccatggcctggcatagtatggcggtcggtatgtgttgggccggaacagagaacgtccccgcggtcagcagcagcgtcggcaaccgctctcccattccaggtcctgaccgttctgtccgtcgactacccagatgtggggtttttgtgtccttcctgtgccacgggtacgccggctccatgagcttttcgggaatatataccggtaagccctggtccaccttttggcgataatgagacgttgatcggcacgtaagaggttccaactttcgccataatgaaataagatcactaccgggcgtattttgtgagttatcgagattttcaggagctaaggaagcatgggcaaatattatacgcaaggcgacaaggtgctgatgccgctggcgattcaggttcatcatgccgtttgtgatggcttccat

SEQ ID NO: 121416 - DNA, 831 bp, Homo sapiens
atgctgtatgccggtataccgctgaaagttctgcaaagcctgatgggacataagtccatcagttcaacggaagtctacacgaaggtttttgcgctggatgtggctgcccggcaccgggaactgagaatgcagaaaacatacaaagctaaagctacagcctacgatatggcacgttctcaaaataataactcagagaagcttttggtttatagaaaattattacaagtgttgacaggactttataaacggagtaacctcggtgtgcggttgtatgcctgctgtggattgctgctgtgtcctgcttatccacaacattttgcgcacggttatgtggacaaaatacctggttacccaggccgtgccggcacgttaaccgggctgcatccgatgcaatgtgacaatctaaaaacttgtcacacttcacatggatctgtcatggcggaaacagcggttatcaatcacaagaaacgtaaaaatagcccgcgaatcgtccagtcaaacgacctcactgaggcggcatatagtctctcccgggatcaaaaacgtatgctgtatctgttcgttgaccagatcagaaaatctgatggcaccctacaggaacatgacggtatctgcgagatccatgttgctaaatatgctgaaatattcggattgacctctgcggaagccatactgaggtacttcattaagcattctgccgacatggaagccatcacaaacggcatgatgaacctgaatcgccagcggcatcagcaccttgtcgccttgcgtataatatttgcccatggtgaaaacgggggcgaagaagttgtccatattggccacgtttaa

SEQ ID NO: 121417 - DNA, 612 bp, Homo sapiens
tcaaagtggtatctctagacgcagcctggtttctgcacgtaggctgtttttggaagagtcaccctcgtattctctggagggccttggtggaaggccaaagtcagcctgtttgtcatttgcacagtcatcaatattcagtaagccatacggtcgcataaaaaggtccgtaatatccagctgaacgggtctggtaatagggtacattgagcaactgattggaaatgctccaaaatgttctccacgatgccattggaatacatcaacggcggtataaccagcgatatttttctccattttagcttccgtagctcctgaaaatctcgataactcaaaaagatacgcccggtagtgatctggattggggaggcggtcgccgccgctgctgctgacggtgtgacgttctctgttccggtcacaccacagacgttccgccattcctatgcgatgcacatgctgtaagccggaacaccgctgaaagtactgcaaagcgtggccaatatggacaacttcttcgcccccgttttcaccatgggcaaatattatacgcaaggcgacaaggtgctgatgccgctggcgattcaggttcatcatgccgtttgtgatggcttccat

SEQ ID NO: 121418 - DNA, 3171 bp, Homo sapiens
tcaagccctgctaaaccaggggccccggagaggtacctcagtgtcagagcagttgccattcagagcctcgatgtttggatccctccagtcttctgagagtgaagggatgtaattgtctgtcagagcatcccaaaccctgggggatggtagaggatgaggaccctgatcagatattgggggtagagggttcttgctaaacttcacacggttcttgctgaaactggattttataaggaagtgcacagattgattgtttgtcagcatctgcaggtcttccactgagggaggagaggctttcttctcgtaaggaatgactgtgttcagatatggtgtgagatgatatctcatagtggttttgatttgcatttctctgatggccagtgatgatgagcatttcttcatgtgttttttggctgcataaatgtcttcttttgagaagtgtctgttcatgtccttcgcccactttttgatggggttgtttgtttttttcttgtaaatttgtttgagttcattgtagattctggatattagccctttgtcagatgagtaggttgcaaaaattttctcccatgttgtaggttgcctgttcactctgatggtagtttcttttgctgtgcagaagctctttagtttaattagatcccatttgtcaattttgtcttttgttgccattgcttttggtgttttggacatgaagtccttgcccacgcctatgtcctgaatggtaatgcctaggttttcttctagggtttttatggttttaggtttaacgtttaaatctttaatccatcttgaattgatttttgtataaggtgtaaggaagggatccagtttcagctttctacatatggctagccagttttcccagcaccatttattaaatagggaatcctttccccattgcttgtttttctcaggtttgtcaaagatcagatagttgtagatatgcggcattatttctgagggctctgttctgttccattgatctatatctctgttttggtaccagtaccatgctgttttggttactgtagccttgtagtatagtttgaagtcaggtagtgtgatgcctccagctttgttcttttggcttaggattgacttggcaatgcgggctcttttttggttccatatgaactttaaagtagttttttccaattctgtgaagaaagtcattggtagcttgatggggatggcattgaatctgtaaattaccttgggcagtatggccattttcacgatattgattcttcctacccatgagcatggaatgttcttccatttgtttgtgtcctcttttatttccttgagcagtggtttgtagttctccttgaagaggtccttcacatcccttgtaagttggattcctaggtattttattctctttgaagcaattgtgaatgggagttcacccatgatttggctctctgtttgtctgttgttcgtgtataagaatgcttgtgatttttgtacattgattttgtatcctgagactttgctgaagttgcttatcagcttaaggagattttgggctgagacaatggggttttctagataaacaatcatgtcgtctgcaaacagggacaatttgacttcctcttttcctaattgaataccctttatttccttctcctgcctgattgccctggccagaacttccaacactatgttgaataggagcggtgagagagggcatccctgtcttgtgccagttttcaaagggaatgcttccagtttttgcccattcagtatgatattggctgtgggtttgtcatagatagctcttattattttgaaatatgtaccatcaatacctaatttattgagagtttttagcatgaagggttgttgaattttgtcaaaggctttttctgcatctattgagataatcatgtggtttttgtctttggctctgtttatatgctggattacatttattgatttgcgtatattgaaccagccttgcatcccagggatgaagcccacttgatcatggtggataagctttttgatgtgctgctggattcggtttgccagtattttattgaggatttttgcatcaatgttcatcaaggatattggtctaaaattctcttttttggttgtgtctctgcccggctttggtatcagaatgatgctggcctcataaaatgagttagggaggattccctctttttctattgattggaatagtttcagaaggaatggtaccagttcctccttgtacctctggtagaattcggctgtgaatccatctggtcctggactctttttggttggtaaactattgattattgccacaatttcagagcctgttattggtctattcagagattcaacttcttcctggtttagtcttgggagagtgtatgtgtcgaggaatgtatccatttcttctagattttctagtttatttgcgtagaggtgtttgtagtattctctgatggtagtttgtatttctttctctctggctgcccttaacattttttccttcatttcaactttggtgaatctgacaattatgtgtcttggagttgctcttctcgaggagtatctttgtggcgttctctgtatttcctgaatctgaacgttggcctgccttgctagattggggaagttctcctggataatatcctgcagagtgttttccagcttggttccattctccacatcactttcaggtacaccaatcagacgtagatttggtcttttcacatagtcccatatttcttggaggctttgctcatttctttttattcttttttctctaaacttcccttctcgcttcatttcattcatttcatcttccattgctgataccctttcttccagttgatcgcatcggctcctgaggcttctgcattcttcacgtagttctcgagccttggttttcagctccatcagctcctttaagcacttctctgtattggttattctagttatacattcttctaaatttttttcaaagttttcaacttctttgcctttggtttgaatgtcctcccatagctcagagtaatttgatcgtctgaagccttcttctctcagctcgtcaaaatcattctccatccagctttgttctgttgctggtgaggaactgcgttcctttggaggaggagaggcgctctgcgttttagagtttccagtttttctgttctgttttttccccat

SEQ ID NO: 121419 - DNA, 760 bp, Homo sapiens
atggaagccatcacaaacggcatgatgaacctgaatcgccagcggcatcagcaccttgtcgccttgcgtataatatttgcccatggtgaaaacgggggcgaagaagttgtgcatattggccacgatctggctctgaaggggctacgtgttttgctcgtggaaggtaacgacccccagggaacagcctcaatgtatcacggatgggtaccagatcttcatattcatgcagaagacactctcctgcctttctatcttggggaaaaggacgatgtcacttatgcaataaagcccacttgctggccggggcttgacattattccttcctgtctggctctgcaccgtattgaaactgagttaatgggcaaatttgatgaaggtaaactgcccaccgatccacacctgatgctccgactggccattgaaactgttgctcatgactatgatgtcatagttattgacagcgcgcctaacctgggtatcggcacgattaatgtcgtatgtgctgctgatgtgctgattgttcccacgcctgctgagttgtttgactacacctccgcactgcagtttttcgatatgcttcgtgatctgctcaagaacgttgatcttaaagggttcgagcctgatgtacgtattttgcttaccaaatacagcaatagtaatggctctcagtccccgtggatggaggagcaaattcgggatgcctggggaagcatggttctaaaaaatgttgtacgtgaaacggatgaagttgacggaatcc

SEQ ID NO: 121420 - DNA, 1314 bp, Homo sapiens
gtgggctgtaaggcagccatggtctttttccaatattgtgtcatggctaacttcttctggctgctggtggagggcctctacctgtacaccctgcttgccgtctccttcttctctgagcggaagtacttctgggggtacatactcatcggctggggtatgaccgttcagctggatattacggcctttttaaagaccgtaaagaaaaataagcacaagttttatccggcctttattcacattcttgcccgcctgatgaatgctcatccggagttccgtatggcaatgaaagacggtgagctggtgatatgggatagtgttcacccttgttacaccgttttccatgagcaaactgaaacgttttcatcgctctggagtgaataccacgacgatttccggcagtttctacacatatattcgcaagatgtggcgtgttacggtgaaaacctggcctatttccctaaagggtttattgagaatatgtttttcgtctcagccaatccctgggtgagtttcaccagttttgatttaaacgtggccaatatggacaacttcttcgcccccgttttcaccatgggcaaatattatacgcaaggcgacaaggtgctgatgccgctggcgattcaggttcatcatgccgtttgtgatggcttccatgtcggcagaatgcttcaatctgtgacagataaccctcagattatccgtcgtcatggaagtgatatcgcggaaggaaaatacgatatgagtcgtctggcggcctttctttttctcaatgtatgagaggcgcattggagttctgctgttgatctcattaacacagacctgcaggaagcggcggcggaagtcaggcatacgctggtaactttgaggcagctggtaacgctctatgatccagtcgattttcagagagacgatgcctgacgcatccggcttacgatactgacacagggattcgtataaacgcatggcatacggattggtgatttcttttgtttcactaagccgaaactgcgtaaaccggttctgtaacccgataaagaagggaatgagatatgggttgatatgtacactgtaaagccctctggatggactgtgcgcacgtttgataaaccaaggaaaagattcatagcctttttcatcgccggcatcctcttcagggcgataaaaaaccacttccttccccgcgaaactcttcaatgcctgccgtatatccttactggcttccgcagaggtcaatccgaatatttcagcatatttagcaacatggatctcgcagataccgtcatgttcctgtagggtgccatcagattttctgat

SEQ ID NO: 121421 - DNA, 552 bp, Homo sapiens
atggaagccatcacgaacggcatgatgaacctgaatcgccagcggcatcagcaccttgtcgccttgcgtataatatttgcccatggctccttccaagaggacataagagataccagccattgcctgccctgggcagcccctgggaagagcccaagagatcaggaccagctcacaggcgtcatcgtggtccagttactcctagcttgttcctggcaccaggcttctcctccatgtgacctcgtctgtgaactctgtgaccgactcccgggcggaaaatatgggatggacccgggcctttttaagaaggacctcctgcagaattcccccaattccatgttcggagtctccaataacccccacgggattgtggtcccagcctcagcgctccagcagggcaacatcgccatgacaaccgtcaactcacaagttgtgtcagacaattacatcccttcactctcagaagactgcagggaaccaaacatcgaggctctgaatggcaactgctgtgacactgaggtacctctccggggcccctggtttagcagggcttga

SEQ ID NO: 121422 - DNA, 504 bp, Homo sapiens
tcaggataattgtttcagcatcgcaaccgcatcagactccggcatcgcaaactgcacccggtgccgggcagccacatccagcgcaaaaaccttcgtgtagactacaaaagaactgatggacgtatgtcccatcagcccccgcagaaccaacagcggtataccggcatacagcatgtgcatcgcataggaatggcggaacgtatgtggtgtgaccggaacagagaacgtcacaccgtcagcagcagcggcggcaaccgcctccccaatccaggtcctgaccgtctcgtccgtcacttcccagatccgagctttctctgtccttcctgtgcgacggttacgccgctccatgagcttatcgcgaataaatacgtggccaatatggacaacttcttcgcccccgttttcaccatgggcaaatattatacgcaaggcgacaaggtgctgatgccgctggcgattcaggttcatcatgccgtttgtgatggcttccatgtcggcagaatg

SEQ ID NO: 121423 - DNA, 1784 bp, Homo sapiens
aacatttttaagaaccatgcttcccagcgcatccggaatttgctcctctatccacgggggctgagagccatcactattgctgtatttggtaagcaaaatacgtacatcaggctcgaaccctttaagatcaacgttcttgagcagatcacgaagcatatcgaaaaactgcagtgcggaggtgtagtcaaacaactcagcaggcgtgggaacaattagtacatcagcagcacatactaccctcatcgtgccgatacccaggttaggcgcgctgtcaataactaccccaccatagtcatgagcaacagtttcaatggccagtaggagcatcaagtgtggatcggtgggcagtttaccttcatcaaatttgcccattaactcagtttcaatacggtgcagagccagacaggaaggaataatgtcaagctctggccagcaagtgggcgctcctgcataagtgacatctgccccgccctgccactcatcgcagtactgttgtaattcattaagcattctgccgacatggaagccatcacaaacggcatgatgaacctgaatcgccagcggcatcagcaccttgtcgccttgcgtataatatttgcccatggaggagcgactcaagccttcgcgaaagaaaataaccaaaaagcatacaaagaaacgtacggcgtctctcatattacacgccatgatatgctgcagatccctaaacagcagcaaaacgaaaaataccaagtgcctcaattcgatcaatcaacgattaaaaatattgagtctgcaaaaggacttgatgtgtgggacagctggccgctgcaaaacgctgacggaacagtagctgaatacaacggctatcacgttgtgtttgctcttgcgggaagcccgaaagacgctgatgacacatcaatctacatgttttatcaaaaggtcggcgacaactcaatcgacagctggaaaaacgcgggccgtgtctttaaagacagcgataagttcgacgccaacgatccgatcctgaaagatcagacgcaagaatggtccggttctgcaacctttacatctgacggaaaaatccgtttattctacactgactattccggtaaacattacggcaaaaaaagcctgacaacagcgcagcattctgccgacatggaagccatcacaaacggcatgatgaacctgaatcgccagcggcatcagcaccttgtcgccttgcgtataatatttgcccatgctcctgaaaatctcgataactcaaaaattcgcccggtagtgatcttatttcattatggtgaaagttggaacctcttacgtgccgatcaacgtctcattttcgccaaaagttggcccagggcttcccggtatcaacagggacaccaggatttatttattctgcgaagtgatcttccgtcacaggtatttattcgcgataagctcatggagcggcgtaaccgtcgcacaggaaggacagagaaagcgcggatctgggaagtgacggacagaacggtcaggacctggattggggaggcggttgccgccgctgctgctgacggtgtgacgttctctgttccggtcacaccacatacgttccgccattcctatgcgatgcacatgctgtatgccggtataccggtgaaaggttctgcaaagcctgatgggacataagtccatcagttcaacggaagtctacacgaaggtttttgcccctgatggggcctgccccgcacccggcggcagtttggcaatgccggaaactcgatgccggttggcaatgcttgaaacaattatcctga

SEQ ID NO: 121424 - DNA, 1712 bp, Homo sapiens
atgccaaaggaaaaaaatccacaatataaatttccagacattgcagaaactgtggaagacccagcaacgccgcgggaaaccacaagcagcgcccagaaacaaccaaccatcacggggttggcagctcgggacggcccccaacaacgaaacccaaccgaaccaccgcacaacaaaacgggaaaggagggacaccacacaccggcaagggaacaagcgggcacggaggcagcgacccgacgcaaggacaaaggggcccaaaaggacacagaaagaaagaataagaccggcgacgggccagcacaacaggggtttattgagaatatgtttttcgtctcagccaatccctgggtgagtttcaccagttttgatttaaacgtggccaatatggacaacttcttcgcccccgttttcaccatgggcaaatattatacgcaaggcgacaaggtgctgatgccgctggcgattcaggttcatcatgccgtttgtgatggcttccatgtcggcagaatgcttaatgaattacaacagtactgcgatgagtggcaggcgcggggcggattttgccgatttcggaaccaccatcaaacaggattttcgcctgctggggcaaaccagcgtggaccgcttgctgcaactctctcagggccaggcggtgaagggcaatcagctgttgcccgtctcactggtgaaaagaaaaaccaccctggcgcccaatacgcaaaccgcctctccccgcgcgttggccgattcattaatgcagctggcacgacaggtttcccgactggaaagcgggcacccgtccagttggatattacggcctttttaaaggaccgtaaagaaaaaataagcacaagttttatccgggcctttattcacattcttgccccccctgatgaatgctcatccggagttccgtaggccaatgaaagccggtgagctggtgatatgggatagtgttcacccttgttacaccgttttccatgagcaaactgaaacgttttcatcgctctggagtgaataccacgacgatttccggcagtttctacacatatattcgcaagatgtggcgtgttacggtgaaaacctggcctatttccctaaagggtttattgagaatatgtttttcgtctcagccaatccctgggtgagtttcaccagttttgatttaaacgtggccaatatggacaacttcttcgcccccgttttcaccatgggcaaaatattatacgcaaggcgacaaggtgctgatgccgctggcgattcaggttcatcatgccgtttgtgatggcttccatgtcggcagaatgcccccagtaggggcagactgacacttcacacggccgggtactcctctgagacaaaacttccagaggaacgatcagacagcagaatttacggttcacgaaaaaccgctgttctgcaaacaccgctgctgatacccaggcaaacagggtctggagtggacctctagcaagctccaacagacctgcagctgagagtcctgtccttggaggggacatatgagacctaggcttctgagggtggccgatgaccagcaacagcaacaaaccagcactggccagcaggcccatagcctccacgcaccggcctcgcacgtcctccctcccatgggcaaatattatacgcaaggcgacaaggtgctgatgccgctggcgattcaggttcatcatgccgtttgtgatggcttccat

SEQ ID NO: 121425 - DNA, 1218 bp, Homo sapiens
tcatgttttcctggatggccttaatgcttctggatgtttgtcaatgtctgggcattgaggagttaggtatattatagccttcacagtgttctcttttttataaccatctttcttgtgaaggcttcccaagaatttaaagaggaatcgggtgttgtgatgtaagtctttggtcactgcagccatatctgtgccaggggcaacccaaggccagtacattgtggttcttgcaaacttgtagagataccgccttggtggtcttaggtaagatccggaagatttatctggattccagccagtgactcctgttctctttcctttccctagaatgacagtttctccatagtgagttgccttgaggcactgtccctcgccctcggtggccagatctggccacagcttggacacttccttgtctgggtccaagttgcactcatgggggttgaggccacagtgggcatccgtaagccagagagccttgaatgagcccttgccccatgggggcagcctgagtgcctctagggcaggtgctgagtccccttcacccccgtatccatgatgccagtgtgatgccaggcttgccgctcgggtcccttccacgctgtcaaagctttgttctttcactctttgcaataaatcttgctgctgctcgctctttgggtccacactgcctttatgagctgtaacactcaccacgaaggtctgcagcttcactcctgaagccagcgagaccacgaacccaccgggaggaacgaacaactccagacgcaccgccttaagagctgtagcactcaccgcgaaggtccgcagcttcactccgcgagggtccgcggcttcattcttgaagtcagtgagaccaagaacccaccaattccggacacaatagcacgtgcaccaaatagaattctcacctgggggactgtgggaatcctgcccaagagcctcctcctccactggggacccagggaggcctcctgaaagaagaggtgctgcagccaggaagacagtgggagtccagggggtggggtacagcttgcccaggaagctctgccccctgttctcccggaccacgtatccccacacgagtctcaggaaggactgtcttgagtctgacaccactgctgagtaggggagtgacagcagctgccttcctttgctgctggcgatggcaatacaagtgacccttgaacaacgcaggggtggggcgccgaacccccacat

SEQ ID NO: 121426 - DNA, 438 bp, Homo sapiens
ccatttatttatttatttattggtggtcttgctgtggtgtccaggctggcctcaaactgctggactcaaaggatcctcctgcctcagcctcctgagtaactgtaattataggccaccactctaggctctacttcttggaacgcaaaaactaccgagagtctggaattttatcatggtccgaagaatacaggatggagtgaagccatctgtgtccatagcagagagagagatgaaatcgcgaaagtctgcagcttcactcctgagccagcgagaccacgaacccaccagaaggaagaaactccgaacacatccgaacatcagaaggaacaaactccagacgcgccaccttaagagctgtaacactcactgcgagggtccatggcgtcattcttgaagtcagtgagaccaagaacccaccaattccggacacagtatgat

SEQ ID NO: 121427 - DNA, 342 bp, Homo sapiens
ttaacttttccccgattcaacacattcctcgatcaaggttccataacaggatttttctatataagtatggtaagtaaaggattgttgtatttttcctccgtagtggaaagactgataatgagaggtgacagcgtgctggcagtcctcgcagcccttgctcgctctcagcgcctcctctgcctgggctcccactttggcggcacttgaggagcccttcagcccgccgctgcactgtgggggcccctttctgggctggccaaggccggagccggctccctcaggttgcagaaaagctgctgcttcaccctccgctgtgcacaggagactgcgaaatttggccag

SEQ ID NO: 121428 - DNA, 882 bp, Homo sapiens
atgctgtatctgttcgttgaccagatcagaaaatctgatggcaccctacaggaacatgacggtatctgcgagatccatgttgctaaatatgctgaaatattcggattgacctctgcggaagccagtaaggatatacggcaggcattgaagagtttcgcggggaaggaagtggttttttatcgccctgaagaggatgccggcgatgaaaaaggctatgaatcttttccttggtttatcaaacgtgcgcacagtccatccagagggctttacagtgtacatatcaacccatatctcattcccttctttatcgggttacagaaccggtttacgcagtttcggcttagtgaaacaaaagaaatcaccaatccgtatgccatgcgtttatacgaatccctgtgtcagtatcgtaagccggatggctcaggcatcgtctctctgaaaatcgactggatcatagagcgttaccagctgcctcaaagttaccagcgtatgcctgacttccgccgccgcttcctgcaggacccccggcagtcctcgcagccctcgctcgctctcggagcctcttctgcctggactcccattttggcggcacttgagaagcccttcagcccgccgctgcactgtgggagcccctttctgggctggccaaggccggagctggctccctcagcttgcagggaggtgaggagggagaggcgccagcgggaaccggggctgcacctggcgcttgcgtgccagctggagttccgggctgaggagtgtgggcgcactgtgtgggactggcaggcagctccacctacggcccaggtgtgggattcactgggtgaagccagctgggctcctgagtctggtggggacttggagaactttatgtctagctag

SEQ ID NO: 121429 - DNA, 4491 bp, Homo sapiens
ggctcgagcggccgcccgggcaggttgagatcgtgtttcatttcaggaagatatatgcgtcaggaaaatttctatcttcttttgtattatcaaggagatatttggagcagagtcaaccctctcagttacataaaataaaaaatggcatattcttggcaaacggatccaaatcctaatgaatcacacgaaaagcagtatgaacaccaagaatttctctttgtaaatcaaccccattcttctagccaagtcagtctgggttttgatcagatagtagatgagatcagtggcaaaattccacactacgagagtgaaattgatgaaaacaccttttttgtgcccactgcaccaaaatgggactcaacagggcattcattaaatgaagcacaccaaatatccttgaatgaattcacttctaaaagccgtgaactctcctggcatcaagttagcaaagcaccagcaattggttttagtccttctgtgttaccaaaacctcaaaatacgaataaagaatgctcctggggaagccccataggaaaacatcatggtgctgatgattccagattcagtattttagctccatcattcacaagtttggataaaattaatctagagaaagaattagaaaatgaaaatcataactaccatataggatttgaaagtagcattcctccaacaaattcatccttctcaagtgacttcatgccgaaagaagagaataaaaggagtggacatgtgaacattgtggaaccatctttgatgcttttgaaaggctctcttcaacccggaatgtgggaaagtacatggcagaagaatatagagtcaataggttgttccattcagctagtggaagtacctcaaagcagcaatacgagtctggcctctttttgcaacaaagtaaaaaaaatcagagaaagatatcatgcagctgatgttaatttcaattctgggaagatctggagcactactacagcatttccgtatcagctcttttctaagaccaagtttaatatacatatttttattgataactcaacacaacctcttcattttatgccatgtgctaattatcttgtcaaagatctaattgcagaaattctgcatttttgcacaaatgaccagctactccccaaagatcatattctaagtgtatgtggctctgaagaatttttacaaaacgaccactgtttggggagccacaaaatgtttcaaaaagataaatctgttattcagctccacctgcagaaaagtagggaagctccaggaaagctatctcgaaagcatgaagaggaccacagtcagttttatctgaatcaacttctagaatttatgcatatttggaaagtatccagacaatgtctcttaacactcatcagaaaatatgacttccacctgaaatacctattgaaaacccaggaaaacgtgtataatattattgaagaagttaaaaaaatatgcagtgttctagggtgtgtggaaaccaaacaaattacagatgcagtaaatgaactaagtctaattcttcagagaaaaggagagaatttttatcaaagttcagagacttcagcaaaaggcttgatagagaaggtaacaactgaactatccacatccatctaccagctaatcaatgtctactgtaacagcttttatgcagattttcagcctgtaaatgtacctagatgcacttcctatctaaatcccgggcttccttcccacctcagcttcacagtgtatgcagcacacaacattccagaaacctgggtgcacaggatcaattttccccttgaaataaagtcacttccaagggaatccatgctcactgtaaaactgtttgggattgcctgtgcaaccaacaatgcaaatttactggcgtggacttgtcttccactgtttccaaaagaaaaatccattctcgggtctatgctgttcagcatgacattacagagtgagcctcccgtagaaatgataactccaggagtgtgggatgtaagtcagccatccccggtgaccctgcagattgattttccagctactgggtgggagtatatgaaacctgattctgaagagaatagaagtaatcttgaagagccactaaaggagtgtataaaacatattgccagactttcacagaaacagactcccctactactctctgaagaaaagaaaagatatttatggttttatcgcttctactgcaataatgaaaactgctcccttcctttagtcctgggtagtgcccctggatgggatgaaaggactgtttcagaaatgcataccattttgagaagatggacattttctcaacctttagaggctcttgggcttttgacttccagttttccagatcaagaaattcgtaaagtggcagttcaacaattagacaacctcttgaatgatgaactactggaatatctcccacagctagttcaggctgtcaagtttgaatggaaccttgagagtcctttagtgcaacttctactccaccgctccttgcagagcatccaggttgcccatcgtctttactggctgctaaaaaatgcagaaaatgaagcttattttaaaagctggtatcagaagctactagctgctctccaattctgtgcaggtaaagccttgaatgatgagttttccaaggagcagaaacttatcaaaattctgggagatattggggaaagagtcaagtctgccagtgaccatcaaagacaggaggtactgaagaaagaaattggcagactagaagagttctttcaagatgtaaatacttgtcatcttcctctgaaccctgccctatgtataaaagggattgatcacgatgcatgttcatattttacatctaatgctttgccattgaagattactttcatcaatgctaatctgatgggcaaaaacatcagcattatttttaaggctggagatgatcttcgtcaggatatgcttgttctgcagcttattcaagtgatggacaatatttggctgcaggaaggcttggatatgcaaatgatcatttatagatgtctatccacaggaaaagaccaacgattggtgcagatggtacctgatgctgtgaccctagcaaagattcatcgccattctggactgataggaccattgaaagaaaataccattaaaaagtggttcagtcagcacaaccacttaaaggcagattatgaaaaggccttgaggaactttttctactcctgtgctggctggtgtgtggtaacattcatcctgggagtatgtgaccgtcacaatgataatatcatgctgacaaagtcgggccacatgtttcatattgactttggaaaattcttaggtcatgcacaaacatttggagggataaaaagggaccgagctcctttcatttttacttcagagatggaatactttattacagagggtgggaaaaacccacagcattttcaagattttgtggaactttgctgtcgtgcttataatattatcagaaagcacagccaactgctcttgaacctgctggaaatgatgctgtatgcaggactgcctgagctaagtggaattcaagacctgaaatatgtgtataataatcttcgtccacaagacacagacctggaagcaacaagtcattttaccaagaaaataaaggaaagtctggagtgtttccctgttaaattgaataacttgatccacacacttgcacaaatgtcagccataagccctgccaaatctacttcacagacttttcctcaggaatcctgtttgctgagtacaactaggtcgattgaaagagcaacaattttagggttcagcaagaaatccagtaatctgtatctgatccaggtgacacacagcaacaacgaaacaagcctgacagaaaaatcatttgagcagttttcaaaacttcacagccaacttcagaagcagtttgcatcactgactctcccagagtttcctcattggtggcacctaccttttacaaattcagatcacagaagattcagagatctaaatcattacatggaacagatattaaatgtatcacatgaagttacaaacagtgattgtgtacttagctttttcctctctgaggctgtgcaacaaacagttgaatcatcacctgtgtacctaggtgagaagaagtttccagacaagaagcctaaggtgcagttagtcatatcctacgaggatgtgaagctgaccatactagtgaaacacatgaaaaacattcatctcccagatggctctgcgcccagtgcacatgttgaattttatcttttaccatatcccagtgaagttctgaggaggaaaacaaaatctgttccaaaatgtacggaccccacttacaatgaaattgtagtatatgatgaagtcacagagctccaaggacatgtcttaatgcttattgtgaagagtaaaactgtatttgtgggagcaattaacatccgactctgtagtgtcccactcgataaagaaaaatggtatccattaggaaacagtataatttcaccattgctatga

SEQ ID NO: 121430 - DNA, 936 bp, Homo sapiens
atgaagccgcggaccttcgcggtgagtgttacagctcttaaggtggcgcgtctggagtttgttctttctgatgttcggatgtgttcggagtttcttccttctggagtgaagctgcggacctacgcggtgagtgttacagctcttaaggcggtgtgtctggagttgttcgttcctcccggtgggttcgtggtcccgctggtttcaggagtgaagctacagaccttcgcggtggtcgatgggactgggcgccgtggagcagggggccgcgctcgtaggggaggctcggctgcacaggagcacatggaggcttggggaggctcaggcatggctggctgcaggtcccgagccttgccccgcgggaaggcagctaaggcccggcgagaaatccagcgcagcgctgctgagggagccagctccggccttggccagcccagaaaggggctcccacacagcagcggccggctgaagggctcctcaagtgccgccaaagtgggagcccaggcagaggaggcgccgagagcgagcgagggctgtgaggactgccagcacgctgtcacctctcacaggtactttgaaaaatccttacatttttctttacttgttcttgttgtggttaagatgctgtatgcaggactgcctgagctaagtggaattcaagacctgaaatatgtgtataataatcttcgtccacaagacacagacctggaagcaacaagtcattttaccaaaccacagtcttctcaaggtttttcagagcctgcgttggctgaagttgaacaaagatatattctccagcctttctcaggcactcatccttttatccggaatacctcaagcatcagcagagaacagaagttcctttctggaactgctatctctatgctaccaccaggagtcccctggatatttggttccagatctgctttgctgccctga

SEQ ID NO: 121431 - DNA, 1001 bp, Homo sapiens
atgatgacaggattaaatccacacataccaatattgaacttaaatgtaaatgagctaaatgctccaattaaaaggcacagggtggcaatttggacaaagaaggaaaacccaatggtacgctgtcttcaagaaacccatctcacatgcaatgacactcatagtgtgtccggaattggtgggttcttggtctcactgacttcaagaatgaagccgcggaccctcgcggtgagtgttacagctcttaaggtggcacgtctggagtttgttccttctgatgttcggatgtgttcggagtttcttccttctggagtgaagctgcagaccttcgcggtgagtgttacagctcttaaggcagcacgtctggagttgttcgttcctcctggtgggctcgtggtctcactggcttcaggagagaagctgcagatcttcgcagtgagtgttacagctcataaaagcagtgtggacccaaagaactcaggagcccagctggcttcacctagtggatcccgcaccggggctgcaggtggagctgcctgccagtcccacgcggtacgctcacactcctcagcccttgggtggttgatgggactgggcgccgtggagcagggggcggtgctcgttggggaggctcgggccacacaggagcccacggagggctggagaggctcaggcatggcgggctgcaggtcccaagccctgcctgcctggggctggtggggccagccggccgctccgagtgcggggtccgacaagcccacgcccacccagaactcacgctggccagcaagcaccatgcgcagccccagttcctgcccgtgtctctccctccacacctccccgcaagctgagggagcctgctccggccttggccagcccagaaaggggctcccacagtgcagcggcaggctgaagggctcctcaagtgctgccaaagtggaagcccaggcagaggaggcgccgagagccagcgagggctgtgaggactgccagcacgctgtcat

SEQ ID NO: 121432 - DNA, 3101 bp, Homo sapiens
atggttggaggatgcaggtggacagaagacgtggagcctgcagaagtaaaggaaaagatgtcctttcgggcagccaggctcagcatgaggaacagaaggaatgacactctggacagcacccggaccctgtactccagcgcgtctcggagcacagacttgtcttacagtgaaagcgccagcttctacgctgccttcaggacacagacgtgcccaatcatggcttcttgggacttggtgaattttattcaagcaaattttaagaaacgagaatgtgtcttctttaccaaagattccaaggccacggagaatgtgtgcaagtgtggctatgcccagagccagcacatggaaggcacccagatcaaccaaagtgagaaatggaactacaagaaacacaccaaggaatttcctaccgacgcctttggggatattcagtttgagacactggggaagaaagggaagtatatacgtctgtcctgcgacacggacgcggaaatcctttacgagctgctgacccagcactggcacctgaaaacacccaacctggtcatttctgtgaccgggggcgccaagaacttcgccctgaagccgcgcatgcgcaagatcttcagccggctcatctacatcgcgcagtccaaaggtgcttggattctcacgggaggcacccattatggcctgatgaagtacatcggggaggtggtgagagataacaccatcagcaggagttcagaggagaatattgtggccattggcatagcagcttggggcatggtctccaaccgggacaccctcatcaggaattgcgatgctgagggctattttttagcccagtaccttatggatgacttcacaagagatccactgtatatcctggacaacaaccacacacatttgctgctcgtggacaatggctgtcatggacatcccactgtcgaagcaaagctccggaatcagctagagaagtatatctctgagcgcactattcaagattccaactatggtggcaagatccccattgtgtgttttgcccaaggaggtggaaaagagactttgaaagccatcaatacctccatcaaaaataaaattccttgtgtggtggtggaaggctcgggccagatcgctgatgtgatcgctagcctggtggaggtggaggatgccctgacatcttctgccgtcaaggagaagctggtgcgctttttaccccgcacggtgtcccggctgcctgaggaggagactgagagttggatcaaatggctcaaagaaattctcgaatgttctcacctattaacagttattaaaatggaagaagctggggatgaaattgtgagcaatgccatctcctacgctctatacaaagccttcagcaccagtgagcaagacaaggataactggaatgggcagctgaagcttctgctggagtggaaccagctggacttagccaatgatgagattttcaccaatgaccgccgatgggagaagagcaaaccgaggctcagagacacaataatccaggtcacatggctggaaaatggtagaatcaaggttgagagcaaagatgtgactgacggcaaagcctcttctcatatgctggtggttctcaagtctgctgaccttcaagaagtcatgtttacggctctcataaaggacagacccaagtttgtccgcctctttctggagaatggcttgaacctacggaagtttctcacccatgatgtcctcactgaactcttctccaaccacttcagcacgcttgtgtaccggaatctgcagatcgccaagaattcctataatgatgccctcctcacgtttgtctggaaactggttgcgaacttccgaagaggcttccggaaggaagacagaaatggccgggacgagatggacatagaactccacgacgtgtctcctattactcggcaccccctgcaagctctcttcatctgggccattcttcagaataagaaggaactctccaaagtcatttgggagcagaccaggggctgcactctggcagccctgggagccagcaagcttctgaagactctggccaaagtgaagaacgacatcaatgctgctggggagtccgaggagctggctaatgagtacgagacccgggctgttggtgagtccacagtgtggaatgctgtggtgggcgcggatctgccatgtggcacagacattgccagcggcactcatagaccagatggtggagagctgttcactgagtgttacagcagcgatgaagacttggcagaacagctgctggtctattcctgtgaagcttggggtggaagcaactgtctggagctggcggtggaggccacagaccagcatttcatcgcccagcctggggtccagaattttctttctaagcaatggtatggagagatttcccgagacaccaagaactggaagattatcctgtgtctgtttattatacccttggtgggctgtggctttgtatcatttaggaagaaacctgtcgacaagcacaagaagctgctttggtactatgtggcgttcttcacctcccccttcgtggtcttctcctggaatgtggtcttctacatcgccttcctcctgctgtttgcctacgtgctgctcatggatttccattcggtgccacacccccccgagctggtcctgtactcgctggtctttgtcctcttctgtgatgaagtgagacagggccggccggctgctcccagtgcggggcccgccaagcccacgcccacccggaactccatctggcccgcaagctccacacgcagccccggttcccgctcacgccactccttccacacttccctgcaagctgagggtgccagctctggccttggccagcccagaaaggggctcccacagtgcagcggtgggctgaaggggctcctcaagtgcggccaaagtgggagcccaggcagaggacgcgcccagagtgagcgagggctgtgaggactgccagcaagcacgctgtcacctctcagaagcgtaagacagcaatggaccaaacagacgaagatctcttcccctatggagcattctaccagttcctgatgatttccaggagctttcgaggagaggagatgagcatcggcaagcagcactaa

SEQ ID NO: 121433 - DNA, 1641 bp, Homo sapiens
tcattgttcaattcccacctatgagtgagaatatgcgtgaactagtttacagtcccaccaacagtgtaaaagtgttcctatttctccacatcctctccagcacctgttgtttcctgactttttaatgattgccattctaactggtgtgagatgatatctcatagtggttttgatttgcatttctctgatggccagtgatgatgagcatttcttcatgtgttttttggctgcataaatgtcttcttttgagaagtgtctgttcatgtccttcgcccactttttgatggggttgtttgtttttttcttgtaaatttgtttgagttcattgtagattctggatattagccctttgtcagatgagtaggttgcgaaaattttctcccatgttgtaggttgcctgttcactctgatggtagtttcttttgctgtgcagaagctctttagtttaattagatcccatttgtcaattttggcttttgttgccattgcttttggtgttttggacatgaagtccttgcccacgcctatgtcctgaatggtaatgcctaggttttcttctagggtttttatggttttaggtctaaagtttaaatctttaatccatcttgaattgatttttgtataaggtgtaaggaagggatccagtttcagctttctacatatggctagccagttttcacagcaccatttattaaatagggaatccttttcccattgcttgtttttctcaggtttgtcaaagataagatagttgtagatatgcggcattatttctgagggctctgttctgttccattgatctatatctctgttttggtaccagtaccatgctgttttggttactgtagccttgtagtatcgtttgaagtcaggtagtgtgatgcctccagctttgttcttttggcttaggattgacttggcgatgcgggctcttttttggttccatatgaactttaaagtagttttttccaattctgtgaagaaagtcattggtagcttgatggggatggcattgaatctgtaaattaccttgggcagtatggccattttcacgatattgattcttcctacccatgagcatggaatgttcttccatttgtttgtgtcctcttttatttccttgagcagtggtttgtagttctccttgaagaggtccttcacatcccttgtaagttggattcctaggtattttattctctttgaagcaattgtgaatgggagttcacccatgatttggctctctgtttgtctgttgttggtgtataagaatgcttgtgatttttgtacattgattttgtatcctgagactttgctgaagttgcttatcagcttaaggagattttgggctgagacgatggggttttctagataaacaatcatgtcgtctgcaaacagggacaatttgacttcctcttttcctaattgaataccctttatttccttctcctgcctgattgccctggccagaacttccaacactatgttgaataggagcggtgagagagggcatccctgtcttgtgccagttttcaaagggaatgcttccagtttttgcccattcagtatgatattggctgtgggtttgtcatagatagctcttattattttgagatacgtcccatcaatacctaatttattgag

SEQ ID NO: 121434 - DNA, 1464 bp, Homo sapiens
ctcagagcacatgagtcaggtgcgagtggccaggagacgctttcctgaggaccttacgtagcctctggcccaggcaggctgagtgggcagctctgtctttactatgctgtgtacctctgggcaacctgctaccctctctgtggctcccacgcagatgctgcatggggtcagtcagaaattcagcacaagtcaaagcagagagaagaaaacatcctgtgagctcaccgacagcaacccctgggggcctggtaaagagcaacaactgatgcaactccaccttttgcttggtagccaaaacctgagagctcagagcctaatccagggaacggacaaaacctcacctccccagtcacccccacctttccacttccagtgccatcaaggcacggtcatcaaagccaggcaggtctgagtgctgctctgcaacttactacctttatgaccatacgcaagtcataagtctggccatacgcactactgccagagaccccattttattctgtaagaagtgacaggaaggcatagcttgttccccacaaaataccccatcttcaattttctcccttgcttggctccaacggcagagaaaaatgtgcatggacaccaaaccatctccaagaagcagccattaggtaatctgggacatggcattgacaatggcaccgggcacagggcttctgacatcatataagcaagggccgaagtcaaattgtccctgtttgcagatgacatgattgtatatttagaaaaccccatcatctcagcccaaaatctcctcaagctgataagcaagttcagcaaagtctcaagatacaaaattaatgtgcaaaaatcacaagcattcctatacaccaataacagacaaacagagagccaaatcatgagtgaactcccattcacaattgctacaaagagaataaaatacctaggaatacaacttacaagggatgtgaaggacctcttcaaggagaactacaaaccactgctcaatgaaataaaggaggacacaaacaaatggaagaacattccatgctcatggataggaagaatcaatatcgtgaaaatggccatactgcccaaggtaatttatagattcagtgccatccccatcaagctaccaatgactttcttcacagaattggaaaaaacaaactggctagcaatatgtagaaagctgaaactggatttcttctttataccttacacaaaaattaattcaagatggattaaagacttaaatgttagacctaaaaccatgaaaaccctagaagaaagcctaggcaataccattcaggacataggcatcggcaaggacttcatgactaaaacaccaaaagcaatggcaacaaaagccaaaagagcttctgcacagcaaaagaaactaccatcagagtgaacaggcaacctacagaatgggagaaaatttttgcaatctatccatctgacaaagggttaatatccaga

SEQ ID NO: 121435 - DNA, 3529 bp, Homo sapiens; identical to SEQ ID NO: 120366

SEQ ID NO: 121436 - DNA, 1314 bp, Homo sapiens
caagatgagtatcatatggttcatctagtatgtacttctcggactcctcccagttctccaaaatccagcaccaatagagaaagtcatgaagcattggcatccagcagcaattctagttcagatcattcaggatcaacaactccatcatctggtcaagaaaccttgtctttagctgtgggttcttcctcagaaggattgaggcagcgtacccttccacaagcacaaactgaccaagcacagagtcaccagtttccatatgtaatgcaaggaaatatggccatcagagagtactataaacacctctacgcaaataaactagaaaatctagaagaaatggataaattcctcgacacatacaccctcccaagactaaaccaggaagaagttgaatccctgaatagaccaataacgggttctgaaattgaggcaataattaatagcctaccaaccaaaaaaagtccaagaccagacggattcacagctgaattctaccagagatgcagaaaaggcctttacaaaattcaacagctcttcatgctaaaaactctcaataaattaggtattgatgggacgtatctcaaaatagtaaaagctgtttatgacacacccacagccaatatcatactgaatgggcaaaaactggaagcattccctttgaaaactggcacaagacagggatgccgtctctcaccactccttttcaacgtagtgttggaagttctggccagggcaatcaggcaagagaaagcaataaagggtattcaattaggaaatgaggaagtcaaattgtccctgtttgcagatgacatgattgtatatttagaaaaccctatcatctcagcccaaaatctccttaagctgataagcaacttcagcaaagtctcaggatacaaaatcaatgtgcaaaattcacaagcattcctatacaccaataacagacagacagagagccaaatcatgagtgaactcccattcacaattgcttcaaagagaataaaatacctaggaatccaaattacaagggatgtgaacgacctcttcaaggagaactacaaaccactgctcagcgaaataaaagaggacacaaacaaatggaagaacattccatgctcatggataggaagaatcaatatcgtgaaaatggccatactgcccaaggtaattcatagattcaatgccatccccatcaagctaccaatgactttcttcacagaattggaaaaaactaaagttcatatggaaccaaaaaagagcccgcattgccaagtcagtcctaagccaaaagaacaaagttggaggcatcacgctacctga

SEQ ID NO: 121437 - DNA, 1995 bp, Homo sapiens
ttatttattaataaagaatgagatatgtggcattatttctgaaggctctgttctgttccattgatctatatctctgttttggtaccagtaccatgctgtttgcgttactgtagccttgtagtatagtttgaagtcaggtagtgtgatgcctccagctttgttcttttggcttaggattgacttggcgatgcgggctcttttttggttccatatgaactttaaagtagttttttcgaattctgtgaagaaagtcattggtagcttgatggggatggcattgaatctgtaaattaccttgggcagtatggccattttcacgatattgattcttcctacccatgagcatggaatgttcttccatttgtttgtgtcctcttttatttccttgagcagtggtttgtagttctccttgaagaggtccttcacatcccttgtaagttggattcctaggtattttattctctttgaagcaattgtgaatgggagttcactcatgatttggctctctgtttgtctgttgttggtgtataagaatgcttgtgatttttgtacattgattttgtatcctgagactttgctgaagttgcttatcagcttaaggagattttgggctgagacaatggggttttctagataaacaatcatgtcgtctgcaaacagggacaatttgacttcctcttttcctaattgaataccctttatttccttctcctgcctgattgccctggccagaacttccaacactatgtttaataggagcggtgagagagggcatccctgtcttgtgccagttttcaaagggaatgcttccagtttttgcccattcagtatgatattggctgtgggtttgtcatagatagctcttattattttgaaatacgtcccatcaatacctaatttattgagagtttttagcatgaagggttgttgaattttgtcaaaggctttttctgcatctattgagataatcatgtggtttttgtctttggctctgtttatatgctggattacatttattgatttgcgtatattgaaccagccttgcatcccagggatgaagcccacttgatcatggtggataagctttttgatgtgctgctggattcggtttgccagtattttattgaggatttttgcatcaatgttcatcaaggatattggtctaaaattatcttttttggttgtgtctctgcccggcagttcctccttgtacctctggtagaattcggctgtgaatccatctggtcctggactctttttggttggtaaactattgattattgccacaatttcagagcctgttattggtctattcagatattcaacttcttcctggtttagtcttgggagagtgtatgtgtcgaggaatgtatccacttcttctagattttctagtttatttgcatagaggtgtttgtagtattctctgatggtagtttgtatttctgtgggattggtggtgatatcccctttatcattttttattgtgtctatttgattcttctctctttttttctttattagtcttgctagcggtctatcaattttgttgatcctttcaaaaaaccagctcctggattcattgattttttgaaggattttttgtgtctctatttccttcagttctgctctgattttagttatttcttgccttctgctagcttttgaatgtgtttgctcttgcttttctagttcttttaattgagatgttagggtgtcaattttggatctttcctgctttctcttgtaggcatttagtgctataaatttccctctacacactgctttgaatgcgtcccagagattctggtatgtggtgtctttgttctcgttggtttcaaagaacatctttatttctggcttcatttcgttatgtacccagtagtcattcaggagcaggttgttcagtttccatgtagttgagcggctttgagtgagattcttaatcctgagaaataatgccgcatatctacaactatctgatctttgacaaac

SEQ ID NO: 121438 - DNA, 1653 bp, Homo sapiens
atgaaggcagaaataacaatgttctttgaaaccaatgagaacaaagacacaacgtaccataatctccgggacacatttaaagcagtgtttagagggaaatttatagcactaaatgcccacaagagaaagcaggaaagatctaaaattcacaccctaacatcacaattaaaagaactggagaagcaagagcaaacacattcaaaagctagcagaaggcaagaaataactaagatcagagcagaactgaaggagatagagacacaaaaaacccttcaaaaaatcaatgaatccaggagctggttttttgaaaagatcaacaaaattgatagaccgctagcaagactaataaagaagaaaatagagaagaatcaaatagacataataaaaaatgataaaggggatatcaccaccgatcccacagaaatacaaactaccatcagagaattctataaacacttctatgcaaatagactgaaaaatctagaagaaatggatgaattcctggaaacatacaccctcccaagactaaaccaggaagaagttgaatctctgaatagaccaataacaggctctgaaattgaggccataatcaatagcctaccaaccaaaaaaagtccaggaccagacggattcactgctgaaatctaccagagaaccaatgacaaaaaccacatgattatctcaatagatgaagaaaaggcctttgacaaaattcaacagcccttcatgctagaaatgctcaataaactaggtatttatggaatgtatatcaaaataataagaactatttatgacaaatccacagccaatatcatactgaatgtgcaaaaactggaagcattccctttgaaaactggcacaagacagggatgccctctctcaccactcctattcaacatagtgttggaagttctggccagggcaatcaggcaagagaaagaaataaagggtattcgattaagaaaagaggtattcaaaatgttcctgtttgcagatgacatgattgtatatttagaaaaccccatcatctcagccccaaatctccttaagctgataagcaacttcagcaaagtctcaggatacaaaatcaatgtgcaaaaatcacaagcattcctatacaccaataacagacaaacagagagccaaatcatgagtgaactcccattcacaattgctacaaagagaataaaatacctaggaatccaacttacaagggatgtgaaggacctcttcaaggagaactacaaaccactgctcaatgaaataaaggaggacacaaacaaatggaagaacattccatgctcgtggataggaagaattaatattgtgaaaatggccatactgcccaaggtaatttatagattcaatgccattcccatcaagctaccaatgactttcttcacagaattggaaaaaactactttaaagttcatatggaaccaaaaaagagccctcaatgccaagacaatcctaagccaaaagaacaaagctggaggcatcatgctacctgacttcaaattaccctacaaggctacatggtactggaaccaaaacacagagatagaccaatggaacaaaacagaggcctcagaaataacaccacacatctacaaccatctggtctttgacaatcctgacaaaaacaagaaatag

SEQ ID NO: 121439 - DNA, 1581 bp, Homo sapiens
atgcatttattgagtgcctacttcgtgccaggatctatgctagtaggctcaggttatatgatggtgaatatcacagatgtgtccccaccatcatggagcttcctgtgtagcatgctcatcaccagtgaaagcacatttcccccaataacaaatgtaaaaaaagggtccttgagaagtgtttataaggagtatgtgggacctccgctggtgatacccaggcaaacacagtctggagtggacctccagcaaactccaacagacctgcagctgagggacctgactgtcagaaggacaacgaacaaacagaaaggaatagcatcaacatcaaaaaaaaaggacatccacaccaaaaccccatctgtaggtcaccaatatcaaagaccaaacgtagataaaaccacaaagatggggagaaaccagagcagaaaagctgaaaattctaaaaaccagagtgccttttctcctccaaaggatcacagctcctcaccagtaatggaacaaagctggatggagaatgactttgacgagctgacagaagtaggcttcagaagcctggcagagacacaacaacaacaaaaagagaaatttagaccaatatccctgatgaacatcgatgtgaaaatcctcaataaaatactggcaaaccgaatccagcagcacatcaaaaagcttatccaccatgatcaagttggcttcatctctgggatgcaaggctggttcaacatatgcaaatcaataaacgtaatccatcacataaacagaaccaatgacaaaaaccacatgattatctcaatagatgcagaaaaggcctttgacaaaattcaacagcccttcatgctaaaaactctcaaaaaactaggtattgatgggacgtatctcaaaataataagagctatttatgacaaatccacagccagtatcatactgaatgggcaaaaactggaagcattccctttaaaagacaggacaagacaaggatgtcctctctcaccactcctattcaacatagcattggaagttctggccagggcaatcaggcaagagaaagacataaagtgtattcaattaggaaaagagaaagtcagattgtccctgtttgcagaggacatgattgtatatttagaaaaccccatcgtctcagccccaaatctctttaagctgataagcaacttcagcaaagtctcaggatacaaaatcaatgtgcaaaaatcacaagtattcctatacatcaataacagacaaagagagagccaaatcatgaatgaattcccattcacaattgccagaaggagaataaaatacctaggaatccaacttacaagggatgtgaaggacctcttcaaggagaactacaaaccactgctcaaggaaataaaagaggatacaaacaaatggaagaatatgccatgctcatggataggaagaatcaatatcatgaaaatggccatactggccaagctctatcaccctgatgtagatcattctgagttttcctggacaactacaactgtcagctgtctagactccttttcttcatcctactgcattcccaacagtgttttaatgatagaagaactttga

SEQ ID NO: 121440 - DNA, 1223 bp, Homo sapiens; identical to SEQ ID NO: 121154

SEQ ID NO: 121441 - DNA, 1314 bp, Homo sapiens
atgaaggcagaaataaagatgttctttgaaaccaaagagaacaaagacacaacataccagaatctctgggacacatttaaagcagtgtgtagagggaaatttatagcactaaatgcccacaagagaaagcaggaaagatctaaaattgacaccctaacatcacaattaaaagaactagaaaagcgagagcaaacacattcaaaagttagcagaaggcaagaaataactaagattagagcagaactgaaggaaatagagacacaaaaaacccttcaaaaaatcaatgaatccaggtcctggttttttgaaaagatcaacaaaattgatagaccgctagcaagactaataaagaagaaaagagagaagaatcaaatagatgcaataaaaaatgataaaggggatatcaccactgatcccacagagatacaaactaccatcagagaatactataaacacctctacacaaataaactagaaaatctagaagaaatggatacattcctcgacacatacaccctcccaagactaaaccaggaagaagttgaatctctgaatagaccaatgacaggttctgaaattgaggcaataattaatagcttaccaaccaaacaaagtcctggaccagatggattcacagctgaattctaccagaggtacaaggaggaactgctgataagcaacttcagcaaagtttcaggatacaaaatcaatgtgcaaaaatcacaagcattcttatacaccaataacagacaaacagagagccaaatcatgagtgaactcccattcacaattgcttcaaagagaataaaatacctaggaatccaacttacaaggaatgtgaaggacctcttcaaggagaattacaaaccactgctcaacgaaattaaagaggacacaaacaaatggaagaacattccatgctcatggataggaagaatcaatattgtgaaaatggccatactgcccaaggtaatgtatggattcaatgccatccccatcaagctaccaatgactttcttcacagaattggaaaaaactactttaaagttcatatggaaccaaaagagagcccacattgccaagtcaatcctaagccaaaagaacaaagctggaggcatcatgctacctgacttcaaactatactacaaggctacattatccaaaacagcatggcagtggtaccaaaacagagatatagaccaatggaacagaacagagccctcagaaataatgccgcataactacaaccatctgatctttgacaaacctgacaaaaacaagcaatgggaaaaggattccctatttaatagatag

SEQ ID NO: 121442 - DNA, 1608 bp, Homo sapiens
ctagcagaagacaagaaataactaagatcagagcagaactgaagaagatagagacacaaaaacccttcaaaaaaatcaatgaatccaggagctggttttttgaaaagatcaacaaaattgatagactgctagcaagactaataaagaagaaaatagagaagaatcaaatagatgcaataaaaaatgataaagggaatatcaccaccaatcccacagaaatacaaactaccatcagagaatactataaacacctctatgcaaataaactagaacacctagaagaaatggataaattcctggacatatacaccctcccaagactaaaccaggaagaagttgaatctgtgaatagaccaataacaggttctgaaattgaggcaataattaatagtctaccaaccaaaaaaagtccaggaccagacagattcacagctgaactctaccagaggtacaaagaggagctggtaccattccttctgaaactattccaatcaatagaaaaagagggaatcctccctaattcattttatgaggccagcatcatcctgatatcaaagcctggcagagacacaacaaaaaaagagaattttagaccaatatccctgatgaacatcgatgcaaaaatcctcaataaaatactggcaaaccaaatccagcagcacatcaaaaagcttatccaccaccatcaagttggcttcatccctgggatgcaaggctggttcaacatactcaaatcaataaacgtaatccatcatataaacagaaccaaagacaaaaaccacatgattatctcaatagaagcagaaaaggcctttgacaaaattcaacagccctttatgctaaaaactctcaataaactaggtattgatgggacatatctgacatatctcaaaataataagagctatttatgacaaacccacagccaatatcatactgaatgggcaaaaactggaagcattcccttttaagactggcacaagacagggatgtcctctctcaccactcctattcaacatagtgttggaagctctggccagggcaatcaggcaagagaaagaaataaagggtattcaattaggaaaagaggatgtcaaattgtccctgtttgcagatgacatgattgtatatttagaaaaccccatcgtctcagcccaaaatctccttaagctgataagcaacttcagcgaagtctcaggatacaaaatcaatgtgcaaaaatcacaagcattcctatacaccaataacagacagacagagagccaaatcatgagtgaactcccattcacaattgcttcaaagagaataaaatacctaggaatacaacttacaagggatgtgaaggacctcttcaaggagaactacaaaccactgctcaatgaaataaaagaggacacaaacaaatggaagaacattccatgctcatggataggaagaatcaatattgtgaaaatggccatactgcccaagactctcaatcagaaattctcatactggttcagagtcaacaaacactacattcaccagaggacttttcccctcaaagagacagaattcaacaccatagcaacgctttataatggtgcttctccagcacagcaccaaaaag

SEQ ID NO: 121443 - DNA, 1476 bp, Homo sapiens
atgggtgaactcccattcacaattgcttcaaagagaataaaatacctaggaatccaacttacaagggatgtgaaggacctcttcaaggagaactacaaaccactgctcaaggaaataaaagaggacacaaacaaatggaagaacattccatgctcatgggtaggaagaatcaatatcgtgaaaatggccatactgcccaaggtaatttacagattcaatgccatccccatcaagctaccaatgactttcttcacagaattggaaaaaactactttaaagttcatatggaatcaaaaaagagcctgcattgccaagtcaatcctaagccaaaagaacaaagctggaggcatcacactacctgacttcaaactatactacaaggctacagtaaccaaaacagcatggtactggtaccaaaacagagatatagatcaatggaacagaacagaggcctcaaaaataatgccgcatatctacaactatctgatctttgacaaacctgagaaaaacaagcaatggggaaaggattccctatttaataaatggtgctgggaaaactggctagccatatgtagaaagctgaaactggatcccttccttacaccttatacaaaaatcaattcaagatggattaaagatttaaacgttagacctaaaaccataaaaaccctagaagaaaacctaggcattaccattcaggacataggcgtgggcaaggacttcatgtccaaaacaccaaaagcaatggcaacaaaagacaaaattgacaaatgggatctaattaaactaaagagcttctgcacagcaaaagaaactaccatcagagtgaacaggcaacctacaacatgggagaaaattttcgcaacctactcatctgacaaagggctaatatccagaatctacaatgaactcaaacaaatttacaagaaaaaaacaaacaaccccatcaaaaagtgggcgaaggacatgaacagacacttctcaaaagaagacatttatgcagccaaaaaacacatgaagaaatgctcatcatcactggccatcagagaaatgcaaatcaaaaccgctatgagataccatctcacaccagttagaatggcaatcattaaaaagtcaggaaacaacagaatctttgatcacctgctcagctttctgctgctgctgtccttttctgctgttataccttatgatgtctttgtctttgacagttacaaaccactaattccaccaacccctccttttgaactctccacatctgtatttcaacatataatggttgtcaagaaaacaaagttacctgtcaaacagactcaggcaggtccttcaaaaggtattccagaagacgccattgttatcataggaaatgacagcttcatgcatgttactgtccctgaagacctttcagtgggacaagatgtggaggtggaagacaatgatactgctaatcctgacccatgtaggcctagcctaatatga

SEQ ID NO: 121444 - DNA, 1428 bp, Homo sapiens
atgattatctcaatagatgcagaaaaggcctttgacaaaattcaacaacacttcatgctaaaaactctcaataaactaggtattgatgggacgtatctcaaaataataagagctatttatgacaaacccacagccaatatcatactgaatgggcaaaaactgaaagcattccctttgaaaactggcacaagacagggatgccctctctcacaacttctattcaacatagtgttggaagttctggccagggcaatcaggcaagagaaagaaataaagggtattcacttaggaaaagaggaagtcaaattgttcctgtttgcagatgacatgattgtatatctagaaaaccccgttgtctcagcccaaaatctccttgggccaataagcaacttcagcaaagtctcaggatacaaaatcaatgtgcaaaaatcacaagcattcatatacatcaataacagacaaacagagagccaaatcatgagtgaactcccattcacaattgcttcaaagagaataaaatacctaggaatccaacttacaagggacgtgaaggacctcttcaaggagaactacaaaccactgctcaatgaaataaaagaggacacaaacaaatggaagaacattccatgctcatggataggaagaatcaatattgtgaaaatcgccatactgcccaaggtaatttatagattcaatgccacccccatcaagctaccaaggactttcttcacagaattggaaaaaactactttaaagttcatatgcaacgaaaaaagagcccgcattgccaagtcaatcagaagcaaaaaagacaaagctggagacatcatgctacctgacttcaaactatactacaaggctacagtaaccaaaacagcatggtactggtaccaaaacagagatataagccaatggaacagaacagagccctcagaaataataccacacagctacaaccatctggtctttgacaaacctgacaaaaacaagaaatggggaaaggattccctatttaataaatggtgttgggaaaactggctagccatatgtagaaagctgaaactggatcccttccttacaccttatacaaaaattaattcaagatggattaaagatttaactgtaagacctaaaaccataaaagccctagaagaaaaccttggcaataccatttgggacataggcatgggcaaggacttcacgtctaaaacaccaaaagcaatggcaacaaaagccaaaattgacaaatgggatctaactaaactaaagagcttctgcacagcaaaagaaactaccatcagagtgaacaggcaacctacagaatgggagaaaatttttgcaatcttctcatctgacaaaaggctaatatccagaatctacaaagaattattcaacctcaaaacggaaatttttgaggataaaccttga

SEQ ID NO: 121445 - DNA, 2334 bp, Homo sapiens
atgtcccagggctattccatccaccttgctccagcagcagggtctggggacgagtcagcttctttggaaggccttcatgaaatacaaactgccatcagagaatactacaaacacctctacgcaaataaactagaaaatctagaagaaatggatacattcctcgacacatacactctcccaagactaaaccaggaagaagttgaatctctgaatagaccaataacaggctctgaaattgtggcaataatcaatagtttaccaaccaaaaagagtccaggaccagatggattcacagccgaattctaccagaggtacaaggaggaactgcatataaacagagccaaagacaaaaaccacatgattatctcaatagatgcagaaaaagcctttgacaaaattcaacaacccttcatgctaaaaactctcaataaattaggtattgatgggacgtatttcaaaataataagagctatctatgacaaacccacagccaatattatactgaatgggcaaaaactggaagcattccctttgaaaactggcacaagacagggatgccctctctcaccactcctattcaacatagggttggaagttctggccagggcaatcaggcaggagaaggaaataaagggtattcaattaggaaaagagaaagtcaaattgtccctgtttgcagacgacatgattgtttatctagaaaaccccatcgtctcagcccaaaatctccttaagctgataagcaacttcagcaaagtctcaggatacaaaatcaatgtacaaaaatcacaagcattcttatacaccaacaacagacaaacagagagccaaatcatgagtgaactcccattcacaattgcttcaaagagaataaaatacctaggaatccaacttacaagggatgtgaaggacctcttcaaggagaactacaaaccactgctcaaggaaataaaagaggacacaaacaaatggaagaacattccatgctcatgggtaggaagaatcagtatcgtgaaaatggccatactgcccaaggtaatttacagattcaatgccatccccatcaagctaccaatgactttcttcacagaattggaaaaaactactttaaagttcatatggaaccaaaagagagcccgcatcgccaagtcaatcctaagccaaaagaacaaagctggaggcatcacactacctgacttcaaactatactacaaggctacagtaaccaaaacagcatggtgctggtaccaaaacagagatatagatcaatggaacggaacagagccctcagaaataatgccgcatatctacaactatctgatctttgacaaacctgagaaaaacaagcaatggggaaaggattccctatttaataaatggtgctgggaaaactggctagcgatatgtagaaagctgaaactggatcccttccttacaccttatacaaaaatcaattcaagatggattaaagatttaaacgttagacctaaaaccataaaaaccctagaagaaaacctaggcattaccattcaggacataggcgtgggcaaggacttcatgtccaaaacaccaaaagcaatggcaacaaaagccaaaattgacaaatgggatctaattaaactaaagagcttctgcacagcaaaagaaactaccgtcagagtgaacaggcaacctacaacatgggagaaaattttcacaacctactcatctgacaaagggctaatatccagaatctacaatgaactcaaacaaatttacaagaaaaaaacaaacaaccccatcaaaaagtgggcgaaggacatgaacagacacttctcaaaagaagacatttatgcagccaaaaaacacatgaagaaatgctcatcatcactggccatcagagaaatgcaaatcaaaaccactatgagatatcatctcacaccagttagaatggcaatcattaaaaagtcaggaaacaacagcaacagttgggtcagcaaaaagattcttcttaaaattaaaaaacataagaaattgcgatgcatttgccaagaatggctgacatctttttcaattgtgttgattgaaaatgagctggctaaaagtttacattttgatgatctaatcaataaagttgcagaaagtgtgaagaaacatcctgaagttattcacagtgacttcaatgaacaacacattagtatactttttacacaggggacagaagtaaaagccggcttgatcatttacaaggctttcaccatgccgctgagatgtcaaggactacaagttgatcttcagcctcttaaaatatggcctcgaagcctttcatgtcttcagacaactccagcattttga

SEQ ID NO: 121446 - DNA, 1542 bp, Homo sapiens
atggataaattcctcgacacatacactctcccaagactaaaccaggaagaagttgaatctctgaatagaccaataacaggctctgaaattgaggcaataatcaatagcttactaaccaaaaaaactccaggaccagatggattcacagccgagttctaccagagtgttggaagttctggccagggcaatcgggcaatcaggcaggagaaggaaataaagggtattcaattaggaaaagaggaagtcaaattgtccctgtttgcagacgacatgattgtttatctagaaaaccccatcatctcagcccaaaatctccttaagctgataagcaaattcagcaaagtctcaggatacaaaatcaatgtacaaaaatcacaagcattcttatacacctacaacagacaaacagagagccaaatcatgggtgaactcccattcacaattgcttcaaagagaataaaatacctaggaatccaacttacaagggatgtgaaggacctcttcaaggagaactacaaaccactgctcaaggaaataaaagaggacacaaacaaatggaagaacattccatgctcatgggtaggaagaatcaatatcgtgaaaatggccatactgcccaaggtaatttacagattcaatgccatccccatcaagctaccaatgactttcttcacagaattggaaaaaactactttaaagttcatatggaaccaaaaaagagcccgcattgccaagtcaatcctaagccaaaagaacaaagctggaggcatcacactacctgacttcaaactatactacaaggctacagtaaccaaaacagcatggtactggtaccaaaacagagatatagatcaatggaacagaacagagccctcagaaataatgctgcatatctacaactatctgatctttgacaaacctgagaaaaacaagcaatggggaaaggattccctatttaataaatggtgctgggaaaactggctagccatatgtagaaagctgaaactggatcccttccttacaccttatacaaaaatcaattcaagatggattaaagatttaaacgttaaacctaaaaccataaaaaccctagaagaaaacctaggcattaccattcaggacataggcgtgggcaaggacttcatgtccaaaacaccaaaagcaatggcaacaaaagacaaaattgacaaatgggatctaattaaactaaagagcttctgcacagcaaaagaaactaccatcagagtgaacaggcaacctgttgggagaaaattcaggcaacctgaatgggagaaaatttttgcaacctactcatctgacaaagggctaatatgcagaatctacaacaaactcaaacaaatttacaagaaaaaaacaaacaaccccatcaaaaaatgcagaaacccagtggaatcctctgaggccttgaaagatagtggacccaccagatggaaggaccataggtccctaaatgagtatcgctaccatctactctcccatcccccaccttcttgcattgctctgggaatgagcaagaaataa

SEQ ID NO: 121447 - DNA, 2361 bp, Homo sapiens
atgtgggaaagtttggaacttcacggagacttgttgaatgattttgaccaaaatgctaatagtgatatgggtagtgaagtccaggctgagttgagctcagatagaaatgagaaagttattgggaactacagtaaaggtcactcttgctattctttagctaaaagactgatagcattgtgcccttgctgtagagatctatggaactttgaacttgagagagatgatttaaggtatctggcagaagaaatttctaagcagcaaagcactcaagatgtggtctggctgctcctcacagcgtacagtcgtatgtgttcacaaagagatggtctgaaattggaacttatgtttaaaagggaaacagagcataaaagtttggaaaatttgcagcctgaccatgtggttgaaaaaaaaaaagagccattttctggggacaaattcaagctggctgcagaaatttgcataagtaaagacaaaccaaatgttaacagccaagacaatggggaaaatgtctccagggcatgcctggaggcctacgagggaaaaaaggttttgtgggccatgcccagggccctgctgctctgtgccactttgggacatgatgccctgcaacccagcccctccagctccagccatggcaaaaaggagccaagatacagcttgggctgttgcttcggagggtgcaaggcccaggctttggcagcttccacctccttcaatcctatcaccaacaggcacctaaggttgtttgagctggccaaggactatatgaatggaacaggaagatatagagttgtcaaacacatgatctttcctgttggtgatgcttataagaagaaaggactcattcctgcccatcaccaggtcatcatagccgaacttgccaccaagaattccaaactaaaccaggaagacattgaatccctgaacagaccaataacaggttctgaaattgaggcaataattaatagcctaccaaccaaaaaaagtccaggaccagatggattcacagccgatttctaccagaggtacaaacaggagctagtaccattccttctgaaactattccaatcaatagaaaaagagggaatcctccctaattcatttgatgaggccagcatcatcctgataccaaagcctggcagagacacaacaaaaaaagagaattttagaccaatatccctgatgaacattgatgcaaaaattctggcaaaccaaatccagcagcagatcaaaaagtttatccaccacgatcaagttggcttcatccctgggatgcaaggctggttcaacatacacaaatcaataaatgtaatccagcatataaacagaaccaaagacaaaaaccacacgattatctcaacagatgcagaaaaggccttcgacaaaattcaacagcccttcatgctaaaaactctgaataaactaggtattgatgggacgtatctcaaaataataagagctatttatgatgaacccacagccaatatcatactgaatgggcaaaaactggaagcattccctttgaaaactggcacaagacagggatgtcctctctcaccactcctattcaacatagtattggaagttctggccagggcaatcaagcaggataaagaaatacaggatattcagttaggaaaagaagtcaaattgtccctatttgcagatgtcatgattgtatatttagaaaactccatcgtctcagtccaaaatctccttaagctgataagtaacttcagcgaagtctcaggatacaaaatcaatgtgcaaaaatcacaagcattcctctacaccaataaaagacaaagagagagccaaatcatgagtgaactcccattcacaattgcttcaaagagaataaaatacctaggaatccaacttacaagggatgtgaaggacctcttcaaggagaactacaaaccactgctcaatgaaataaaagaggacacaaacaaatggaagaacattccatgctcatggattggaagaatcaatatcgtgaaaatggccatactgcccaagataatttatgcagccaaaaaacacatgaaaaaatgctcatcatcactggccatcagagaaatgcaaatcaaaaccacaatgagataccatctcacaccagttagaatggcgatcattaaaaagtcaggaaacaacagaagtacccgtggcctgctcagctgtgactctgctgacctcaggacctcactggtcaaggtatgtagggacccttgcaggagacttggtaatggtgaaatgatcctatcgttacattatctatggagcaacaactttgtacagagaaccagctgcttggctttttctcccagtgcccaggatgctgctgatgcggccgtgtaa

SEQ ID NO: 121448 - DNA, 6024 bp, Homo sapiens
gttttagggtacatgtgcacattgtgcaggttagttacatatgtatacatgtgccatgctggtgcactgcaccactaactcgtcatctagcattaggtatatctcccaatgctatccctcccccctcccccctccccaccatagtccccagagtgtgatattccccttcctgtgtccatgtgatctcattgttcaattcccacctatgagtgagaatatgcggtgtttggttttttgttcttgcgatagtttactgagaatgatggtttccaatttcatccatgtccctacaaaggatatgaactcatcattttttatggctgcatagtattccatggtgtatatgtgccacattttcttaatccagtctatcattgttggacatttgggttggttccaagtctttgctattgtgaatagtgccgcaataaacatacgtgtgcatgtgtctttatagcagcatgatttatagtcctttgggtatatacccagtaatgggatggctgggtcaaatggtatttctagttctagatccctgaggaatcgccacactgacttccacaatggttgaactagtttacagtcccaccaacagtgtaaaagtgttcctatttctccgcatcctctccagcacctgttgtttcctgactttttaatgattgccattctaactggtgtgagatgatatctcatagtggttttgatttgcatttctcttgatggccagtgatgatgagcatttttttcatgtgtctgtatggctgcataaatgtcttcttttgaaaagtgtctgttcatattttttgcccactttttgatggggttgtttgatttttttcctgtaaatttgtttgagttcattgtagattctggatattagccctttgtcacatgagtaggttgcgaaaattttctcccattttgtaggttgcttgttcactctgatggtagtttcttttgctgtgcagaagctctttagtttaattagatcccatttgtcaattttggcttttgttgccattgcttttggtgttttagacatgaagtccttgcccatgcctatgtcctgaatggtaatgcctaggttttcttctagggtttttatggttttagttgtaacatttaagtctttaatccatcttgaattaatttttgtataagctgtaaggaagggatccagtttcagctttctacatatggctagccagttttcccagcaccatttattaaatagggaatccttttgccattgtttgtttttctcaggtttttcgaagatcagatggttgtaggtgtatggtattatttccaagggctctattctgttccactggtctatatctctgttttggtaccagtaccatgctgttttggtaccagtaccatccaggctgttttggttactgtagccttgtagtatagtttgaagtcaggtagcgtgatgcctccagttttgttcttttggcttagggatgacttggcaatgagggctctcttttggttccatatgaactttaaagtagttttttccaattctgtgaagaaagtcattggtagcttgatggggatggcattgaatctgtaaattaccttgggcagtatggccattttcacgagattgattcttcctcctacccatgagcatggaatgttcttccatttgttttgtgtcctcttttatttccttgagcagtggtttgtagttctccttgaagaggtccttcacatcccttgtaagttggattcctaggtattttattctctttgaagcaattgtgaatgggattgcactcatgatttggctctctgtttgtctgttgttggtgtataagaatgcttgtgcatttttgtacattgattttgtatattttgtatcctgagactttgctgaagttgcttatcagcttaaggagattttgggctgagacaatggggttttctagatatacaatcatgtcatctgcaaacagggacaatttgacttcctcttttcctaattgaatacccttggtttccttctcctgcctaattgccctggccagaacttccaacactatgttgaataggagtggtgagagagggcatccctgtcttgtgccagttttcaaagggaatgcttcccatttttgcccattcagtatgatattggctgtgagtttgtcatagatagctcttattattttgagatacatcccatcaataccgaatttattgagagtttttagcatgaagggttgttgaattttgtcaaaggccttttctccatctattgagataatcatgtggtttttgtcgttggttctgtttatatgctggattacatttatcgatttgcgtacattgaaccagccttgcatcccagggatgaagcccacttgatcatggtggataagctttttgatgtgctgctggattcggtttgccagtattttattgaggatttttgcatcagtgttcatcaagggtattggtctaaaattctcttttttggttgtgtctctgcccagctttggtatcaggatgatgctggcctcatcaaatgagttagggaggattccttctttttctattgattggaatagtttcagaaggaatggtaccagttcctccttgtacctctggtagaattcggctgtgaatccatctggtcctggactctttttggttggtaagctattgattattgccacaatttcagatcctgttattggtctattcagagattcaacttcttcctggtttggtcttgggagggtgtatgtctccaggaatttatccatttcttctagattttctagtttctttgcgtagaggtttttatagtattctctgatggtagtgtgtatttctgtgggatcggttggtgatatcccctttatcattttttattgtgtctatttgattcttctctctttttttctttattagtcttgctagcggtctatcaattttgttgatcttttcaaaaaaccagctcctggattcattgatttttttgaagggttttgttgtgtctctatttccttcagttctgctctgattttagttatttcttgccttctgctagcttttgaatgtggttgctcttgcttctctagttcttttaattgtgaatgttagggtgtcaattttggatctttcctgctttctcttgtgggcatttagtgctataaatttccctctacacactgctttgaatgcgtcctagagattctggtatgttgtgtctttgttctcgttggtttcaaagaacatctttatttctgccttcatttcgttatgtacccagtagtcattcaggagcaggttgttcagtttccatgtagttgagcggctttgagtgagattcttaatcctgagttctagtttgattgcactgtggtctgagagatagtttgttataatttctgttcttttacatttgctgaggagagcttcacttccaagtatgtggtcaattttggaatagctgtggtgtggtgctgaaaaaaatgtatattctgttgatttggggtggagagttctgtagatgtctattaggtctgcttggtgcagagctgagttcaattcctgggtatccttgttgactttctgtctcgttgatctgtctaatgttgacagtggggtgttaaagtctcccattattaatgtgtgggagtctaagtctctttgtaggtcactcaggacttgctttatgaatctgggtgctcctgtattgggtgcatacatatttaggatagttagctcctcttgttgaattgatccctttaccatcatgtaatggccttctttgtctcttttgatctttgttggtttaaagtctgttttatcagagactaggattgcaacccctgcctttttttgttttccatttgcttggtagatcttcctccatccttttattttgagcctatgtgtgtctctgcacatgagatgggtttcctgaatacagcacactgatgggtcttgactctttatccaacttgccagtctgtgtcttttaattggagaatttagtccatttacatttaaagttaatattgttatgtgtgaatttgatcctgtcattatgatgttagctggtgattttgctcgttagttgatgcagtttcttcctagtctcgatggtctttacattttggcatgattttgcagtggctggtaccggttgttcctttccatgtttagcgcttccttcaggagctcttttagggcaggcctgctggtgacaaaatcggtcagcatttgcttgtctgtaaagtattttatttctccttcacttatgaagcttagtttggctggatatgaaattctgggttgaaaattcttttctttaagaatgttcaatattggcccccactctcttctggcttgtagggtttctgccgagagatccgctgttagtctgatgggcttccctttgagggtaactcgacctttctctctggctgcccttaacattttttccttcatttcaactttggtgaatctgacaattatgtgtcttggagttgctcttctcgaggagtatctttgtggcgttctctgtatttcctgaatctgaacgttggcctgccttgctagattggggaaagtctcctggataatatcctgcagagtgttttccaacttggttccattctccgcatcactttcaggtacaccaatcagacgtagatttggtcttttcacatagtcccatatttcttggaggctttgctcgtttctttttattcttttttctctaaacttcccttcttgcttcatttcattcatttcatcttccattgctgataccctttcttccagttgatcgcattggctcctgaggcttctgcattcttcacgtagttctcgagccttggttttcagctccatcagctcctttaagcacttctctgtattggttattctagttatacattcttctaaatttttttcaaagttttcaacttctttgcctttggtttgaatgtcctcccgtagctcagagtaatttgagcgtctgaagccttcttctctcagctcgtcaaaatcattctccatccagctttggtccgttgctggtgaggaactgcgttcctttggaggaggagaggtgctctgcgttttagagtttccagtttttctgttctgttttttccccatctttgtggttttatctacttttggtctttgatgatggtgatgtacagatgcgttttcggtgtggatgtcctttctgtttgttagttttccttctaacagacaggaccctcagctgcaggtctgttggaataccctgccgtgtgaggtgtcagtgtgcccctgctggggggtgcctcccagttaggctgctcgggggtcaggggtcagggacccacttgaggaggcagtctgcccgttctcagatctccagctgcgtgctgggagaaccactgctctcttcaaagctgtcagacagggacatttaagtctgcagaggttactgctgtctttttgtttgtctgtgccctgcccccagaggtggagcctacagaggcaggcaggcctccttgagctgtggtgggctgcacccagttcgagcttccccggctgctttgtttacctaagcaagcctgggcaatggcgggcgcccctcccccagccttgctgcggccttgcagtttgatctcagaccgctgtgctagcaatcagcgagattccgtgggcgtaggaccctccgaaggccaggtgtgggatatagtctcgtggtgcgccgttttttaagccggtctgaaaagcgcaatattcgggtgggagtgacccgattttccaggtgcgtccgtcacccctttctttgactcggaaagggaactccctgaccccttgcgcttcccaggtgaggcaatgcctcgccctgcttcggctccgcacggtgcgcgcacccactggcctgcgcccactgtctggcactccctagtgagatgaacccggtacctcagatggaaatgcagaaatcacccgtcttctgcgtcgctcacgctgggagctgtagaccggagg

SEQ ID NO: 121449 - DNA, 462 bp, Homo sapiens
ccaaaaaagcaagaagaagaagaaggcacaacagacactgcaacatcctcatccaacaaccatgagaaggacagtggagtaggacgtacagatgaaagcttgcgaaatgatgagagctcagagcaggagaatgcagccgaggaccccaatagcacatctttgaagagcaagagagacctggggcagagcatagacactctgggaagtgttgaacttcagtacaatgagagcctcgtatctggtgaatacattgactcagactgcattggcaacccagatgaggactgtgaaagattcaggcagctcttggagctcaaatgcaagattcgaaatcatggagatgacatcacttgcgtcgactcgagtacggcagactatcggtcgtgttcgctaataggcagcacgatgtgcaacggcagccaatggaagcagcaattacgcatcatggaagaactaccatga

SEQ ID NO: 121450 - DNA, 1064 bp, Homo sapiens
atcgtggtgtatgtgggcgtctcctcagccggcagcttcactgtgccctgcggttgatgtccaaggttttgactgtgtgggtttgtgtctttccggcaggtgtctcctctgtgacttccctgatgtccctggcttgggtgctagcctcctatcacaagctgctgcgggactccagggacgacaagaagagcatgagctacagaggggccatcatccaggtcttctggcgcctcttcaccatctcatcccgagtgatctcttttgccctctttgcttccatcttccagctctattttgggatcttcgtggtggttcactggtgcgccatggccttctggatcatccatggcggaacagacttctgcatgtccaagtgggaggagatcctcttcaacatggtggtagggatcgtgtacattttctgctggtttaacgtcaaggaagggcggactcgatatcgaatgtttgcatattatacgatagtcttgaccgagaatgctgccttgacgttcctttggtatttttacagagacccggagaccactgactcctatgcggtgccagcactgtgttgtgtctttattagctttgtggctgggatcgcaatgatgctcttatactatggcgtgctgcatcccacaggaccacgagctaagatccttgccagctcctgttgtgccgagctgctctggggcatccctttgccccccgatgttgagcccatggcgcctgagatccctgggtaccgggggacccaggttacgcccaccagagccgtaacggaacaacaggaggatctcacggctgacacttgcttgcctgttttccaagtgagacccatggggccccctaccccgttggggcgtccttacctcccagaagggcccctcattaagattgacatgccaagaaagcgatacccagcttgggatgctcattttgtagacaggaggctgagaaggactattaacattctacaatatgtcacccccaccgcagtaggcattcgatatcgagacggaccactcctctatgagttgctacagtatgagtcttcactctaa

SEQ ID NO: 121451 - DNA, 896 bp, Homo sapiens
acgagcttattgctgttagtctttatatattattgtgaataagtcaattcattttcctttttccaggcattatgaaaaacctctatttcagagtcattaccatagttatatggctttatttcactggtataatgacaaatgcatcaagaaaaagcaatattttattcaattctgaatgccaatggaatgaatatattctgacaaattgttcttttaccggaaagtgtgatatacctgtggacatatcacagacagcagccactgtggatgtaagtttcaatttctttagagttctcttacagtctcacacgaaaaaagaagagtggaaaataaaacatctggacctcagtaacaatctcatatcaaaaataaccttaagcccttttgcatatttacatgctttggaagtgttaaacctcagcaacaatgccatccactccctctcattggatctactcagtcctaagtcctcatgggtgaaacgccacagaagcagcttcagaaacaggtttccattgctgaaggtgctcattcttcaaagaaataaactcagtgacactcccaaggagtgtttgaaagctcagagcaaggatgatgcttgtagccagttacgcctgaccggctatgtcactgacttgtggttccggtgcagtaccttctacttagtgaaagtaaagatgtctcgaagtcggagtccttctccaataagatgtggattgccaagtttagaccaacagaccttccaggactggcttaaggagtgtgggattgagtccattctgcacgaacacacagacgtgagcacacacacacacacacacacacattaccacagatactgtcaaactgaaaaggcccaagatgtggctgtgggcagttttactttgaatatgtaa

SEQ ID NO: 121452 - DNA, 277 bp, Homo sapiens
acagccgctcaggaagcaatcttgcatgcgtctggaaatggcacaaccaaggactactgcatgctttataacccttattggacagctcttccaaacttccattagtttgatgaatctgacttccacaccactatgcaacctttctgatattcctcctgttggcataaagagcaaagcagttgtggttccatggggaagctgccattttcttgaaaaagccagaattgcacagaaaggaggtgctgaagcaatgttagttgtcaataacagtgtccta

SEQ ID NO: 121453 - DNA, 845 bp, Homo sapiens
gcggccgctgtagttgcggcggtccagtcgtagcccggccgcccgcgcctgtccggtccggtccggccacggaggcagcgcagcggcgggactccgagcctaccccgccgagtgagctgcgccgcaccgtgccgtcccacccggcacccaccagtccgatggggccgcagcggcggctgtcccctgccggggacagccctactctggggcttcctgctccagctgacagccgctcaggaagcaatcttgcatgcgtctggaaatggcacaaccaaggactactgcatgctttataacccttattggacagctcttccaagtaccctagaaaatgcaacttccattagtttgatgaatctgacttccacaccactatgcaacctttctgatattcctcctgttggcataaagagcaaagcagttgtggttccatggggaagctgccattttcttgaaaaagccagaattgcacagaaaggaggtgctgaagcaatgttagttgtcaataacagtgtcctatttcctccctcaggtaacagatctgaatttcctgatgtgaaaatactgattgcatttataagctacaaagactttagagatatgaaccagactctaggagataacattactgtgaaaatgtattctccatcgtggcctaactttgattatactatggtggttatttttgtaattgcggtgttcactgtggcattaggtggatactggagtggactagttgaattgattgcatgtcgtggcaaaaacatggaagtgagacttatttttctctctggactgtgcatagcagtagctgttgtttgggctgtgtttcgaaatgaagacag

SEQ ID NO: 121454 - DNA, 3399 bp, Homo sapiens
atgctggtgggccagggcgcggggccgctggggcccgcggtggtcaccgccgcggtggtgctgctgctgagcggcgtggggccggcgcacggctcggaggacatcgtggtgggctgcggtggcttcgtcaagtcggacgtggagatcaactactctctcatcgagataaagctgtacaccaagcatgggactttgaaataccagacagactgtgcccctaataatggttactttatgatccctttgtatgataaggaccatttggcaatgtctagagacgtttttgttgtgacatctgtggctgtgcgctacagtcacccaggggatttcattctgaagattgagcctcccctagggtggagttttgagccgacgaccgtggagctccatgtggatggagtcagtgacatctgcacaaagggtggggacatcaactttgtcttcactgggttctctgtgaatggcaaggtcctcagcaaagggcagcccctgggtcctgcgggagttcaggtgtctctgagaaacactgggaccgaagcaaagatccagtccacagttacacagcctggcggaaattcatgcctgtcacctctgtcaaacccagtcgaatgttctgtgactggtccctgctgtgctacaaggattggttttatgccagaaatccttgagattaagggagacgtaagcactcctctttccgatcagcacatggagcacccctcttggcacacagcaagcaccacagtgcgtgtaaccaactccaatgccaatgcggccagtcccctcatagttgctggctacaatgtgtctggctctgtccgaagtgatggggagcccatgaaaggcgtgaagtttcttctcttttcttctttagtaactaaagagccccaagacgagagtctggtgtatttgtgctacacggtctccagagaagatggctcgttctctttctattccttgccaagtgggggctacactgtgattccgttctatcgaggggagaggattacctttgatgtggcgccttccagacttgacttcacagtggagcatgacagcttgaaaatcgagcccgtgttccacgtcatgggattctccgtcaccgggagggtcttgaacggacccgaaggagatggtgttccagaagcagtagtcaccctgaataaccaaatcaaagttaaaacaaaagctgatggctcattccgccttgagaacataaccacagggacatacaccatccatgctcagaaagagcacctctactttgaaacggtcaccatcaaaattgcaccaaacacacctcagctggctgacattgttgcaacagggttcagtgtctgtggtcagatatcaatcattcgcttccccgacaccgtcaagcagatgaataaatacaaagttgtcctgtcatctcaagacaaggacaagtctttggtcaccgtggagacagatgctcatggatcattttgttttaaagcaaacccagggacttacaaagtgcaggtgatggttcctgaggcagaaaccagagcagggctgacgttgaaaccccagacatttcctcttactgtgaccgacaggcctgtgatggatgtggcctttgtacagttcttggcatcagtttctgggaaagtctcttgtttggacacctgtggtgacttgctggtgactctacagtccctgagccgccagggtgagaagcggagcctccagctctccggcaaggtcaacgccatgactttcacctttgacaacgtgctccctggaaaatacaaaataagcatcatgcatgaggattggtgctggaagaacaagagcctggaggtggaagtgctggaggatgacgtgtctgcagttgagttcaggcagacgggctacatgctgagatgttccctgtctcacgccatcactctggaattttatcaggatggaaatgggcgtgagaatgtggggatttataacctctccaaaggagtcaaccgattctgcctgtccaagcctggtgtgtacaaagtgacccctcgctcctgccaccggtttgagcaagcgttctacacctatgacacgtcttcacctagtatcttgacattgacagccattcgccaccatgtccttggaactatcaccaccgacaaaatgatggatgtcactgtgactatcaagtcttccatcgacagtgaacccgccttggtcttaggccctctgaagtctgtgcaggagctgcggagggagcagcagctggctgagatcgaggcccgcaggcaggagagggagaaaaacggcaaagaggaaggcgaagaaagaatgaccaagcctcccgtgcaggagatggtagatgagttacaaggccccttctcgtatgatttctcttactgggcgcgtgtcctctgttttgtggggacaggacccgccaaactgaagtatattaattattttaggtctggagagaaaatcactgttacaccgtcatctaaagagctgctcttttatcccccttcaatggaagccgttgtcagtggagaaagctgcccagggaagctgatcgagatccacgggaaggcaggcctgtttttagaaggccagatccaccccgagttggaaggagtcgagattgtcatcagtgaaaagggggcaagttcaccgctgatcacagtctttactgatgacaaaggtgcctacagtgttggccccctgcacagtgacctggagtacacggtgacctcacagaaggagggctatgttctgactgcggtggaaggaaccatcggagacttcaaggcctatgccctggcaggcagccctggccagtattacttcaaacccatgatgaaggagttccggtttgagccatcctcacagatgatcgaggtgcaggaaggccagaacctgaagatcaccatcacggggtaccgaaccgcttacagttgctatggcacagtgtcttccttaaacggagagcccgaacaaggggttgccatggaagcggtgggccagaacgactgcagcatttacggagaagacaccgtgacagacgaagagggcaagttcagattacgtggattgctggttgggaataatgacatcgatgatgtaaacatcatagttttccggcagattaatcaatttgatttaagtggaaatgtgatcacttcctctgaataccttcctacgttatgggtcaagctttacaaaagcgaaaacctcgacaatccaatccagacagtttcccttggccagtccctgttcttccatttccccccactgctcagagatggcgagaactatgttgtgcttctggactccacactccccagatcccagtatgactacatcttgcctcaagtttctttcaccgcagtgggctaccataaacacttcaccttgatttttaatcccacg

SEQ ID NO: 121455 - DNA, 3129 bp, Homo sapiens
atggcaagcaccacagtgcgtgtaaccaactccaatgccaatgcggccagtcccctcatagttgctggctacaatgtgtctggctctgtccgaagtgatggggagcccatgaaaggggtgaagtttcttctcttttcttctttagtaactaaagagccccaagacgagagtctggtgtatttgtgctacacggtctccagagaagatggctcgttctctttctattccttgccaagtgggggctacactgtgcccgtgttccacgtcatgggattctccgtcaccgggagggtcttgaacggacccgaaggagatggtgttccagaagcagtagtcaccctgaataaccaaatcaaagttaaaacaaaagctgatggctcattccgccttgagaacataaccacagggacatacaccatccatgctcagaaagagcacctctactttgaaacggtcaccatcaaaattgcaccgaacacacctcagctggctgacattgttgcaacagggttcagtgtctgtggtcggatatcaatcattcgcttcccggacaccgtcaagcagatgaataaatacaaagttgtcctgtcatctcaagacaaggacaagtctttggtcaccgtggagacagatgctcatggatcattttgttttaaagcaaaaccagggacttacaaagtgcaggtgatggttcctgaggcagaaaccagagcagggctgacgttgaaaccccagacatttcctcttactgtgaccgacaggcccgtgatggatgtggcctttgtacagttcttggcatcagtttctgggaaagtctcttgtttggacacctgtggtgacttgctggtgactctacagtccctgagccgccagggtgagaagcggagcctccagctctccggcaaggtcaacgccatgactttcacctttgacaacgtgctccctggaaaatacaaaataagcatcatgcatgaggattggtgctggaagaacaagagcctggaggtggaagtgctggaggatgacgtgtctgcagttgagttcaggcagacgggctacatgctgagatgttccctgtctcacgccatcactctgctacttcgctgcctgtgttcaccatacctcttgtcattgtcatcgtctctcacgtattctggtcttatactcatcgtgtcgcttattcgtggttactgcctactcgtactcatctatcggtgttttgatgattctttcaatgctgaccgggctctggtcctggggtttggaggagggggaccctgggggttggtggcctgtcccagcctgagctggcaagattccgaatgccaggcccctcaagtgtgcaacagggcacagggtgacctcgtgggcagagacgtctcccacaacctgctccgggcgctggacgttgggctcctggcgaacctctcggcgctggcagagctggatataagcaacaacaagatttctacgttagaagaaggaatatttgctaatttatttaatttaagtgaaataaacctgagtgggaacccgtttgagtgtgactgtggcctggcgtggctgccgcgatgggcggaggagcagcaggtgcgggtggtgcagcccgaggcagccacgtgtgctgggcctggctccctggctggccagcctctgcttggcatccccttgctggacagtggctgtggtgaggagtatgtcgcctgcctccctgacaacagctcaggcaccgtggcagcagtgtccttttcagctgcccacgaaggcctgcttcagccagaggcctgcagcgccttctgcttctccaccggccagggcctcgcagccctctccgagcagggctggtgcctgtgtgggtcagcccagccctccagtgcctccttcgcctgcctgtccctctgctccggccccccgccgcctcctgcccccacctgtaggggccccaccctcctccagcacgtcttccctgcctccccaggggccaccctggtggggccccacggacccctggcctccggccagctagcagccttccacatcgctgccccgctccctgtcactgccacacgctgggacttcggagacggctcccccgaggtggatgccgctgggccggctgcctcgcatcgctatgtgctgcctgggcgctatcacgtgacggccgtgctggccctggggaccggctcagccctgctggggacagacgtgcaggtggaagcggcacctgccgccctggagctcgtgtgcccgtcctcggtgcagagtgacgagagcctcgacctcagcatccagaaccgcggtggttcaggcctggaggccgcctacagcatcgtggccctgggcgaggagccggcccgagcggtgcacccgctctgcccctcggacacggagatcttctctggcaatgggcactgctaccgcctggtggtggagaaggcggcctggctgcaggcgcaggagcagtgtcgggcctgggccggggccaccctggcaatggtggacagtcccgccgtgcagcgcttcctggtctcccgggtcaccaggagcctagacatgtggatcggcttctcgactgtgcagggggtggaggtgggcccagcgccgcagggcgaggccttcagcctggagagctgccagaactggctgcccggggagccacacccagccacagccgagcactgcgtccggctcgggcccaccgggtggtgtaacaccgacctgtgctcagcgccgcacagctacgtctgcgagctgcggcctggaggcccagtgcaggatgccgagaacctcctcgtcatggtattcccgggcctgcgtctgagccgtgaagccttcctcaccacggccgaatttgggacccaggagctccggcggcccgcccagctgcggctgcaggtgtaccggctcctcagcacagcagggaccccggagaacggcagcgagcctgagagcaggtccccggacaacaggacccagctggcccccgcgtgcatgccagggggacgctggtgcgctggagccaacatctgcttgccgctgacgcctcctgccaccccaggcctgcgccaatgctgcacagaagtgactatttcaacacccctggagaaagaggaggagaaaattccgtga

SEQ ID NO: 121456 - DNA, 390 bp, Homo sapiens
atggttaatattgagtgtcaacttgattggatcgaagggggcaaagtattgatcctggctctcatcacttcatcatctaattctacagatgagaacactgaggcttggggagatattaaatgtcttatccagattgcatgcattgaagaaaagcttcctgaggtctcaccagaagcagatgctggcatcatgcttcttgtacagtctgcagaacttaaaacaaaagctgatggctcattccgccttgagaacataaccacagggacatacaccatccatgctcagaaagagcacctctactttgaaacggtcaccatcaaaattgcaccgaacacacctcagctggctgacattattgcaacaggggaggaagggcagctgctgatttga

SEQ ID NO: 121457 - DNA, 4093 bp, Homo sapiens
cgcgacctcgtggtgggctgcggtggcttcgtcaagtcggacgtggagatcaactactctctcatcgagataaagctgtacaccaagcatgggactttgaaataccagacagactgtgcccctaataatggttactttatgatccctttgtatgataagggggatttcattctgaagattgagcctcccctagggtggagttttgagccgacgaccgtggagctccatgtggatggagtcagtgacatctgcacaaagggtggggacatcaactttgtcttcactgggttctctgtgaatggcaaggtcctcagcaaagggcagcccctgggtcctgcgggagttcaggtgtctctgagaaacactgggaccgaagcaaagatccagtccacagttacacagcctggcggaaagtttgcattttttaaagttctgcctggagattatgaaatcctcgcaactcatccaacctgggcgttgaaagaggcaagcaccacagtgagtgtaaccaactccaatgccaatgcggccagtcccctcatagttgctggctacaatgtgtctggctctgtccgaagtgatggggagcccatgaaaggcgtgaagtttcttctcttttcttctttagtaactaaagaggatgtcctgggctgcaatgtctcaccagtgcctgggttccagccccaagacgagagtctggtgtatttgtgctacacggtctccagagaagatggctcgttctctttctattccttgccaagtgggggctacactgtgattccgttctatcgaggggagaggattacctttgatgtggcgccttccagacttgacttcacagtggagcatgacagcttgaaaatcgagcccgtgttccacgtcatgggattctccgtcaccgggagggtcttgaacggacccgaaggagattggtgttccagaagcagtaagtcaccctgaataaccaaatcaaagttaaaacaaaagcttgatgggctcattcccgccttgagaacataaccacagggacatacaccatccatgctcagaaagagcacctctacttttgaaacggtcaccatcaaaattgcaccaaacacacctcagctggctgacattgttgcaacagggttcagtgtctgtggtcagatatcaatccattcggttccccgacaccgtcaagcagatgaataaatacaaagttgtcctgtcatctcaagacaaggacaagtctttggtcaccgtggagacagatgctcatggatcattttgttttaaagcaaacccagggacttacaaagtgcaggtgatggttcctgaggcagaaaccagagcagggctgacgttgaaaccccagacatttcctcttactgtgaccaacaggcccatgatggatgtggcctttgtacagttcttggcatcagtttctgggaaagtctcttgcttgaacacctgtggtgacttgctggtgactctacagtccctgagccgccagggtgagaagcggagcctccagctctccggcaaggtcaacgccatgactttcacctttgacaacgtgctccctggaaaatacaaaataagcatcatgcatgaggattggtgctggaagaacaagagcctggaggtggaagtgctggaggatgacatgtctgcagttgagttcaggcagacgggctacatgctgagatgttccctgtctcacgccatcactctggaattttatcaggatggaaatgggcgtgagaatgtggggatttatagcctcttcaaaggagtcaaccgattctgcctgtccaagcctggtgtgtacaaagtgacccctcgctcctgccaccggtttgagcaagcgttctatatctatgacacgtcttcacctagtatctttacattgacagccattcgccaccatgtccttggaactatcaccaccgacaaaatgatggatgtcactgtgactatcaagtcttccatcgacagtgaacccgccttggtcttaggccctctgaagtctgtgcaggagctgcggagggagcagcagctggctgagatcgaggcccgcaggcaggagagggagaaaaacggcaatgaggaaggcgaagaaagaatgaccaagcctcccgtgcaggagatggtagatgagttacaaggccccttctcgtatgatttctcttactgggcgcggtctggagagaaaatcactgttacaccgtcatctaaagagctgctcttttatcccccttcaatggaagccgttgtcagtggagaaagctgcccagggaagctgatcgagatccatgggaaggcaggcctgtttttagaaggccagatccaccccgagttggaaggagtcgagattgtcatcagtgaaaagggggcaagttcaccgctgatcacagtctttactgatgacaaaggtgcctacagtgttggccccctgcacagtgacctggagtacacggtgacctcacagaaggagggctatgttctgactgcggtggaaggaaccatcggagacttcaaggcctatgccctggcaggcgtaagctttgagataaaagctgaggatgaccagcccctcccgggagtcctcttatccctgagcggtggcctgtttcgttccaacctcttgacccaggacaacggcattctgacattctcaaacctgagccctggccagtattacttcaaacccatgatgaaggagttccggtttgagccatcctcacagatgatcgaggtgcaggaaggccagaacctgaagatcaccatcacggggtaccgaaccgcttacagttgctatggcacagtgtcttccttaaacggagagcccgaacaaggggttgccatggaagcggtgggccagaacgactgcagcatttacggagaagacaccgtgacagacgaagagggcaagttcagattacgtggattgctgccgggatgtgtgtaccacgttcagctcaaggcagaaggcaacgaccacattgagcgggcgctcccccaccatagggtgattgaggttgggaataatgacatcgatgatgtaaacatcatagttttccggcagattaatcaatttgatttaagtggaaatgtgatcacttcctctgaataccttcctacattatgggtcaagctttacaaaagcgaaaacctcgacaatccaatccagacagtttcccttggccagtccctgttcttccatttccccccactgctcagagacggcgagaactatgttgtgcttctggactccacactccccagatcccagtatgactacatcttgcctcaagtttctttcaccgcagtgggctaccataaacacaccaccttgatttttaatcccacgaggaagctgcctgaacaggacatcgcacaaggatcctacattgccctgccattgacgctgctggttctgctggccggttacaaccatgacaagctcattcctttgctgctgcagttgacaagccggctacagggagtccgcgcgctcggccaggcagcctctgacaatagcggcccagaagatgcaaagagacaagccaagaaacagaagacaaggcggacttgaggaggaaggggacagttgcagtctcacttgggacaggccacagccaggggtccggccactacccgcccgtgggataaaagccaaaagcatgcgtcagctaacttcagcctgtgctgctgggcccgcaccccatgtcccttgtcactgtgacatcctgcacccatcctcacccctccgtagagcccctcgtgcaatgcaatgaatggaccctcctgtcactctgctgaacagaatttattttctgagtcaaatataatttattattattttcgtcaaagaagtatttaagctgtgctgtggtgtgagaatgtcattcttgatcttcagccttcgtttgcaaggagagttccagttgacgtggtgtttggttccatggcggggtaccctggggattcatctgttttcttcacttccctttgcatctgagatcctgttggaaaccacagcaacctgtattcattattaggaaataaaaatcgaaaaaaaggttcattcttttgtgttgtagttttg

SEQ ID NO: 121458 - DNA, 460 bp, Homo sapiens
gcggccgctgtagttgcggcggtccagtcgtagcccggccgcccgcgcctgtccggtccggtccggccacggaggcagcgcagcggcgggactccgagcctaccccgccgagtgagctgcgccgcaccgtgccgtcccacccggcacccaccagtccgatggggccgcagcggcggctgtcccctgccggggacagccctactctggggcttcctgctccagctgacagccgctcaggaagcaatcttgcatgcgtctggaaatggcacaaccaaggactactgcatgctttataacccttattggacagctcttccaagtaccctagaaaatgcaacttccattagtttgatgaatctgacttccacaccactatgcaacctttctgatattcctcctgttggcataaagagcaaagcagttgtggttccatggggaagctgccattttcttgaaaaag

SEQ ID NO: 121459 - DNA, 468 bp, Homo sapiens
tttcgtcggaggcgggcgcgggcgcgtccctgtggccagtcaccggaggagttggtcgcacaattatgaaagatttcgttttttgctgctagcgcctgagctgagttagttctgagaaggtttccctgggcgttccttgtccggcggcctctgctgccgcctccggagacgcttcccgatagatggctacaggccgtggaggaggaggaggtggagttgctgcccttccggagtccgccccgtgaggagaatgtcccacaaatcctggatagaaagcactttgaccaagagggaatgtgtatatattataccaagttccaaggacccttacagatgccttccaggatgtcaaatttgtcagcaactcgtcaggtgtttttgtggtcgtttggtcaagcaacatgcttggtttactgcaagtcctgccatgaaatacttagatgtgaacttggtggcccatttttacag

SEQ ID NO: 121460 - DNA, 1805 bp, Homo sapiens
aaacaaggtccaactaatccaatgctgtttcatcttgttcgagacgtcaaacagggaaatcttcctccaggatataagatcactctgattgatataggacttgttattgaatatctcatgggaggaacctacagatgcacctatactaggaaacgttttcgattaatatataatagtcttggtggaaataatcggaggtctggccgaaatacctccagcagcactcctcagttgcgaaagagtcatgaatcttttggcaatagggcagataaaaaggaaaaaatgaggcataaccatttcattaagacagcacagccctaccgaccaaagattgatacagttatggaagaaggaaagaagaaaagaaccaaagatgaaattgtagacattgatgatccagaaaccaagcgctttccttatccacttaatgaacttttaatttgggcttgccttatgaagaggcaggtcatggcccgttttttatggcaacatggtgaagaatcaatggctaaagcattagttgcctgtaagatctatcgttcaatggcatatgaagcaaagcagagtgacctggtagatgatacttcagaagaactaaaacagtattccaaacagccgctcaggaagcaatcttgcatgcgtctggaaatggcacaaccaaggactactgcatgctttataacccttattggacagctcttccaaacttccattagtttgatgaatctgacttccacaccactatgcaacctttctgatattcctcctgttggcataaagagcaaagcagttgtggttccatggggaagctgccattttcttgaaaaagccagaattgcacagaaaggaggtgctgaagcaatgttagttgtcaataacagtgtcctatttcctccctcaggtaacagatctgaatttcctgatgtgaaaatactgattgcatttataagctacaaagactttagagatatgaaccagtatgtgaggctatcatatgacaccaaacctgaagtcattctgcaacttctgcttaaagaatggcaaatggagttacccaaacttgttatctctgtacatgggggcatgcagaaatttgagcttcacccacgaatcaagcagttgcttggaaaaggtcttattaaagctgcagttacaactggagcctggattttaactggaggagtaaacacaggtgtggcaaaacatgttggagatgcacctcaaagaacatgcttccagatcatctcgaaagatttgcactatcggaatagctccatggggagtgattgaaaacagaaatgatcttgttgggagagattcacccggaggagttggtcgcacaattatgaaagactcggcttctgctgctagcgccggagctgagttagttctgagaaggtttccctgggcgttccttgtccggcggcctctgctgccgcctccggagacgcttcccgatagatggctacaggccgcggaggaggaggaggtggagttgctgcccttccggagtccgccccgtgaggagaatggtactggacccacgcaggcccgggcggggaatggttctggggttgcgggcggtaaaggagagacttggcaggcaagtgtgtggggagccgcgttccatgcggcgaaggaccctcgaattgccttgaggcttccggatttgtcctctcgggacgggtgtgcagttcgttctgggcataggcttcatcaagaactgactcgcaatgttactgtggtgattatcggaaatgatccaaatgccttccaggatgtcaaatttgtcagcaactcgtcag

SEQ ID NO: 121461 - DNA, 5521 bp, Homo sapiens
cgccccgcatcgtgcccggccccgtcgcggagatcccggacgaccgtcgcgggttgatggtcgcattccagatgtaaacagcttcagaagcctgacggtcatatggtagaatcactgtggactgagacccacctttctagacctgaagcccaggaggaggaagaggaggctggttggtaccatgggcataatgctctgaatcctagtctctcacctagtatgtgagcagtccctgcagatggcccatttggagatcttgacaaagcctcttctgtttccaatggggtttttggcgcattctcacagacttagatgaaactgtgatggccaccgcagggggcaggtgctgacatcgtccccagccctgtggctgttcatccggacatcatttccaacctcaatatctaaatgccacagtgctcttggagcaagttgggctggggaccactgttgccttttaagaccataaaaccatgggaaacgcagaaagtcaacatgtagagcacgagttttatggagaaaagcatgccagcctggggcgcaacgacacttcccgctccctgcgcctctcgcacaagacgcggaggaccaggcacgcttcctcggggaaggtgatccacaggaactccgaagtgagcacccgatccagcagcacccccagcatcccccagtccctggctgaaaatggcctggagcccttctcccaagatggtaccctagaagacttcgggagccccatctgggtggaccgagtggacatgggcttgagacctgtgtcttacactgactcttctgtcactcccagcgtagacagcagcatcgtcctcacagcagcctctgtgcagagcatgccagacactgaggagagcaggctttacggggatgacgctacatatttggctgagggaggcaggaggcagcattcctatacatccaatgggcccactttcatggagacggcgagctttaagaagaaacgctccaaatctgcagacatctggcgggaggacagcctggaattctcactctctgatctgagccaagaacatttaacaagcaacgaagaaatcttgggttccgccgaagagaaggactgcgaggaggctcgggggatggaaacgcgggcgagtccgcggcagctcagcacctgtcagagagccaattccttgggtgacttgtatgctcagaaaaactctggagtgacagcaaacatggggccggggagcaaatttgcaggctactgtcggaatttggtgtctgatattcccaatcttgcaaaccataagatgccaccagctgctgctgaagagactcctccgtacagtaattataacacacttccctgtaggaaatctcactgtctctctgaaggtgccaccaacccacaaattagccatagcaacagcatgcaaggcagaagagctaaaacaactcaggatgttaatgcaggcgagggcagtgagtttgcagacagtgggattgaaggggccactaccgacacggacctcctgtccaggcgatctaatgccaccaactccagctactcacccaccacaggccgggcctttgtgggcagcgacagcggcagcagctccaccggggatgcggctcgtcagggggtgtacgagaacttccggcgggagctggagatgagcaccaccaacagcgagagcctggaggaggccggctctgcgcacagcgatgagcagagcagcggcaccctgagctctccgggccagtcggacatcctgctgaccgccgcacagggcacggtgcgcaaggccggcgccctggccgtcaagaacttcctggtgcacaagaagaacaagaaggtggagtcagccacccggaggaagtggaagcactactgggtgtccctgaaaggatgcacgctatttttctacgagagcgacggcaggtctgggatagaccacaacagcatccccaaacacgccgtctgggtggagaacagcattgtgcaggctgtgcctgagcaccccaagaaggactttgtcttctgcctcagcaattccctgggtgatgccttcctttttcagaccactagccagacggagcttgaaaactggatcaccgccatccactctgcctgcgccactgcggtcgcgaggcaccaccacaaggaagacacgctccgactcctgaaatcagagatcaaaaaactggaacagaagattgacatggatgaaaagatgaagaaaatgggtgaaatgcagctgtcttcagtcactgactcaaagaaaaagaaaacaatattagatcagatctttgtctgggagcaaaatctcgagcagttccaaatggacctgtttcgtttccgctgttatttagccagccttcagggtggggagctgccaaaccccaaaaggcttctcgcttttgcaagtcgaccaacgaaagtggccatgggccgccttggaatcttttcggtatcatcgtttcatgccctggtggcagcacgcactggtgaaactggagtgagaagacgtactcaggccatgtccagatccgcgagcaagcgaaggagcaggttttcttctctgtggggtctggatactacctccaaaaagaagcagggacggccaagcatcaatcaggtgtttggagagggaaccgaagctgtaaagaaatctttagagggaatatttgatgacattgttccagatggcaagagggagaaagaagtggtcttacctaacgttcaccagcacaaccctgactgcgacatttgggtccacgagtatttcactccatcctggttctgtctgcccaataatcagcctgccctgacggtcgtccggccaggcgacactgcacgggacaccctggagctgatttgcaagacacatcaactggatcattctgctcattacctgcgcctgaaatttctaatagaaaacaaaatgcagctctatgttccacagcccgaggaagacatctatgagctgctgtacaaagaaattgaaatctgtccaaaagtcactcacagcatccacattgagaagtcagatacagctgctgatacttacgggttttcactttcttctgtggaagaagatggtattcgaaggctgtacgtgaatagtgtgaaggaaaccggtttagcttccaagaaaggcctgaaagcaggagatgagattcttgagatcaataatcgtgctgctgacgccctgaactcttctatgctcaaagatttcctctcacaaccctcgctgggcctcctggtgaggacctaccccgagctggaggaaggagtggagctgctggaaagcccgccccaccgagtggacggccctgccgaccttgacgagagccccctcgcctttctcaccagcaacccagggcacagcctttgcagcgagcagggcagcagtgctgagaccgctccagaggagaccgaggggccagacttggaatcctcagatgagactgatcacagcagcaagagtacagaacaggtggccgcattttgccgcagtttgcatgagatgaacccctctgaccagaacccatctcctcaggactccacggggcctcagctggcgaccatgagacaactctcggatgcagataacgtgcgcaaggtgatctgcgagctcctggagacggagcgcacctacgtgaaggatttaaactgtcttatggagagatacctaaagcctcttcaaaaagaaacttttctcacccaggatgagcttgacgtgctttttggaaatttaacggaaatggtagagtttcaagtagaattccttaaaactctagaagatggagtgagactggtacctgatttggaaaagcttgagaaggttgatcaatttaagaaagtgctgttctctctggggggatcattcctgtattatgctgaccgcttcaagctctacagtgccttctgcgccatccacacaaaagttcccaaggtcctggtgaaagccaagacagacacggctttcaaggcattcttggatgcccagaacccgaagcagcagcactcatccacgctggagtcgtacctcatcaagcccatccagaggatcctcaagtacccacttctgctcagggagctgttcgccctgaccgatgcggagagcgaggagcactaccacctggacgtggccatcaagaccatgaacaaggttgccagtcacatcaatgagatgcagaaaatccatgaagagtttggggctgtgtttgaccagctgattgctgaacagactggtgagaaaaaagaggttgcagatctgagcatgggagacctgcttttgcacactaccgtgatctggctgaacccgccggcctcgctgggcaagtggaaaaaggaaccagagttggcagcattcgtcttcaaaactgctgtggtccttgtgtataaagatggttccaaacagaagaagaaacttgtaggatctcacaggctttccatttatgaggactgggaccccttcagatttcgacacatgatccccacggaagcgctgcaggttcgagctttggcgagtgcagatgcagaggcaaatgccgtgtgtgaaattgtccatgtaaaatccgagtctgaagggaggccggagagggtctttcacttgtgctgcagctccccagagagccgaaaggatttcctaaaggctgtgcattcaatcctgcgtgataagcacagaagacagctcctcaaaaccgagagccttccctcatcccagcaatatgtcccttttggaggcaaaagattgtgtgcactgaagggggccaggccggccatgagcagggcagtgtctgccccaagcaagtctcttgggaggaggaggcggcggctggctcgaaacaggtttaccattgattctgatgccgtctccgcaagcagcccggagaaagagtcccagcagccccccggtggtggggacactgaccgatgggtagaggagcagtttgatcttgctcagtatgaggagcaagatgacatcaaggagacagacatcctcagtgacgatgatgagttctgtgagtccgtgaagggtgcctcagtggacagagacctgcaggagcggcttcaggccacctccatcagtcagcgggaaagaggccggaaaaccctggatagtcacgcgtcccgcatggcacagctcaagaagcaagctgccctgtcggggatcaatggaggcctggagagcgcaagcgaggaagtcatttgggttaggcgtgaagactttgccccctccaggaaactgaacactgagatctgactgcgtcacctgccccgtagagaatgtgtgtagatacttcctgccctaactctgcccaccctcctgtaccgtcgacaagaatgtccccttaggtcgcgctcttgcacacacggttttggcagctgacttggttctgaagccatgtagccacccaactttgtcattttcaacaacatcagaaagaattgatcagaatcccaaataaaacccaaaagtgtctaatgtattcattcattagctaactaaaagcccaaaaaagacaagacacccag

SEQ ID NO: 121462 - DNA, 1005 bp, Homo sapiens
ttaagcagcgtttgttgaacaggaaaggcctctgtgatagccgtgaaagtcgaaggcaccttgcttcagagagaggaattgccaagtgctgagcacggacagccgcttggtctgcatgggcaggacgtgcctctgtgcagtacccgtgaagtgtgaggttctattttggtctgatgttccatggagatggcctggagctcgattctgaaaaccgaagacagtcaggcggcagggaggggcggcaaaggaagaggaactgcacagatttctcttcccacaaacaaatatggtccagggcttcagattctctgaagtctcacagatacccggcagcacatggtcctctgtttgtttgtcgataacatttggagacacgcgcgcctcgtaaactgtcggcctgctgtgcttcttgtcacacagcacatggcctgcctgcgtgggccctgctatggccgggggcggggtaacttccagtgagatttgactgatgacaccgtcaaatccgagccctcttcctctcccccggtcccctgctgcatgcctggcagtgtgctcagtactgggatgtggatgggcatcctgcttctccagccacgactgagccttatcttcagctttcttctctctctgattggtagcagagctgtcgtgctttgtttcacaggggtggcttttagcaattactgtccatgttgacccacattttcttctgatttcatctgacagggcacagcctttgcagcgagcagggcagcagtgctgagaccgctccagaggagaccgaggggccagacttggaatcctcagatgagactgatcacagcagcaaggtgagagattttcattttcacatcccatgctttgaaccactgaagaatcacagctgacaatgtcacctacacagctgtatgtggttaccaggcctctccatggacgaagtgtttttgcttctgagatgttgcgtcgctgtccttgctgcgttgagacgtggccgtagattttcat

SEQ ID NO: 121463 - DNA, 661 bp, Homo sapiens
cctttgcgccagctgctctgtgtcaagcgagggttttgctagcatcactgacatgagggttgccagagcagactgctcctccgttgcctcctttgcagcactgccatctaaaccatagaggggctgttctactcgtcgctcaaagtaatcactaattttatgtcccctaggagtgcctttcccttggctagtttcatatggttcagcttttcttttccgatttcgctggtcattctgctttttctcgggagtctctacttctttatcactcaaggatccgacgctgcacaagctctggttggaagactcactattaagtggtcccttactaacacctaatccagtaaaacctggcctccaataattcctggcgtcgtggggtcccaggctatgcaattcttccatcatttctgctgccgccgccgccgccgccgctccacgctcctcccgggaggggccccgacccgacccggctgcggaccgctccgctctccccctgggcaggcccggggcggagccggggcctctcctgagcgccgcaaccccccgcccgggcagccgccgccggcgccgggctccacgagagggcgggcgggggagggggggcacgaaggccgcagatccccgggctcgcgtacagagccaggcgcccgacgcgggc

SEQ ID NO: 121464 - DNA, 1848 bp, Homo sapiens
atggcgggatccttgtcatttgaagatgtgactgtgggcttcacccaggaggagtggcagcatctggaccctgctcagatgaccctgtacagggatgtgatgctagagaactacagccacctcgtctcagtggaagtctgcaaagtggatgatcaactagagcactgtcaggaaatccaggacagacatatctggcaagctccatatatcaacaatagaacactgactatagagagaggtaacatagtaggaaaagtgtttgatttcagcatacacccacttccttccataaaaataccttgtaaatgtgacttatgtggtatgagtttgcaatacatttcagatttatttaatagtaagaaaaactatttaagaaagatgcctcatgacctcagtgcatatggaaaactattcctcaatagtaaccatgaaaaaactcatatggaagagaaaccttatgagtttattcaaaatggaaaatgtctcagtcataaggaggacttcatttcatatctgagaattcaaaatttagagcaatcttttgaatataaggaatgtgaaaaggatttctatggaaaggcagttttcattacatataagcaagcttacacaggagcgagtccttgtgtacacaatgaatgtaataaagtgttctgtaataattcaactctcatggtccataaaatgtcagaaaaaagagaaaacttttatgagtttaatgaatatgaaaaaacctttgagaagtcccctttcttgaaacataaagttcatttggaggaaatctctcctcactctacatcagagagtccacacaggagagaaaccctatgtaaggaatgtgggaaatgcttttctaggaattcacacctcataatacatcagagaactcacacaggagagcaaccctgtgaatgcaaggaatgtagaaaaagcttctatcataagtcatatcttacagtacatcagagaattcacacaggggagaaaccctatgaatgtaatcaatgtggaaaaaccttcataagcaactctgttctcacaatacatcgtaaaacatatacaggtgagaaaccctatgaatgtaatgaatgtgggaaatctttctctaggagttcatatcttacaatacatcagagaactcacccaggcgagaaaccctatgaatgtaaggtatgtagaaaaaccttttgccacaagtctgatgccactaaacatcagaagactcacctagggggaaaaccctatgaatgtactcaatgtgggaaaacttttagtcgtaactcaggcctaaaagtacatcagagaacacatgcaaaggagaaaccctatgaatatactgagtgtgggaaatccttctctgagaaatcagtcctcacagtacatcagagaatacacacaggggaaaaaccttataaatgtaatgcacgtggaaaaaccttctacaataaatcagacctaaccaaacatcagagaacacacacaggtgagaagccctgtgaatgtaaggaatgtgggaaattcttctctaggaattcataccttacaatacaccagagaatgcatacaggagacaaaccctatgtgtgtaaaaaatgtgggaaaaccttctaccataaggcagactatacagtacataagagaacacacagaggggagaaatcttattactgtaataaatgtgggaaaacctttatttgcaactcagtcctcaaatcacatcagagaacacacacaggggagaagccctatggatgtaatgagtgtgggaagtccttctctgagaaatcagtccttactgtacatcagagaatacacacaggggaaaaaccttataaatgtaatgaatga

SEQ ID NO: 121465 - DNA, 1508 bp, Homo sapiens
atgggatccttgagtgataaagaagtagagactcccgagaaaaagcagaatgaccagcgaaagtggaaaagaaaagccgaaccacatgaaactagccaagggaaaggcactgctgggggacaatcttatcaagcatcagaaaaggataaattcacagagggaagagatagaaagacaacggaaaatgttagcaaagcgggaaacctcctgccatgggtcaggcccctcctgcaaccaatgagcagaaacagcggaaaagcaagaccaatggagctgaaaatgaaacgttaacgttagcagaataccatgaacaagaagaaatcttcaaactcagattaggtcatcttaaaaaggaggaagcagagatccaggcagagctggagagactagaaagggttagaaatctacatatcagggaactaaaaaggatacataatgaagataattcacaatttaaagatcatccaacgctaaatgacagatatttgttgttacatcttttggatagaggagaagtctgcaaagtggatgatcaactagagcactgtcaggaaatccaggacagacatatctggcaagctccatatatcaacaatagaacactgactatagagagagtacatcagagaattcacacaggggagaaaccctatgaatgtaatcaatgtggaaaaaccttcataagcaactctgttctcacaatacatcgtaaaacatatacaggtgagaaaccctatgaatgtaatgaatgtgggaaatctttctctaggagttcatatcttacaatacatcagagaactcacccaggcgagaaaccctatgaatgtaaggtatgtagcaaaaccttttgccacaagtctgatgccactaaacatcagaagactcacctagggggaaaaccctatgaatgtactcaatgtgggaaaacttttagtcgtaactcaggcctaaaagtacatcagagaacacatgcaaaggagaaaccctatgaatatactgagtgtgggaaatccttctctgagaaatcagtcctcacagtacatcagagaatacacacaggggaaaaaccttataaatgtaatgcacgtggaaaaaccttctacaataaatcagacctaaccaaacatcagagaacacacacaggtgagaagccctgtgaatgtaaggaatgtgggaaattcttctctaggaattcataccttacaatacaccagagaatgcatacaggagacaaaccctatgtgtgtaaaaaatgtgggaaaaccttctaccataaggcagactatacagtacataagagaacacacagaggggagaaatcttattactgtaataaatgtgggaaaacctttatttgcaactcagtcctcaaatcacatcagagaacacacacaggggagaagccctatggatgtaatgagtgtgggaagtccttctctgagaaatcagtccttactgtacatcagagaatacacacaggggaaaaaccttataaatgtaatgaatga

SEQ ID NO: 121466 - DNA, 688 bp, Homo sapiens
ctctcctgttggggatgtgccattcatccgatcaggattgctggggtttgtagggccgggtagtttggtgttcgtggttgggaaaatggatggcttactgatggttagtggtcgaagacataatgctgatgacattgttgctactggattggctgtagaatcaataaagactgtttatagaggaagaattgctgtgttttctgtgtctgtattttatgatgagcgcattgtggtggttgcggaacaaagacctgatgcttctgaggaagatagtttccagcggatgatccgcgtgctgcaggcgatcgatagcattcatcaagtgggggtttattgtcttgctctggtgccagccaatacattgccaaaaactccactaggaggaatccatatatctcagacgaaacaactctttctggagggatcactgcatccttgcaacatcctcatgtgcccccatacatgtgtgacaaacttgccaaagccccggcaaaaacaaccaggtgtaggccctgcttccgtgatggttgggaatctggttgctggaaaacgtatagcacaagctgctggaagggatctgggacaaatagaagagaatgatttggtgaggaagcaccagtttctggcagagatcctacagtggcgagcccaggcgactcctgaccatgtactcttcatgctgttaaaa

SEQ ID NO: 121467 - DNA, 518 bp, Homo sapiens
atgctgctggcatggtccaagtgggaagaaaaagagccctacgtggtgacattctggaaggatatcatggatgattgcaaaagatgcagtgatgatgtccagagtgtacgggaaataaaacgtattgaaatgctagaacataagtacggcggtcacctggtgtcccggcgcgccgcttgcaccatccaaaccgccttccgccaataccagctcagcaagaacttcgagaaaatccgcaactcgcttctggagagccgcctgccacggcggatctccctgcgcaagcctggcggccgagaaagcgctcatggagggctacggctcgtggggctgccgctggtgcgctcgccctccctgccgcccaccttcgcaggcaccctcaccgagctggaggactccttcaccgagcaggtgcaatccctggccaagtccatcgacgacgcgctcagcacgtggagcctcaagaccatgtgctccctgcgagatagtggcgcttaccagctccaccaggccctgca

SEQ ID NO: 121468 - DNA, 279 bp, Homo sapiens
atgacaactcagaaaggacctgaaaacttacattatgatcagggttgtcagacatctcgaaccaaaatgacacccctcagacagggcattttaaaggctttcacggtgtaccacatgagggagctttgtaacaaggcttgtgaggctctcaatgccgacaaggaaaccaccatggatagactcctggaagcagtcacaatatgcatcttcttgattatggcgacacaacctgggggcagtataaagcagtccattgataactgttgggaagatgtttga

SEQ ID NO: 121469 - DNA, 5071 bp, Homo sapiens
ccgccgcctcctccgcctcctcctcctcaccagcgctaaagccgggactggaccgagcggagttgaccaagaatcgccttcagccctgtctggtgcatccttggcagaaagtgaggaggaaaacacccccattgttagatgaggtcttaatcatggaacatttgaagtcacgtaaagaaggttctttggcatggacacaagttcagtgggaggattagaattgactgatcagactcctgttttattagggagtacggccatggcaactagtctcacgaatgtaggaaactcatttagtggtccagctaatcctttagtgtctagatctaataagtttcagaactcgtcagtggaagatgatgatgatgttgtttttatcgaacctgtacaacctcccccaccttctgtaccagtggtagctgatcaaagaaccataacatttacatcatcaaaaaatgaagaactacaaggaaatgattccaaaattactccttcctcaaaagagttggcatctcagaagggaagtgtaagtgagacaattgtcattgatgatgaagaggacatggaaacaaatcaagggcaagagaaaaattcctccaattttattgaacgaagacctcctgagactaaaaacagaaccaatgatgtggatttctccacttccagtttttcaagaagtaaggtaaatgcaggaatgggtaatagtggtatcaccacagaaccagactctgaaattcagattgctaatgttacaactttagaaacaggtgtaagctctgtgaatgatggccaattagaaaatactgacgggcgagatatgaacttaatgattacacatgtaacatcactgcagaataccaacttgggagatgtctctaacggactgcagtcaagtaattttggtgttaatatacaaacatacaccccatctttaacttcacagaccaagactggagtaggaccttttaatcctggtagaatgaatgtggcaggagacgtttttcagaatggagaatctgcaactcatcataatcctgattcttggatctcccagtcagcttcatttccccgtaatcagaaacaaccaggggtggactctttatcaccagtggcctcacttcctaaacagattttccagccgtctgtccaacagcagcctactaaaccagttaaagttcacttgtgcaaactgcaaaaaacctttacagaagggccagacagcttatcaacgaaaaggatcagctcacctcttttgttctaccacctgcctttcttccttctcccacaagcctgctccaaagaaactctgtgttatgtgtaaaaaagatataactacaatgaaaggaaccattggttggctcaagtggattcaagtgagtccttccaggaattctgtagtaacatcctgtttaatctctctaatgaagaacaacagaatcctactaaagggagctctaaataaatcaagatgtacaatctgtggtaaactaactgagattcgccatgaagtcagctttaaaaatatgactcataagctgtgcagtgaccactgctttaatagatatagaatggccaatggtttaataatgaattgctgtgaacagtgtggagagtacttgcccagtaaaggtgctggaaataatgttctggtgattgatggtcaacagaaaagattttgctgtcaaagttgtgtcagtgaatacaaacaggtaggtagccatccaagcttcctgaaggaggttcgagatcacatgcaggactctttcttaatgcagcctgagaaatatggaaaactgacaacttgtactggttgccgaacacagtgcaggttttttgatatgactcagtgtataggtcctaatggatatatggagccatattgttcaactgcttgtatgaacagtcacaagacaaaatatgcaaaatcacaaagtttgggaattatttgccatttttgtaagcgaaactctttacctcaataccaagccacaatgcctgatggaaaactgtacaacttttgcaattccagttgtgtggctaaatttcaggctctaagtatgcagtcatctccaaatggccagtttgtagcgccaagtgatattcagttgaaatgcaactactgcaaaaattccttttgttcaaaaccagaaatcctggaatgggagaacaaagtgcatcagttctgcagcaaaacttgttcagatgactataagaagttgcattgcatagttacatattgcgaatactgtcaagaggagaagactcttcatgaaacagtaaatttctctggcgttaagagacctttctgtagtgaaggctgcaaattattatacaaacaggattttgccagacgtttaggattgagatgtgttacttgcaactattgttctcagctatgtaaggggggagcaactaaagaactcgatggtgttgtgagagatttctgcagtgaagattgctgtaaaaaatttcaggattggtactacaaggctgcaaggtgtgactgttgtaaatctcaaggaactcttaaagagcgagttcagtggcgtggggaaatgaaacatttctgtgatcaacattgcttactgcgtttctactgtcaacaaaatgagcccaacatgacaactcagaaaggacctgaaaacttacattatgatcagggttgtcagacatctcgaaccaaaatgacaggttcagcaccacccccttctccaacacctaacaaagagatgaagaacaaagcagttctttgcaaacctttaacaatgacaaaagctacttactgtaaacctcacatgcagaccaaatcttgtcagacagatgatacttggaggacagaatatgttccagtgcctatccctgtgcctgtgtatatcccagttcctatgcacatgtacagtcagaatattcctgttcctactacagttcctgttcctgtgccagttcctgtttttctgcctgctccattggacagcagtgagaagattcctgcagcaattgaggagctaaaaagcaaggtttcttcagatgctcttgatacagagttgcttacaatgacggatatgatgagtgaagacgaggggaaaacagagacaaccaacatcaacagtgtaattattgaaacagatataattggttcagaccttttgaagaactctgacccagagacacagtccagcatgcctgatgtaccatatgaaccagatttggatatcgaaatagattttcccagagctgctgaggagcttgatatggaaaatgaatttttattaccacctgtttttggcgaagaatatgaggaacagcccagacctcgatctaaaaaaaagggagccaagagaaaggctgtatcaggataccagtctcatgatgatagttctgacaattcagaatgcagctttcctttcaaatatacgtatggcgtaaatgcatggaaacactgggtcaaaactaggcaacttgatgaagatcttctggtattagatgagttaaaatcttctaaatcagtaaagttaaaagaggatctactctctcacaccacagctgagcttaactatgggttagctcattttgtcaatgagatccgacggccaaatggagagaattatgcacctgacagcatctattacctttgccttggaatacaggagtatttgtgtggaagtaatcgaaaagacaacatatttattgatcctggataccaaacatttgagcaagaattgaataaaatactgcgaagctggcaaccaagcatacttccagatgggtcaatattctctcgagttgaagaagactatctctggaggataaaacaactaggatcacactctccagtagctcttctgaatacactgttctactttaacactaagtattttggcctgaaaacagtggaacaacacttaagactttcctttggcactgtgtttaggcattggaaaaaaaatcctttaacgatggaaaacaaagcgtgtcttcgataccaagtgtcttccttgtgtggaacagataatgaagataaaattactactggaaaaagaaaacatgaagatgatgagccagtatttgaacaaattgaaaacacagccaatccttccagatgtcctgtgaaaatgtttgaatgctacttgtctaaaagtccacagaatcttaatcagaggatggatgttttttatttgcaaccagaatgctctagttctacagatagccctgtctggtatacgtctacttcactggaccgaaacaccttggaaaatatgcttgtacgggttcttctagtaaaagatatttatgataaagacaattatgaactggatgaagacacagactaaaaaggaacgttgcagaagcaatcgggataaaacagcattagatagtcatgctgctagatctttattatggaaaacatttcaagtttactccttctgttttgagttttgtagcagtgtacccacgctgggtattaccatgtaaataatctgtgagtgaaagttgccattattctatgtagtggttttaggatacttaacaaatacattcaaattctttttttattattatttatttgattaggtatgtttgtaactttttacattacagaatatgaatgagaatgtgccatgtataatttttttcttgtagtaagaaacatccatattgcacaactctactgttgcaaagcttccttggaagggggctcttttactgggttcttaaccagatggttgtgtatgggtagcactactaaaagtttagaacttgcagtgtctttcggaatttttaaaataaactgtaaactaataggctggggtttttgttttgttttggggttttgttttgtttggttttacattttagttactgaagccttacaaggttatgtagagagataccatcttctgtaccaaaaatagacaagagaatgctgtcaatattggtgtactgtaatgtgaatctatgctggtgaaaacaattttttgttccccttattaaaaccttagtgtccttttctcatttgtggctttctgcatcacccaatcaataaaaaacaaatatatatatgtaaaaaaaa

SEQ ID NO: 121470 - DNA, 1074 bp, Homo sapiens
atgaaggctgcctcatcctcaggcctgcctgtaaaggatgtgctgttactatccccaatctatggtggaggaaactggggcaccaaaagattaggtcacttgcccaaggtctcacagcaggtgactgataaatatgtgtttaatgaccgaatactttccccctgtggttggtttgaggagtcagtacctgcatccagccaggccctgggatgggtgctcggaaactgttattacatcatcatcaccaccaccatcatcatcaccactatcaccaccatcatcaccactatcaccatcaccatcatcacgactatcaccaccatcatgtaccgggatcatgctagaacgctgtttgtttttttgtcgtctttgtgtcggcgtcgttgtgtgttggttctccgttcggctgttgtcgtctcctcctcctgttctctcgtgttgcgttttttgtttcctgagcgttttgctggctggtgctacgcgcgtgtgttcggctcgccctttggttgtttggcctgctcctgcaaccagcacgcccgacgctgccggttcaactctgagctgttcagactgtcgggcggccggagtgggggtgtttgtgagcggtgccgccaccacacagctgggcggcactgccactactgccaacctgggttctggagggaccctagccagcctatcttcagccgcagggcctgcagagcctgccagtgccaccctattggggcaacaggaggaacctgcaaccagaccagtgggcagtgcacctgcaagttaggggtcacaggcctgacctgcaaccgctgtggccctggctaccagcagagccgctcccccagatgccttccagctcacatcggaccagcacctgaccccgaggactggtggagctacaaggataatctccagggaaacttcgtgccaggtgccgccaaggcggggacccaggagtccggccctcccggcgcctccttcttcagactcaggaacctgggttcccagctccctcctcccccccaggaccaggagtcccagccccctcctctgtccctcaggagtcgggccagcttctga

SEQ ID NO: 121471 - DNA, 2121 bp, Homo sapiens
  misc_feature (1)...(2121): n = a,t,c or g
accccggatccaacccttccgcggtttatgggagcgcttttcatgttgaaaatggtgactcttttgccggctggtttgccttcttaaaaaggaagcgcgagcacctcgagctcagcagagcagccgctggggattacccaaaatncaaaggctgaagtgaatctgggggggctgtctagtttagtagtgaacaccccaattacctctgtctccctcagccactcatcgtctgagtctagcaagatgtcagagagcaaagaccaagagaacaactgtgaaaggccaaaagaaagcaacgttttacacccaaacggggagtgccctgtcaaaagtgaacccactgaaccgggagatgaggatgaagaagatgcgtactccaatgaacttgatgacgaggaagtattaggtgaactcaccgatagtattggtaacaaagatttccctctcttaaaccaaagcatttctcctttatcatccagtgtgctaaaatttattgaaaagggtacctcgtcctcctcggcgactgtttctgatgacacagaaaagaaaaaacagactgctgctgttagggccagtggcagtgttgctagtaactatggcatcagtggcaaggactttgcagacgcaagtgccagtaaagacagtgccacagctgctcatccaagtgaaatagcccggggagacgaagacagttcagccactcctcaccagcatggctttaccccgagtactcctggcacaccagggcctggaggagacggctcaccgggcagtggcatcgagtgtccaaagtgcgacactgtgttggggtcttcgaggtctcttggtggtcatatgactatgatgcactcgaggaactcatgcaaaaccctcaaatgtcctaaatgtaactggcactacaaatatcagcagaccctggaggcccatatgaaggagaaacaccctgagccgggtggctcttgtgtttattgtaagactggacagcctcaccccaggcttgcccggggtgagagttacacgtgtggctataaacccttccgttgtgaggtttgtaactactctaccactaccaaaggcaacctcagtattcatatgcagtcggacaagcacctgaacaatgttcagaatctccaaaatggcaatggtgagcaggtgtttggccactctgccccagcccccaacaccagcctcagtggctgcggaacaccctctccgtccaaacccaaacagaaacccacctggcggtgtgaagtttgtgattatgaaaccaatgtcgccaggaacctccgaattcatatgaccagcgaaaagcacatgcataatatgatgcttttgcagcagaacatgaagcagatccagcataatctgcacttgggcctcgccccggcggaagcagagctttatcagtactacctagcccagaacataggcctgaccggaatgaagctggaaaaccctgccgaccctcagctgatgatcaatccattccagctggatccagcgacagcagcggctttggcaccagggctcgtaaataatgagctgccgcctgaaatccggcttgccagtggtcagctaatgggtgatgacctgtccctccttactgcaggagagctgtcaccttatatcagtgacccagcgctgaagctattccagtgtgctgtttgcaacaaattcacctctgacagcctggaggccctaagtgtgcatgtgagcagtgagcgctctctccctgaagaggaatggagggcagtaattggagatatctaccagtgcaagctctgcaactacaacactcagctcaaagccaacttccagctacactgcaagactgataaacatatgcagaaatatcaactggtggctcacattaaagaagggggcaaaagcaatgagtggaggttgaagtgtattgccattggcaaccctgttcacctaaaatgtaacgcctgtgactattacaccaacagtgtggataaattacgcttgcataccaccaatcacaggcacgaggcggccctgaagctctacaagggcaatttgcttggtgccacagttacccttgaagttccttttcatggagagttggatgttgtctttgaatttataacaaccaattaa

SEQ ID NO: 121472 - DNA, 2932 bp, Homo sapiens
cgcccctccccctcccgtgacgctcgctttctgtcagcctctctccctctccctctcccctctccttcctctcgcttcctctctcgcacctgagcgtacgcacctgcccgggcccggctccctcctcctctcccctccctctttccccgcccggccgcgggagcctcgtggctgcgtcaccgccgcccccccagacaagatggacaccgcggaggaagacatatgtagagtgtgtcggtcagaaggaacacctgagaaaccgctttatcatccttgtgtatgtactggcagtattaagtttatccatcaagaatgcttagttcaatggctgaaacacagtcgaaaagaatactgtgaattatgcaagcacagatttgcttttacaccaatttattctccagatatgccttcacggcttccaattcaagacatatttgctggactggttacaagtattggcactgcaatacgatattggtttcattatacacttgtggcctttgcatggttgggagttgttcctcttacagcatgccgcatctacaagtgcttgtttactggctccgtgagctcactactgacgctgccattagatatgctgtcaacggaaaatttgttggcagattgtttgcagggttgttttgtggtgacgtgcacactgtgtgcattcatcagcctggtgtggttgagagagcagatagtccatgggggagcaccaatttggttggagcatgctgccccaccgttcaatgctgcggggcatcaccaaaatgaggctccagcaggaggaaatggtgcagaaaatgttgctgctgatcagcctgctaacccaccagctgagaacgcagtggtgggggaaaaccctgatgcccaggatgaccaggcagaagaggaggaggaggacaatgaggaggaagatgacgctggtgtggaggatgcggcagatgctaataacggagcccaggatgacatgaattggaatgctttagaatgggaccgagctgctgaagagcttacatgggaaagaatgctaggacttgatggatcactagtttttctggaacatgtcttctgggtggtatctttaaatacactgttcattcttgtttttgcattttgcccttaccatattggtcatttctcccttgttggtttgggatttgaagaacacgtccaagcatctcattttgaaggcctaatcacaaccatagttgggtatatacttttagcaataacactgataatttgtcatggcttggcaactcttgtgaaatttcatagatctcgtcgcttactgggagtctgctatattgttgttaaggtctctttgttagtggtggtagaaattggagtattccctctcatttgtggttggtggctggatatctgttccttggaaatgtttgatgctactctgaaagatcgagaactgagctttcagtcggctccaggtactaccatgtttctgcattggctagtgggaatggtatatgtcttctactttgcctccttcattctactactgagagaggtacttcgacctggtgtcctgtggtttctaaggaatttgaatgatccagatttcaatccagtacaggaaatgatccatttgccaatatataggcatctccgaagatttattttgtcagtgattgtctttggctccattgtcctcctgatgctttggcttcctatacgtataattaagagtgtgctgcctaattttcttccatacaatgtcatgctctacagtgatgctccagtgagtgaactgtccctcgagctgcttctgcttcaggttgtcttgccagcattactcgaacagggacacacgaggcagtggctgaaggggctggtgcgagcgtggactgtgaccgccggatacttgctggatcttcattcttatttattgggagaccaggaagaaaatgaaaacagtgcaaatcaacaagttaacaataatcagcatgctcgaaataacaacgctattcctgtggtgggagaaggccttcatgcagcccaccaagccatactccagcagggagggcctgttggctttcagccttaccgccgacctttaaattttccactcaggatatttctgttgattgtcttcatgtgtataacattactgattgccagcctcatctgccttactttaccagtatttgctggccgttggttaatgtcgttttggacggggactgccaaaatccatgagctctacacagctgcttgtggtctctatgtttgctggctaaccataagggctgtgacggtgatggtggcatggatgcctcagggacgcagagtgatcttccagaaggttaaagagtggtctctcatgatcatgaagactttgatagttgcggtgctgttggctggagttgtccctctccttctggggctcctgtttgagctggtcattgtggctcccctgagggttcccttggatcagactcctcttttttatccatggcaggactgggcacttggagtcctgcatgccaaaatcattgcagctataacattgatgggtcctcagtggtggttgaaaactgtaattgaacaggtttacgcaaatggcatccggaacattgaccttcactatattgttcgtaaactggcagctcccgtgatctctgtgctgttgctttccctgtgtgtaccttatgtcatagcttctggtgttgttcctttactaggtgttactgcggaaatgcaaaacttagtccatcggcggatttatccatttttactgatggtcgtggtattgatggcaattttgtccttccaagtccgccagtttaagcgcctttatgaacatattaaaaatgacaagtaccttgtgggtcaacgactcgtgaactacgaacggaaatctggcaaacaaggctcatctccaccacctccacagtcatcccaagaataa

SEQ ID NO: 121473 - DNA, 1680 bp, Homo sapiens
atggaactggattacacagatccggcgctcatcggccagagcttttatggcaagctgcagacccaggcccccaatgtctgcccccactccctgctcattgaactccttacctacctctgcctgagcttcctccgctcctactacccctgctacctgaaggtctgccacagggacatccttggcaaccgcgacgtgcaggtcaagagcgtggaggtcctcattaggattacagcacagctggtctccatggccaagtcggcggaagggaagaacacggagttcatccacagcctgctgcagaggtgcaaggtccaggagttcgtcctgctctcgctgtccgcgtccatgtacaccagccagaagcgctacggcctggccaccgccgaccggggcggcaggctcctcgcggaggacagcctctttgaggagagcctcatcaatctggggcaggaccagatctggagcgagcacccactgcagatcgagctgctcaagctgctgcaggccctcatcgtcctggagcaccacctgggccagggccaggaggaggcggagactcagccggccctatcccgagagtggcagagggctctcaacttccagcaggccatcggtgccatgcagtacgtgcagccccaccccctcacctcccagggccttctggtctcagctgtggtgagagggctgcagcccgcctatggctacggcatgcaccccgcctgggtgagcctggtcacgcattccttgccatactttggaaagtctctgggctggacagtgacaccctttgttatccagatttgcaaaaatttggacgatctggtcaagcaatatgaaagtgaatctgtcaagttcaccatcagccgcgtggccctggtaactggggctaacaaaggcatcggctttgcgatcacgcgtgacctgtgtcggaaattctccggggacgtggtgctcacggcgcgggacgaggcgcggggccgcgcggcggtgcagcagctgcaggcggagggcctgagcccacgcttccaccagctggacatcgacgacccgcagagcatccgtgcgctgcgcgactttctgcgcaaggagtacgggggacttaacgtgctggtcaacaacgcgggcatcgcctttagaatggatgacccaacacccttcgacattcaagctgaggtgacactgaagacgaacttttttgccactagaaatgtctgcactgagttactgcctataatgaaaccacatggatgtaagatggacccggaggagcaggagctactgaacgattacagatacagaagctactcctcagtaatcgagaaggcgttgagaaactttgagtcctccagcgaatgggcagatctcatctcttcgctcggcaagctcaacaaggtgctgggtcacttcctatgggaggcccggccgcgggagcctcgtggctgcgtcaccgccgcaccccccagacaagatggacaccgcgtgaggaagtgccctaccccctcgcgacagaacttctttgttgactttgaaacttcgcgaaaaataccccgccagatgacggccgagtggatgcctttcctgtgcacaggattcagcgctttcccagcgggctccctgcagctccaccaaggagtgctggaggctgagtcagcagcacggccaggaaatggtaacagatga

SEQ ID NO: 121474 - DNA, 13329 bp, Homo sapiens
gggacaccatcatttgggtttttaaaagcttcagcttctccagcatctttgcattgtgaatatcttcctgcttctagtcaaagctttctctctagtgattggaatgctgctgtaagcctattagaggtgcctgaggatatcaccttttacaaggaagccgtgtgtgcttgagaggatctttttaaatgcattatggctcatgcagcctcacaattaaagaaaaacagggatttagaaatcaatgctgaagaagagcctgagaaaaaaaggaaacaccgcaaacggtcccgggatcggaagaaaaagtctgatgccaatgcaagttacttaagagcagctcgagctggacaccttgaaaaggccctcgactacataaaaaatggagttgacatcaacatttgcaatcagaatgggttgaacgctctccaccttgcttccaaagaaggccatgtagaggttgtttctgagctgctgcagagagaagccaatgtggatgcagctacaaagaaaggaaacacagcattgcacatcgcatctttggctgggcaagcagaggtggtaaaagtcttggttacaaatggagccaatgtcaatgcacaatctcagaatggtttcacgccattgtatatggcagcccaggaaaatcacctggaagttgtcaagtttcttcttgacaatggtgcaagccagagcctagccacagaggatggcttcacaccattggcagtggctttgcaacaaggtcacgaccaagtcgtttcgctcctgctagagaatgacaccaaaggaaaagtgcgtctcccagctcttcatatcgcggcccgcaaagacgacacaaaagccgccgccctgctgctgcagaatgacaacaatgcagatgtggaatcaaagagtggcttcactccgctccacatagctgctcactatggaaatatcaatgtagccacgttgctgttaaaccgagcggctgctgtggatttcaccgcaaggaatgacatcactcctttacatgttgcatcaaaaagaggaaatgcaaatatggtaaaactattgctcgatcgaggagctaaaatcgatgccaaaaccagggatggtctgacaccactgcactgtggagcaaggagtggccacgagcaggtggtagaaatgttgcttgatcgagctgcccccattctttcaaaaaccaagaatggattatctccattgcacatggccacacaaggggatcatttaaactgcgtccagcttctcctccagcataatgtacccgtggatgatgtcaccaatgactacctgactgccctacacgtggctgcccactgtggccattacaaagttgccaaggttctcttggataagaaagctaaccccaatgccaaagccctgaatggctttacccctcttcatatcgcctgcaagaagaatcgaattaaagtaatggaactccttctgaaacacggtgcatccatccaagctgtaaccgagtcgggccttaccccaatccatgttgctgccttcatggggcatgtaaatattgtatcacaactaatgcatcatggagcctcaccaaacaccaccaatgtgagaggagaaacagcactgcacatggcagctcgctccggccaagctgaagttgtgcggtatctggtacaagacggagctcaggtagaagctaaagctaaggatgaccaaacaccactccacatttcagcccgactggggaaagcagacatagtacaacagctgttgcagcaaggggcatctccaaatgcagccacaacttctgggtacaccccacttcacctttccgcccgagaggggcatgaggatgtggccgcgttccttttggatcatggagcgtctttatctataacaacaaagaaaggatttactcctcttcatgtggcagcaaaatatggaaagcttgaagtcgccaatctcctgctacagaaaagtgcatctccagatgctgctgggaagagcgggctaacaccactgcatgtagctgcacattacgataatcagaaagtggcccttctgcttttggaccaaggagcctcacctcacgcagccgcaaagaatggttatacgccactgcacatcgctgccaaaaagaaccagatggacatagcgacaactctgctggaatatggtgctgatgccaacgcagttacccggcaaggaattgcttccgtccatctcgcagctcaggaagggcacgtggacatggtgtcgctgctcctcggtagaaatgcgaatgtgaacctgagcaataagagcggcctgaccccactccatttggctgctcaagaagatcgagtgaatgtggcagaagtcctcgtaaaccaaggggctcatgtggacgcccagacaaagatgggatacacaccactgcatgtgggctgccactatggaaatatcaagattgttaatttcctgctccagcattctgcaaaagttaatgccaaaacaaagaatgggtatacgccattacatcaagcagcacagcaggggcatacgcatataataaatgtcttacttcagaacaacgcctcccccaatgaactcactgtgaatgggaatactgcccttggcattgcccggcgcctcggctacatctcagtagtggacaccctgaagatagtgaccgaagaaaccatgaccacaactactgtcacagagaagcacaaaatgaatgttccagaaacgatgaatgaagttcttgatatgtctgatgatgaagttcgtaaagccaatgcccctgaaatgctcagtgatggcgaatatatctcagatgttgaagaaggtgaagatgcaatgaccggggacacagacaaatatcttgggccacaggaccttaaggaattgggtgatgattccctgcctgcagagggttacatgggctttagtctcggagcgcgttctgccagcctccgctccttcagttcggataggtcttacaccttgaacagaagctcctatgcacgggacagcatgatgattgaagaactccttgtgccatccaaagagcagcatctaacattcacaagggaatttgattcagattctcttagacattacagctgggctgcagacaccttagacaatgtcaatcttgtttcaagccccattcattctgggtttctggttagctttatggtggacgcgagagggggctccatgagaggaagccgtcatcacgggatgagaatcatcattcctccacgcaagtgtacggcccccactcgaatcacctgccgtttggtaaagagacataaactggccaacccacccccacatggtgaaaggagagggattagcagtaggctggtagaaatgggtcctgcaggggcacaatttttaggccctgtcatagtggaaatccctcactttgggtccatgagaggaaaagagagagaactcattgttcttcgaagtgaaaatggtgaaacttggaaggagcatcagtttgacagcaaaaatgaagatttaaccgagttacttaatggcatggatgaagaacttgatagcccagaagagttagggaaaaagcgtatctgcaggattatcacgaaagatttcccccagtattttgcagtggtttcccggattaagcaggaaagcaaccagattggtcctgaaggtggaattctgagcagcaccacagtgccccttgttcaagcatctttcccagagggtgccctaactaaaagaattcgagtgggcctccaggcccagcctgttccagatgaaattgtgaaaaagatccttggaaacaaagcaacttttagcccaattgtcactgtggaaccaagaagacggaaattccataaaccaatcacaatgaccattccggtgcccccgccctcaggagaaggtgtatccaatggatacaaaggggacactacacccaatctgcgtcttctctgtagcattacagggggcacttcgcctgctcagtgggaagacatcacaggaacaactcctttgacgtttataaaagattgtgtctcctttacaaccaatgtttcagccagattttggcttgcagactgccatcaagttttagaaactgtggggttagccacgcaactgtacagagaattgatatgtgttccatatatggccaagtttgttgtttttgccaaaatgaatgatcccgtagaatcttccttgcgatgtttctgcatgacagatgacaaagtggacaaaactttagagcaacaagagaattttgaggaagtcgcaagaagcaaagatattgaggttctggaaggaaaacctatttatgttgattgttatggaaatttggccccacttaccaaaggaggacagcaacttgtttttaacttttattctttcaaagaaaatagactgccattttccatcaagattagagacaccagccaagagccctgtggtcgtctgtcttttctgaaagaacgaaagacaacaaaaggactgcctcaaacagcggtttgcaacttaaatatcactctgccagcacataaaaaggagacagagtcagatcaagatgatgagattgagaaaacagatagacgacagagcttcgcatccttagctttacgtaagcgctacagctacttgactgagcctggaatgaaaacagttgaacggagtacaggagcaacaagatccctccccaccacttactcatacaagccattcttttctacaagaccataccagtcctggacaacagctccgattacagtgcctgggccagccaagtcaggcttcacttccttatcaagttcttcctctaatacgccatcagcttctccgttaaaatcaatatggtctgtttcgacaccttctccaatcaaatccacattaggcgcgtcaactacatcttcagttaaatccattagtgacgtggcatctccaattagatccttacggacaatgtcttcgccgataaaaactgtggtgtcacaatctccatacaatatccaggtttcctctggtaccctggctagagctccagcagtcacggaagctacgcccttaaaagggctggcatccaattctacgttttcctctcgaacctctccagtgactacagcagggtctcttttggagaggtcatcaattactatgacaccccctgcctcccccaaatcaaacattaatatgtattcctcaagtttgccatttaagtcaattattacatcagcagcaccgctaatatcttcacctttaaagtcagtggtgtctccagttaaatcacgagttgatgtcatttcatcagccaaaattacaatggcatcttctctctcatcacctgtgaagcagatgcctggacatgcagaggtagcattagtcaatggatctatttcccctctaaaatatgcatcatcctcaactttaattaatggatgcaaagccactgccacgttacaggaaaaaatttcttctgctacaaactctgtgagctctgtggtcagtgcagccactgacacagttgagaaagtgttttctaccacgactgcaatgccattttccccactcaggtcatatgtttctgcagcaccatcagcttttcagtctctaagaactccttccgcaagtgcactctatacatcccttgggtcgtcaatatctgcaactacctcatctgtaacttcatcaattataacagtgccagtatactctgtagtcaatgttttgccagaaccagcattaaagaaacttccagactctaattcatttacaaaatcagcagcagccttgctgtcacccattaaaacattgactacggagacacatcctcagcctcacttcagtcgaacttcatctccagttaagtcatctttgttccttgcaccctctgcccttaagttgtctacaccatcttctttatcttccagtcaggagatactaaaagatgtagctgaaatgaaagaggacctaatgcggatgaccgcaatactacagacagatgtgcctgaggagaagccattccaacctgaactcccaaaggaagggagaatagatgatgaagaacctttcaaaattgtagagaaagtaaaggaagacttagtgaaagttagtgaaatccttaaaaaggatgtatgtgtagataataaaggatcacccaaatcaccaaagagtgacaaaggacactctcctgaagatgactggatagaatttagttcggaagaaatccgggaagccagacaacaagctgctgcgagccagtctccatctctgccagagagagtgcaagtaaaagcaaaagccgcctccgaaaaggattataacttgaccaaagttattgattacctaacaaatgatattgggagtagttcactgacaaacttaaaatacaagtttgaggatgcaaagaaggatggtgagggaggacagaaaagagttttaaaaccagcaattgctttgcaggaacacaaactcaaaatgcctccagcctccatgaggacttccacctctgagaaagaattgtgtaaaatggctgattccttttttggaacagatactattttagagtctcctgatgacttttctcaacacgaccaagataaaagtcccttgtctgacagtggctttgaaacaagaagtgaaaagacaccttcagccccacaaagcgctgaaacgactggtcctaaaccactttttcatgaagttcccatccctcctgttattacagaaacaagaactgaagtggttcatgttatcaggagctatgatccctcagctggggatgttccccagacccaaccagaggagcctgtgtcacctaaaccttcacctacttttatggaattggaaccaaagcccaccacctctagtattaaagaaaaggttaaagcatttcaaatgaaagccagtagtgaagaagatgaccacaatcgggttttaagcaaaggcatgcgtgttaaagaagagactcacataaccacaaccaccagaatggtttatcattctccaccaggcggtgaaggtgcatctgaaagaattgaagaaaccatgtcagtccatgacatcatgaaggcctttcagtccgggcgggatccttccaaagaactggcaggtctgtttgaacataagtcggcagtgtctccagatgttcacaagtctgctgctgaaacctcagcccagcatgcagagaaggacaaccaaatgaaacccaaactggagcgtataatagaagtccacatcgaaaaaggtaaccaagctgagcccactgaagtcattattagagaaaccaaaaagcatccagaaaaagaaatgtatgtatatcagaaagacttatcccggggagatattaacctaaaagattttctgccagaaaaacacgatgcttttccttgttcagaggaacagggtcagcaagaagaagaagaacttactgctgaagagtcattgccttcttatctggagtcttccagagtaaacactcctgtgtcccaagaagaagatagccgccctagttctgctcaactcatatctgatgactcttataaaacattgaagcttttgagtcaacactcaatagaataccatgacgatgagttgtcagaactaagaggggagtcttacaggtttgctgagaaaatgcttctgtcagaaaagctagatgtgtctcattctgatactgaggaatcggttacagaccatgcaggaccccctagctcagagttacaggggtctgataagcggtccagagaaaaaatagccactgcccccaaaaaagaaattctctccaaaatctataaagatgtttctgaaaatggtgtaggtaaagtgtctaaagatgagcattttgataaagtgacagtgttgcactattctggcaatgttagtagtccaaaacatgccatgtggatgcgctttactgaggacagattagacagaggtagagagaagttgatatatgaagatagggtggacaggactgtgaaggaggctgaagaaaaactgactgaagtgtcacagttttttcgtgacaaaactgaaaagctaaatgatgaactgcagtccccagagaaaaaggcacgccctaaaaatggcaaagaatattcttctcaaagccctaccagtagcagccctgagaaagtgctactgacagaactgctggcatccaatgatgagtgggttaaggcaagacagcatggccctgatggacaaggcttccccaaggccgaggagaaggcacccagtctgcccagcagcccagagaagatggttctctcccaacagactgaggacagcaagtccacagtggaagccaaaggaagtatttcacagagcaaagcaccagatgggccccagtctggattccagctcaaacaatctaaactcagttccattagattaaaatttgaacaaggcacacacgcaaaaagtaaggacatgtctcaagaagacagaaagtcagatggccagtccagaatcccagttaaaaaaatacaggagagcaagctacccgtctaccaagtttttgctagagaaaaacagcagaaggccatagacctcccagatgaaagtgtatctgtgcaaaaagattttatggtattaaaaaccaaagatgagcatgcccaaagcaacgaaattgttgtaaatgattctggctctgataatgtgaaaaaacagagaactgaaatgtcaagtaaagcaatgcctgactctttttctgagcagcaggctaaagacttggcatgtcatataacctcagatttagcaactaggggaccatgggacaaaaaggtctttagaacatgggagagttcgggagccactaacaataagtctcagaaagaaaaactttcgcatgtacttgttcatgatgtaagagagaatcacattggtcaccctgagagtaaaagtgttgatcaaaagaatgaatttatgtctgtgactgagagagaacgcaaattgttaacaaacggctctctctcagaaattaaagaaatgactgtaaaatctccctccaaaaaagtcttatatagggaatatgttgtgaaagaaggggaccatccaggcggattgcttgatcagccttccaggaggagcgagagctcagcagtgtcacacattcccgtcagagttgctgatgagaggagaatgctgtcttctaatattcccgatggtttttgtgaacagtcggcatttccaaaacatgaactatcacaaaaattgtcccagtcaagcatgagtaaagagacagttgagacacagcactttaattctatagaagatgaaaaagttacctattcagaaatcagcaaagtttccaaacaccagagttatgtaggtttatgcccacctctcgaggaaaccgaaacctcccccaccaaatctcctgattctttagagtttagcccaggaaaggaatctccctctagtgatgtattcgaccacagtcccattgatggattggaaaaactcgcaccactagcccagacagagggagggaaagagataaaaactttacccgtttatgtcagttttgtacaagtggggaagcaatatgaaaaggagatacaacaaggaggtgtaaaaaaaatcataagtcaggaatgtaagacagtacaagaaaccagggggaccttttatacaactagacagcaaaagcaacctccttctccccaaggtagtccagaagatgatactctagagcaagtatcctttctagacagctctgggaaaagccctttaaccccagaaacacccagttcagaggaagtgagttatgaatttacatctaagacacctgactcgctcatagcttatataccaggcaaacccagcccaattcccgaggtttctgaggagtcagaggaggaggaacaggccaagtcaacctcccttaagcagactacagtggaggaaacagcagttgagcgtgaaatgcctaatgacgtgagcaaagactctaaccaaagacccaaaaataacagagttgcctatattgaatttccccctcctccaccactggatgcggaccagattgagtcagataagaagcatcattatctcccagaaaaagaggttgacatgattgaagtcaatctgcaagatgagcatgacaagtaccagctggctgaacctgtcattagagtgcagccaccttcaccagttcctcccggggcagacgtcagtgattcaagcgatgacgaatctatttatcagccagtcccagttaaaaaatataccttcaaattaaaggaagtggacgatgaacaaaaagaaaaacccaaagcttctgctgaaaaggcttccaaccagaaagaactggaaagtaatggatctggaaaagataatgaatttggccttggccttgattcacctcagaatgaaattgcccagaatgggaacaacgaccagtccatcacagagtgttccattgccaccacagcagagttttctcatgacacggatgccacagagatcgactctctggatggctatgacctgcaagatgaagatgatggcttgacagagagtgattctaaactcccaattcaagccatggaaattaagaaagatatctggaacacagagggcattctgaagccagctgaccgctcttttagccaaagtaaacttgaagttatcgaggaggagggaaaggtgggaccagatgaggacaagccaccttctaaaagttcttcatctgaaaagactcctgataagactgatcagaagtcaggggcccagttcttcacactggaaggcagacatcctgacagatcagtgtttcctgatacttacttcagttacaaagtagatgaagaatttgccactccttttaaaacagtagctaccaaaggtctagattttgacccttggtctaataaccgaggggatgatgaagtttttgacagtaaatcacgggaagatgaaactaagccatttgggctggcggtagaagaccgctctccagcaacaacccctgatacaacgccagccagaacgccaactgatgaaagtaccccaactagtgagcctaaccccttcccatttcatgaaggaaaaatgtttgagatgactcgcagtggtgcaattgacatgagcaagagggattttgttgaagagaggctccaatttttccagattggtgagcatacttctgaagggaagtcaggggaccagggggaaggggataaaagtatggtcactgccacaccacagccacagtcaggggacaccactgtagaaaccaatctagagagaaatgtagagacacctacagtggaacctaaccccagcatcccgaccagcggagagtgtcaggaaggcacatccagtagtggctccctggagaaatcagcagcagccactaacacctctaaagttgaccccaagttgcgcacgcctataaaaatgggaatttctgcatccaccatgaccatgaagaaagaaggccctggagaaataacagataagatagaagcggtgatgaccagttgtcagggattagaaaatgaaactataacaatgatttcaaatacagccaatagccagatgggcgttaggccccatgaaaaacatgattttcaaaaagataactttaataacaacaacaatttggattcttccactatacagacagataacattatgagtaatatagttctgacagaacattctgcacccacttgtaccacagagaaagataacccagtgaaagtctcatcaggaaaaaagacaggggtactacaaggacactgtgtaagagataagcagaaagttcttggagaacagcaaaaaacaaaggaattgatagggattaggcaaaaatccaaacttcccataaaggccacttcaccaaaagataccttcccaccgaaccatatgtcaaacactaaagcaagtaaaatgaagcaggttagtcaatccgagaaaaccaaagcccttactacttcttcatgtgtagatgtaaagtccagaattccagtgaaaaacacacccagggataacataattgcagttagaaaagcatgtgccacacaaaagcaagggcagccagagaaaggcaaggccaaacagcttccatccaagttgccagtaaaggtaagatccacctgtgtcactaccaccaccaccactgccaccaccaccaccactaccaccactaccaccaccaccagctgcacagttaaagttaggaaaagtcagctcaaggaagtatgtaaacattccattgaatattttaagggaattagtggtgagaccttaaagcttgtggaccgcctctctgaagaagaaaaaaagatgcagtccgagttgtccgatgaggaagaaagtacctcaagaaacacgtcgttgtccgagacttcccggggtggccagccttcggttacaacgaagtctgctagagataagaaaacagaggcagcacctttaaaatcaaagagtgaaaaggccggcagtgagaaaaggagcagtagaaggactggtccacagagtccatgtgaacggacagatatcaggatggcaatagtagccgatcacctgggacttagttggacagaactggcaagggaactgaatttttcagtggatgaaatcaatcaaatacgtgtggaaaatccaaattctttaatttctcagagcttcatgttattaaaaaaatgggttaccagagacggaaaaaatgccacaactgatgccttaacttcggtcttgacaaaaattaatcgaatagatatagtgacactgctagaaggaccaatatttgattatggaaatatttcaggcaccagaagttttgcagatgagaacaatgttttccatgaccctgttgatggttggcagaatgagacatcaagtggaaacctagagtcctgcgctcaagctcgaagagtaactggtgggttactagatcgactggatgacagccctgaccagtgtagagattccattacctcatatctcaaaggagaagctggcaaatttgaagcaaatggaagccatacagaaatcactccagaagcaaagacaaaatcttactttccagaatcccaaaatgatgtaggaaaacagagtaccaaggaaactctgaaaccaaaaatacatggatctggtcatgttgaagaaccagcatcaccactagcagcatatcagaaatctctagaagaaaccagcaagcttataatagaagagactaaaccctgtgtgcctgtcagtatgaaaaagatgagtaggacttctccagcagatggcaagccaaggcttagcctccatgaagaagaggggtccagtgggtctgagcaaaagcagggagaaggttttaaggtgaaaacgaagaaagaaatccggcatgtggaaaagaagagccactcg

SEQ ID NO: 121475 - DNA, 1020 bp, Homo sapiens
tcaaatgatgtcattagaacctagccactttctctcttctcctcctctgccctcttttccatctctcagttctactttcctatgcgctggccttattcccaggcaagccttctgcatctggtggtttccagcacctccaggcttatgtcctgcaatttcaataatatcatacaagccattcttttctacaagaccataccagtcctggacaacagctccgattacagtgcctgggccagccaagtcaggcttcacttccttatcaagttcttcctctaatacgccatcagcttctccgttaaaatcaatatggtctgtttcgacaccttctccaatcaaatccacattaggcgcgtcaactacatccggcctgcgaccgaagtcgcctacgcgacaagttctacgggacttccccatgtgttccgcggcagccacaactgcgttcatgttttcctctcgaacctctccagtgactacagcagggtctcttttggagaggtcatcaattactatgacaccccctgcctcccccaaatcaaacattaatatgtattcctcaagtttgccatttaagtcaattattacatcagcagcaccgctaatatcttcacctttaaagtcagtggtgtctccagttaaatcagcagttgatgtcatttcatcagccaaaattacaatggcatcttctctctcatcacctgtgaagcagatgcctggacatgcagaggtagcattagtcaatggatctatttcccctctaaaatatccatcatcctcaactttaattaatggatgcaaagccactgccacgttacaggaaaaaatttcttctgctacaaactctgtgagctctgtggtcagtgcagccactgacacagttgagaaagtgttttctaccacgactgcaatgccattttccccactcaggtcatatgtttctggataatttttgtgttgttgttgttgttgttgttgttgttgttgttgttgctgtgtgtatggagaccggggttttgccat

SEQ ID NO: 121476 - DNA, 936 bp, Homo sapiens
atggaagataaagcagcaatttactatgggcatcaaacagatacgtcgaatgacattgagggtttcactgaagaccagtggtctgatcacctcaacattcctggctgcccaatgtggggtgacaaagaccctggtgaaggaacgccagagcatgtgaaagctgaggatgcattgtcaaagggcacccgaggacatctaaaagaagctgagcctgggaagaaccaggccgcaggcctcggggccgctgctgctgatggattgaagccgccccacaagctcaggaggtgcagggagatggcctctggctcccgtgtggggctgcaggagcaggcgggctgcaaagtgcccgaagctatggcactgtgggagaggccagtgtggctgagcacccatgggtgctcctggagggtgcatggctggctgtggcagtctggctgctgctgcctcgcctggcctggtgcctggtcaccttccccgcctactgcagcccccagccatccccacagagcttctcttcgggtggcgcttctctccggacagtggggcctgacctgtgggcagctgctggcgtcagcacccttgctccagtcgtgggcctgggacaccaggcttctcatgtgcaggcgtctgagctgctccagtgaggagggagaaagaattgctcagttgttgctgttaccttacctaaaactaggaagcagcacagtgaaaagaacaggaggctttggtaatactaatccagcaggaaaggctgtgtattgggttaatcaggtgtcggacaaaagacctatttgcacagtagctattcagggaaaagattttgaaggactagtagatactgaagctgatgtctctattattgctataaatcaatggccccagcactggcctaagcaaaaggcatccattggtattgttggagtaggagctgcctag

SEQ ID NO: 121477 - DNA, 2388 bp, Homo sapiens
ggctgggtgccgtttcgcggcgaggatcgttctgtgtttggctgcctttcgtgagttcaaggggtgatcagaactccgttaaagattggttagcgcaacgctggaacagcagagccaggggggaaattggtcgcgtcttccatggagggtagtccgtttgaagggacttagcccgggcgctttttgagatgtggctgcctaggcctccacgtcccggtatttaagatcgctaatccccggcccctatgtagtttaaaccattgcggctgtaaatcatgtgcttaaggcaatgtgtcctttccacttccacattatcaccacttgtttctttgttggattcccaataaatagcatgggctgccagagctcagggccttcacagcctccacaatggtgatggccccctggtatcccacctttctctctcaaactgtgtacttctcaatcctttggctccgtcggactttgtcacccccaagacctggtgttgggtttgatcaccccaacattcctggctgctcaatgtggggcgacaaagaccccactgaaggaacgctagagtgtgtgaaagcagaggatgcatcgtcaaaggacacctgaggatgtctaaaagaagctcagtaggaaagttgagcacttggaagaaccagggtaacaatgagacaaagtgaaagcagacattctgcttatcgaaatttcttaaggcatttattatgaagatggagagtgaaagttagtcctcagaatttgttatcactcactcttcagtgcagtaaagcagttttgcccatggttcccagaacaagggactatagagttggaggaatgggagagaattgcccgagattttttaaaaagcatataaagatggagcaaaaattccagtctcagttttggtcaatgtgggtgctaataaaagcagctcttgagccatttcaaacagatgatgaggcagattcagatgcggaagaggaggatgggtgtaaagaactaaattcagattctgaatgtgaggaacaggaaatggaggaaattaaagaaaagaaagggaaactgaacaaaggacctaaagaatcatatattgattttattgcttggctccaagaggttgtgtataaagccataactgataaaacagctcaagatgttgtaatacagcttctcacatatgataatgctaatgcagagtgtcaaactgctattagacccctgagagggaagtctcatttagctgaatatattaaggcttgcaatggcactggaggagaaagaattgctcagttgttgctgttaccttacataaaactagggagcagcacagtgaaaagagcaggaggctttggtagtactaatccagcaagaaaggctgtatattgggttaatcaagtgtctgacaaaagacctatttgcacagtaactattcagggaaaagattttgaaggacgagtagataccggagctgatgtctctattattgctataaatcaatggccccagcattggcctaagcaaaaggcacccattggtattgctggagtaggagctgcctcagaaatttttcacagttccttgattttaccatgtcaagggttggatggccaggaagagacaattcagcctattattatacctattcctgttaatttatgggctgaatcttggggtgacagaggctcctttgtggccatcatcattataactttgatgggtcatacctgtggccagcacagtacctcagccaaggcctgctgtaaccactactgcacacggatgcccaaggactactacccatggtttctaaaggggacctacaatcagcagcctcaggacttggtgctctgcgtctcagccactccagccatggctaaagggggccatggtacagctcaggccattgcttcagagggtgaaagccccaagctttggcagtttccatctaatgttggtcctacaggtgtgcagaagacaaaaactgagatttgtgaggacagcacttgcgtctttgaagagccctgtaattgctcttctctgtatgtcagatctaacggtgggagccatagtcagtcaattacaaaatttaattacaacggaataattggatcccgaggtggcgagggccaagtggtagcactcagccatcaaaggcaaggggatccaaaatgtcactgtggtcctccacttaaagtaggggcttatggaggacaggtaactgtggcaaccattaaatatcggcagtcaggaaactttgggccagatgagcgcacagttgtacccatggtgcaatgcacaaattggctgagagatgacaatgtgtggatggaacaaaagctagcacttatgacggaacaactgaatgagcaacatggagcatctctactccatggctag

SEQ ID NO: 121478 - DNA, 387 bp, Homo sapiens
ctacgggtcgttacgctggcagtcgccgccttcatcttcaacaccaccgaatttgtccctgttggcctgctctctgacattgcgcaaagttttcacatgcaaaccgctcaggtcggcatcatgttgaccatttacgcatgggtagtagcgcaacctcccctcacgaggggggggaaggcctagttccccactgcgtttagagaaacagggctcggacaagacagttcggatgttgtcgaagacttctcgtgggtgatgtcgtagaccagcatgatgccatgtgggggccaccctctgacggtctgtgtggttctcgatgtccttgtggagtgcccacagcgggccagcctgcagtgccatcacaagtccccctttgttgccgggcat

SEQ ID NO: 121479 - DNA, 1716 bp, Homo sapiens
atgacctgggcctactctccaagctatggcaaaccgctctctgtaccacaaggcatcatcggtctgatgactcgcttcggtatggatgtcaccctggcccatccggaaggctacgacctgatcccggatgtggttgaagtggcgaaaaacaatgctaaagcctccggtggtagcttccgtcaggtcaccagcatggaagaagccttcaaagacgcagacatcgtttatccgaagtcatgggcaccttacaaagtgatggaagagcgtactgaattgctgcgtgcgaacgatcacgaaggcgtaaaacgcaccggaaaaacactgtctaggcacagaacgcgcaacacaaacgactggcaccagcatcgaagagatgatggaaccgatcccgtgagggcgaagcccagaacaagcacggccgaccagactgagatcaacggcgcatcctgtaaagaagggcgaagtgaccagaaggcgtatgacgagaaatcacgcccagatgagatgccgatagatgacaacgtcgtgcttaacaaaggtgacgttttacaagtcagcggcgatgcccgccgcgtaaaaaccatcgccgatcgcatcggctttatctcgattcacagccaggtcactgacctgctggcattctgcgccttctttgttattgggctgatgatcgggatgatcaccttccagttcagcacattcagtttcggcatggggaacgctgccgggttgttattcgccggaattatgctgggctttatgcgtgctaaccacccgaccttcggttacattccgcagggtgcattaagcatggtgaaagagttcggcttgatggtgtttatggcaggcgaaatccaggttgatggcaacaccatctatccgcacatctggaaaagctgtgacggtggtgtgctgtttgccaagcaatatttattacgtctgggtatcattctttatggcttccgtctgacgttctcgcaaattgccgatgtcggtatcagtgggatcatcattgacgtgttgacgctgtccagtaccttcctgctggcttgcttcctggggcagaaagtgtttggtctggataagcacaccagctggttgatcggtgccggtagcagtatctgtggtgctgccgcggtactggcgactgagccggtagtgaaagcggaagccagtaaagtaaccgtggctgttgcaaccgttgttatcttcgggaccgtcgcgattttcctctacccggcgatatatccgctgatgtctcaatggtttagtccggaaactttcggtatctacattggttccgttattgaagtcggcgttgatgtgcctaacgccagtctgatgattatcgaaaacccggagcgtctgggtctggcgcagttacaccagctgcgcgggcgcgtaggtcgtggcgcggggcttctcactgcgtgctgctctacaaaacgccgctttctaaaagccgctccggaggtgacacggaccggcctagcagatgaccgtagctcaggacttccacttcaaactggttacgagctggcatccatgcagggcctggttgatgtggtccgcctgtcaccgcagggtactgacactttcgcgatgctcgacgccttccgcgctaatgaaaatggcgctgcaccactgccgttgacggcgaacagcgactgtaacggctactggcggcggctggcaggactggagctgcaagcctaa

SEQ ID NO: 121480 - DNA, 777 bp, Homo sapiens
atgcatcttaacgaaaacctcgacgataacggcgaaatgcatgatatcaacgtgacgccgtttatcgacgtgatgttggttctgctgattatctctatggtggcggcaccgttagcgacggtagatgtgaaggtgaacttgcctgcttctaccagcacgccgcagccgcgcccggaaaaaccggtttatctgtcggtgaaggcagacaactccgacacgagcaggcctcagccggaccacctcatgttactggacgacggcaaaaacctgcgtgtactgggtatttatcgacaaaccggctgctacattgaacgtattcgacgtaacgggattctggcaaatccagacggtgatgccgtgctacaaatgggcgatgaaatagccttccgtaacggtaaagaagttttcgatcgtgaccttctcgacatgcgtatcgtcactgaagaagtggtcgttaaaaaccataacgctgtaggtaaacgtctcgcacaactgaagttgaccgatcacggttgcttccttaaccgcgtcattcgtagccagattgagatgccgatagatgacaacgtcgtgcttaacaaaggtgacgtcttacaagtcagcggcgatgcccgccgcgtaaaaaccatcgccgatcgcatcggctttatctcgattcacagacaggtcactgacctgctggcattctgcgccttcttggttattgggctgatgatcgggatgatcaccttccagttcagcacattcagtttcggcatggggaacgctgccgggtag

SEQ ID NO: 121481 - DNA, 158 bp, Homo sapiens
gtctcacctgcggtttgttgttcatattgctcgtaattatgcgggctatggcctgccacaggcggatttgattcaggaaggtaacatcggcctgatgaaagcagtgcgccgtttcaacccggaagtgggtgtgcgcctggtctccttcgccgttcact

SEQ ID NO: 121482 - DNA, 177 bp, Homo sapiens
atggccttttctcaagcggttagcggattaaacgctgccgccaccaacctcgatgttattggcaacaatatcgccaactccgccacctacggctttaaatcaggcacggcctcttttgccgatatgtttgccggttcgaaagtgggaggatgttggaaatttgtggagaagttttag

SEQ ID NO: 121483 - DNA, 1248 bp, Homo sapiens
atggcggaaacagcggttatcaatcacaagaaacgtaaaaatagcccgcgaatcgtccagtcaaacgacctcactgaggcggcatatagtctctcccgggatcaaaaacgtatgctgtatctgttcgttgaccagatcagaaaatctgatggcaccctacaggaacatgacggtatctgcgagatccatgttgctaaatatgctgaaatattcggattgacctctgcggaagccaaggcgggaatttgtgagaactgggagagtgtggctgtcggcaggggtccgtatcacactgtgggcgggggtcccgacccctgctgcctcgggtacggggtaagcggcatctgccacgcgcccgcctcgcgcgctgtcaggaggcgctgtccccgtggggattttgccgatttcggaaccaccatcaaacaggattttcgcttgctggggcaaaccagcgtggaccgcttgctgcaactctctcagggccaggcggtgaagggcaatcagctgttgcccgtctcatgggtgaaaagaaaaaccaccctggcgcccaatacgcaacccgcctctccccgcgcgttggccgattcattaatgcagctggcacgacaggtttcccgactggaaagcgggcacccacttgctggcccggggctgacaattatcccttcctgtctggctctgccccgtattgaaactgagttaatgggcaaatttgatgaaggtaaactgcccaccgatccacacttgatgctcggactggccattgaaactgttgctcatgactatgatgtcatagttattgacagcgcgcctaacctgggtatcggcacgattaatgtcgtatgtgctgctgatgtgctgattgttcccacgcctgctgagttgtttgactacacctccgcactgcagtttttcgatatgcttcgtgatctgctcaagaacgttgatcttaaagggttcgagcctgatgtacgtattttgcttaccaaatacagcaatagtaatggctctcagtccccgtggatggaggagcaaattcgggatgcctggggaagcatggttctaaaaaatgttgtacgtgaaacggatgaagttggtaaaggtcagatccggatgagaactgtttttgaacaggccattgatcaacgctcttcaactggtgcctggagaaatgctctttctatttgggaacctgtctgcaatgaaattttcgatcgtctgattaaaccacgctgggagattagataa

SEQ ID NO: 121484 - DNA, 1116 bp, Homo sapiens
  misc_feature (1)...(1116): n = a,t,c or g
atggaaattcgaggacgggttgagcaacgtgttggttatacaattgaacaaattaatcatatgcgtgatgtgtttggtacgcgattgcgacgtgctgaagacgtatttccaccggtgatcggggttgctgcccataaaggtggcgtttacaaaacctcagtttctgttcatcttgctcaggatctggctctgaaggggctacgtgttttgctcgtggaaggtaacgacccccagggaacagcctcaatgtatcacggatgggtaccagatcttcatattcatgcagaagacactctcctgcctttctatcttggggaaaaggacgatgtcacttatgcaataaagcccacttgctggccggggcttgacattattccttcctgtctggctctgcaccgtattgaaactgagttaatgggcaaatttgatgaagnagaatccccaactgagttaatgggcaaatttgatgaaggtaaactgcccaccgatccacacctgatgctccgactggccattgaaactgttgctcatgactatgatgtcatagttattgacagcgcgcctaacctgggtatcggcacgattaatgtcgtatgtgctgctgatgtgctgattgttcccacgcctgctgagttgtttgactacacctccgcactgcagtttttcgatatgcttcgtgatctgctcaagaacgttgatcttaaagggttcgagcctgatgtacgtattttgcttaccaaatacagcaatagtaatggctctcagtccccgtggatggaggagcaaattcgggatgcctggggaagcatggttctaaaaaatgttgtacgtgaaacggatgaagttggtaaagaggaaacagctctgtgtcagtatcgtaagccggatggctcaggcatcgtctctctgaacatcgactggatcatagagcgttaccagctgcctcaaagttaccagactaggcctgacttccgccgccgcttcctgcaggtctgtgttaatgagatcaacagcagaactccaatgcgcctctcatacattgagaaaaagaaaggccgccagacgactcatatcgtattttccttccgcgatatcacttccatgacgacaggatag

SEQ ID NO: 121485 - DNA, 1234 bp, Homo sapiens
actaataatcagaccgacgatacgagtgggaccatggtccagcactaataatcagaccgacgatacgagtgggaccgtggtcagatctgattatcagaccgacgatacgagtgggaccgtggtcagtactaataatcagaccgacgatacgagtgggaccgtggtcagatctaataatcagaccgacgatacgagtgggaccgtgtgtgacaatctaaaaacttgtcacacttcacatggatctgtcatggcggaaacagcggttatcaatcacaagaaacgtaaaaatagcccgcgaatcgtccagtcaaacgacctcactgaggcggcatatagtctctcccgggatcaaaaacgtatgctgtatctgttcgttgaccagatcagaaaatctgatggcaccctacaggaacatgacggtatctgcgagatccatgttgctaaatatgctgaaatattcggattgacctctgcggaagcagatctggctctgaaggggctacgtgttttgctcgtggaaggtaacgacccccagggaacagcctcaatgcatcacggatgggtatcagatcttcatattcatgcagaagacactctcctgcctttctatcttggggaaaaggacgatgtcacttatgcaataaagcccacttgctggccggggcttgacattattccttcctgtctggctctgcaccgtattgaaactgagttaatgggcaaatttgatgaaggtagactgcccaccgatccacacctgatgctccgactggccattgaaactgttgcgcatgactatgatgtcatagttattgacagcgcgcctaacctgggtatcggcacgattaatgtcgtatgtgctgctgatgtgctgattgttcccacgcctgctgagttgtttgactacacctccgcactgcagtttctcgatatgcttcgtgatctgctcaagaacgttgatcttaaagggttcgagcctgatgtacgtattttgcttaccaaatacagcaatagtaatggctctcagtccccgtggatggaggagcaaattcgggatgccttgggaagcatggttctacaaaatgttgtacgtgaaacggatgaagttggtaaaggtcacatccggatgagaactgtctttgagcaggccattgatcaacgctcttcaactggtgactggagaaatgctctttctatctgggaactgtctgcaatgacattctcgatcgtctga

SEQ ID NO: 121486 - DNA, 1215 bp, Homo sapiens
  misc_feature (1)...(1215): n = a,t,c or g
ctaggacttgacagccctgctttgtgcgactctaaaggacccccataaagattcttcgccttggtatccgttttctgttcccgtgttggcttcgaatacaaggtatttatggcctttgtcttcaacgtagtgagggtctctcagcgtatggttgtcgccggatgtataattgccttcatcgataaactgctgaacgttctgatatgtttttccgtctccgtcaaaaatcgttttgtgatcttccactccgttgattttgagtgtgtcatcagattttgacacatttacctgcgcggaatagtcagtgtagaataaacggatttttccgtcagatgtaaaggttgcagaaccggaccattcttgcgtctgatctttcaggatcggatcgttggcgtcgaacttatcgctgtctttaaagacacggcccgcgtttttccagctgtcgattgagttgtcgccgaccttttgataaaacatgtagattgatgtgtcatcagcgtctttcgggcttcccgcaagagcaaacacaacgtgatagccgttgtattcagctactgttccgtcagcgttttgcagcggccagctgtcccacacatcaagtccttttgcagactcaatatttttaatcgttgattgatcgaattgaggcacttggtatttttcgntttgctgctgtttagggatctgggtatcggcacgattaatgtcgtatgtgctgctgatgtgctgattgttcccacgcctgctgagttgtttgactacacctccgcactgcagtttttcgatatgcttcgtgatctgctcaagaacgttgatcttaaagggttcgagcctgatgtacgtattttgcttaccaaatacagcaatagtaatggctctcagtccccgtgggatggaggagcaaattcgggatgctgcccgctttccagtcgggaaacctgtcgtgccagctgcattaatgaatcggccaacgcgccggggagaggcggtttgcgtattgggcgccagggtggtttttcttttcaccagtgagacgggcaacagctgattgcccttcaccgcctggccctgagagagttgcagcaagcggtccacgctggtttgccccagcaggcgaaaatcctgtttgatggtggttccgaaatcggcaaaatcccacttcaagccactgagattcagttcctccaggaacagctcctctggtaccacacccat

SEQ ID NO: 121487 - DNA, 1431 bp, Homo sapiens
atgggcaaatttgatgaaggtaaactgcccaccgatccacacctgatgctccgactggccattgaaactgttgctcatgactatgatgtcatagttattgacagcgcgcctaacctgggtatcggcacgattaatgtcgtatgtgctgctgatgtgctgattgttcccacgcctgctgagttgtttgactacacctccgcactgcagtttttcgatatgcttcgtgatctgctcaagaacgttgatcttaaagggttcgagcctgatgtacgtattttgcttaccaaatacagcaatagtaatggctctcagtccccgtggatggaggagcaaattcgggatgcctggggaagcatggttctaaaaaatgttgtacgtgaaacggatgaagttggtaaagtttctgttcatcttgctcaggatctggctctgaaggggctacgtgttttgctcgtggaaggtaacgacccccagggaacagcctcaatgtatcacggatgggtaccagatcttcatattcatgcagaagacactctcctgcctttctatcttggggaaaaggacgatgtcacttatgcaataaagcccacttgctggccggggcttgacattattccttcctgtctggctctgcaccgtattgaaactgagttaatgggcaaatttgatgaaggtaaactgcccaccgatccacacctgatgctccgactggccattgaaactgttgctcatgactatgatgtcatagttattgacagcgcgcctaacctgggtatcggcacgattaatgtcgacgatgtcacttatgcaataaagcccacttgctggccggggcttgacattattccttcctgtctggctctgcaccgtattgaaactgagttaatgggcaaatttgatgaaggtaaactgcccaccgatccacacctgatgctccgactggccattgaaactgttgctcatgactatgatgtcatagttattgacagcgcgcctaacctgggtatcggcacgattaatgtcgtatgtgctgctgatgtgctgattgttcccacgcctgctgagttgtttgactacacctccgcactgcagtttttcgatatgcttcgtgatctgctcaagaacgttgatcttaaagggttcgagcctgatgtacgtattttgcttaccaaatacagcaatagtaatggctctcagtccccgtggatggaggagcaaattcgggatgcctggggaagcatggttctaaaaaatgttgtacgtgaaacggatgaagttggtaaaggtcagatccggatgagaactgtttttgaacaggccattgatcaacgctcttcaactggtgcctggagaaatgctctttctatttgggaacctgtctgcaatgaaattttcgatcgtctgattaaaccacgctgggagattagataa

SEQ ID NO: 121488 - DNA, 1128 bp, Homo sapiens
atggcggtctgcaggtcccgagccctgccccgcgggaaggcagctaaggccccacgagaaatcgagcacagcgcagccacccagctttggcccttatgctatcgtctgaaacctgtcggcgccgacacagaaaaccagtctccacagcaatcagttattccaagacaccgatttgagtgcgggtctcgtcctgggtcaaggtccccaacccaaccaaggctcctattaaagccaaaggatctggctctgaaggggttacgtgttttgctcgtggaaggtaacgacccccagggaacagcttcaatgtatcacggatgggtaccagatcttcatattcatgcagaagacactctcctgcctttctatcttggggaaaaggacgatgtcacttatgcaataaagcccacttgctggccggggcttgacattattccttcctgtctggctctgcaccgtattgaaactgagttaatgggcaaatttgatgaaggtaaactgcccaccgatccacacctgatgctccgactggccattgaaactgttgctcatgactatgatgtcatagttattgacagcgcgcctaacctgggtatcggcacgattaatgtcgtatgtgctgctgatgtgctgattgttcccacgcctgctgagttgtttgactacacctccgcactgcagtttttcgatatgcttcgtgatctgctcaagaacgttgatcttaaagggttcgagcctgatgtacgtattttgcttaccaaatacagcaatagtaatggctctcagtccccccccatggaggagcaaattcgggatgcctggggaagcatggttctaaaaaatgttaaatgccgatggagtcgccgtgtaaagtgtgcactacgaaagtattatcgtgttctggttgcgagtgcacaccacagatggtgcattatccagattgggacgattatcgcccacaaggcttatgaacgtgggccaggcgttaagggccaatcacttgttgtccgtttcactggtgaaagaaaacccgccctggcgctcaatacgcaaaccgcctctccccgcgtgtgggccgattcattaatgcagctggcacgacaggtttcccgactggaaagcggacagtga

SEQ ID NO: 121489 - DNA, 1437 bp, Homo sapiens
  misc_feature (1)...(1437): n = a,t,c or g
tcagaccgacgatacgagtgggaccgtggtcccagtctgattatcagaccgacgatacgagtgggaccgtggtcccagactaataatcagaccgacgatacgagtgggaccgtggtcccagaccctttccaccggtgatcggggttgttttccataaaggtggcgtttacaaaacctcagtttctgttcatcttgctcaggatctggctctgaaggggctacgtgttttgctcgtggaaggtaacgacccccagggaacagcctcaatgtatcacggatgggtaccagatcttcatattcatgcagaagacactctcctgcctttctatcgatccacacctgatgctccgactggccattgaaactgttgctcatgactatgatgtcatagttattgacagcgcgcctaacctgggtatcggcacgattaatgtcgtatgtgctgctgatgtgctgattgttcccacgcctgctgagttgtttgactacacctccgcactgcagtttttcgatatgcttcgtgatctgctcaagaacgttgatcttaaagggttcgagcctgatgtacgtattttgcttaccaaatacagcaatagtaatggctctcaatccccgtggatggaagagcaaatatcggatgccctccgcatcagccagcgcagaaatatttccagcaaattcattctgcaatccgcttgcataacgctgaccacgttcataagcacttgttgggcgataatcgttacccaatctggataatgcagccatctgctcatcatccagctcgccaaccagaacacgataatcactttcggtaagtgcagcagctttacgacggcgactcccatcggcaattttcnttcgaccgaacgccggtgtctgttgaccagtcagtagaaaagaagggatgagatcatccagtgcgtcctcagtaagcagctcctggtcacgttcattacctgaccatacccgagaggtcttctcaacactatcaccccggagcacttcaagagtaaacttcacatcccgaccacatacaggcaaagtaatggcattaccgcgagccattactcctacgcgcgcaattaacgaatccaccatcggggcagctggtgtcgataacgaagtatcgacgatgcgagtgggaccgagggcccagtactgattatcagaccgaccatacgagtgggaccgtggtcccagactaataatcataccgtctatacgagtgggaccgtgtgtcccagactggttacccaggccgtgccggcacgttaaccgggctgcatccgatgcaagtgtgtcgctgtcgacggtgacccgtgtatgaaatctaacaatgcgctcatcgtcatcctcggcaccgtcaccctggatgctgtaggcataggcttggttatgccggtactgccgggcctcttgcgggatatcgtccat

SEQ ID NO: 121490 - DNA, 1332 bp, Homo sapiens
atgaaactcatggaaacacttaaccagtgcataaacgctggtcatgaaatgacgaaggctatcgccattgcacagtttaatgatgacagcccggaagcgaggaaaataacccggcgctggagaataggtgaagcagcggatttagttggggtttcttctcaggctatcagagatgccgagaaagcagggcgactaccgcacccggatatggaaattcgaggacgggttgagcaacgtgttggttatacaattgaacaaattaatcatatgcgtgatgtgtttgtttctgttcatcttgctcaggatctggctctgaaggggctacgtgttttgctcgtggaaggtaacgacccccagggaacagcctcaatgtatcacggatgggtaccagatcttcatattcatgcagaagacactctcctgcctttctatcttggggaaaaggacgatgtcacttatgcaataaagcccacttgctggccggggcttgacattattccttcctgtctggctctgcaccgtattgaaactgagttaatgggcaaatttgatgaaggtaaactgcccaccgatccacacctgatgctccgactggccattgaaactgttgctcatgactatgatgtcatagttattgacagcgcgcctaacctgggtatcggcacgattaatgtcgtatgtgctgctgatgtgctgattgttcccacgcctgctgagttgtttgactacacctccgcactgcagtttttcgatatgcttcgtgatctgctcaagaacgttgatcttaaagggttcgagcctgatgatctggctctgaaggggctacgtgttttgctcgtggaagatcttcatattcatgcagaagacactctcctgcctttctatcttggggaaaaggacgatgtcacttatgcaataaagcccacttgctggccggggcttgacattattccttcctgtctggctctgcaccgtattgaaactgagttaatgggcaaatttgatgaaggtaaactgcccaccgatccacacctgatgctccgactggccattgaaactgttgctcatgactatgatgtcatagttattgacagcgcgcctaacctgggtatcggcacgattaatgtcgtatgtgctgctgatgtgctgattgttcccacgcctgctgagttgtttgactacacctccgcactgcagtttttcgatatgcttcgtgatctgctcaagaacgttgatcttaaagggttcgagcctgatgtacgtattttgcttaccaaatacagcaatagtaaggggggatctctagagtcgcacagcaggctgcaagcataa

SEQ ID NO: 121491 - DNA, 1188 bp, Homo sapiens
atgggcaaggacttcatctctaagacaccaaaagcaatggcaacaaaagccaaaattgacaaacgggatctaattaaattaaagagcttctgcacagcaaaggaaactaccatcagagaacgcagctcttcaccagcaacagaacaaagctggacggagaatgactttgacgagttgagagaagaaggcttcagacgatcaaactactccgagctacaggaggaaattctaaccaaaggcaaagaagctgaaaactttgaaaaaaatttagacgaacgtataactagaataaccaatacagagaagtgcttaaaggagctgatggagctgaaagccaaggctcgagaagatctggctctgaaggggctacgtgttttgctcgtggaaggtaacgacccccagggaacagcctcaatgtatcacggatgggtaccagatcttcatattcatgcagaagacactctcctgcctttctatcttggggaaaaggacgatgtcacttatgcaataaagcccacttgctggccggggcttgacattattccttcctgtctggctctgcaccgtattgaaactgagttaatgggcaaatttgatgaaggtaaactgcccaccgatccacacctgatgctccgactggccattgaaactgttgctcatgactatgatgtcatagttattgacagcgcgcctaacctgggtatcggcacgattaatgtcgtatgtgctgctgatgtgctgattgttcccacgcctgctgagttgtttgactacacctccgcactgcagtttttcgatatgcttcgtgatctgctcaagaacgttgatcttaaagggttcgagcctgatgtacgtattttgcttaccaaatacagcaatagtaatggctctcagtccccgtggatggaggagcaaattcgggatgcctggggaagcatggttctaaaaaatgttgtacgtgaaacggatgaagttggtaaagctgaactggtactgaagctgcaaagcaaagtcccttttactcttagatctactttcctcaaacaggaggagtctctccctatagccaccatagctggcatgtgtggggttacacctgaagccagcataatactgattctcaccccatgctgtggcaagtactacctggctaccactgctgattattcaggtccaagggctctttag

SEQ ID NO: 121492 - DNA, 1068 bp, Homo sapiens
atggcggaaacagcggttatcaatcacaagaaacgtaaaaatagcccgcgaatcgtccagtcaaacgacctcactgaggcggcatatagtctctcccgggatcaaaaacgtatgctgtatctgttcgttgaccagatcagaaaatctgatggcaccctacaggaacatgacggtatctgcgagatccatgttgctaaatatgctgaaatattcggattgacctctgcggaagccagtaaggatatacggcaggcattgaagagtttcgcggggaaggaagtggttttttatcgccctgaagaggatgccggcgatgaaaaaggctatgaatcttttccttggtttatcaaacgtaacgacccccagggaacagcctcaatgtatcacggatgggtaccagatcttcatattcatgcagaagacactctcctgcctttctatcttggggaaaaggacgatgtcacttatgcaataaagcccacttgctggccggggcttgacattattccttcctgtctggctctgcaccgtattgaaactgagttaatgggcaaatttgatgaaggtaaactgcccaccgatccacacctgatgctccgactggccattgaaactgttgctcatgactatgatgtcatagttattgacagcgcgcctaacctgggtatcggcacgattaatgtcgtatgtgctgctgatgtgctgattgttcccacgcctgctgagttgtttgactacacctccgcactgcagtttttcgatatgcttcgtgatctgctcaagaacgttgatcttaaagggttcgagcctgatgtacgtattttgcttaccaaatacagcaatagtaatggctctcagtccccgtggatggaggagcaaattcgggatgcctggggaagcatggttctaaaaaatgttgtacgtgaaacggatgaagttggtaaaggtcagatccggatgagaactgtttttgaacaggccattgatcaacgctcttcaactggtgcctggagaaatgctctttctatttgggaacctgtctgcaatgaaatttcggggggtctttag

SEQ ID NO: 121493 - DNA, 1062 bp, Homo sapiens
  misc_feature (1)...(1062): n = a,t,c or g
gatctggctctgaaggggctacgtgttttgctcgtggaaggtaacgacccccagggaacagcctcaatgtatcacggatgggtaccagatcttcatattcatgcagaagacactctcctgcctttctatcttggggaaaaggacgatgtcacttatgcaataaagcccacttgctggccggggcttgacattattccttcctgtctggctctgcaccgtattgaaactgagttaatgggcaaatttgatgaaggtaaactgcccaccgatccacacctgatgctccgactggccattgaaactgttgctcatgactatgatgtcatagttattgacagcgcgcctaacctgggtatcggcacgattaatgtcgtatgtgctgctgatgtgctgattgttcccacgcctgctgagttgtttgactacacctccgcactgcagtttttcgatatgcttcgtgatctgctcaagaacgttgatcttaaagggttcgagcctgataggcccttttcctgctcttctttctggggaaaaaggaggatgttcacttatgcaataaagcccccctggctggccgggggcttgacattattcccttctggtcgggtctggcccggtattgaaactgagttaatgggcaaatttgatgaaggtaactgccccaccgatccacacctgatgctccgactggccattgaaactgttgctcatgactatgatgtcatagttattgacagcgcgcctaacctgggtatcggcacgattaatgtcgtatgtgctgctgatgtgctgattgttcccacgcctgctgagttgtttgactacacctccgcactgcagtttttcgatatgcttcgtgatctgctcaagaacgttgatcttaaagggttcgagcctgatgtacgtattttgcttaccaaatacagcaatagtaatggctctcagtccccgtggatggaggagcaaattcgggatgcctggggaagcatggttctaaaaaatgttgtacgtgaaacggatgaagttggtaaaggtcagatccggatgagaactgtnttttga

SEQ ID NO: 121494 - DNA, 1192 bp, Homo sapiens
gatctggctctgaaggggctacgtgttttgctcgtggaaggtaacgacccccagggaacagcctcaatgtatcacggatgggtaccagatcttcatattcatgcagaagacactctcctgcctttctatcttggggaaaaggacgatgtcacttatgcaataaagcccacttgctggccggggcttgacattattccttcctgtctggctctgcaccgtattgaaactgagttaatgggcaaatttgatgaaggtaaactgcccaccgatccacacctgatgctccgactggccattgaaactgttgctcatgactatgatgtcatagttattgacagcgcgcctaacctgggtatcggcacgattaatgtcgtatgtgctgctgatgtgctgattgttcccacgcctgctgagttgtttgactacacctccgcactgcagtttttcgatatgcttcgtgatctgctcaagaacgttgatcttaaagggttcgagcctgatgtacgtattttgcttaccaaatacagcaatagtaatggctctcagtccccgtggatggaggagcaaattcgggatgcctggggaagcatggttctaaaaaatgttgtacgtgaaacggatgaagttggtaaaggtcagatccggatgagaactgtttttgaacaggccattgatcaggggggagaggatccgcggaattatacatccggcgacaaccatacgctgagagaccctcactacgttgaagacaaaggccataaataccttgtattcgaagccaacacgggaacagaaaacggataccaaggcgaagaatctttatttaacaaagcgtactacggcggcggcacgaacttcttccgtaaagaaagccagaagcttcagcagagcgctaaaaaacgcgatgctgagttagcgaacggcgccctcggtatcatagagttaaataatgattacacattgaaaaaagtaatgaagccgctgatcacttcaaacacggtaactgatgaaatcgagcgcgcgaatgttttcaaaatgaacggcaaatggtacttgttcactgattcacgcggttcaaaaatgacgatcgatggtattaactcaaacgatatttacatgcttggttatgtatcaaactctttaaccggcccttacaagccgctgaacaaaacagggcttgtgctgcaaatgg

SEQ ID NO: 121495 - DNA, 1416 bp, Homo sapiens
gtgctccggggtgatagtgttgaaaagacctctcgggtaaggtcaggtaatgaacgtgaccaggagctgctactggaggacgcactggatgatttcatcccttcttttctactgactggtcaacagacaccggcgttcggtcgaagagtatctggtgtcatagaaattgccgatgggagtcgccgtcgtaaagctgctgcacttaccgaaagtgattatcgtgttctggttggcgagctggatgatgagcagatggctgcattatccagattgggtaacgattatcgcccaacaagtgcttatgaacgtggtcagcgttatgcaagccgattgcagaatgaatttgctggaaatatttctgcgctggctgatgcggaaaatatttcacgtaagattattacccgctgtatcaaccccgccaaattgcctaaatcagttgttgctcttttttctcaccccggtgaactatctgcccggtcaggtgatgcacttcaaaaagcctttacagataaagaggaattacttaagcagcaggcatctaaccttcatgagcagaaaaaagctggggtgatatttgaagctgaagaagttatcactcttttaacttctgtgcttaaaacgtcaacgcatcaagaactagttaaggacgatgtcacttatgcaataaagcccacttgctggccggggcttgacattattccttcctgtctggctctgcaccgtattgaaactgagttaatgggcaaatttgatgaaggtaaactgcccaccgatccacacctgatgctccgactggccattgaaactgttgctcatgactatgatgtcatagttattgacagcgcgcctaacctgggtatcggcacgattaatgtcgtatgtgctgctgatgtgctgattgttcccacgcctgctgagttgtttgactacacctccgcactgcagtttttcgatatgcttcgtgatctgctcaagaacgttgatcttaaagggttcgagcctgatgtacgtattttgcttaccaaatacagcaatagtaatggctctcagtccccgtggatggaggagcaaattcgggatgcctggggaagcatggttctaaaaaatgttgtacgtgaaacggatgaagttggtaaaggtcagatccggatgagaactgtttttgaacaggccattgatcaacgctcttcaactggtgcctggagaaatgctctttctatttgggaacctgtctgcaatgaaattttcgatcgtctgattaaaccacgctggagattagatgagtgtatcctctacagtaaagcctggttgtcatgcacgctatttcgcctctcatacattgagaaaaagaaaggccgccagacgactcatatcgtattttccttccgcgatatcacttccatgacgacaggatag
